(19) United States
(12) Patent Application Publication
(10) Pub. No.: US 2004/0009491 A1
(43) Pub. Date: Jan. 15, 2004

(54) Nucleic acids, proteins, and antibodies

(76) Inventors: Charles E. Birse, North Potomac, MD (US); Craig A. Rosen, Laytonsville, MD (US)

Correspondence Address: HUMAN GENOME SCIENCES INC, 9410 KEY WEST AVENUE, ROCKVILLE, MD, 20850

(21) Appl. No.: 10/264,237

(22) Filed: Oct. 4, 2002

Related U.S. Application Data
(63) Continuation-in-part of application No. PCT/US01/16450, filed on May 18, 2001.
(60) Provisional application No. 60/205,515, filed on May 19, 2000.

(51) Int. Cl. C12Q 1/68; G01N 33/574; C07H 21/04; C12P 21/02; C12N 5/06; C07K 16/30; C07K 14/705

(52) U.S. Cl. 435/6; 435/7.23; 435/69.1; 435/320.1; 435/325; 530/350; 536/23.2; 530/388.1

(57) ABSTRACT

The present invention relates to novel polynucleotides associated with the plasma membrane, the polypeptides encoded by these polynucleotides herein collectively referred to as “plasma membrane associated antigens,” and antibodies that immunospecifically bind these polypeptides, and the use of such plasma membrane associated polynucleotides, antigens, and antibodies for detecting, treating, preventing and/or prognosing disorders related to these novel polypeptides. More specifically, isolated nucleic acid molecules are provided encoding novel plasma membrane associated polypeptides. Novel polypeptides and antibodies that bind to these polypeptides are provided. Also provided are vectors, host cells, and recombinant and synthetic methods for producing these plasma membrane associated polynucleotides, polypeptides, and/or antibodies. The invention further relates to diagnostic and therapeutic methods useful for diagnosing, treating, preventing and/or prognosing disorders related to the novel polypeptides of the invention. The invention further relates to screening methods for identifying agonists and antagonists of polynucleotides and polypeptides of the invention. The invention further relates to methods and/or compositions for inhibiting or promoting the production and/or function of the polypeptides of the invention.

### CROSS REFERENCE TO RELATED APPLICATIONS

[0001] This application is a continuation-in-part of, and claims priority under 35 U.S.C. §120 to International Application No: PCT/US01/16450, filed May 18, 2001, which claims benefit under 35 U.S.C. §119(e) of U.S. Provisional Application No. 60/205,515, filed on May 19, 2000. Each of the above referenced applications is hereby incorporated by reference herein in its entirety.

### STATEMENT UNDER 37 C.F.R. §1.77(b)(4)

[0002] This application refers to a “Sequence Listing” and Tables listed below, which are provided as electronic documents on two identical compact discs (CD-R), labeled “Copy 1” and “Copy 2.” These compact discs each contain the following files, which are hereby incorporated in their entirety herein:

| Document | File Name | Size in bytes | Date of Creation |
|---|---|---|---|
| Sequence Listing | PA131.seqList.txt | 5,652,037 | Sep. 18, 2002 |
| Table 1 | PA131.table1.txt | 3,411,985 | Sep. 18, 2002 |
| Table 2 | PA131.table2.txt | 523,767 | Sep. 19, 2002 |
| Table 3 | PA131.table3.txt | 3,362,705 | Sep. 17, 2002 |
| Table 4 | PA131.table4.txt | 572,708 | Sep. 17, 2002 |

### FIELD OF THE INVENTION

[0003] The present invention relates to novel polynucleotides associated with the plasma membrane, the polypeptides encoded by these polynucleotides herein collectively referred to as “plasma membrane associated antigens,” and antibodies that immunospecifically bind these polypeptides, and the use of such plasma membrane associated polynucleotides, antigens, and antibodies for detecting, treating, preventing and/or prognosing disorders related to these novel polypeptides. More specifically, isolated nucleic acid molecules are provided encoding novel plasma membrane associated polypeptides. Novel polypeptides and antibodies that bind to these polypeptides are provided. Also provided are vectors, host cells, and recombinant and synthetic methods for producing these plasma membrane associated polynucleotides, polypeptides, and/or antibodies. The invention further relates to diagnostic and therapeutic methods useful for diagnosing, treating, preventing and/or prognosing disorders related to the novel polypeptides of the invention. The invention further relates to screening methods for identifying agonists and antagonists of polynucleotides and polypeptides of the invention. The invention further relates to methods and/or compositions for inhibiting or promoting the production and/or function of the polypeptides of the invention.

### BACKGROUND OF THE INVENTION

[0004] Protein transport is a quintessential process for both prokaryotic and eukaryotic cells. Transport of an individual protein usually occurs via an amino-terminal signal sequence, which directs, or targets, the protein from its ribosomal assembly site to a particular cellular or extracellular location. Transport may involve any combination of several of the following steps: contact with a chaperone, unfolding, interaction with a receptor and/or a pore complex, addition of energy, and refolding. Moreover, an extracellular protein may be produced as an inactive precursor. Once the precursor has been exported, removal of the signal sequence by a signal peptidase activates the protein.

[0005] Although amino-terminal signal sequences vary substantially, many patterns and overall properties are shared. Recently, hidden Markov models (HMMs), statistical alternatives to FASTA and Smith Waterman algorithms, have been used to find shared patterns, specifically consensus sequences (Pearson, W. R. and D. J. Lipman PNAS 85:2444-48 (1988); Smith, T. F. and M. S. Waterman J. Mol. Biol. 147:195-197 (1981)). Although they were initially developed to examine speech recognition patterns, HMMs have been used in biology to analyze protein and DNA sequences and to model protein structure (Krogh, A. et al. J. Mol. Biol. 235:1501-31 (1994); Collin, M. et al. Protein Sci. 2:305-14 (1993)). HMMs have a formal probabilistic basis and use position-specific scores for amino acids or nucleotides and for opening and extending an insertion or deletion. The algorithms are quite flexible in that they incorporate information from newly identified sequences to build even more successful patterns. Other methods exist to identify membrane associated proteins. Klein et al. have developed a method (“ALOM”, also called as KKD) to detect potential transmembrane segments in polypeptides (Klein, P. et al. Biochim. Biophys. Acta, 815:468 (1985)). It attempts to identify the most probable transmembrane segment from the average hydrophobicity value over a range of amino acid residues. It predicts whether the segment is a transmembrane segment (INTEGRAL) or not (PERIPHERAL) and thus, can suggest membrane association of a polypeptide.

[0006] Some examples of the protein families which are known to be plasma membrane associated are receptors (nuclear, 4 transmembrane, G protein coupled, and tyrosine kinase), cytokines (chemokines), hormones (growth and differentiation factors), neuropeptides and vasomediators, protein kinases, phosphatases, phospholipases, phosphodiesterases, nucleotide cyclases, matrix molecules (adhesion, cadherin, extracellular matrix molecules, integrin, and selectin), seven transmembrane receptors, ion channels (calcium, chloride, potassium, and sodium), proteases, transporter/pumps (amino acid, protein, sugar, metal and vitamin; calcium, phosphate, potassium, and sodium) and regulatory proteins. Descriptions of some of these proteins (seven transmembrane receptors, kinases, matrix proteins, fibronectins, defensins, EF-hand domain containing proteins, mac/perforin family members, pancreatic hormones, serine carboxypeptidases, tumor necrosis factors (TNFs)) and diseases associated with their dysfunction follow.

[0007] Seven Transmembrane Receptors

[0008] The seven transmembrane receptors (also known as heptahelical, serpentine, or G protein-coupled receptors) comprise a superfamily of structurally related molecules. Possible relationships among seven transmembrane receptors (7TM receptors) for which amino acid sequence had previously been reported are reviewed in Probst et al., DNA and Cell Biology, 11(1):1-20 (1992). Briefly, the 7TM receptors exhibit detectable amino acid sequence similarity and all appear to share a number of structural characteristics including: an extracellular amino terminus; seven predominantly hydrophobic α-helical domains (of about 20-30 amino acids) which are believed to span the cell membrane and are referred to as transmembrane domains TM 1-7; approximately twenty well-conserved amino acids; and a cytoplasmic carboxy terminus.

[0009] Each 7TM receptor is predicted to associate with a particular G protein at the intracellular surface of the plasma membrane. The binding of the receptor to its ligand is thought to result in activation (i.e., the exchange of GTP for GDP on the α-subunit) of the G protein which in turn stimulates specific intracellular signal-transducing enzymes and channels. Thus, the function of each 7TM receptor is to discriminate its specific ligand from the complex extracellular milieu and then to activate G proteins to produce a specific intracellular signal. Transmembrane domain-3 (TM3) is believed to be essential in signal transduction (Cotecchia et al., Proc. Natl. Acad. Sci., USA, 87:2896-2900 (1990)). Other regions may be essential for biological activity as well (Lefkowitz, Nature, 265:603-604 (1993)).

[0010] Mutations in the third intracellular loop of one 7TM receptor (the thyrotropin receptor) and in the adjacent sixth transmembrane domain of another 7TM receptor (the luteinizing hormone receptor) have been reported to be the genetic defects responsible for an uncommon form of hyperthyroidism (Parma et al., Nature, 365:649-651 (1993) and for familial precocious puberty (Shenker et al., Nature, 365:652-654 (1993)), respectively. In both cases the mutations result in constitutive activation of the G protein receptors. Other studies have shown that mutations that prevent the activation of 7TM receptors are responsible for states of hormone resistance which are responsible for diseases such as congenital nephrogenic diabetes insipidus. See Rosenthal et al., J. Biol. Chem., 268:13030-13033 (1993). Still other studies have shown that several 7TM receptors can function as protooncogenes and be activated by mutational alteration. See, for example, Allen et al., Proc. Natl. Acad. Sci. USA, 88:11354-11358 (1991) which suggests that spontaneously occurring mutations in some 7TM receptors may alter the normal function of the receptors and result in uncontrolled cell growth associated with human disease states such as neoplasia and atherosclerosis. Therefore, mutations in 7TM receptors may underlie a number of human pathologies.

[0011] Kinases

[0012] The kinases comprise the largest known group of proteins, a superfamily of enzymes with widely varied functions and specificities. Kinases regulate many different cell proliferation, differentiation, and signaling processes by adding phosphate groups to proteins. Receptor mediated extracellular events trigger the transfer of these high energy phosphate groups and activate intracellular signaling cascades. Activation is roughly analogous to the turning on a molecular switch, and in cases where signalling is uncontrolled, may be associated with or produce inflammation and cancer.

[0013] Almost all kinases contain a similar 250-300 amino acid catalytic domain. The N-terminal domain, which contains subdomains I-IV, generally folds into a two-lobed structure which binds and orients the ATP (or GTP) donor molecule. The larger C terminal lobe, which contains subdomains VIA-XI, binds the protein substrate and carries out the transfer of the gamma phosphate from ATP to the hydroxyl group of a serine, threonine, or tyrosine residue. Subdomain V spans the two lobes.

[0014] The kinases may be categorized into families by the different amino acid sequences (between 5 and 100 residues) located on either side of, or inserted into loops of, the kinase domain. These amino acid sequences allow the regulation of each kinase as it recognizes and interacts with its target protein. The primary structure of the kinase domain is conserved and contains specific residues and identifiable motifs or patterns of amino acids. The serine threonine kinases represent one family which preferentially phosphorylates serine or threonine residues. Many serine threonine kinases, including those from human, rabbit, rat, mouse, and chicken cells and tissues, have been described (Hardie, G. and Hanks, S. (1995) The Protein Kinase Facts Books, Vol 1:7-20 Academic Press, San Diego, Calif.).

[0015] Matrix Proteins

[0016] The matrix proteins (MPs) provide structural support, cell and tissue identity, and autocrine, paracrine and juxtacrine properties for most eukaryotic cells (McGowan, S. E. (1992) FASEB J. 6:2895-2904). MPs include adhesion molecules, integrins and selectins, cadherins, lectins, lipocalins, and extracellular matrix proteins (ECMs). MPs possess many different domains which interact with soluble, extracellular molecules. These domains include collagen-like domains, EGF-like domains, immunoglobulin-like domains, fibronectin-like domains, type A domain of von Willebrand factor (vWFA)-like modules, ankyrin repeat modules, RDG or RDG-like sequences, carbohydrate-binding domains, and calcium-binding domains.

[0017] The diversity, distribution and biochemistry of MPs is indicative of their many, overlapping roles in cell proliferation and cell signaling. MPs function in the formation, growth, remodeling, and maintenance of bone, and in the mediation and regulation of inflammation. Biochemical changes that result from congenital, epigenetic, or infectious diseases affect the expression and balance of MPs. This balance, in turn, affects the activation, proliferation, differentiation, and migration of leukocytes and determines whether the immune response is appropriate or self-destructive (Roman, J. (1996) Immunol. Res. 15:163-178).

[0018] Fibronectins

[0019] Fibronectin proteins play a vital role in the structure and function of the extracellular matrix (ECM). Defects in the function of the ECM are thought to be involved in diseases such as osteoporosis, atherosclerosis, arthritis, and fibrotic diseases. Fibronectin enables cells to adhere to the ECM, and influences the growth and migration of cells as well as the organization of the cytoskeleton. As a major component of the ECM, Fibronectin is thought to influence such processes as cellular adhesion and migration, particularly during development, as well as processes such as wound repair (R. O. Hynes, PNAS, 96:2588-90 (1999)).

[0020] Fibronectin is a disulfide-linked dimeric glycoprotein composed of type I, type II, and type III fibronectin repeats. Type I repeats are approximately 45 amino acids in length and are located at the amino- and carboxy-termini of the protein. Type II domains are approximately 40-60 amino acids in length, and contain four conserved cysteines involved in disulfide bonding. It is thought that the type II domains may function in collagen binding. There are approximately 15-17 type III domains, arranged in tandem in the middle of the protein, that are thought to provide elasticity to fibronectin.

[0021] Defensins

[0022] Mammalian defensins are produced by the epidermis and mucosal epithelium as innate effector molecules thought to function in an antimicrobial capacity. Defensins are cytotoxic peptides with a broad range of activity on gram-positive and negative bacteria, fungi, parasites, viruses, and mycobacteria. The two characterized defensins are the alpha and beta defensins. The alpha-defensins are produced by neutrophils and macrophage, while the beta-defensins are produced by epithelia (Singh, P. K., et al., PNAS, 95:14961-66 (1998); Lillard, J. W., et al., PNAS, 96:651-56 (1999)).

[0023] Defensin peptides range in length from approximately 29 to 35 amino acids, and include six conserved cysteine residues involved in disulfide bond formation and protein folding. The distribution and connection of the cysteine residues differs between the alpha and beta defensins.

[0024] EF-Hand Domain Containing Proteins

[0025] Calcium is well known to be essential for cell signaling. However, calcium also plays a role in such cellular processes as protein processing and membrane traffic to and through the Golgi. Many proteins thought to be involved in the binding of calcium accomplish this in part through a protein calcium-binding domain known as the EF-hand domain.

[0026] The domain consists of a twelve residue loop flanked by a twelve residue alpha-helical domain on both sides. In the EF hand loop, the calcium ion is situated in a coordinated pentagonal bipyramidal configuration. An invariant Glutamic acid or Aspartic acid residue provides two oxygens for liganding the calcium ion.

[0027] Proteins containing this domain include aequorin and Renilla luciferin binding protein (LBP), Recoverins, Calmodulin, Calpain small and large chains, Calretinin, Calcyclin, Fimbrin, Serine/Threonine protein phosphatase, and Diacylglycerol kinase, for example.

[0028] MAC/Perforin Family Members

[0029] The Membrane Attack Complex (MAC) is one of the sequentially activated, membrane bound complexes of the complement system used to eliminate diseased or non-compliant cells. Under this system, activated C5b sequentially binds C6 and C7, which insert into cell membranes. This complex then binds one molecule of C8, followed by between 1 and 18 molecules of C9, which polymerizes to generate a transmembrane channel. These transmembrane channels pierce the membrane, increasing the cell's permeability. These channels permit small molecules in the cell to exchange with the medium. Therefore, water is osmotically drawn into the cell, eventually resulting in the cell bursting.

[0030] Similarly, Perforin is a molecule produced by cytotoxic T cells. In the presence of calcium, Perforin polymerizes into transmembrane channels capable of lysing a variety of target cells in a nonspecific manner.

[0031] Pancreatic Hormones—Serine Carboxypeptidases

[0032] Pancreatic hormone (PP) is a peptide of approximately 80 amino acids in length that is generated in pancreatic islets of Langherhans and consequently secreted. Pancreatic hormone is thought to function as a regulator of pancreatic and gastrointestinal functions.

[0033] Representative members of the pancreatic hormones family of proteins include Neuropeptide Y, Peptide YY, and skin peptide YY. These proteins may be useful as therapeutics for controlling secretion of the gonadotropin-releasing hormone, disorders related to feeding, vasoconstrictory actions, and colonic mobility, as well as antibacterial and antifungal activity.

[0034] Serine Carboxypeptidases

[0035] Carboxypeptidases catalyze the hydrolysis of C-terminal residues of polypeptides. Carboxypeptidases are identified either as metallo-carboxypeptidases or serine-carboxypeptidases.

[0036] Serine carboxypeptidases have the ability to hydrolyze peptides as well as peptide amides from the C-terminus, and have a preferential release of a C-terminal arginine or lysine residue. Their subcellular location is usually extracellular or intracellular. The catalytic activity of serine carboxypeptidases is provided by a charge relay system involving an aspartic acid residue hydrogen-bonded to a histidine, which is itself hydrogen bonded to a serine.

[0037] Tumor Necrosis Factors (TNF)

[0038] Tumor necrosis factors (TNF) alpha and beta are cytokines, which act through TNF receptors to regulate numerous biological processes, including protection against infection and induction of shock and inflammatory disease. The TNF molecules belong to the “TNF-ligand” superfamily, and act together with their receptors or counter-ligands, the “TNF-receptor” superfamily. So far, nine members of the TNF ligand superfamily have been identified and ten members of the TNF-receptor superfamily have been characterized.

[0039] Many members of the TNF-ligand superfamily are expressed by activated T-cells, implying that they are necessary for T-cell interactions with other cell types which underlie cell ontogeny and functions (Meager, A., supra).

[0040] Considerable insight into the essential functions of several members of the TNF receptor family has been gained from the identification and creation of mutants that abolish the expression of these proteins. For example, naturally occurring mutations in the FAS antigen and its ligand cause lymphoproliferative disease (Watanabe-Fukunaga, R. et al., Nature 356:314 (1992)), perhaps reflecting a failure of programmed cell death. Mutations of the CD40 ligand cause an X-linked immunodeficiency state characterized by high levels of immunoglobulin M and low levels of immunoglobulin G in plasma, indicating faulty T-cell-dependent B-cell activation (Allen, R. C. et al., Science 259:990 (1993)). Targeted mutations of the low affinity nerve growth factor receptor cause a disorder characterized by faulty sensory innovation of peripheral structures (Lee, K. F. et al., Cell 69:737 (1992)).

[0041] TNF and LT-α are capable of binding to two TNF receptors (the 55- and 75-kd TNF receptors). A large number of biological effects elicited by TNF and LT-α, acting through their receptors, include hemorrhagic necrosis of transplanted tumors, cytotoxicity, a role in endotoxic shock, inflammation, immunoregulation, proliferation and anti-viral responses, as well as protection against the deleterious effects of ionizing radiation. TNF and LT-α are involved in the pathogenesis of a wide range of diseases, including endotoxic shock, cerebral malaria, tumors, autoimmune disease, AIDS and graft-host rejection (Beutler, B. and Von Huffel, C., Science 264:667-668 (1994)). Mutations in the p55 Receptor cause increased susceptibility to microbial infection.

[0042] Moreover, an about 80 amino acid domain near the C-terminus of TNFR1 (p55) and Fas was reported as the “death domain,” which is responsible for transducing signals for programmed cell death (Tartaglia et al., Cell 74:845 (1993)).

[0043] Plasma membrane associated proteins with a predominant tissue expression pattern are important targets for targeted drug delivery, tumor-targeted therapy (e.g., including, but not limited to, radioimmunotherapy) antibody mediated attack of diseased tissues or cancers, and immune mediated cytotoxicity.

[0044] The discovery of new plasma membrane associated proteins and the polynucleotides encoding these molecules thus satisfies a need in the art by not only providing new compositions useful in the diagnosis, treatment, and prevention of diseases associated with cell proliferation and cell signaling, particularly cancer, immune response and neuronal disorders; but also by providing new targets for immune based therapies.

### SUMMARY OF THE INVENTION

[0045] The present invention relates to novel polynucleotides associated with the plasma membrane, the polypeptides encoded by these polynucleotides herein collectively referred to as “plasma membrane associated antigens,” and antibodies that immunospecifically bind these polypeptides, and the use of such plasma membrane associated polynucleotides, antigens, and antibodies for detecting, treating, preventing and/or prognosing disorders related to these novel polypeptides. More specifically, isolated nucleic acid molecules are provided encoding novel plasma membrane associated polypeptides. Novel polypeptides and antibodies that bind to these polypeptides are provided. Also provided are vectors, host cells, and recombinant and synthetic methods for producing these plasma membrane associated polynucleotides, polypeptides, and/or antibodies. The invention further relates to diagnostic and therapeutic methods useful for diagnosing, treating, preventing and/or prognosing disorders related to the novel polypeptides of the invention. The invention further relates to screening methods for identifying agonists and antagonists of polynucleotides and polypeptides of the invention. The invention further relates to methods and/or compositions for inhibiting or promoting the production and/or function of the polypeptides of the invention.

### DETAILED DESCRIPTION

[0046] Tables

[0047] Table 1 summarizes some of the polynucleotides encompassed by the invention (including cDNA clones related to the sequences (Clone ID NO:Z), contig sequences (contig identifier (Contig ID:) and contig nucleotide sequence identifier (SEQ ID NO:X)) and further summarizes certain characteristics of these polynucleotides and the polypeptides encoded thereby. The first column, “Gene No.”, numbers each disclosed cDNA clone related to the sequences sequentially. The second column provides a unique clone identifier, “Clone ID NO:Z”, for a cDNA plasmid related to each contig sequence disclosed in Table 1. The third column provides a unique contig identifier, “Contig ID:” for each of the contig sequences disclosed in Table 1. The fourth column provides the sequence identifier, “SEQ ID NO:X”, for each of the contig polynucleotide sequences disclosed in Table 1. The fifth column, “ORF (From-To)”, provides the location (i.e., nucleotide position numbers) within the polynucleotide sequence of SEQ ID NO:X that delineate the preferred open reading frame (ORF) shown in the sequence listing and referenced in Table 1 as SEQ ID NO:Y (column 6). Column 7 lists residues comprising predicted epitopes contained in the polypeptides encoded by each of the preferred ORFs (SEQ ID NO:Y). Identification of potential immunogenic regions was performed according to the method of Jameson and Wolf (CABIOS, 4:181-186 (1988)); specifically, the Genetics Computer Group (GCG) implementation of this algorithm, embodied in the program PEPTIDESTRUCTURE (Wisconsin Package v10.0, Genetics Computer Group (GCG), Madison, Wis.). This method returns a measure of the probability that a given residue is found on the surface of the protein. Regions where the antigenic index score is greater than 0.9 over at least 6 amino acids are indicated in Table 1 as “Predicted Epitopes.” In particular embodiments, polypeptides of the invention comprise, or alternatively consist of, one, two, three, four, five or more of the predicted epitopes described in Table 1. It will be appreciated that depending on the analytical criteria used to predict antigenic determinants, the exact address of the determinant may vary slightly. Column 8, “Tissue Distribution” shows the expression profile of tissue, cells, and/or cell line libraries which express the polynucleotides of the invention. The first number in column 8 (preceding the colon), represents the tissue/cell source identifier code corresponding to the code and description provided in Table 4. Expression of these polynucleotides was not observed in the other tissues and/or cell libraries tested. For those identifier codes in which the first two letters are not “AR”, the second number in column 8 (following the colon), represents the number of times a sequence corresponding to the reference polynucleotide sequence (e.g., SEQ ID NO:X) was identified in the tissue/cell source. Those tissue/cell source identifier codes in which the first two letters are “AR” designate information generated using DNA array technology. Utilizing this technology, cDNAs were amplified by PCR and then transferred, in duplicate, onto the array. Gene expression was assayed through hybridization of first strand cDNA probes to the DNA array. cDNA probes were generated from total RNA extracted from a variety of different tissues and cell lines. Probe synthesis was performed in the presence of ³³P dCTP, using oligo(dT) to prime reverse transcription. After hybridization, high stringency washing conditions were employed to remove non-specific hybrids from the array. The remaining signal, emanating from each gene target, was measured using a Phosphorimager. Gene expression was reported as Phosphor Stimulating Luminescence (PSL) which reflects the level of phosphor signal generated from the probe hybridized to each of the gene targets represented on the array. A local background signal subtraction was performed before the total signal generated from each array was used to normalize gene expression between the different hybridizations. The value presented after “[array code]:” represents the mean of the duplicate values, following background subtraction and probe normalization. One of skill in the art could routinely use this information to identify normal and/or diseased tissue(s) which show a predominant expression pattern of the corresponding polynucleotide of the invention or to identify polynucleotides which show predominant and/or specific tissue and/or cell expression. Column 9, “Cytologic Band,” provides the chromosomal location of polynucleotides corresponding to SEQ ID NO:X. Chromosomal location was determined by finding exact matches to EST and cDNA sequences contained in the NCBI (National Center for Biotechnology Information) UniGene database. Given a presumptive chromosomal location, disease locus association was determined by comparison with the Morbid Map, derived from Online Mendelian Inheritance in Man (Online Mendelian Inheritance in Man, OMIM™. McKusick-Nathans Institute for Genetic Medicine, Johns Hopkins University (Baltimore, Md.) and National Center for Biotechnology Information, National Library of Medicine (Bethesda, Md.) 2000. World Wide Web URL: http://www.ncbi.nlm.nih.gov/omim/). If the putative chromosomal location of the Query overlapped with the chromosomal location of a Morbid Map entry, an OMIM identification number is provided in column 10 labeled “OMIM Disease Reference(s)”. A key to the OMIM reference identification numbers is provided in Table 5.

[0048] Table 2 summarizes homology and features of some of the polypeptides of the invention. The first column provides a unique clone identifier, “Clone ID NO:Z”, corresponding to a cDNA disclosed in Table 1. The second column provides the unique contig identifier, “Contig ID:” corresponding to contigs in Table 1 and allowing for correlation with the information in Table 1. The third column provides the sequence identifier, “SEQ ID NO:X”, for the contig polynucleotide sequences. The fourth column provides the analysis method by which the homology/identity disclosed in the row was determined. Comparisons were made between polypeptides encoded by the polynucleotides of the invention and either a non-redundant protein database (herein referred to as “NR”), or a database of protein families (herein referred to as “PFAM”) as further described below. The fifth column provides a description of PFAM/NR hits having significant matches to a polypeptide of the invention. Column six provides the accession number of the PFAM/NR hit disclosed in the fifth column. Column seven, “Score/Percent Identity”, provides a quality score or the percent identity, of the hit disclosed in column five. Columns 8 and 9, “NT From” and “NT To” respectively, delineate the polynucleotides in “SEQ ID NO:X” that encode a polypeptide having a significant match to the PFAM/NR database as disclosed in the fifth column. In specific embodiments, polypeptides of the invention comprise, or alternatively consist of, an amino acid sequence encoded by the polynucleotides in SEQ ID NO:X as delineated in columns 8 and 9, or fragments or variants thereof.

[0049] Table 3 provides polynucleotide sequences that may be disclaimed according to certain embodiments of the invention. The first column provides a unique clone identifier, “Clone ID NO:Z”, for a cDNA clone related to contig sequences disclosed in Table 1. The second column provides the sequence identifier, “SEQ ID NO:X”, for contig polynucleotide sequences disclosed in Table 1. The third column provides the unique contig identifier, “Contig ID”, for contigs disclosed in Table 1. The fourth column provides a unique integer ‘a’ where ‘a’ is any integer between 1 and the final nucleotide minus 15 of SEQ ID NO:X, represented as “Range of a”, and the fifth column provides a unique integer ‘b’ where ‘b’ is any integer between 15 and the final nucleotide of SEQ ID NO:X, represented as “Range of b”, where both a and b correspond to the positions of nucleotide residues shown in SEQ ID NO:X, and where b is greater than or equal to a+14. For each of the polynucleotides shown as SEQ ID NO:X, the uniquely defined integers can be substituted into the general formula of a−b, and used to describe polynucleotides which may be preferably excluded from the invention. In certain embodiments, preferably excluded from the polynucleotides of the invention (including polynucleotide fragments and variants as described herein and diagnostic and/or therapeutic uses based on these polynucleotides) are at least one, two, three, four, five, ten, or more of the polynucleotide sequence(s) having the accession number(s) disclosed in the sixth column of this Table. In further embodiments, preferably excluded from the invention are the specific polynucleotide sequence(s) contained in the clones corresponding to at least one, two, three, four, five, ten, or more of the available material having the accession numbers identified in the sixth column of this Table (including for example, the actual sequence contained in an identified BAC clone).

[0050] Table 4 provides a key to the tissue/cell source identifier code disclosed in Table 1, column 8. Column 1 provides the key to the tissue/cell source identifier code disclosed in Table 1, Column 8. Columns 2-5 provide a description of the tissue or cell source. Codes corresponding to diseased tissues are indicated in column 6 with the word “disease”. The use of the word “disease” in column 6 is non-limiting. The tissue or cell source may be specific (e.g. a neoplasm), or may be disease-associated (e.g., a tissue sample from a normal portion of a diseased organ). Furthermore, tissues and/or cells lacking the “disease” designation may still be derived from sources directly or indirectly involved in a disease state or disorder, and therefore may have a further utility in that disease state or disorder. In numerous cases where the tissue/cell source is a library, column 7 identifies the vector used to generate the library.

[0051] Table 5 provides a key to the OMIM™ reference identification numbers disclosed in Table 1, column 10. OMIM reference identification numbers (Column 1) were derived from Online Mendelian Inheritance in Man (Online Mendelian Inheritance in Man, OMIM™. McKusick-Nathans Institute for Genetic Medicine, Johns Hopkins University (Baltimore, Md.) and National Center for Biotechnology Information, National Library of Medicine, (Bethesda, Md.) 2000. World Wide Web URL: http://www.ncbi.nlm.nih.gov/omim/). Column 2 provides diseases associated with the cytologic band disclosed in Table 1, column 9, as determined from the Morbid Map database.

[0052] Table 6 summarizes ATCC Deposits, Deposit dates, and ATCC designation numbers of deposits made with the ATCC in connection with the present application.

[0053] Table 7 shows the cDNA libraries sequenced, tissue source description, vector information and ATCC designation numbers relating to these cDNA libraries.

[0054] Definitions

[0055] The following definitions are provided to facilitate understanding of certain terms used throughout this specification.

[0056] In the present invention, “isolated” refers to material removed from its original environment (e.g., the natural environment if it is naturally occurring), and thus is altered “by the hand of man” from its natural state. For example, an isolated polynucleotide could be part of a vector or a composition of matter, or could be contained within a cell, and still be “isolated” because that vector, composition of matter, or particular cell is not the original environment of the polynucleotide. The term “isolated” does not refer to genomic or cDNA libraries, whole cell total or mRNA preparations, genomic DNA preparations (including those separated by electrophoresis and transferred onto blots), sheared whole cell genomic DNA preparations or other compositions where the art demonstrates no distinguishing features of the polynucleotide sequences of the present invention.

[0057] As used herein, a “polynucleotide” refers to a molecule having a nucleic acid sequence encoding SEQ ID NO:Y or a fragment or variant thereof; a nucleic acid sequence contained in SEQ ID NO:X (as described in column 4 of Table 1) or the complement thereof, or a cDNA sequence contained in Clone ID NO:Z (as described in column 2 of Table 1 and contained within a library deposited with the ATCC). For example, the polynucleotide can contain the nucleotide sequence of the full length cDNA sequence, including the 5′ and 3′ untranslated sequences, the coding region, as well as fragments, epitopes, domains, and variants of the nucleic acid sequence. Moreover, as used herein, a “polypeptide” refers to a molecule having an amino acid sequence encoded by a polynucleotide of the invention as broadly defined (obviously excluding poly-Phenylalanine or poly-Lysine peptide sequences which result from translation of a polyA tail of a sequence corresponding to a cDNA).

[0058] As used herein, a “plasma membrane associated antigen” refers collectively to any polynucleotide disclosed herein (e.g., a nucleic acid sequence contained in SEQ ID NO:X or the complement therof, and fragments or variants thereof as described herein) or any polypeptide disclosed herein (e.g., an amino acid sequence contained in SEQ ID NO:Y, an amino acid sequence encoded by SEQ ID NO:X, or the complement thereof, an amino acid sequence encoded by the cDNA sequence contained in Clone ID NO:Z, or the complement thereof, and fragments or variants thereof as described herein). These plasma membrane associated antigens have been determined to be predominantly expressed in tissues, including normal or diseased tissues as shown in Table 1 column 8 and Table 4.

[0059] In the present invention, “SEQ ID NO:X” was often generated by overlapping sequences contained in multiple clones (contig analysis). A representative clone containing all or most of the sequence for SEQ ID NO:X is deposited at Human Genome Sciences, Inc. (HGS) in a catalogued and archived library. As shown, for example, in column 2 of Table 1, each clone is identified by a cDNA Clone ID (identifier generally referred to herein as Clone ID NO:Z). Each Clone ID is unique to an individual clone and the Clone ID is all the information needed to retrieve a given clone from the HGS library. Furthermore, certain clones disclosed in this application have been deposited with the ATCC on Mar. 24, 2000, having the ATCC designation number PTA-1559. In addition to the individual cDNA clone deposits, most of the cDNA libraries from which the clones were derived were deposited at the American Type Culture Collection (hereinafter “ATCC”). Table 7 provides a list of the deposited cDNA libraries. One can use the Clone ID) NO:Z to determine the library source by reference to Tables 6 and 7. Table 7 lists the deposited cDNA libraries by name and links each library to an ATCC Deposit. Library names contain four characters, for example, “HTWE.” The name of a cDNA clone (Clone ID NO:Z) isolated from that library begins with the same four characters, for example “HTWEP07”. As mentioned below, Table 1 correlates the Clone ID NO:Z names with SEQ ID NO:X. Thus, starting with an SEQ ID NO:X, one can use Tables 1, 6 and 7 to determine the corresponding Clone ID NO:Z, which library it came from and which ATCC deposit the library is contained in. Furthermore, it is possible to retrieve a given cDNA clone from the source library by techniques known in the art and described elsewhere herein. The ATCC is located at 10801 University Boulevard, Manassas, Va. 20110-2209, USA. The ATCC deposits were made pursuant to the terms of the Budapest Treaty on the international recognition of the deposit of microorganisms for the purposes of patent procedure.

[0060] In specific embodiments, the polynucleotides of the invention are at least 15, at least 30, at least 50, at least 100, at least 125, at least 500, or at least 1000 continuous nucleotides but are less than or equal to 300 kb, 200 kb, 100 kb, 50 kb, 15 kb, 10 kb, 7.5 kb, 5 kb, 2.5 kb, 2.0 kb, or 1 kb, in length. In a further embodiment, polynucleotides of the invention comprise a portion of the coding sequences, as disclosed herein, but do not comprise all or a portion of any intron. In another embodiment, the polynucleotides comprising coding sequences do not contain coding sequences of a genomic flanking gene (i.e., 5′ or 3′ to the gene of interest in the genome). In other embodiments, the polynucleotides of the invention do not contain the coding sequence of more than 1000, 500, 250, 100, 50, 25, 20, 15, 10, 5, 4, 3, 2, or 1 genomic flanking gene(s).

[0061] A “polynucleotide” of the present invention also includes those polynucleotides capable of hybridizing, under stringent hybridization conditions, to sequences contained in SEQ ID NO:X, or the complement thereof (e.g., the complement of any one, two, three, four, or more of the polynucleotide fragments described herein), the polynucleotide sequence delineated in columns 8 and 9 of Table 2 or the complement thereof, and/or cDNA sequences contained in Clone ID NO:Z (e.g., the complement of any one, two, three, four, or more of the polynucleotide fragments, or the cDNA clone within the pool of cDNA clones deposited with the ATCC, described herein) or the complement thereof. “Stringent hybridization conditions” refers to an overnight incubation at 42 degree C. in a solution comprising 50% formamide, 5×SSC (750 mM NaCl, 75 mM trisodium citrate), 50 mM sodium phosphate (pH 7.6), 5×Denhardt's solution, 10% dextran sulfate, and 20 μg/ml denatured, sheared salmon sperm DNA, followed by washing the filters in 0.1×SSC at about 65 degree C.

[0062] Also contemplated are nucleic acid molecules that hybridize to the polynucleotides of the present invention at lower stringency hybridization conditions. Changes in the stringency of hybridization and signal detection are primarily accomplished through the manipulation of formamide concentration (lower percentages of formamide result in lowered stringency), salt conditions, or temperature. For example, lower stringency conditions include an overnight incubation at 37 degree C. in a solution comprising 6×SSPE (20×SSPE =3M NaCl; 0.2M NaH₂PO₄; 0.02M EDTA, pH 7.4), 0.5% SDS, 30% formamide, 100 ug/ml salmon sperm blocking DNA; followed by washes at 50 degree C. with 1×SSPE, 0.1% SDS. In addition, to achieve even lower stringency, washes performed following stringent hybridization can be done at higher salt concentrations (e.g. 5×SSC).

[0063] Note that variations in the above conditions may be accomplished through the inclusion and/or substitution of alternate blocking reagents used to suppress background in hybridization experiments. Typical blocking reagents include Denhardt's reagent, BLOTTO, heparin, denatured salmon sperm DNA, and commercially available proprietary formulations. The inclusion of specific blocking reagents may require modification of the hybridization conditions described above, due to problems with compatibility.

[0064] Of course, a polynucleotide which hybridizes only to polyA+ sequences (such as any 3′ terminal polyA+ tract of a cDNA shown in the sequence listing), or to a complementary stretch of T (or U) residues, would not be included in the definition of “polynucleotide,” since such a polynucleotide would hybridize to any nucleic acid molecule containing a poly (A) stretch or the complement thereof (e.g., practically any double-stranded cDNA clone generated using oligo dT as a primer).

[0065] The polynucleotide of the present invention can be composed of any polyribonucleotide or polydeoxribonucleotide, which may be unmodified RNA or DNA or modified RNA or DNA. For example, polynucleotides can be composed of single- and double-stranded DNA, DNA that is a mixture of single- and double-stranded regions, single- and double-stranded RNA, and RNA that is mixture of single- and double-stranded regions, hybrid molecules comprising DNA and RNA that may be single-stranded or, more typically, double-stranded or a mixture of single- and double-stranded regions. In addition, the polynucleotide can be composed of triple-stranded regions comprising RNA or DNA or both RNA and DNA. A polynucleotide may also contain one or more modified bases or DNA or RNA backbones modified for stability or for other reasons. “Modified” bases include, for example, tritylated bases and unusual bases such as inosine. A variety of modifications can be made to DNA and RNA; thus, “polynucleotide” embraces chemically, enzymatically, or metabolically modified forms.

[0066] The polypeptide of the present invention can be composed of amino acids joined to each other by peptide bonds or modified peptide bonds, i.e., peptide isosteres, and may contain amino acids other than the 20 gene-encoded amino acids. The polypeptides may be modified by either natural processes, such as posttranslational processing, or by chemical modification techniques which are well known in the art. Such modifications are well described in basic texts and in more detailed monographs, as well as in a voluminous research literature. Modifications can occur anywhere in a polypeptide, including the peptide backbone, the amino acid side-chains and the amino or carboxyl termini. It will be appreciated that the same type of modification may be present in the same or varying degrees at several sites in a given polypeptide. Also, a given polypeptide may contain many types of modifications. Polypeptides may be branched, for example, as a result of ubiquitination, and they may be cyclic, with or without branching. Cyclic, branched, and branched cyclic polypeptides may result from posttranslation natural processes or may be made by synthetic methods. Modifications include acetylation, acylation, ADP-ribosylation, amidation, covalent attachment of flavin, covalent attachment of a heme moiety, covalent attachment of a nucleotide or nucleotide derivative, covalent attachment of a lipid or lipid derivative, covalent attachment of phosphotidylinositol, cross-linking, cyclization, disulfide bond formation, demethylation, formation of covalent cross-links, formation of cysteine, formation of pyroglutamate, formylation, gamma-carboxylation, glycosylation, GPI anchor formation, hydroxylation, iodination, methylation, myristoylation, oxidation, pegylation, proteolytic processing, phosphorylation, prenylation, racemization, selenoylation, sulfation, transfer-RNA mediated addition of amino acids to proteins such as arginylation, and ubiquitination. (See, for instance, PROTEINS—STRUCTURE AND MOLECULAR PROPERTIES, 2nd Ed., T. E. Creighton, W. H. Freeman and Company, New York (1993); POSTTRANSLATIONAL COVALENT MODIFICATION OF PROTEINS, B. C. Johnson, Ed., Academic Press, New York, pgs. 1-12 (1983); Seifter et al., Meth. Enzymol. 182:626-646 (1990); Rattan et al., Ann. N.Y. Acad. Sci. 663:48-62 (1992).)

[0067] “SEQ ID NO:X” refers to a polynucleotide sequence described, for example, in Tables 1 or 2, while “SEQ ID NO:Y” refers to a polypeptide sequence described in column 6 of Table 1. SEQ ID NO:X is identified by an integer specified in column 4 of Table 1. The polypeptide sequence SEQ ID NO:Y is a translated open reading frame (ORF) encoded by polynucleotide SEQ ID NO:X. “Clone ID NO:Z” refers to a cDNA clone described in column 2 of Table 1.

[0068] “A polypeptide having biological activity” refers to a polypeptide exhibiting activity similar to, but not necessarily identical to, an activity of a polypeptide of the present invention, including mature forms, as measured in a particular biological assay, with or without dose dependency. In the case where dose dependency does exist, it need not be identical to that of the polypeptide, but rather substantially similar to the dose-dependence in a given activity as compared to the polypeptide of the present invention (i.e., the candidate polypeptide will exhibit greater activity or not more than about 25-fold less and, preferably, not more than about tenfold less activity, and most preferably, not more than about three-fold less activity relative to the polypeptide of the present invention).

[0069] Table 1 summarizes some of the polynucleotides encompassed by the invention (including contig sequences (SEQ ID NO:X) and clones (Clone ID NO:Z) and further summarizes certain characteristics of these polynucleotides and the polypeptides encoded thereby.

[0070] Polynucleotides and Polypeptides

[0071] Table 1

[0072] Table 1 is provided on CD-R, hereby incorporated by reference herein.

[0073] The first column in Table 1, “Gene No.”, numbers each disclosed cDNA clone related to the sequences sequentially. The second column in Table 1 provides a unique “Clone ID NO:Z” for a cDNA clone related to each contig sequence disclosed in Table 1. This clone ID references the cDNA clone which contains at least the 5′ most sequence of the assembled contig, and at least a portion of SEQ ID NO:X was determined by directly sequencing the referenced clone. The reference clone may have more sequence than described in the sequence listing or the clone may have less. In the vast majority of cases, however, the clone is believed to encode a full-length polypeptide. In the case where a clone is not full-length, a full-length cDNA can be obtained by methods known in the art and/or as described elsewhere herein.

[0074] The third column in Table 1 provides a unique “Contig ID” identification for each contig sequence. The fourth column provides the “SEQ ID NO:X” identifier for each of the contig polynucleotide sequences disclosed in Table 1. The fifth column, “ORF (From-To)”, provides the location (i.e., nucleotide position numbers) within the polynucleotide sequence “SEQ ID NO:X” that delineate the preferred open reading frame (ORF) shown in the sequence listing and referenced in Table 1, column 6, as SEQ ID NO:Y. Where the nucleotide position number “To” is lower than the nucleotide position number “From”, the preferred ORF is the reverse complement of the referenced polynucleotide sequence.

[0075] The six column in Table 1 provides the corresponding SEQ ID NO:Y for the polypeptide sequence encoded by the preferred ORF delineated in column 5. In one embodiment, the invention provides an amino acid sequence comprising, or alternatively consisting of, a polypeptide encoded by the portion of SEQ ID NO:X delineated by “ORF (From-To)”. Also provided are polynucleotides encoding such amino acid sequences and the complementary strand thereto.

[0076] Column 7 in Table 1 lists residues comprising epitopes contained in the polypeptides encoded by the preferred ORF (SEQ ID NO:Y), as predicted using the algorithm of Jameson and Wolf, (1988) Comp. Appl. Biosci. 4:181-186. The Jameson-Wolf antigenic analysis was performed using the computer program PROTEAN (Version 3.11 for the Power MacIntosh, DNASTAR, Inc., 1228 South Park Street Madison, Wis.). In specific embodiments, polypeptides of the invention comprise, or alternatively consist of, at least one, two, three, four, five or more of the predicted epitopes as described in Table 1. It will be appreciated that depending on the analytical criteria used to predict antigenic determinants, the exact address of the determinant may vary slightly.

[0077] Column 8 in Table 1 provides an expression profile and library code: count for each of the contig sequences (SEQ ID NO:X) disclosed in Table 1, which can routinely be combined with the information provided in Table 4 and used to determine the normal or diseased tissues, cells, and/or cell line libraries which predominantly express the polynucleotides of the invention. The first number in column 8 (preceding the colon), represents the tissue/cell source identifier code corresponding to the code and description provided in Table 4. For those identifier codes in which the first two letters are not “AR”, the second number in column 8 (following the colon) represents the number of times a sequence corresponding to the reference polynucleotide sequence was identified in the tissue/cell source. Those tissue/cell source identifier codes in which the first two letters are “AR” designate information generated using DNA array technology. Utilizing this technology, cDNAs were amplified by PCR and then transferred, in duplicate, onto the array. Gene expression was assayed through hybridization of first strand cDNA probes to the DNA array. cDNA probes were generated from total RNA extracted from a variety of different tissues and cell lines. Probe synthesis was performed in the presence of ³³P dCTP, using oligo(dT) to prime reverse transcription. After hybridization, high stringency washing conditions were employed to remove non-specific hybrids from the array. The remaining signal, emanating from each gene target, was measured using a Phosphorimager. Gene expression was reported as Phosphor Stimulating Luminescence (PSL) which reflects the level of phosphor signal generated from the probe hybridized to each of the gene targets represented on the array. A local background signal subtraction was performed before the total signal generated from each array was used to normalize gene expression between the different hybridizations. The value presented after “[array code]:” represents the mean of the duplicate values, following background subtraction and probe normalization. One of skill in the art could routinely use this information to identify normal and/or diseased tissue(s) which show a predominant expression pattern of the corresponding polynucleotide of the invention or to identify polynucleotides which show predominant and/or specific tissue and/or cell expression.

[0078] Column 9 in Table 1 provides a chromosomal map location for certain polynucleotides of the invention. Chromosomal location was determined by finding exact matches to EST and cDNA sequences contained in the NCBI (National Center for Biotechnology Information) UniGene database. Each sequence in the UniGene database is assigned to a “cluster”; all of the ESTs, cDNAs, and STSs in a cluster are believed to be derived from a single gene. Chromosomal mapping data is often available for one or more sequence(s) in a UniGene cluster; this data (if consistent) is then applied to the cluster as a whole. Thus, it is possible to infer the chromosomal location of a new polynucleotide sequence by determining its identity with a mapped UniGene cluster.

[0079] A modified version of the computer program BLASTN (Altshul et al., J. Mol. Biol. 215:403-410 (1990), and Gish et al., Nat. Genet. 3:266-272 (1993)) was used to search the UniGene database for EST or cDNA sequences that contain exact or near-exact matches to a polynucleotide sequence of the invention (the ‘Query’). A sequence from the UniGene database (the ‘Subject’) was said to be an exact match if it contained a segment of 50 nucleotides in length such that 48 of those nucleotides were in the same order as found in the Query sequence. If all of the matches that met this criteria were in the same UniGene cluster, and mapping data was available for this cluster, it is indicated in Table 1 under the heading “Cytologic Band”. Where a cluster had been further localized to a distinct cytologic band, that band is disclosed; where no banding information was available, but the gene had been localized to a single chromosome, the chromosome is disclosed.

[0080] Once a presumptive chromosomal location was determined for a polynucleotide of the invention, an associated disease locus was identified by comparison with a database of diseases which have been experimentally associated with genetic loci. The database used was the Morbid Map, derived from OMIM™ (supra). If the putative chromosomal location of a polynucleotide of the invention (Query sequence) was associated with a disease in the Morbid Map database, an OMIM reference identification number was noted in column 10, Table 1, labeled “OMIM Disease Reference(s)”. Table 5 is a key to the OMIM reference identification numbers (column 1), and provides a description of the associated disease in Column 2.

[0081] Table 2

[0082] Table 2 is provided on CD-R, hereby incorporated by reference herein.

[0083] Table 2 further characterizes certain encoded polypeptides of the invention, by providing the results of comparisons to protein and protein family databases. The first column provides a unique clone identifier, “Clone ID NO:”, corresponding to a cDNA clone disclosed in Table 1. The second column provides the unique contig indentifier, “Contig ID:” which allows correlation with the information in Table 1. The third column provides the sequence identifier, “SEQ ID NO:X”, for the contig polynucleotide sequences. The fourth column provides the analysis method by which the homology/identity disclosed in the row was determined. The fifth column provides a description of PFam/NR hits having significant matches identified by each analysis. Column six provides the accession number of the PFam/NR hit disclosed in the fifth column. Column seven, “Score/Percent Identity”, provides a quality score or the percent identity, of the hit disclosed in column five. Comparisons were made between polypeptides encoded by polynucleotides of the invention and a non-redundant protein database (herein referred to as “NR”), or a database of protein families (herein referred to as “PFam”), as described below.

[0084] The NR database, which comprises the NBRF PIR database, the NCBI GenPept database, and the SIB SwissProt and TrEMBL databases, was made non-redundant using the computer program nrdb2 (Warren Gish, Washington University in Saint Louis). Each of the polynucleotides shown in Table 1, column 4 (e.g., SEQ ID NO:X or the ‘Query’ sequence) was used to search against the NR database. The computer program BLASTX was used to compare a 6-frame translation of the Query sequence to the NR database (for information about the BLASTX algorithm please see Altshul et al., J. Mol. Biol. 215:403-410 (1990), and Gish et al., Nat. Genet. 3:266-272 (1993)). A description of the sequence that is most similar to the Query sequence (the highest scoring ‘Subject’) is shown in column five of Table 2 and the database accession number for that sequence is provided in column six. The highest scoring ‘Subject’ is reported in Table 2 if (a) the estimated probability that the match occurred by chance alone is less than 1.0e-07, and (b) the match was not to a known repetitive element. BLASTX returns alignments of short polypeptide segments of the Query and Subject sequences which share a high degree of similarity; these segments are known as High-Scoring Segment Pairs or HSPs. Table 2 reports the degree of similarity between the Query and the Subject for each HSP as a percent identity in Column 7. The percent identity is determined by dividing the number of exact matches between the two aligned sequences in the HSP, dividing by the number of Query amino acids in the HSP and multiplying by 100. The polynucleotides of SEQ ID NO:X which encode the polypeptide sequence that generates an HSP are delineated by columns 8 and 9 of Table 2.

[0085] The PFam database, PFam version 5.2, (Sonnhammer et al., Nucl. Acids Res., 26:320-322, (1998)) consists of a series of multiple sequence alignments; one alignment for each protein family. Each multiple sequence alignment is converted into a probability model called a Hidden Markov Model, or HMM, that represents the position-specific variation among the sequences that make up the multiple sequence alignment (see, e.g., R. Durbin et al., Biological sequence analysis: probabilistic models of proteins and nucleic acids, Cambridge University Press, 1998 for the theory of HMMs). The program HMMER version 1.8 (Sean Eddy, Washington University in Saint Louis) was used to compare the predicted protein sequence for each Query sequence (SEQ ID NO:Y in Table 1) to each of the HMMs derived from PFam version 5.2. A HMM derived from PFam version 5.2 was said to be a significant match to a polypeptide of the invention if the score returned by HMMER 1.8 was greater than 0.8 times the HMMER 1.8 score obtained with the most distantly related known member of that protein family. The description of the PFam family which shares a significant match with a polypeptide of the invention is listed in column 5 of Table 2, and the database accession number of the PFam hit is provided in column 6. Column 7 provides the score returned by HMMER version 1.8 for the alignment. Columns 8 and 9 delineate the polynucleotides of SEQ ID NO:X which encode the polypeptide sequence which shows a significant match to a PFam protein family.

[0086] As mentioned, columns 8 and 9 in Table 2, “NT From” and “NT To”, delineate the polynucleotides of “SEQ ID NO:X” that encode a polypeptide having a significant match to the PFam/NR database as disclosed in the fifth column of Table 2. In one embodiment, the invention provides a protein comprising, or alternatively consisting of, a polypeptide encoded by the polynucleotides of SEQ ID NO:X delineated in columns 8 and 9 of Table 2. Also provided are polynucleotides encoding such proteins, and the complementary strand thereto.

[0087] The nucleotide sequence SEQ ID NO:X and the translated SEQ ID NO:Y are sufficiently accurate and otherwise suitable for a variety of uses well known in the art and described further below. For instance, the nucleotide sequences of SEQ ID NO:X are useful for designing nucleic acid hybridization probes that will detect nucleic acid sequences contained in SEQ ID NO:X or the cDNA contained in Clone ID NO:Z. These probes will also hybridize to nucleic acid molecules in biological samples, thereby enabling immediate applications in chromosome mapping, linkage analysis, tissue identification and/or typing, and a variety of forensic and diagnostic methods of the invention. Similarly, polypeptides identified from SEQ ID NO:Y may be used to generate antibodies which bind specifically to these polypeptides, or fragments thereof, and/or to the polypeptides encoded by the cDNA clones identified in, for example, Table 1.

[0088] Nevertheless, DNA sequences generated by sequencing reactions can contain sequencing errors. The errors exist as misidentified nucleotides, or as insertions or deletions of nucleotides in the generated DNA sequence. The erroneously inserted or deleted nucleotides cause frame shifts in the reading frames of the predicted amino acid sequence. In these cases, the predicted amino acid sequence diverges from the actual amino acid sequence, even though the generated DNA sequence may be greater than 99.9% identical to the actual DNA sequence (for example, one base insertion or deletion in an open reading frame of over 1000 bases).

[0089] Accordingly, for those applications requiring precision in the nucleotide sequence or the amino acid sequence, the present invention provides not only the generated nucleotide sequence identified as SEQ ID NO:X, and a predicted translated amino acid sequence identified as SEQ ID NO:Y, but also a sample of plasmid DNA containing cDNA Clone ID NO:Z (deposited with the ATCC on Mar. 24, 2000, having the ATCC designation number PTA-1559, and/or as set forth, for example, in Table 1, 6 and 7). The nucleotide sequence of each deposited clone can readily be determined by sequencing the deposited clone in accordance with known methods. Further, techniques known in the art can be used to verify the nucleotide sequences of SEQ ID NO:X.

[0090] The predicted amino acid sequence can then be verified from such deposits. Moreover, the amino acid sequence of the protein encoded by a particular clone can also be directly determined by peptide sequencing or by expressing the protein in a suitable host cell containing the deposited human cDNA, collecting the protein, and determining its sequence.

[0091] RACE Protocol for Recovery of Full-Length Genes

[0092] Partial cDNA clones can be made full-length by utilizing the rapid amplification of cDNA ends (RACE) procedure described in Frohman, M. A., et al., Proc. Nat'l. Acad. Sci. USA, 85:8998-9002 (1988). A cDNA clone missing either the 5′ or 3′ end can be reconstructed to include the absent base pairs extending to the translational start or stop codon, respectively. In some cases, cDNAs are missing the start codon of translation. The following briefly describes a modification of this original 5′ RACE procedure. Poly A+ or total RNA is reverse transcribed with Superscript II (Gibco/BRL) and an antisense or complementary primer specific to the cDNA sequence. The primer is removed from the reaction with a Microcon Concentrator (Amicon). The first-strand cDNA is then tailed with dATP and terminal deoxynucleotide transferase (Gibco/BRL). Thus, an anchor sequence is produced which is needed for PCR amplification. The second strand is synthesized from the dA-tail in PCR buffer, Taq DNA polymerase (Per-kin-Elmer Cetus), an oligo-dT primer containing three adjacent restriction sites (XhoI, SalI and ClaI) at the 5′ end and a primer containing just these restriction sites. This double-stranded cDNA is PCR amplified for 40 cycles with the same primers as well as a nested cDNA-specific antisense primer. The PCR products are size-separated on an ethidium bromide-agarose gel and the region of gel containing cDNA products the predicted size of missing protein-coding DNA is removed. cDNA is purified from the—agarose with the Magic PCR Prep kit (Promega), restriction digested with XhoI or SalI, and ligated to a plasmid such as pBluescript SKII (Stratagene) at XhoI and EcoRV sites. This DNA is transformed into bacteria and the plasmid clones sequenced to identify the correct protein-coding inserts. Correct 5′ ends are confirmed by comparing this sequence with the putatively identified homologue and overlap with the partial cDNA clone. Similar methods known in the art and/or commercial kits are used to amplify and recover 3′ ends.

[0093] Several quality-controlled kits are commercially available for purchase. Similar reagents and methods to those above are supplied in kit form from Gibco/BRL for both 5′ and 3′ RACE for recovery of full length genes. A second kit is available from Clontech which is a modification of a related technique, SLIC (single-stranded ligation to single-stranded cDNA), developed by Dumas et al., Nucleic Acids Res., 19:5227-32 (1991). The major differences in procedure are that the RNA is alkaline hydrolyzed after reverse transcription and RNA ligase is used to join a restriction site-containing anchor primer to the first-strand cDNA. This obviates the necessity for the dA-tailing reaction which results in a polyT stretch that is difficult to sequence past.

[0094] An alternative to generating 5′ or 3° cDNA from RNA is to use cDNA library double-stranded DNA. An asymmetric PCR-amplified antisense cDNA strand is synthesized with an antisense cDNA-specific primer and a plasmid-anchored primer. These primers are removed and a symmetric PCR reaction is performed with a nested cDNA-specific antisense primer and the plasmid-anchored primer.

[0095] RNA Ligase Protocol for Generating the 5′ or 3′ End Sequences to Obtain Full Length Genes

[0096] Once a gene of interest is identified, several methods are available for the identification of the 5′ or 3′ portions of the gene which may not be present in the original cDNA plasmid. These methods include, but are not limited to, filter probing, clone enrichment using specific probes and protocols similar and identical to 5′ and 3′ RACE. While the full length gene may be present in the library and can be identified by probing, a useful method for generating the 5′ or 3′ end is to use the existing sequence information from the original cDNA to generate the missing information. A method similar to 5′ RACE is available for generating the missing 5′ end of a desired full-length gene. (This method was published by Fromont-Racine et al., Nucleic Acids Res., 21(7):1683-1684 (1993)). Briefly, a specific RNA oligonucleotide is ligated to the 5′ ends of a population of RNA presumably containing full-length gene RNA transcript. A primer set containing a primer specific to the ligated RNA oligonucleotide and a primer specific to a known sequence of the gene of interest, is used to PCR amplify the 5′ portion of the desired full length gene which may then be sequenced and used to generate the full length gene. This method starts with total RNA isolated from the desired source, poly A RNA may be used but is not a prerequisite for this procedure. The RNA preparation may then be treated with phosphatase if necessary to eliminate 5′ phosphate groups on degraded or damaged RNA, which may interfere with the later RNA ligase step. The phosphatase, if used, is then inactivated and the RNA is treated with tobacco acid pyrophosphatase in order to remove the cap structure present at the 5′ ends of messenger RNAs. This reaction leaves a 5′ phosphate group at the 5′ end of the cap cleaved RNA which can then be ligated to an RNA oligonucleotide using T4 RNA ligase. This modified RNA preparation can then be used as a template for first strand cDNA synthesis using a gene specific oligonucleotide. The first strand synthesis reaction can then be used as a template for PCR amplification of the desired 5′ end using a primer specific to the ligated RNA oligonucleotide and a primer specific to the known sequence of the plasma membrane associated antigen of interest. The resultant product is then sequenced and analyzed to confirm that the 5′ end sequence belongs to the relevant plasma membrane associated antigen.

[0097] The present invention also relates to vectors or plasmids, which include such DNA sequences, as well as the use of the DNA sequences. The material deposited with the ATCC (deposited with the ATCC on Mar. 24, 2000, having the ATCC designation numbers PTA-1559, and/or as set forth, for example, in Table 1, 6 and 7) is a mixture of cDNA clones derived from a variety of human tissue and cloned in either a plasmid vector or a phage vector, as shown, for example, in Table 7. These deposits are referred to as “the deposits” herein. The tissues from which some of the clones were derived are listed in Table 7, and the vector in which the corresponding cDNA is contained is also indicated in Table 7. The deposited material includes cDNA clones corresponding to SEQ ID NO:X described, for example, in Table 1 (Clone ID NO:Z). A clone which is isolatable from the ATCC Deposits by use of a sequence listed as SEQ ID NO:X, may include the entire coding region of a human gene or in other cases such clone may include a substantial portion of the coding region of a human gene Furthermore, although the sequence listing may in some instances list only a portion of the DNA sequence in a clone included in the ATCC Deposits, it is well within the ability of one skilled in the art to sequence the DNA included in a clone contained in the ATCC Deposits by use of a sequence (or portion thereof) described in, for example Tables 1A or 2 by procedures hereinafter further described, and others apparent to those skilled in the art.

[0098] Also provided in Table 7 is the name of the vector which contains the cDNA clone. Each vector is routinely used in the art. The following additional information is provided for convenience.

[0099] Vectors Lambda Zap (U.S. Pat. Nos. 5,128,256 and 5,286,636), Uni-Zap XR (U.S. Pat. Nos. 5,128,256 and 5,286,636), Zap Express (U.S. Pat. Nos. 5,128,256 and 5,286,636), pBluescript (pBS) (Short, J. M. et al., Nucleic Acids Res. 16:7583-7600 (1988); Alting-Mees, M. A. and Short, J. M., Nucleic Acids Res. 17:9494 (1989)) and pBK (Alting-Mees, M. A. et al., Strategies 5:58-61 (1992)) are commercially available from Stratagene Cloning Systems, Inc., 11011 N. Torrey Pines Road, La Jolla, Calif., 92037. pBS contains an ampicillin resistance gene and pBK contains a neomycin resistance gene. Phagemid pBS may be excised from the Lambda Zap and Uni-Zap XR vectors, and phagemid pBK may be excised from the Zap Express vector. Both phagemids may be transformed into E. coli strain XL-1 Blue, also available from Stratagene.

[0100] Vectors pSport1, pCMVSport 1.0, pCMVSport 2.0 and pCMVSport 3.0, were obtained from Life Technologies, Inc., P. O. Box 6009, Gaithersburg, Md. 20897. All Sport vectors contain an ampicillin resistance gene and may be transformed into E. coli strain DH10B, also available from Life Technologies. See, for instance, Gruber, C. E., et al., Focus 15:59-(1993). Vector lafmid BA (Bento Soares, Columbia University, New York, N.Y.) contains an ampicillin resistance gene and can be transformed into E. coli strain XL-1 Blue. Vector pCRf®2.1, which is available from Invitrogen, 1600 Faraday Avenue, Carlsbad, Calif. 92008, contains an ampicillin resistance gene and may be transformed into E. coli strain DH10B, available from Life Technologies. See, for instance, Clark, J. M., Nuc. Acids Res. 16:9677-9686 (1988) and Mead, D. et al., Bio/Technology 9: (1991).

[0101] The present invention also relates to the genes corresponding to SEQ ID NO:X, SEQ ID NO:Y, and/or the deposited clone (Clone ID NO:Z). The corresponding gene can be isolated in accordance with known methods using the sequence information disclosed herein. Such methods include preparing probes or primers from the disclosed sequence and identifying or amplifying the corresponding gene from appropriate sources of genomic material.

[0102] Also provided in the present invention are allelic variants, orthologs, and/or species homologs. Procedures known in the art can be used to obtain full-length genes, allelic variants, splice variants, full-length coding portions, orthologs, and/or species homologs of genes corresponding to SEQ ID NO:X or the complement thereof, polypeptides encoded by SEQ ID NO:X or the complement thereof, and/or the cDNA contained in Clone ID NO:Z, using information from the sequences disclosed herein or the clones deposited with the ATCC. For example, allelic variants and/or species homologs may be isolated and identified by making suitable probes or primers from the sequences provided herein and screening a suitable nucleic acid source for allelic variants and/or the desired homologue.

[0103] The polypeptides of the invention can be prepared in any suitable manner. Such polypeptides include isolated naturally occurring polypeptides, recombinantly produced polypeptides, synthetically produced polypeptides, or polypeptides produced by a combination of these methods. Means for preparing such polypeptides are well understood in the art.

[0104] The polypeptides may be in the form of the secreted protein, including the mature form, or may be a part of a larger protein, such as a fusion protein (see below). It is often advantageous to include an additional amino acid sequence which contains secretory or leader sequences, pro-sequences, sequences which aid in purification, such as multiple histidine residues, or an additional sequence for stability during recombinant production.

[0105] The polypeptides of the present invention are preferably provided in an isolated form, and preferably are substantially purified. A recombinantly produced version of a polypeptide, including the secreted polypeptide, can be substantially purified using techniques described herein or otherwise known in the art, such as, for example, by the one-step method described in Smith and Johnson, Gene 67:31-40 (1988). Polypeptides of the invention also can be purified from natural, synthetic or recombinant sources using techniques described herein or otherwise known in the art, such as, for example, antibodies of the invention raised against the polypeptides of the present invention in methods which are well known in the art.

[0106] The present invention provides a polynucleotide comprising, or alternatively consisting of, the nucleic acid sequence of SEQ ID NO:X, and/or the cDNA sequence contained in Clone ID NO:Z. The present invention also provides a polypeptide comprising, or alternatively, consisting of, the polypeptide sequence of SEQ ID NO:Y, a polypeptide encoded by SEQ ID NO:X or a complement thereof, or a polypeptide encoded by the cDNA contained in Clone ID NO:Z. Polynucleotides encoding a polypeptide comprising, or alternatively consisting of the polypeptide sequence of SEQ ID NQ:Y, a polypeptide encoded by SEQ ID NO:X, and/or a polypeptide encoded by the cDNA contained in Clone ID NO:Z. The present invention further encompasses a polynucleotide comprising, or alternatively consisting of, the complement of the nucleic acid sequence of SEQ ID NO:X, a nucleic acid sequence encoding a polypeptide encoded by the complement of the nucleic acid sequence of SEQ ID NO:X, and/or the cDNA contained in Clone ID NO:Z.

[0107] Many polynucleotide sequences, such as EST sequences, are publicly available and accessible through sequence databases and may have been publicly available prior to conception of the present invention. Preferably, such related polynucleotides are specifically excluded from the scope of the present invention. Accordingly, for each contig sequence (SEQ ID NO:X) listed in the fourth column of Table 1, preferably excluded are one or more polynucleotides comprising a nucleotide sequence described by the general formula of a−b, where a is any integer between 1 and the final nucleotide minus 15 of SEQ ID NO:X, b is an integer of 15 to the final nucleotide of SEQ ID NO:X, where both a and b correspond to the positions of nucleotide residues shown in SEQ ID NO:X, and where b is greater than or equal to a+14. More specifically, preferably excluded are one or more polynucleotides comprising a nucleotide sequence described by the general formula of a−b, where a and b are integers as defined in columns 4 and 5, respectively, of Table 3. In specific embodiments, the polynucleotides of the invention do not consist of at least one, two, three, four, five, ten, or more of the specific polynucleotide sequences referenced by the Genbank Accession No. as disclosed in column 6 of Table 3. In further embodiments, preferably excluded from the invention are the specific polynucleotide sequence(s) contained in the clones corresponding to at least one, two, three, five, ten, or more of the available material having the accession numbers identified in the sixth column of this Table. In no way is this listing meant to encompass all of the sequences which may be excluded by the general formula, it is just a representative example. All references available through these accessions are hereby incorporated by reference in their entirety.

TABLE 3
Table 3 is provided on CD-R, hereby incorporated by reference herein.

[0108] TABLE 4
Table 4 is provided on CD-R, hereby incorporated by reference herein.

[0109] TABLE 5

| OMIM | |
|---|---|
| Reference | Description |
| 100678 | ACAT2 deficiency |
| 100690 | Myasthenic syndrome, slow-channel congenital, |
| | 601462 |
| 100710 | Myasthenic syndrome, slow-channel congenital, |
| | 601462 |
| 100730 | Myasthenia gravis, neonatal transient |
| 102200 | Somatotrophinoma |
| 102300 | Restless legs syndrome |
| 102480 | Male infertility due to acrosin deficiency |
| 102540 | Cardiomyopathy, dilated, 115200 |
| 102540 | Cardiomyopathy, familial hypertrophic, 192600 |
| 102578 | Leukemia, acute promyelocytic, PML/RARA type |
| 102600 | Urolithiasis, 2,8-dihydroxyadenine |
| 102700 | Hemolytic anemia due to ADA excess |
| 102700 | Severe combined immunodeficiency due to ADA |
| | deficiency |
| 102770 | Myoadenylate deaminase deficiency |
| 102772 | [AMP deaminase deficiency, erythrocytic] |
| 103000 | Hemolytic anemia due to adenylate kinase |
| | deficiency |
| 103050 | Autism, succinylpurinemic |
| 103050 | Adenylosuccinase deficiency |
| 103581 | Albright hereditary osteodystrophy-2 |
| 103720 | Alcoholism, susceptibility to |
| 103850 | Aldolase A deficiency |
| 103950 | Alzheimer disease, susceptibility to |
| 103950 | Emphysema due to alpha-2-macroglobulin |
| | deficiency |
| 104311 | Alzheimer disease, familial, with spastic |
| | paraparesis and unusual plaques |
| 104311 | Alzheimer disease-3 |
| 104311 | Alzheimer disease-3, early onset |
| 104311 | Dementia, frontotemporal, 600274 |
| 104500 | Amelogenesis imperfecta-2, hypoplastic local |
| | type |
| 104770 | Amyloidosis, secondary, susceptibility to |
| 105600 | Dyserythropoietic anemia, congenital, type III |
| 106150 | Hypertension, essential, susceptibility to |
| 106150 | Preeclampsia, susceptibility to |
| 106165 | Hypertension, essential, 145500 |
| 106180 | Alzheimer disease, susceptibility to, 104300 |
| 106180 | Myocardial infarction, susceptibility to |
| 106300 | Ankylosing spondylitis |
| 107271 | CD59 deficiency |
| 107300 | Antithrombin III deficiency |
| 107470 | Mycobacterial infection, atypical, familial |
| | disseminated, 209950 |
| 107470 | BCG infection, generalized familial |
| 107470 | Tuberculosis, susceptibility to |
| 107670 | Apolipoprotein A-II deficiency |
| 107680 | Amyloidosis, 3 or more types |
| 107680 | Hypertriglyceridemia, one form |
| 107680 | Hypoalphalipoproteinemia |
| 107680 | ApoA-I and apoC-III deficiency, combined |
| 107680 | Corneal clouding, autosomal recessive |
| 107720 | Hypertriglyceridemia |
| 107741 | Hyperlipoproteinemia, type III |
| 107741 | Sea-blue histiocyte disease, 269600 |
| 107741 | Myocardial infarction susceptibility |
| 107777 | Diabetes insipidus, nephrogenic, autosomal |
| | dominant, 125800 |
| 107777 | Diabetes insipidus, nephrogenic, autosomal |
| | recessive, 222000 |
| 107970 | Arrhythmogenic right ventricular dysplasia-1 |
| 108120 | Arthrogryposis multiplex congenita, distal, |
| | type 1 |
| 108600 | Spastic ataxia, autosomal dominant |
| 108725 | Atherosclerosis, susceptibility to |
| 108730 | Brody myopathy, 601003 |
| 108740 | Darier disease, 124200 |
| 108800 | Atrial septal defect, secundum type |
| 108962 | Hypertension, salt-resistant |
| 108985 | Atrophia areata |
| 109270 | Hemolytic anemia due to band 3 defect |
| 109270 | Renal tubular acidosis, distal, 179800 |
| 109270 | Spherocytosis, hereditary |
| 109270 | [Acanthocytosis, one form] |
| 109270 | [Elliptocytosis, Malaysian-Melanesian |
| | type] |
| 109480 | [Blood group OK], 111380 |
| 109535 | Immunodeficiency with hyper-IgM, type 3, |
| | 606843 |
| 109560 | Leukemia/lymphoma, B-cell, 3 |
| 109565 | Lymphoma, B-cell |
| 109630 | Resting heart rate |
| 109690 | Asthma, nocturnal, susceptibility to |
| 109690 | Obesity, susceptibility to |
| 109700 | Hemodialysis-related amyloidosis |
| 110700 | Vivax malaria, susceptibility to |
| 112250 | Diaphyseal medullary stenosis with malignant |
| | fibrous histiocytoma |
| 112410 | Hypertension with brachydactyly |
| 112500 | Brachydactyly, type A1 |
| 113300 | Brachydactyly type E |
| 113530 | Hypervalinemia or hyperleucine-isoleucinemia |
| 113721 | Breast cancer |
| 114021 | Hypotrichosis, congential, with juvenile |
| | macular dystrophy, 601553 |
| 114130 | Osteoporosis |
| 114131 | Osteoporosis, postmenopausal, susceptibility, |
| | 166710 |
| 114240 | Muscular dystrophy, limb-girdle, type 2A, |
| | 253600 |
| 114251 | Ventricular tachycardia, stress-induced |
| | polymorphic, 604772 |
| 114290 | Acampomelic campolelic dysplasia |
| 114290 | Campomelic dysplasia |
| 114290 | Campomelic dysplasia with autosomal sex |
| | reversal |
| 114350 | Leukemia, acute myeloid |
| 114835 | Monocyte carboxylesterase deficiency |
| 115500 | Acatalasemia |
| 115501 | Albinism, brown, 203290 |
| 115501 | Albinism, rufous, 278400 |
| 115660 | Cataract, cerulean, type 1 |
| 115665 | Cataract, congenital, Volkmann type |
| 116800 | Cataract, Marner type |
| 116806 | Hepatoblastoma |
| 116806 | Hepatocellular carcinoma, 114550 |
| 116806 | Ovarian carcinoma, endometrioid type |
| 116806 | Pilomatricoma |
| 116806 | Colorectal cancer |
| 116897 | Leukemia, acute myeloid |
| 116955 | Myotonic dystrophy, type 2, 602668 |
| 117700 | Hemosiderosis, systemic, due to |
| | aceruloplasminemia, 604290 |
| 117700 | [Hypoceruloplasminemia, hereditary], |
| | 604290 |
| 117700 | Cerebellar ataxia, 604290 |
| 118190 | Spastic paraplegia-13, 605280 |
| 118425 | Myotonia congenita, dominant, 160800 |
| 118425 | Myotonia congenita, recessive, 255700 |
| 118425 | Myotonia levior, recessive |
| 118485 | Polycystic ovary syndrome, 184700 |
| 118504 | Epilepsy, nocturnal frontal lobe, 1, 600513 |
| 118507 | Epilepsy, nocturnal frontal lobe, 3, 605375 |
| 118511 | Schizophrenia, neurophysiologic defect in |
| 118800 | Choreoathetosis, familial paroxysmal |
| 119530 | Orofacial cleft-1 |
| 119540 | Cleft palate, isolated |
| 120070 | Alport syndrome, autosomal recessive, 203780 |
| 120110 | Metaphyseal chondrodysplasia, Schmid type |
| 120110 | Spondylometaphyseal dysplasia, Japanese type |
| 120120 | Transient bullous dermolysis of the newborn, |
| | 131705 |
| 120120 | EBD, Bart type, 132000 |
| 120120 | EBD, generalized atrophic benign, 226650 |
| 120120 | EBD, localisata variant |
| 120120 | Epidermolysis Epidermolysis bullosa |
| | dystrophica, AR, 226600 |
| 120120 | Epidermolysis bullosa dystrophica, AD, 131750 |
| 120120 | Epidermolysis bullosa pruriginosa, 604129 |
| 120120 | Epidermolysis bullosa, pretibial, 131850 |
| 120131 | Hematuria, familial benign |
| 120131 | Alport syndrome, autosomal recessive, 203780 |
| 120140 | Kniest dysplasia, 156550 |
| 120140 | Osteoarthrosis, 165720 |
| 120140 | SED congenita, 183900 |
| 120140 | SMD, 184252 |
| 120140 | SMED Strudwick type, 184250 |
| 120140 | Spondyloperipheral dysplasia, 184252 |
| 120140 | Stickler syndrome, type I, 108300 |
| 120140 | Wagner syndrome, 143200 |
| 120140 | Achondrogenesis-hypochondrogenesis, type II, |
| | 200610 |
| 120140 | Epiphyseal dysplasia, multiple, with myopia |
| | and deafness, 132450 |
| 120150 | Osteogenesis imperfecta, type I, 166200 |
| 120150 | Osteogenesis imperfecta, type II, 166210 |
| 120150 | Osteogenesis imperfecta, type III, 259420 |
| 120150 | Osteogenesis imperfecta, type IV, 166220 |
| 120150 | Osteoporosis, idiopathic, 166710 |
| 120150 | Dissection of cervical arteries |
| 120150 | Ehlers-Danlos syndrome, type I, 130000 |
| 120150 | Ehlers-Danlos syndrome, type VII, 130060 |
| 120160 | Marfan syndrome, atypical |
| 120160 | Osteogenesis imperfecta, 3 clinical forms, |
| | 166200, 166210, 259420 |
| 120160 | Osteoporosis, idiopathic, 166710 |
| 120160 | Ehlers-Danlos syndrome, type VIIA2, 130060 |
| 120210 | Epiphyseal dysplasia, multiple, COL9A1- |
| | related |
| 120215 | Ehlers-Danlos syndrome, type I, 130000 |
| 120215 | Ehlers-Danlos syndrome, type II, 130010 |
| 120220 | Bethlem myopathy, 158810 |
| 120240 | Bethlem myopathy, 158810 |
| 120240 | Ullrich scleroatonic muscular dystrophy, |
| | 254090 |
| 120250 | Bethlem myopathy, 158810 |
| 120260 | Intervertebral disc disease, susceptibility |
| | to, 603932 |
| 120260 | Epiphyseal dysplasia, multiple, type 2, |
| | 600204 |
| 120280 | Marshall syndrome, 154780 |
| 120280 | Stickler syndrome, type II, 604841 |
| 120290 | OSMED syndrome, 215150 |
| 120290 | Stickler syndrome, type III, 184840 |
| 120290 | Weissenbacher-Zweymuller syndrome, 277610 |
| 120290 | Deafness, autosomal dominant 13, 601868 |
| 120360 | Osteolysis, idiopathic, Saudi type, 605156 |
| 120435 | Muir-Torre syndrome, 158320 |
| 120435 | Ovarian cancer |
| 120435 | Cafe-au-lait spots, multiple, with leukemia, |
| | 114030 |
| 120435 | Colorectal cancer, hereditary nonpolyposis, |
| | type 1, 114500 |
| 120436 | Muir-Torre syndrome, 158320 |
| 120436 | Turcot syndrome with glioblastoma, 276300 |
| 120436 | Cafe-au-lait spots with glioma or leukemia, |
| | 114030 |
| 120436 | Colorectal cancer, hereditary nonpolyposis, |
| | type 2, 114500 |
| 120502 | Branchiootic syndrome 2 |
| 120520 | Membranous glomerulonephritis, antenatal |
| 120520 | [Neutral endopeptidase deficiency] |
| 120550 | C1q deficiency, type A |
| 120570 | C1q deficiency, type B |
| 120575 | C1q deficiency, type C |
| 120580 | C1r/C1s deficiency, combined |
| 120580 | C1s deficiency, isolated |
| 120700 | C3 deficiency |
| 120810 | C4 deficiency |
| 120820 | C4 deficiency |
| 120900 | C5 deficiency |
| 120950 | C8 deficiency, type I |
| 120960 | C8 deficiency, type II |
| 121011 | Keratitis-ichthyosis-deafness syndrome, |
| | 148210 |
| 121011 | Keratoderma, palmoplantar, with deafness, |
| | 148350 |
| 121011 | Vohwinkel syndrome, 124500 |
| 121011 | Deafness, autosomal dominant 3, 601544 |
| 121011 | Deafness, autosomal recessive 1, 220290 |
| 121014 | Deafness, autosomal recessive 38, 607197 |
| 121050 | Contractural arachnodactyly, congenital |
| 121300 | Harderoporphyrinuria |
| 121300 | Coproporphyria |
| 121360 | Myeloid leukemia, acute, M4Eo subtype |
| 121700 | Congenital hereditary endothelial dystrophy |
| | of cornea |
| 121800 | Corneal dystrophy, crystalline, Schnyder |
| 122470 | Cornelia de Lange syndrome |
| 122720 | Nicotine addiction, protection from |
| 122720 | Coumarin resistance, 122700 |
| 123101 | Parietal foramina 1, 168500 |
| 123101 | Craniosynostosis, type 2, 604757 |
| 123580 | Cataract, congenital progressive, autosomal |
| | recessive |
| 123580 | Cataract, zonular central nuclear, autosomal |
| | dominant |
| 123590 | Myopathy, cardioskeletal, desmin-related, |
| | with cataract, 601419 |
| 123590 | Cataract, posterior polar 2 |
| 123610 | Cataract, congenital zonular, with sutural |
| | opacities, 600881 |
| 123620 | Cataract, cerulean, type 2, 601547 |
| 123620 | Cataract, sutural, with punctate and cerulean |
| | opacities, 607133 |
| 123680 | Cataract, Coppock-like, 604307 |
| 123680 | Cataract, variable zonular pulverulent |
| 123690 | Cataract, crystalline aculeiform, 115700 |
| 123690 | Cataracts, punctate, progressive juvenile- |
| | onset |
| 123940 | White sponge nevus, 193900 |
| 124020 | Mephenytoin poor metabolizer |
| 124030 | Parkinsonism, susceptibility to |
| 124030 | Debrisoquine sensitivity |
| 124080 | Hypoaldosteronism, congenital, due to CMO I |
| | deficiency, 203400 |
| 124080 | Hypoaldosteronism, congenital, due to CMO II |
| | deficiency |
| 124080 | Low renin hypertension, susceptibility to |
| 125264 | Leukemia, acute nonlymphocytic |
| 125370 | Dentatorubro-pallidoluysian atrophy |
| 125485 | Dentinogenesis imperfecta-1 with deafness, |
| | 605594 |
| 125485 | Dentinogenesis imperfecta-1, 125490 |
| 125660 | Myopathy, desmin-related, cardioskeletal, |
| | 601419 |
| 125660 | Cardiomyopathy, dilated, 1I, 604765 |
| 125670 | Keratosis palmoplantaris striata I, 148700 |
| 125852 | Diabetes mellitus, insulin-dependent, 2 |
| 125860 | Benzene toxicity, susceptibility to |
| 125860 | Leukemia, post-chemotherapy, susceptibility |
| | to |
| 126060 | Anemia, megaloblastic, due to DHFR deficiency |
| 126090 | Hyperphenylalaninemia due to pterin-4a- |
| | carbinolamine dehydratase deficiency, 264070 |
| 126110 | Leukemia, acute myeloblastic |
| 126337 | Myxoid liposarcoma |
| 126340 | Trichothiodystrophy, 601675 |
| 126340 | Xeroderma pigmentosum, group D, 278730 |
| 126340 | Cerebrooculofacioskeletal syndrome, 214150 |
| 126391 | DNA ligase I deficiency |
| 126450 | Dystonia, myoclonic, 159900 |
| 126452 | Autonomic nervous system dysfunction |
| 126452 | [Novelty seeking personality], 601696 |
| 126650 | Chloride diarrhea, congenital, Finnish type, |
| | 214700 |
| 126650 | Colon cancer |
| 127700 | Dyslexia-1 |
| 128200 | Paroxysmal kinesigenic choreoathetosis |
| 128235 | Dystonia-12 |
| 129010 | Neuropathy, congenital hypomyelinating, 1, |
| | 605253 |
| 129010 | Charcot-Marie-Tooth disease, type 1, 118200 |
| 129010 | Dejerine-Sottas neuropathy, 145900 |
| 129900 | EEC syndrome-1 |
| 130130 | Hematopoiesis, cyclic, 162800 |
| 130130 | Neutropenia, congenital, 202700 |
| 130410 | Glutaricaciduria, type IIB |
| 130500 | Elliptocytosis-1 |
| 131100 | Hyperparathyroidism, AD, 145000 |
| 131100 | Angiofibroma, sporadic |
| 131100 | Lipoma, sporadic |
| 131100 | Multiple endocrine neoplasia I |
| 131100 | Parathyroid adenoma, sporadic |
| 131100 | Prolactinoma, hyperparathyroidism, carcinoid |
| | syndrome |
| 131100 | Carcinoid tumor of lung |
| 131100 | Adrenal adenoma, sporadic |
| 131195 | Hereditary hemorrhagic telangiectasia-1, |
| | 187300 |
| 131210 | Atherosclerosis, susceptibility to |
| 131242 | Shah-Waardenburg syndrome, 277580 |
| 131400 | Eosinophilia, familial |
| 131440 | Eosinophilic myeloproliferative disorder |
| 133020 | Erythermalgia, primary |
| 133090 | Stomatocytosis I, 185000 |
| 133170 | Erythremia |
| 133171 | [Erythrocytosis, familial], 133100 |
| 133430 | Breast cancer |
| 133430 | Estrogen resistance |
| 133450 | Neuroepithelioma |
| 133450 | Ewing sarcoma |
| 133520 | Xeroderma pigmentosum, group F, 278760 |
| 133700 | Chondrosarcoma, 215300 |
| 133700 | Exostoses, multiple, type 1 |
| 133701 | Exostoses, multiple, type 2 |
| 133780 | Vitreoretinopathy, exudative, familial |
| 134570 | Factor XIIIA deficiency |
| 134580 | Factor XIIIB deficiency |
| 134637 | Squamous cell carcinoma, burn scar-related, |
| | somatic |
| 134637 | Autoimmune lymphoproliferative syndrome, |
| | 601859 |
| 134770 | Iron overload, autosomal dominant |
| 134790 | Hyperferritinemia-cataract syndrome, 600886 |
| 134790 | Basal ganglia disease, adult-onset, 606159 |
| 135100 | Fibrodysplasia ossificans progressiva |
| 135150 | Birt-Hogg-Dube syndrome |
| 135600 | Ehlers-Danlos syndrome, type X, 225310 |
| 135700 | Fibrosis of extraocular muscles, congenital, 1 |
| 135750 | Tetramelic mirror-image polydactyly |
| 135940 | Ichthyosis vulgaris, 146700 |
| 136132 | [Fish-odor syndrome], 602079 |
| 136350 | Jackson-Weiss sydnrome, 123150 |
| 136350 | Pfeiffer syndrome, 101600 |
| 136351 | Leukemia, acute myeloid, reduced survival in |
| 136352 | Hemangioma, capillary infantile, somatic, |
| | 602089 |
| 136352 | Lymphedema, hereditary I, 153100 |
| 136430 | Congenital anomalies, susceptibility to |
| 136435 | Ovarian sex cord tumors |
| 136435 | Premature ovarian failure, 233300 |
| 136435 | Twinning, dizygotic, 276400 |
| 136470 | Polycystic ovary syndrome, 184700 |
| 136530 | Male infertility, familial |
| 136550 | Macular dystrophy, North Carolina type |
| 136836 | Fucosyltransferase-6 deficiency |
| 137100 | Immunoglobulin A deficiency |
| 137150 | GABA-transaminase deficiency |
| 137160 | Epilepsy, juvenile myoclonic, 606904 |
| 137164 | Epilepsy, childhood absence, 600131 |
| 137164 | Epilepsy, generalized, with febrile seizures |
| | plus, 604233 |
| 137167 | Vitamin K-dependent coagulation defect, |
| | 277450 |
| 137290 | Corneal dystrophy, gelatinous drop-like, |
| | 204870 |
| 137580 | Tourette syndrome |
| 138030 | [Hyperproglucagonemia] |
| 138033 | Diabetes mellitus, noninsulin-dependent, |
| | 125853 |
| 138040 | Cortisol resistance |
| 138079 | Hyperinsulinism, familial, 602485 |
| 138079 | MODY, type II, 125851 |
| 138079 | Diabetes mellitus, neonatal-onset, 606176 |
| 138140 | Glucose transport defect, blood-brain barrier, |
| | 606777 |
| 138160 | Diabetes mellitus, noninsulin-dependent |
| 138160 | Fanconi-Bickel syndrome, 227810 |
| 138190 | Diabetes mellitus, noninsulin-dependent |
| 138300 | Hemolytic anemia due to glutathione reductase |
| | deficiency |
| 138320 | Hemolytic anemia due to glutathione peroxidase |
| | deficiency |
| 138430 | Diabetes mellitus, noninsulin-dependent, |
| | 125853 |
| 138491 | Hyperekplexia and spastic paraparesis |
| 138491 | Startle disease, autosomal recessive |
| 138491 | Startle disease/hyperekplexia, autosomal |
| | dominant, 149400 |
| 138570 | Diabetes mellitus, noninsulin-dependent |
| 138700 | [Apolipoprotein H deficiency] |
| 138720 | Bernard-Soulier syndrome, type B, 231200 |
| 138720 | Giant platelet disorder, isolated |
| 138981 | Pulmonary alveolar proteinosis, 265120 |
| 139130 | Hypertension, essential, susceptibility to, |
| | 145500 |
| 139190 | Isolated growth hormone deficiency due to |
| | defect in GHRF |
| 139190 | Gigantism due to GHRF hypersecretion |
| 139250 | Isolated growth hormone deficiency, Illig |
| | type with absent GH and Kowarski type with |
| | bioinactive GH |
| 139320 | McCune-Albright syndrome, 174800 |
| 139320 | Osseous heteroplasia, progressive, 166350 |
| 139320 | Pituitary ACTH secreting adenoma |
| 139320 | Pseudohypoparathyroidism, type Ia, 103580 |
| 139320 | Somatotrophinoma |
| 139330 | Night blindness, congenital stationary |
| 139340 | Achromatopsia, 216900 |
| 139350 | Keratoderma, palmoplantar, nonepidermolytic |
| 139350 | Cyclic ichthyosis with epidermolytic |
| | hyperkeratosis |
| 139350 | Epidermolytic hyperkeratosis, 113800 |
| 139360 | Pituitary ACTH-secreting adenoma |
| 139360 | Ventricular tachycardia, idiopathic, 192605 |
| 140100 | [Anhaptoglobinemia] |
| 140100 | [Hypohaptoglobinemia] |
| 140300 | Hashimoto thyroiditis |
| 140600 | Osteoarthritis of distal interphalangeal |
| | joints |
| 141250 | Heme oxygenase-1 deficiency |
| 141750 | Alpha-thalassemia/mental retardation |
| | syndrome, type 1 |
| 141800 | Heinz body anemias, alpha- |
| 141800 | Methemoglobinemias, alpha- |
| 141800 | Thalassemias, alpha- |
| 141800 | Erythremias, alpha- |
| 141850 | Heinz body anemia |
| 141850 | Hemoglobin H disease |
| 141850 | Hypochromic microcytic anemia |
| 141850 | Thalassemia, alpha- |
| 141850 | Erythrocytosis |
| 141900 | HPFH, deletion type |
| 141900 | Heinz body anemias, beta- |
| 141900 | Methemoglobinemias, beta- |
| 141900 | Sickle cell anemia |
| 141900 | Thalassemias, beta- |
| 141900 | Erythremias, beta- |
| 142000 | Thalassemia due to Hb Lepore |
| 142000 | Thalassemia, delta- |
| 142200 | HPFH, nondeletion type A |
| 142250 | HPFH, nondeletion type G |
| 142335 | Hereditary persistence of fetal hemoglobin, |
| | heterocellular, Indian type |
| 142470 | [Hereditary persistence of fetal |
| | hemoglobin, heterocellular] |
| 142600 | Hemolytic anemia due to hexokinase deficiency |
| 142640 | Thrombophilia due to HRG deficiency |
| 142640 | Thrombophilia due to elevated HRG |
| 142857 | Pemphigoid, susceptibility to |
| 142858 | Beryllium disease, chronic, susceptibility to |
| 142989 | Synpolydactyly, type II, 186000 |
| 142993 | Microphthalmia, cataracts, and iris |
| | abnormalities |
| 142994 | Currarino syndrome, 176450 |
| 143200 | Wagner syndrome |
| 143200 | Erosive vitreoretinopathy |
| 144120 | Hyperimmunoglobulin G1 syndrome |
| 145001 | Hyperparathyroidism, familial primary, 145000 |
| 145001 | Hyperparathyroidism-jaw tumor syndrome |
| 145260 | Pseudohypoaldosteronism, type II |
| 145410 | Opitz G syndrome, type II |
| 145505 | Hypertension, essential |
| 145750 | Hypertriglyceridemia, susceptibility to |
| 145981 | Hypocalciuric hypercalcemia, type II |
| 146200 | Hypoparathyroidism, familial |
| 146255 | HDR syndrome |
| 146520 | Hypotrichosis simplex of scalp |
| 146760 | [IgG receptor I, phagocytic, familial |
| | deficiency of] |
| 146790 | Lupus nephritis, susceptibility to |
| 147020 | Agammaglobulinemia, 601495 |
| 147050 | Atopy |
| 147060 | Hyper-IgE syndrome |
| 147110 | IgG2 deficiency, selective |
| 147138 | Asthma, atopic, susceptibility to |
| 147141 | Leukemia, acute lymphoblastic |
| 147200 | [Kappa light chain deficiency] |
| 147440 | Growth retardation with deafness and mental |
| | retardation |
| 147670 | Leprechaunism, 246200 |
| 147670 | Rabson-Mendenhall syndrome, 262190 |
| 147670 | Diabetes mellitus, insulin-resistant, with |
| | acanthosis nigricans |
| 147680 | Severe combined immunodeficiency due to IL2 |
| | deficiency |
| 147683 | Asthma, susceptibility to, 600807 |
| 147730 | Interleukin-2 receptor, alpha chain, |
| | deficiency of |
| 147781 | Atopy, susceptibility to |
| 147791 | Jacobsen syndrome |
| 147840 | Malaria, cerebral, susceptibility to |
| 148040 | Epidermolysis bullosa simplex with mottled |
| | pigmentation, 31960 |
| 148040 | Epidermolysis bullosa simplex, Koebner, |
| | Dowling-Meara, and Weber-Cockayne types, |
| | 131900, 131760, 131800 |
| 148041 | Pachyonychia congenita, Jadassohn-Lewandowsky |
| | type, 167200 |
| 148042 | Pachyonychia congenita, Jackson-Lawler type, |
| | 167210 |
| 148043 | Meesmann corneal dystrophy, 122100 |
| 148060 | Cirrhosis, cryptogenic |
| 148065 | White sponge nevus, 193900 |
| 148070 | Liver disease, susceptibility to, from |
| | hepatotoxins or viruses |
| 148080 | Epidermolytic hyperkeratosis, 113800 |
| 148300 | Keratoconus |
| 148370 | Keratolytic winter erythema |
| 148500 | Tylosis with esophageal cancer |
| 148900 | Klippel-Feil syndrome with laryngeal |
| | malformation |
| 150100 | Lactate dehydrogenase-B deficiency |
| 150200 | [Placental lactogen deficiency] |
| 150210 | Lactoferrin-deficient neutrophils, 245480 |
| 150230 | Langer-Giedion syndrome |
| 150240 | Cutis laxa, marfanoid neonatal type |
| 150250 | Larsen syndrome, autosomal dominant |
| 150270 | Laryngeal adductor paralysis |
| 150292 | Epidermolysis bullosa, Herlitz junctional |
| | type, 226700 |
| 150292 | Epidermolysis bullosa, generalized atrophic |
| | benign, 226650 |
| 150330 | Lipodystrophy, familial partial, 151660 |
| 150330 | Mandibuloacral dysplasia, 248370 |
| 150330 | Muscular dystrophy, limb-girdle, type 1B, |
| | 159001 |
| 150330 | Cardiomyopathy, dilated, 1A, 115200 |
| 150330 | Charcot-Marie-Tooth disease, type 2B1, 605588 |
| 150330 | Emery-Dreifuss muscular dystrophy, AD, 181350 |
| 150330 | Emery-Dreifuss muscular dystrophy, AR, 604929 |
| 151385 | Leukemia, acute myeloid |
| 151385 | Platelet disorder, familial, with associated |
| | myeloid malignancy, 601399 |
| 151390 | Leukemia, acute T-cell |
| 151400 | Leukemia/lymphoma, B-cell, 1 |
| 151440 | Leukemia, T-cell acute lymphoblastoid |
| 151460 | Severe combined immunodeficiency due to |
| | PTPRC deficiency |
| 151460 | Multiple sclerosis, susceptibility to, 126200 |
| 151670 | Hepatic lipase deficiency |
| 152200 | Coronary artery disease, susceptibility to |
| 152427 | Long QT syndrome-2 |
| 152445 | Vohwinkel syndrome with ichthyosis, 604117 |
| 152445 | Erythrokeratoderma, progressive symmetric, |
| | 602036 |
| 152760 | Hypogonadotropic hypogonadism due to GNRH |
| | deficiency, 227200 |
| 152780 | Hypogonadism, hypergonadotropic |
| 152780 | Male pseudohermaphroditism due to defective |
| | LH |
| 152790 | Hypogonadotropic hypogonadism |
| 152790 | Leydig cell adenoma, with precocious puberty |
| 152790 | Micropenis |
| 152790 | Precocious puberty, male, 176410 |
| 152790 | Pseudohermaphroditism, male, with Leydig |
| | cell hypoplasia |
| 153390 | SCID due to LCK deficiency |
| 153454 | Ehlers-Danlos syndrome, type VI, 225400 |
| 153455 | Cutis laxa, recessive, type I, 219100 |
| 153700 | Macular dystrophy, vitelliform type |
| 153880 | Macular dystrophy, dominant cystoid |
| 154045 | Cataract, cortical pulverulent, late-onset |
| 154050 | Cataract, polymorphic and lamellar, 604219 |
| 154275 | Malignant hyperthermia susceptibility 2 |
| 154276 | Malignant hyperthermia susceptibility 3 |
| 154545 | Chronic infections, due to opsonin defect |
| 154550 | Carbohydrate-deficient glycoprotein syndrome, |
| | type Ib, 602579 |
| 154705 | Marfan-like connective tissue disorder |
| 154870 | Keutel syndrome, 245150 |
| 155555 | [Red hair/fair skin] |
| 155555 | UV-induced skin damage, vulnerability to |
| 155600 | Malignant melanoma, cutaneous |
| 156225 | Muscular dystrophy, congenital merosin- |
| | deficient |
| 156232 | Mesomelic dysplasia, Kantaputra type |
| 156600 | Microcoria, congenital |
| 156845 | Tietz syndrome, 103500 |
| 156845 | Waardenburg syndrome, type IIA, 193510 |
| 156845 | Waardenburg syndrome/ocular albinism, |
| | digenic, 103470 |
| 156850 | Cataract, congenital, with microphthalmia |
| 157140 | Pallidopontonigral degeneration, 168610 |
| 157140 | Parkinson disease, late-onset, 168600 |
| 157140 | Dementia, Pick disease-like, 172700 |
| 157140 | Dementia, frontotemporal, with parkinsonism, |
| | 601630 |
| 157147 | Abetalipoproteinemia, 200100 |
| 157300 | Migraine with aura, susceptibility to |
| 157655 | Lactic acidosis due to defect in iron-sulfur |
| | cluster of complex I |
| 157655 | Mitochondrial complex I deficiency |
| 157660 | Metaphyseal dysplasia without hypotrichosis, |
| | 250460 |
| 157660 | Cartilage-hair hypoplasia, 250250 |
| 157700 | Mitral valve prolapse, familial |
| 157900 | Moebius syndrome |
| 158371 | Ulcerative colitis, susceptibility to, 191390 |
| 159001 | Muscular dystrophy, limb-girdle, type 1B |
| 159440 | Hypomyelination, congenital |
| 159440 | Charcot-Marie-Tooth neuropathy-1B, 118200 |
| 159440 | Dejerine-Sottas disease, myelin P-zero- |
| | related, 145900 |
| 159530 | Thrombocytopenia, congenital amegakaryocytic, |
| | 604498 |
| 159555 | Leukemia, myeloid/lymphoid or mixed-lineage |
| 160710 | Cardiomyopathy, familial hypertrophic, 192600 |
| 160760 | Cardiomyopathy, familial hypertrophic, 1, |
| | 192600 |
| 160760 | Central core disease, one form |
| 160775 | May-Hegglin anomaly, 155100 |
| 160775 | Sebastian syndrome, 605249 |
| 160775 | Deafness, autosomal dominant 17, 603622 |
| 160775 | Epstein syndrome, 153650 |
| 160775 | Fechtner syndrome, 153640 |
| 160777 | Griscelli syndrome-type pigmentary dilution |
| | with mental retardation, 214450 |
| 160781 | Cardiomyopathy, hypertrophic, mid-left |
| | ventricular chamber type |
| 161015 | Leigh syndrome, 256000 |
| 161015 | Alexander disease, 203450 |
| 161561 | BCG and salmonella infection, disseminated, |
| | 209950 |
| 161900 | Nephropathy-hypertension |
| 161950 | Nephropathy, IgA type |
| 162080 | Retinitis pigmentosa, autosomal dominant |
| 162100 | Neuralgic amyotrophy with predilection for |
| | brachial plexus |
| 163000 | Capillary malformations, hereditary |
| 163729 | Coronary spasm, susceptibility to |
| 163729 | Preeclampsia, susceptibility to, 189800 |
| 163890 | Parkinson disease, familial, 601508 |
| 164009 | Leukemia, acute promyelocytic, NUMA/RARA |
| | type |
| 164100 | Nystagmus-2, autosomal dominant |
| 164160 | Obesity, morbid, with hypogonadism |
| 164160 | Obesity, severe, due to leptin deficiency |
| 164200 | Oculodentodigital dysplasia |
| 164200 | Syndactyly, type III, 186100 |
| 164280 | Oculodigitoesophagoduodenal syndrome |
| 164500 | Spinocerebellar ataxia-7 |
| 164690 | Leukemia, acute myeloid, with eosinophilia |
| 164731 | Ovarian carcinoma, 167000 |
| 164860 | Hepatocellular carcinoma, childhood type, |
| | 114550 |
| 164860 | Renal cell carcinoma, papillary, familial |
| | and sporadic, 605074 |
| 164953 | Liposarcoma |
| 165240 | Greig cephalopolysyndactyly syndrome, 175700 |
| 165240 | Pallister-Hall syndrome, 146510 |
| 165240 | Polydactyly, postaxial, types A1 and B, |
| | 174200 |
| 165240 | Polydactyly, preaxial, type IV, 174700 |
| 165320 | Hepatocellular carcinoma |
| 166600 | Osteopetrosis, AD, type II |
| 166800 | Otosclerosis 1 |
| 167000 | Ovarian cancer, serous |
| 167250 | Paget disease of bone |
| 167409 | Optic nerve coloboma with renal disease, |
| | 120330 |
| 167410 | Rhabdomyosarcoma, alveolar, 268220 |
| 167415 | Hypothyroidism, congenital, due to thyroid |
| | dysgenesis or hypoplasia, 218700 |
| 167416 | Hypodontia, 106600 |
| 167416 | Oligodontia, 604625 |
| 168360 | Neuropathy, paraneoplastic sensory |
| 168450 | Hypoparathyroidism, autosomal dominant |
| 168450 | Hypoparathyroidism, autosomal recessive |
| 168461 | Multiple myeloma, 254500 |
| 168461 | Parathyroid adenomatosis 1 |
| 168461 | Centrocytic lymphoma |
| 168468 | Metaphyseal chondrodysplasia, Murk Jansen |
| | type, 156400 |
| 168468 | Enchondromatosis, Ollier type, 166000 |
| 168470 | Humoral hypercalcemia of malignancy |
| 168820 | Coronary artery disease, susceptibility to |
| 168820 | Coronary artery spasm, susceptibility to |
| 168860 | Patella aplasia or hypoplasia |
| 170261 | Bare lymphocyte syndrome, type I, due to |
| | TAP2 deficiency |
| 170280 | Hemophagocytic lymphohistiocytosis, familial, |
| | 2, 603553 |
| 170995 | Zellweger syndrome-2 |
| 171190 | Hypertension, essential, 145500 |
| 171650 | Lysosomal acid phosphatase deficiency |
| 171760 | Hypophosphatasia, adult, 146300 |
| 171760 | Hypophosphatasia, childhood, 241510 |
| 171760 | Hypophosphatasia, infantile, 241500 |
| 171834 | Ovarian cancer |
| 171860 | Hemolytic anemia due to phosphofructokinase |
| | deficiency |
| 172400 | Hemolytic anemia due to glucosephosphate |
| | isomerase deficiency |
| 172400 | Hydrops fetalis, one form |
| 172411 | Colorectal cancer, resistance to |
| 172430 | Enolase deficiency |
| 172471 | Glycogenosis, hepatic, autosomal |
| 172490 | Phosphorylase kinase deficiency of liver |
| | and muscle, autosomal recessive, 261750 |
| 173110 | Pituitary hormone deficiency, combined |
| 173335 | Ossification of posterior longitudinal |
| | ligament of spine, 602475 |
| 173360 | Hemorrhagic diathesis due to PAI1 deficiency |
| 173360 | Thrombophilia due to excessive plasminogen |
| | activator inhibitor |
| 173610 | Platelet alpha/delta storage pool deficiency |
| 173850 | Polio, susceptibility to |
| 173910 | Polycystic kidney disease, adult, type II |
| 174000 | Medullary cystic kidney disease 1 |
| 174050 | Polycystic liver disease |
| 174500 | Polydactyly, preaxial II |
| 174763 | Progressive external ophthalmoplegia with |
| | mitochondrial DNA deletions, 157640 |
| 175900 | Porokeratosis, disseminated superficial |
| | actinic |
| 176000 | Porphyria, acute intermittent |
| 176000 | Porphyria, acute intermittent, nonerythroid |
| | variant |
| 176100 | Porphyria cutanea tarda |
| 176100 | Porphyria, hepatoerythropoietic |
| 176260 | Episodic ataxia/myokymia syndrome, 160120 |
| 176300 | Amyloid neuropathy, familial, several allelic |
| | types |
| 176300 | Amyloidosis, senile systemic |
| 176300 | [Dystransthyretinemic hyperthyroxinemia] |
| 176300 | Carpal tunnel syndrome, familial |
| 176450 | Sacral agenesis-1 |
| 176730 | MODY, one form, 125850 Hyperproinsulinemia, |
| | familial |
| 176730 | Diabetes mellitus, rare form |
| 176801 | Metachromatic leukodystrophy due to |
| | deficiency of SAP-1 |
| 176801 | Combined SAP deficiency |
| 176801 | Gaucher disease, variant form |
| 176830 | ACTH deficiency |
| 176830 | Obesity, adrenal insufficiency, and red hair |
| 176876 | Noonan syndrome 1, 163950 |
| 176876 | Cardiofaciocutaneous syndrome, 115150 |
| 176885 | Insulin resistance, susceptibility to |
| 176930 | Hyperprothrombinemia |
| 176930 | Hypoprothrombinemia |
| 176930 | Dysprothrombinemia |
| 176960 | Pituitary tumor, invasive |
| 177400 | Apnea, postanesthetic |
| 177900 | Psoriasis, susceptibility to, 177900 |
| 178300 | Ptosis, hereditary congenital, 1 |
| 178640 | Pulmonary alveolar proteinosis, congenital, |
| | 265120 |
| 179095 | Male infertility |
| 179450 | Ragweed sensitivity |
| 179502 | Lymphocytic leukemia, acute T-cell |
| 179605 | Macular dystrophy |
| 179605 | Macular dystrophy, vitelliform |
| 179605 | Pattern dystrophy of retina |
| 179605 | Retinitis pigmentosa with bull's-eye |
| | maculopathy |
| 179605 | Retinitis pigmentosa, digenic |
| 179605 | Retinitis pigmentosa-7, peripherin-related |
| 179605 | Retinitis punctata albescens |
| 179605 | Butterfly dystrophy, retinal |
| 179605 | Foveomacular dystrophy, adult-onset, with |
| | choroidal neovascularization |
| 179615 | Omenn syndrome, 603554 |
| 179615 | Reticulosis, familial histiocytic, 267700 |
| 179615 | Severe combined immunodeficiency, B cell- |
| | negative, 601457 |
| 179616 | Omenn syndrome, 603554 |
| 179616 | Severe combined immunodeficiency, B cell- |
| | negative, 601457 |
| 179755 | Renal cell carcinoma, papillary, 1, 605074 |
| 180020 | Retinal cone dystrophy-1 |
| 180069 | Leber congenital amaurosis-2, 204100 |
| 180069 | Retinal dystrophy, autosomal recessive, |
| | childhood-onset |
| 180069 | Retinitis pigmentosa-20 |
| 180071 | Retinitis pigmentosa, autosomal recessive |
| 180090 | Newfoundland rod-cone dystrophy |
| 180090 | Retinitis pigmentosa, AR, 268000 |
| 180090 | Retinitis punctata albescens, 136880 |
| 180090 | Bothnia retinal dystrophy |
| 180090 | Fundus albipunctatus, 136880 |
| 180104 | Retinitis pigmentosa-9 |
| 180105 | Retinitis pigmentosa-10 |
| 180250 | Retinol binding protein, deficiency of |
| 180297 | Anemia, hemolytic, Rh-null, regulator type, |
| | 268150 |
| 180297 | Rh-mod syndrome |
| 180380 | Night blindness, congenital stationery, |
| | rhodopsin-related |
| 180380 | Retinitis pigmentosa, autosomal recessive |
| 180380 | Retinitis pigmentosa-4, autosomal dominant |
| 180381 | Oguchi disease-2, 258100 |
| 180385 | Leukemia, acute T-cell |
| 180435 | Prostate cancer 1, 176807, 601518 |
| 180721 | Retinitis pigmentosa, digenic |
| 180860 | Russell-Silver syndrome |
| 180901 | Malignant hyperthermia susceptibility 1, |
| | 145600 |
| 180901 | Central core disease, 117000 |
| 180902 | Arrhythmogenic right ventricular dysplasia 2, |
| | 600996 |
| 180902 | Ventricular tachycardia, stress-induced |
| | polymorphic, 604772 |
| 181405 | Scapuloperoneal spinal muscular atrophy, |
| | New England type |
| 181430 | Scapuloperoneal syndrome, myopathic type |
| 181460 | Schistosoma mansoni infection, |
| | susceptibility/resistance to |
| 181510 | Schizophrenia, 181500 |
| 181600 | Huriez syndrome |
| 181800 | Scoliosis, idiopathic |
| 182125 | Sepiapterin reductase deficiency |
| 182138 | Anxiety-related personality traits |
| 182280 | Small-cell cancer of lung |
| 182290 | Smith-Magenis syndrome |
| 182380 | Glucose/galactose malabsorption, 606824 |
| 182381 | Renal glucosuria, 233100 |
| 182452 | Lung cancer, small cell |
| 182530 | Fibromatosis, gingival, 135300 |
| 182600 | Spastic paraplegia-3A |
| 182860 | Pyropoikilocytosis |
| 182860 | Spherocytosis, recessive |
| 182860 | Elliptocytosis-2 |
| 182870 | Anemia, neonatal hemolytic, fatal and near- |
| | fatal |
| 182870 | Spherocytosis-1 |
| 182870 | Elliptocytosis-3 |
| 182900 | Spherocytosis-2 |
| 183600 | Split hand/foot malformation, type 1 |
| 185470 | Pheochromocytoma, extraadrenal, and cervical |
| | paraganglioma, 115310 |
| 185900 | Syndactyly, type 1 |
| 186740 | Immunodeficiency due to defect in CD3-gamma |
| 186770 | Leukemia, T-cell acute lymphocytic |
| 186780 | CD3, zeta chain, deficiency |
| 186830 | Immunodeficiency, T-cell receptor/CD3 complex |
| 186860 | Leukemia/lymphoma, T-cell |
| 186880 | Leukemia/lymphoma, T-cell |
| 186921 | Leukemia, T-cell acute lymphoblastic |
| 187040 | Leukemia-1, T-cell acute lymphocytic |
| 187395 | Forebrain defects |
| 187680 | 6-mercaptopurine sensitivity |
| 188000 | Thrombocytopenia-2 |
| 188025 | Thrombocytopenia, Paris-Trousseau type |
| 188070 | Bleeding disorder due to defective |
| | thromboxane A2 receptor |
| 188450 | Goiter, adolescent multinodular |
| 188450 | Goiter, nonendemic, simple |
| 188450 | Hypothyroidism, hereditary congenital |
| 188540 | Hypothyroidism, nongoitrous |
| 188826 | Sorsby fundus dystrophy, 136900 |
| 188830 | Myxoma, intracardiac, 255960 |
| 188830 | Thyroid carcinoma, papillary, 188550 |
| 188830 | Carney complex, type 1, 160980 |
| 189800 | Preeclampsia |
| 189980 | Leukemia, chronic myeloid |
| 190020 | Bladder cancer, 109800 |
| 190040 | Meningioma, SIS-related |
| 190040 | Dermatofibrosarcoma protuberans |
| 190040 | Giant-cell fibroblastoma |
| 190070 | Colorectal adenoma |
| 190070 | Colorectal cancer |
| 190080 | Burkitt lymphoma, 113970 |
| 190090 | Colon cancer, advanced |
| 190160 | Thyroid hormone resistance, 274300, 188570 |
| 190180 | Camurati-Engelmann disease, 131300 |
| 190195 | Ichthyosiform erythroderma, congenital, |
| | 242100 |
| 190195 | Ichthyosis, lamellar, autosomal recessive, |
| | 242300 |
| 190198 | Leukemia, T-cell acute lymphoblastic |
| 190300 | Tremor, familial essential, 1 |
| 190450 | Hemolytic anemia due to triosephosphate |
| | isomerase deficiency |
| 190605 | Triphalangeal thumb-polysyndactyly syndrome |
| 190685 | Down syndrome |
| 190900 | Colorblindness, tritan |
| 191030 | Nemaline myopathy 1, autosomal dominant, |
| | 161800 |
| 191041 | Nemaline myopathy, Amish type, 605355 |
| 191044 | Cardiomyopathy, familial hypertrophic |
| 191092 | Lymphangioleiomyomatosis, somatic, 606690 |
| 191092 | Tuberous sclerosis-2, 191100 |
| 191160 | Malaria, cerebral, susceptibility to |
| 191160 | Septic shock, susceptibility to |
| 191181 | Cervical carcinoma |
| 191190 | Periodic fever, familial, 142680 |
| 191290 | Segawa syndrome, recessive |
| 191315 | Insensitivity to pain, congenital, with |
| | anhidrosis, 256800 |
| 191315 | Medullary thyroid carcinoma, familial, 155240 |
| 191540 | [Urate oxidase deficiency] |
| 191740 | Hyperbilirubinemia, familial transcient |
| | neonatal, 237900 |
| 191740 | [Gilbert syndrome], 143500 |
| 191740 | Crigler-Najjar syndrome, type I, 218800 |
| 191740 | Crigler-Najjar syndrome, type II, 606785 |
| 192090 | Ovarian carcinoma |
| 192090 | Listeria monocytogenes, susceptibility to |
| 192090 | Breast cancer, lobular |
| 192090 | Endometrial carcinoma |
| 192090 | Gastric cancer, familial diffuse, 137215 |
| 192315 | Retinopathy, vascular, with cerebral and |
| | renal involvement |
| 192340 | Diabetes insipidus, neurohypophyseal, 125700 |
| 192500 | Jervell and Lange-Nielsen syndrome, 220400 |
| 192500 | Long QT syndrome-1 |
| 192974 | Glycoprotein Ia deficiency |
| 192974 | Neonatal alloimmune thrombocytopenia |
| 193000 | Vesicoureteral reflux |
| 193200 | Vitiligo, susceptibility to |
| 193235 | Vitreoretinopathy, neovascular inflammatory |
| 193300 | Renal cell carcinoma |
| 193300 | von Hippel-Lindau syndrome |
| 193500 | Rhabdomyosarcoma, alveolar, 268220 |
| 193500 | Waardenburg syndrome, type I |
| 193500 | Waardenburg syndrome, type III, 148820 |
| 193500 | Craniofacial-deafness-hand syndrome, 122880 |
| 194070 | Mesangial sclerosis, isolated diffuse, 256370 |
| 194070 | WAGR syndrome, 194072 |
| 194070 | Wilms tumor, type 1 |
| 194070 | Denys-Drash syndrome, 194080 |
| 194070 | Frasier syndrome, 136680 |
| 194071 | Wilms tumor, type 2 |
| 194071 | Adrenocortical carcinoma, hereditary, 202300 |
| 194380 | Pseudohyperkalemia, familial, 177720 |
| 194380 | Dehydrated hereditary stomatocytosis |
| 194380 | Dehydrated hereditary stomatocytosis, |
| | pseudohyperkalemia, and perinatal edema, 603528 |
| 200990 | Acrocallosal syndrome |
| 201100 | Acrodermatitis enteropathica, zinc-deficiency |
| | type |
| 201460 | Acyl-CoA dehydrogenase, long chain, deficiency of |
| 201475 | VLCAD deficiency |
| 201810 | 3-beta-hydroxysteroid dehydrogenase, type II, |
| | deficiency |
| 201910 | Adrenal hyperplasia, congenital, due to |
| | 21-hydroxylase deficiency |
| 202010 | Adrenal hyperplasia, congenital, due to |
| | 11-beta-hydroxylase deficiency |
| 202010 | Aldosteronism, glucocorticoid-remediable, 103900 |
| 203310 | Ocular albinism, autosomal recessive |
| 203500 | Alkaptonuria |
| 203740 | Alpha-ketoglutarate dehydrogenase deficiency |
| 203750 | 3-ketothiolase deficiency |
| 204500 | Ceroid-lipofuscinosis, neuronal 2, classic late |
| | infantile |
| 207750 | Hyperlipoproteinemia, type Ib |
| 208400 | Aspartylglucosaminuria |
| 209901 | Bardet-Biedl syndrome 1, 209900 |
| 210200 | 3-Methylcrotonylglycinuria I |
| 210210 | 3-Methylcrotonylglycinuria II |
| 210600 | Seckel sydnrome |
| 211420 | Breast cancer, ductal |
| 212138 | Carnitine-acylcarnitine translocase deficiency |
| 212750 | Celiac disease |
| 213300 | Joubert syndrome-1 |
| 214300 | Klippel-Feil syndrome |
| 215400 | Chordoma |
| 216550 | Cohen syndrome |
| 216950 | C1r/C1s deficiency, combined |
| 217000 | C2 deficiency |
| 217030 | C3b inactivator deficiency |
| 218000 | Andermann syndrome |
| 218030 | Hypertension, mild low-renin |
| 218030 | Apparent mineralocorticoid excess, hypertension |
| | due to |
| 218040 | Costello syndrome |
| 218400 | Craniometaphyseal dysplasia, autosomal recessive |
| 221820 | Gliosis, familial progressive subcortical |
| 222100 | Diabetes mellitus, insulin-dependent-1 |
| 222748 | Dihydropyrimidinuria |
| 222800 | Hemolytic anemia due to bisphosphoglycerate |
| | mutase deficiency |
| 222900 | Sucrose intolerance |
| 224100 | Congenital dyserythropoietic anemia II |
| 225750 | Aicardi-Goutieres syndrome 1 |
| 226450 | Epidermolysis bullosa inversa, junctional |
| 227220 | [Eye color, brown] |
| 227500 | Myocardial infarction, decreased susceptibility |
| | to |
| 227500 | Factor VII deficiency |
| 227600 | Factor X deficiency |
| 227645 | Fanconi anemia, complementation group C |
| 227650 | Fanconi anemia, complementation group A |
| 228000 | Farber lipogranulomatosis |
| 228960 | [Kininogen deficiency] |
| 229600 | Fructose intolerance |
| 229700 | Fructose-bisphosphatase deficiency |
| 229800 | [Fructosuria] |
| 230000 | Fucosidosis |
| 230500 | Mucopolysaccharidosis IVB |
| 230500 | GM1-gangliosidosis |
| 231090 | Hydatidiform mole |
| 231670 | Glutaricaciduria, type I |
| 231680 | Glutaricaciduria, type IIA |
| 231950 | Glutathioninuria |
| 232000 | Propionicacidemia, 606054 |
| 232050 | Propionicacidemia, 606054 |
| 232400 | Glycogen storage disease IIIa |
| 232400 | Glycogen storage disease IIIb |
| 232500 | Glycogen storage disease IV |
| 232600 | McArdle disease |
| 232700 | Glycogen storage disease VI |
| 233100 | [Renal glucosuria] |
| 233690 | Chronic granulomatous disease, autosomal, due |
| | to deficiency of CYBA |
| 233700 | Chronic granulomatous disease due to deficiency |
| | of NCF-1 |
| 233710 | Chronic granulomatous disease due to deficiency |
| | of NCF-2 |
| 234000 | Factor XII deficiency |
| 235200 | Hemochromatosis |
| 235200 | Porphyria variegata, 176200 |
| 235800 | [Histidinemia] |
| 236100 | Holoprosencephaly-1 |
| 236200 | Homocystinuria, B6-responsive and nonresponsive |
| | types |
| 236200 | Thrombosis, hyperhomocysteinemic |
| 236680 | Hydrolethalus syndrome |
| 236730 | Urofacial syndrome |
| 237300 | Carbamoylphosphate synthetase I deficiency |
| 238310 | Glycine encephalopathy, 605899 |
| 238330 | Glycine encephalopathy, 605899 |
| 238600 | Hyperlipoproteinemia I |
| 238600 | Lipoprotein lipase deficiency |
| 238600 | Chylomicronemia syndrome, familial |
| 238600 | Combined hyperlipemia, familial |
| 240300 | Autoimmune polyglandular disease, type I |
| 240400 | Scurvy |
| 241410 | Hypoparathyroidism-retardation-dysmorphism |
| | syndrome |
| 243500 | Isovalericacidemia |
| 244460 | Kenny-Caffey syndrome-1 |
| 245349 | Lacticacidemia due to PDX1 deficiency |
| 246300 | Leprosy, susceptibility to |
| 246450 | HMG-CoA lyase deficiency |
| 246900 | Lipoamide dehydrogenase deficiency |
| 247200 | Miller-Dieker lissencephaly syndrome |
| 247640 | Leukemia, acute lymphoblastic |
| 248310 | Plasmodium falciparum parasitemia, intensity of |
| 248510 | Mannosidosis, beta- |
| 248600 | Maple syrup urine disease, type Ia |
| 248610 | Maple syrup urine disease, type II |
| 248611 | Maple syrup urine disease, type Ib |
| 249000 | Meckel syndrome, type 1 |
| 250100 | Metachromatic leukodystrophy |
| 250790 | Methemoglobinemia due to cytochrome b5 deficiency |
| 250800 | Methemoglobinemia, type I |
| 250800 | Methemoglobinemia, type II |
| 250850 | Hypermethioninemia, persistent, autosomal |
| | dominant, due to methionine adenosyl- |
| | transferase I/III deficiency |
| 250850 | Methionine adenosyltransferase deficiency, |
| | autosomal recessive |
| 252350 | Moyamoya disease |
| 252500 | Mucolipidosis II |
| 252500 | Mucolipidosis III |
| 252900 | Sanfilippo syndrome, type A |
| 253000 | Mucopolysaccharidosis IVA |
| 253200 | Maroteaux-Lamy syndrome, several forms |
| 253700 | Muscular dystrophy, limb-girdle, type 2C |
| 254780 | Epilepsy, myoclonic, Lafora type |
| 256550 | Sialidosis, type I |
| 256550 | Sialidosis, type II |
| 256700 | Neuroblastoma |
| 256731 | Ceroid-lipofuscinosis, neuronal-5, variant late |
| | infantile |
| 257200 | Niemann-Pick disease, type A |
| 257200 | Niemann-Pick disease, type B |
| 258900 | Oroticaciduria |
| 259730 | Renal tubular acidosis-osteopetrosis syndrome |
| 259770 | Osteoporosis-pseudoglioma syndrome |
| 261000 | Anemia, pernicious, congenital, due to deficiency |
| | of intrinsic factor |
| 261600 | Phenylketonuria |
| 261600 | [Hyperphenylalaninemia, mild] |
| 261640 | Phenylketonuria due to PTS deficiency |
| 261670 | Myopathy due to phosphoglycerate mutase |
| | deficiency |
| 262000 | Bjornstad syndrome |
| 263400 | Erythrocytosis, autosomal recessive benign |
| 264470 | Adrenoleukodystrophy, pseudoneonatal |
| 266100 | Epilepsy, pyridoxine-dependent |
| 266150 | Pyruvate carboxylase deficiency |
| 266200 | Anemia, hemolytic, due to PK deficiency |
| 267750 | Knobloch syndrome |
| 270200 | Sjogren-Larsson syndrome |
| 270685 | Spastic paraplegia-17 |
| 271245 | Spinocerebellar ataxia, infantile-onset, with |
| | sensory neuropathy |
| 271250 | Spinocerebellar ataxia with blindness and |
| | deafness |
| 271900 | Canavan disease |
| 271980 | Succinic semialdehyde dehydrogenase deficiency |
| 272750 | GM2-gangliosidosis, AB variant |
| 273300 | Male germ cell tumor |
| 274180 | Thromboxane synthase deficiency |
| 274270 | Thymine-uraciluria |
| 274270 | Fluorouracil toxicity, sensitivity to |
| 275350 | Transcobalamin II deficiency |
| 276000 | Pancreatitis, hereditary, 167800 |
| 276000 | Trypsinogen deficiency |
| 276600 | Tyrosinemia, type II |
| 276700 | Tyrosinemia, type I |
| 276901 | Retinitis pigmentasa, AR, without hearing loss, |
| | 268000 |
| 276901 | Usher syndrome, type 2A |
| 276903 | Usher syndrome, type 1B |
| 276903 | Deafness, autosomal dominant 11, neurosensory, |
| | 601317 |
| 276903 | Deafness, autosomal recessive 2, neurosensory, |
| | 600060 |
| 276905 | Usher syndrome, type IIB |
| 277600 | Weill-Marchesani syndrome |
| 278000 | Wolman disease |
| 278000 | Cholesteryl ester storage disease |
| 278250 | Wrinkly skin syndrome |
| 278300 | Xanthinuria, type I |
| 278700 | Xeroderma pigmentosum, group A |
| 300005 | Angelman syndrome, 105830 |
| 300005 | Mental retardation, X-linked, nonspecific |
| 300005 | Mental retardation, X-linked, with progressive |
| | spasticity, 300279 |
| 300005 | PPM-X syndrome, 300055 |
| 300005 | Rett syndrome, 312750 |
| 300005 | Rett syndrome, preserved speech variant, 312750 |
| 300011 | Menkes disease, 309400 |
| 300011 | Occipital horn syndrome, 304150 |
| 300011 | Cutis laxa, neonatal |
| 300017 | Heterotopia, periventricular, 300049 |
| 300031 | Mental retardation, X-linked, FRAXF type |
| 300032 | Juberg-Marsidi syndrome, 309590 |
| 300032 | Smith-Fineman-Myers syndrome, 309580 |
| 300032 | Sutherland-Haan syndrome, 309470 |
| 300032 | Alpha-thalassemia/mental retardation syndrome, |
| | 301040 |
| 300036 | Mental retardation, X-linked, with seizures and |
| | carrier manifestations, 300397 |
| 300036 | Creatine deficiency syndrome, X-linked, 300352 |
| 300037 | Simpson-Golabi-Behmel syndrome, type 1, 312870 |
| 300044 | Wernicke-Korsakoff syndrome, susceptibility to |
| 300046 | Mental retardation, X-linked 23, nonspecific |
| 300047 | Mental retardation, X-linked 20 |
| 300048 | Intestinal pseudoobstruction, neuronal, X-linked |
| 300062 | Mental retardation, X-linked 14 |
| 300075 | Mental retardation, X-linked nonspecific, type 19 |
| 300075 | Coffin-Lowry syndrome, 303600 |
| 300076 | Wood neuroimmunologic syndrome |
| 300077 | Mental retardation, X-linked 29 |
| 300088 | Epilepsy, female restricted, with mental |
| | retardation |
| 300100 | Adrenoleukodystrophy |
| 300100 | Adrenomyeloneuropathy |
| 300104 | Mental retardation, X-linked nonspecific, 309541 |
| 300108 | Premature ovarian failure, 311360 |
| 300110 | Night blindness, congenital stationary, X-linked, |
| | type 2, 300071 |
| 300115 | Mental retardation, X-linked nonspecific, type 50 |
| 300121 | Lissencephaly, X-linked, 300067 |
| 300121 | Subcortical laminal heteropia, X-linked, 300067 |
| 300123 | Mental retardation with isolated growth hormone |
| | deficiency |
| 300126 | Hoyeraal-Hreidarsson syndrome, 300240 |
| 300126 | Dyskeratosis congenita-1, 305000 |
| 300135 | Anemia, sideroblastic, with ataxia, 301310 |
| 300142 | Mental retardation, X-linked 30 |
| 300147 | Prostate cancer, susceptibility to, 176807 |
| 300148 | MEHMO syndrome |
| 300155 | Retinitis pigmentosa-24 |
| 300179 | X inactivation, familial skewed, 2 |
| 300195 | Alport syndrome, mental retardation, midface |
| | hypoplasia, and elliptocytosis, 300194 |
| 300200 | Adrenal hypoplasia, congenital, with |
| | hypogonadotropic hypogonadism |
| 300200 | Dosage-sensitive sex reversal, 300018 |
| 300202 | Spondyloepiphyseal dysplasia tarda, 313400 |
| 300205 | Chondrodysplasia punctata, X-linked dominant, |
| | 302960 |
| 300206 | Mental retardation, X-linked 1, non-dysmorphic, |
| | 309530 |
| 300210 | Mental retardation, X-linked nonspecific, 58 |
| 300218 | Mental retardation, X-linked, syndromic 7 |
| 300238 | Mental retardation, X-linked, Shashi type |
| 300243 | Mental retardation, X-linked, South African type |
| 300244 | Osseous dysplasia, digital, with facial |
| | pibmentary defects and multiple frenula |
| 300245 | Ptosis, hereditary congenital 2 |
| 300248 | Incontinentia pigmenti, type II, 308300 |
| 300248 | Ectodermal dysplasia, anhidrotic, lymphedema and |
| | immunodeficiency, 300301 |
| 300248 | Ectodermal dysplasia, hypohidrotic, with immune |
| | deficiency, 300291 |
| 300260 | Mental retardation syndrome, X-linked, Lubs type |
| 300261 | Mental retardation syndrome, X-linked, Armfield |
| | type |
| 300263 | Mental retardation syndrome, X-linked, Siderius |
| | type |
| 300267 | Mental retardation, X-linked nonspecific, type 46 |
| 300271 | Mental retardation, X-linked-72 |
| 300275 | CHILD syndrome, 308050 |
| 300278 | Night blindness, congenital stationary, type 1, |
| | 310500 |
| 300292 | Immunodysregulation, polyendocrinopathy, and |
| | enteropathy, X-linked, 304790 |
| 300300 | XLA and isolated growth hormone deficiency, |
| | 307200 |
| 300300 | Agammaglobulinemia, type 1, X-linked |
| 300307 | Cleft palate with ankyloglossia, 303400 |
| 300321 | FG syndrome, 305450 |
| 300324 | Mental retardation, X-linked-53 |
| 300354 | Mental retardation syndrome, X-linked, Cabezas |
| | type |
| 300356 | Jensen syndrome, 311150 |
| 300356 | Mohr-Tranebjaerg syndrome, 304700 |
| 300356 | Deafness, X-linked 1, progressive |
| 300360 | Mental retardation, X-linked, with short stature |
| 300372 | Mental retardation, X-linked nonspecific, 42 |
| 300382 | Infantile spasm syndrome, X-linked, 308350 |
| 300382 | Myoclonic epilepsy, X-linked, with mental |
| | retardation and spasticity |
| 300382 | Partington syndrome, 309510 |
| 300383 | Properdin deficiency, X-linked, 312060 |
| 300384 | Emery-Dreifuss muscular dystrophy, 310300 |
| 300386 | Immunodeficiency, X-linked, with hyper-IgM, |
| | 308230 |
| 300388 | Polymicrogyria, bilateral perisylvian |
| 300390 | Choroideremia, 303100 |
| 300391 | Amelogenesis imperfecta, 301200 |
| 300392 | Neutropenia, severe congenital, X-linked, 300299 |
| 300392 | Thrombocytopenia, X-linked, 313900 |
| 300392 | Thrombocytopenia, X-linked, intermittent, 313900 |
| 300392 | Wiskott-Aldrich syndrome, 301000 |
| 300394 | Noncompaction of left ventricular myocardium, |
| | isolated, 300183 |
| 300394 | Barth syndrome, 302060 |
| 300394 | Cardiomyopathy, X-linked dilated, 300069 |
| 300394 | Endocardial fibroelastosis-2 |
| 300401 | Pelizaeus-Merzbacher disease, 312080 |
| 300401 | Spastic paraplegia-2, 312920 |
| 300600 | Ocular albinism, Forsius-Eriksson type |
| 301201 | Amelogenesis imperfecta-3, hypoplastic type |
| 301220 | Partington syndrome II |
| 301500 | Fabry disease |
| 301590 | Anophthalmos-1 |
| 301830 | Arthrogryposis, X-linked (spinal muscular |
| | atrophy, infantile, X-linked) |
| 301835 | Arts syndrome |
| 301845 | Bazex syndrome |
| 302350 | Nance-Horan syndrome |
| 302500 | Cerebellar ataxia-2 |
| 303630 | Alport syndrome, 301050 |
| 303631 | Leiomyomatosis, diffuse, with Alport syndrome, |
| | 308940 |
| 303700 | Colorblindness, blue monochromatic |
| 303800 | Colorblindness, deutan |
| 303900 | Colorblindness, protan |
| 304040 | Charcot-Marie-Tooth neuropathy, X-linked-1, |
| | dominant, 302800 |
| 304340 | Mental retardation, X-linked, syndromic-5, with |
| | Dandy-Walker malformation, basal ganglia disease, |
| | and seizures |
| 304500 | Deafness, X-linked 2, perceptive congenital |
| 304730 | Dermoids of cornea |
| 304800 | Diabetes insipidus, nephrogenic |
| 305100 | Ectodermal dysplasia-1, anhidrotic |
| 305371 | Dyserythropoietic anemia with thrombocytopenia, |
| | 300367 Macrothrombocytopenia, 300367 |
| 305450 | FG syndrome |
| 305900 | Hemolytic anemia due to G6PD deficiency |
| 305900 | Favism |
| 305900 | G6PD deficiency |
| 306000 | Glycogenosis, X-linked hepatic, type I |
| 306000 | Glycogenosis, X-linked hepatic, type II |
| 306100 | Gonadal dysgenesis, XY female type |
| 306700 | Hemophilia A |
| 306995 | [Homosexuality, male] |
| 307030 | Glycerol kinase deficiency |
| 307030 | Hyperglycerolemia |
| 307150 | Hypertrichosis, congenital generalized |
| 307700 | Hypoparathyroidism, X-linked |
| 307800 | Hypophosphatemia, hereditary |
| 308000 | HPRT-related gout, 300323 |
| 308000 | Lesch-Nyhan syndrome, 300322, |
| 308240 | Lymphoproliferative syndrome, X-linked |
| 308380 | Severe combined immunodeficiency, X-linked, |
| | 300400 |
| 308380 | Combined immunodeficiency, X-linked, moderate, |
| | 312863 |
| 308840 | Hydrocephalus due to aqueductal stenosis, 307000 |
| 308840 | MASA syndrome, 303350 |
| 308840 | Spastic paraplegia, 312900 |
| 309000 | Lowe syndrome |
| 309060 | Glycogen storage disease IIb, 300257 |
| 309200 | Manic-depressive illness, X-linked |
| 309300 | Megalocornea, X-linked |
| 309470 | Mental retardation, X-linked, syndromic-3, with |
| | spastic diplegia |
| 309500 | Renpenning syndrome-1 |
| 309548 | Mental retardation, X-linked, FRAXE type |
| 309555 | Gustavson syndrome |
| 309585 | Mental retardation, X-linked, syndromic-6, with |
| | gynecomastia and obesity |
| 309600 | Allan-Herndon syndrome |
| 309605 | Mental retardation, X-linked, syndromic-4, with |
| | congenital contractures and low fingertip arches |
| 309610 | Mental retardation, X-linked, syndromic-2, with |
| | dysmorphism and cerebral atrophy |
| 309620 | Mental retardation-skeletal dysplasia |
| 309800 | Lenz microphthalmia syndrome |
| 309850 | Brunner syndrome |
| 309900 | Mucopolysaccharidosis II |
| 310400 | Myotubular myopathy, X-linked |
| 310440 | Myopathy, X-linked, with excessive autophagy |
| 310460 | Myopia-1 |
| 310460 | Bornholm eye disease |
| 310490 | Cowchock syndrome |
| 310600 | Norrie disease |
| 310600 | Coats disease, 300216 |
| 310600 | Exudative vitreoretinopathy, X-linked, 305390 |
| 310700 | Nystagmus 1, congenital |
| 311050 | Optic atrophy, X-linked |
| 311300 | Otopalatodigital syndrome, type I |
| 311300 | Otopalatodigital syndrome, type II, 304120 |
| 311360 | Ovarian failure, premature |
| 311510 | Waisman parkinsonism-mental retardation syndrome |
| 311770 | Paroxysmal nocturnal hemoglobinuria |
| 311800 | Hemolytic anemia due to PGK deficiency |
| 311800 | Myoglobinuria/hemolysis due to PGK deficiency |
| 311850 | Phosphoribosyl pyrophosphate synthetase-related |
| | gout |
| 311870 | Muscle glycogenosis |
| 312000 | Panhypopituitarism, X-linked |
| 312040 | N syndrome, 310465 |
| 312170 | Pyruvate dehydrogenase deficiency |
| 312600 | Retinitis pigmentosa-2 |
| 312612 | Retinitis pigmentosa-6 |
| 312700 | Retinoschisis |
| 313350 | Split hand/foot malformation, type 2 |
| 313850 | Thoracoabdominal syndrome |
| 314200 | [Euthyroidal hyper- and hypothyroxinemia] |
| 314250 | Dystonia-3, torsion, with parkinsonism, Filipino |
| | type |
| 314300 | Goeminne TKCR syndrome |
| 314400 | Cardiac valvular dysplasia-1 |
| 314580 | Wieacker-Wolff syndrome |
| 600018 | [Response to morphine-6-glucuronide] |
| 600031 | [Chitotriosidase deficiency] |
| 600040 | T-cell acute lymphoblastic leukemia |
| 600040 | Colorectal cancer |
| 600044 | Thrombocythemia, essential, 187950 |
| 600045 | Xeroderma pigmentosum, group E, subtype 2 |
| 600046 | HDL deficiency, familial, 604091 |
| 600046 | Tangier disease, 205400 |
| 600046 | Cerebral amyloid angiopathy, 105150 |
| 600048 | Breast cancer, 11:22 translocation associated |
| 600059 | Retinitis pigmentosa-13 |
| 600065 | Leukocyte adhesion deficiency, 116920 |
| 600075 | Spinocerebellar ataxia 17, 607136 |
| 600075 | Complex neurologic disorder, 117200 |
| 600079 | Colon cancer |
| 600095 | Split hand/foot malformation, type 3, 183600 |
| 600098 | Ovarian carcinoma |
| 600101 | Deafness, autosomal dominant 2 |
| 600119 | Muscular dystrophy, Duchenne-like, type 2 |
| 600119 | Muscular dystrophy, limb-girdle, type 2D |
| 600119 | Adhalinopathy, primary |
| 600140 | Rubenstein-Taybi syndrome, 180849 |
| 600143 | Epilepsy, progressive, with mental retardation |
| 600151 | Bardet-Biedl syndrome 3, 209900 |
| 600160 | Li Fraumeni syndrome, 151623 |
| 600160 | Melanoma and neural system tumor syndrome, 155755 |
| 600160 | Melanoma, cutaneous malignant, 2, 155601 |
| 600160 | Pancreatic cancer/melanoma syndrome, 606719 |
| 600163 | Heart block, nonprogressive, 113900 |
| 600163 | Heart block, progressive, type I, 113900 |
| 600163 | Long QT syndrome-3, 603830 |
| 600163 | Ventricular fibrillation, idiopathic, 603829 |
| 600163 | Brugada syndrome, 601144 |
| 600175 | Spinal muscular atrophy, congenital |
| | nonprogressive, of lower limbs |
| 600184 | Carnitine acetyltransferase deficiency |
| 600185 | Pancreatic cancer |
| 600185 | Breast cancer 2, early onset |
| 600185 | Fanconi anemia, complementation group B, 227660 |
| 600193 | Waardenburg syndrome, type 2B |
| 600194 | Ichthyosis bullosa of Siemens, 146800 |
| 600202 | Dyslexia, specific, 2 |
| 600221 | Venous malformations, multiple cutaneous and |
| | mucosal, 600195 |
| 600223 | Spinocerebellar ataxia-4 |
| 600224 | Spinocerebellar ataxia-5 |
| 600225 | Phenylketonuria, atypical, due to GCH1 |
| | deficiency, 233910 |
| 600225 | Dystonia, DOPA-responsive, 128230 |
| 600228 | Pseudohypoaldosteronism, type I, 264350 |
| 600231 | Palmoplantar keratoderma, Bothnia type |
| 600234 | HMG-CoA synthase-2 deficiency, 605911 |
| 600235 | Generalized epilepsy with febrile seizures plus, |
| | 604233 |
| 600243 | Temperature-sensitive apoptosis |
| 600258 | Colorectal cancer, hereditary nonpolyposis, |
| | type 3, 114500 |
| 600259 | Turcot syndrome with glioblastoma, 276300 |
| 600259 | Colorectal cancer, hereditary nonpolyposis, |
| | type 4, 114500 |
| 600266 | Resistance/susceptibility to TB, etc. |
| 600273 | Polycystic kidney disease, infantile severe, |
| | with tuberous sclerosis |
| 600276 | Cerebral arteriopathy with subcortical infarcts |
| | and leukoencephalopathy, 125310 |
| 600279 | Zellweger syndrome, 214100 |
| 600281 | MODY, type I, 125850 |
| 600281 | Diabetes mellitus, noninsulin-dependent, 125853 |
| 600299 | Thyroid carcinoma, papillary, 188550 |
| 600318 | Diabetes mellitus, insulin-dependent, 3 |
| 600319 | Diabetes mellitus, insulin-dependent, 4 |
| 600320 | Diabetes mellitus, insulin-dependent, 5 |
| 600332 | Rippling muscle disease-1, 606072 |
| 600342 | Retinitis pigmentosa, autosomal dominant |
| 600342 | Retinitis pigmentosa, autosomal recessive |
| 600354 | Spinal muscular atrophy-1, 253300 |
| 600354 | Spinal muscular atrophy-2, 253550 |
| 600354 | Spinal muscular atrophy-3, 253400 |
| 600358 | Leukemia, acute myelogenous, 601626 |
| 600359 | Bartter syndrome, antenatal, 601678 |
| 600363 | Spastic paraplegia-6 |
| 600364 | Cone dystrophy-3, 602093 |
| 600374 | Bardet-Biedl syndrome 4, 209900 |
| 600415 | Ataxia with isolated vitamin E deficiency, 277460 |
| 600429 | [Ii blood group, 110800] |
| 600430 | Brachydactyly-mental retardation syndrome |
| 600467 | Malignant hyperthermia susceptibility 4 |
| 600502 | Spinal muscular atrophy with respiratory |
| | distress, 604320 |
| 600509 | Persistent hyperinsulinemic hypoglycemia of |
| | infancy, 256450 |
| 600510 | Pigment dispersion syndrome |
| 600511 | Schizophrenia, 181500 |
| 600514 | Lissencephaly syndrome, Norman-Roberts type, |
| | 257320 |
| 600515 | Platelet ADP receptor defect |
| 600525 | Trichodontoosseous syndrome, 190320 |
| 600528 | CPT deficiency, hepatic, type IA, 255120 |
| 600532 | Parkinson disease, susceptibility to, 168600 |
| 600536 | Myopathy, congenital |
| 600555 | Mycobacterial infection, atypical, familial |
| | disseminated, 209950 |
| 600577 | Pituitary hormone deficiency, combined, with |
| | rigid cervical spine, 262600 |
| 600584 | Atrial septal defect with atrioventricular |
| | conduction defects, 108900 |
| 600617 | Lipoid adrenal hyperplasia, 201710 |
| 600618 | Leukemia, acute lymphoblastic |
| 600623 | Prostate cancer, susceptibility to, 176807 |
| 600624 | Cone-rod retinal dystrophy-1 |
| 600631 | Enuresis, nocturnal, 1 |
| 600635 | Goiter, familial, due to TTF-1 defect |
| 600638 | Fibrosis of extraocular muscles, congenital, 3 |
| 600638 | Fibrosis, congenital, of vertically acting |
| | extraocular muscles |
| 600644 | Zlotogora-Ogur syndrome, 225000 |
| 600644 | Cleft lip/palate ectodermal dysplasia syndrome, |
| | 225000 |
| 600644 | Ectodermal dysplasia, Margarita Island type, |
| | 225060 |
| 600650 | Myopathy due to CPT II deficiency, 255110 |
| 600650 | CPT deficiency, hepatic, type II, 600649 |
| 600652 | Deafness, autosomal dominant 4 |
| 600698 | Lipoma |
| 600698 | Lipomatosis, mutiple, 151900 |
| 600698 | Salivary adenoma |
| 600698 | Uterine leiomyoma |
| 600700 | Leukemia, myeloid |
| 600700 | Lipoma |
| 600722 | Ceroid lipofuscinosis, neuronal, variant |
| | juvenile type, with granular osmiophilic deposits |
| 600722 | Ceroid lipofuscinosis, neuronal-1, infantile, |
| | 256730 |
| 600724 | Retinitis pigmentosa, autosomal recessive, |
| | 268000 |
| 600725 | Holoprosencephaly-3, 142945 |
| 600725 | Solitary median maxillary central incisor, 147250 |
| 600740 | Hypercalciuric hypercalcemia, type III |
| 600757 | Orofacial cleft-3 |
| 600759 | Alzheimer disease-4, 104300 |
| 600760 | Liddle syndrome, 177200 |
| 600760 | Pseudohypoaldosteronism, type I, 264350 |
| 600761 | Liddle syndrome, 177200 |
| 600761 | Pseudohypoaldosteronism, type I, 264350 |
| 600790 | Chorioretinal atrophy, progressive bifocal |
| 600792 | Deafness, autosomal recessive 5 |
| 600797 | Diabetes mellitus, noninsulin-dependent, 125853 |
| 600799 | Pulmonary hypertension, familial primary, 178600 |
| 600807 | Bronchial asthma |
| 600808 | Enuresis, nocturnal, 2 |
| 600811 | Xeroderma pigmentosum, group E, DDB-negative |
| | subtype, 278740 |
| 600838 | T-cell immunodeficiency, congenital alopecia, |
| | and nail dystrophy |
| 600839 | Bartter syndrome, antenatal, 601678 |
| 600850 | Schizophrenia, 181500 |
| 600852 | Retinitis pigmentosa-17 |
| 600856 | Beckwith-Wiedemann syndrome, 130650 |
| 600882 | Charcot-Marie-Tooth disease, type 2B |
| 600883 | Diabetes mellitus, insulin-dependent, 8 |
| 600887 | Endometrial carcinoma |
| 600901 | Fanconi anemia, complementation group E |
| 600917 | Insulin resistance, severe, digenic, 604367 |
| 600919 | Long QT syndrome-4 with sinus bradycardia |
| 600923 | Porphyria variegata, 176200 |
| 600925 | Colon cancer, somatic, 114500 |
| 600937 | Persistent hyperinsulinemic hypoglycemia of |
| | infancy, 256450 |
| 600956 | Persistent Mullerian duct syndrome, type II, |
| | 261550 |
| 600957 | Persistent Mullerian duct syndrome, type I, |
| | 261550 |
| 600958 | Cardiomyopathy, familial hypertrophic, 4, 115197 |
| 600968 | Gitelman syndrome, 263800 |
| 600970 | Deafness, autosomal dominant 22 |
| 600971 | Deafness, autosomal recessive 6 |
| 600975 | Glaucoma 3, primary infantile, B |
| 600977 | Cone dystrophy, progressive |
| 600985 | Ehlers-Danlos-like syndrome, 606408 |
| 600993 | Pancreatic cancer |
| 600993 | Polyposis, juvenile intestinal, 174900 |
| 600995 | Nephrotic syndrome, idiopathic, steroid-resistant |
| 600996 | Arrhythmogenic right ventricular dysplasia-2 |
| 601002 | Hemolytic anemia due to glutathione synthetase |
| | deficiency, 231900 |
| 601002 | 5-oxoprolinuria, 266130 |
| 601007 | Obesity, morbid, with hypogonadism |
| 601011 | Hemiplegic migraine, familial, 141500 |
| 601011 | Spinocerebellar ataxia-6, 183086 |
| 601011 | Cerebellar ataxia, pure |
| 601011 | Episodic ataxia, type 2, 108500 |
| 601015 | Niemann-pick disease, type C2 |
| 601021 | Leukemia, lymphycytic, acute T-cell |
| 601094 | Anterior segment mesenchymal dysgenesis, 107250 |
| 601097 | Neuropathy, recurrent, with pressure palsies, |
| | 162500 |
| 601097 | Charcot-Marie-Tooth disease with deafness, |
| | 118300 |
| 601097 | Charcot-Marie-Tooth neuropathy-1A, 118220 |
| 601097 | Dejerine-Sottas disease, 145900 |
| 601098 | Charcot-Marie-Tooth disease, type 1C |
| 601105 | Pycnodysostosis, 265800 |
| 601107 | Dubin-Johnson syndrome, 237500 |
| 601130 | Tolbutamide poor metabolizer |
| 601130 | Warfarin sensitivity, 122700 |
| 601145 | Epilepsy, progressive myoclonic 1, 254800 |
| 601146 | Brachydactyly, type C, 113100 |
| 601146 | Acromesomelic dysplasia, Hunter-Thompson type, |
| | 201250 |
| 601146 | Chondrodysplasia, Grebe type, 200700 |
| 601154 | Cardiomyopathy, dilated, 1E |
| 601162 | Spastic paraplegia-9 |
| 601202 | Cataract, anterior polar-2 |
| 601208 | Diabetes mellitus, insulin-dependent, 11 |
| 601238 | Cerebellar ataxia, Cayman type |
| 601239 | Left ventricular noncompaction with congenital |
| | heart defects, 606617 |
| 601239 | Left ventricular noncompaction, familial |
| | isolated, 604169 |
| 601240 | GAMT deficiency |
| 601267 | HIV infection, susceptibility/resistence to |
| 601277 | Ichthyosis, lamellar, type 2 |
| 601284 | Hereditary hemorrhagic telangiectasia-2, 600376 |
| 601286 | Cataract, polymorphic congenital |
| 601299 | Polyposis, juvenile intestinal, 174900 |
| 601300 | Pancreatic cancer, somatic |
| 601309 | Holoprosencephaly-7 |
| 601309 | Basal cell carcinoma, somatic, 605462 |
| 601309 | Basal cell nevus syndrome, 109400 |
| 601313 | Polycystic kidney disease, adult type I, 173900 |
| 601318 | Diabetes mellitus, insulin-dependent, 13 |
| 601336 | Glucosidase I deficiency, 606056 |
| 601362 | DiGeorge syndrome/velocardiofacial syndrome |
| | complex-2 |
| 601367 | Stroke, susceptibility to |
| 601373 | HIV infection, susceptibility/resistance to |
| 601385 | Prostate cancer, susceptibility to, 176807 |
| 601387 | Breast cancer |
| 601388 | Diabetes mellitus, insulin-dependent, 12 |
| 601402 | Leukemia, myeloid, acute |
| 601406 | B-cell non-Hodgkin lymphoma, high-grade |
| 601410 | Diabetes mellitus, transient neonatal |
| 601411 | Muscular dystrophy, limb-girdle, type 2F, 601287 |
| 601411 | Cardiomyopathy, dilated, 1L, 606685 |
| 601412 | Deafness, autosomal dominant 7 |
| 601414 | Retinitis pigmentosa-18 |
| 601458 | Inflammatory bowel disease-2, 266600 |
| 601465 | Mitochondrial DNA-depletion syndrome, |
| | hepatocerebral form, 251880 |
| 601470 | Rapid progression to AIDS from HIV1 infection |
| 601471 | Moebius syndrome-2 |
| 601493 | Cardiomyopathy, dilated 1C |
| 601498 | Peroxisomal biogenesis disorder, complementation |
| | group 4 |
| 601498 | Peroxisomal biogenesis disorder, complementation |
| | group 6 |
| 601500 | Basal cell carcinoma, sporadic |
| 601542 | Iridogoniodysgenesis syndrome-2, 137600 |
| 601542 | Rieger syndrome, 180500 |
| 601545 | Lissencephaly-1 |
| 601545 | Subcortical laminar heterotopia |
| 601556 | Spinocerebellar ataxia-1, 164400 |
| 601566 | Squamous cell carcinoma, head and neck, 601400 |
| 601567 | Combined factor V and VIII deficiency, 227300 |
| 601574 | Chondrosarcoma, extraskeletal myxoid |
| 601583 | Wilms tumor susceptibility-5 |
| 601592 | Myasthenia syndrome, congenital |
| 601596 | Charcot-Marie-Tooth neuropathy, demyelinating |
| 601601 | Char syndrome, 169100 |
| 601606 | Trichoepithelioma, multiple familial |
| 601617 | Fundus albipunctatus, 136880 |
| 601620 | Holt-Oram syndrome, 142900 |
| 601621 | Ulnar-mammary syndrome, 181450 |
| 601623 | Angelman syndrome, 105830 |
| 601650 | Paragangliomas, familial nonchromaffin, 2 |
| 601652 | Glaucoma 1A, primary open angle, juvenile-onset, |
| | 137750 |
| 601652 | Glaucoma 1A, primary open angle, recessive |
| 601653 | Anterior segment anomalies and cataract |
| 601653 | Branchiootic syndrome |
| 601653 | Branchiootorenal syndrome with cataract, 113650 |
| 601653 | Branchiootorenal syndrome, 113650 |
| 601666 | Diabetes mellitus, insulin-dependent, 15 |
| 601676 | Acute insulin response |
| 601680 | Arthrogryposis multiplex congenita, distal, type |
| | 2B |
| 601682 | Glaucoma 1C, primary open angle |
| 601690 | Platelet-activating factor acetylhydrolase |
| | deficiency |
| 601690 | Asthma and atopy, susceptibility to, 147070 |
| 601691 | Macular dystrophy, age-related, 2, 153800 |
| 601691 | Retinitis pigmentosa-19, 601718 |
| 601691 | Stargardt disease-1, 248200 |
| 601691 | Cone-rod dystrophy 3 |
| 601691 | Fundus flavimaculatus, 248200 |
| 601692 | Corneal dystrophy, Avellino type |
| 601692 | Corneal dystrophy, Groenouw type I, 121900 |
| 601692 | Corneal dystrophy, Reis-Bucklers type, 121900 |
| 601692 | Corneal dystrophy, lattice type I, 122200 |
| 601692 | Corneal dystrophy, lattice type IIIA |
| 601693 | Obesity, susceptibility to |
| 601724 | Diabetes mellitus, noninsulin-dependent, 125853 |
| 601728 | Lhermitte-Duclos syndrome |
| 601728 | Meningioma, 156100 |
| 601728 | Oligodendroglioma, 137800 |
| 601728 | Bannayan-Riley-Ruvalcaba syndrome, 153480 |
| 601728 | Bannayan-Zonana syndrome, 153480 |
| 601728 | Thyroid carcinoma, follicular, 188470 |
| 601728 | Prostate cancer, susceptibility to, 176807 |
| 601728 | Cowden disease, 158350 |
| 601728 | Endometrial carcinoma |
| 601744 | Systemic lupus erythematosus, susceptibility to, |
| | 1, 152700 |
| 601749 | Glomuvenous malformations, 138000 |
| 601757 | Rhizomelic chondrodysplasia punctata, type 1, |
| | 215100 |
| 601762 | Non-hodgkin lymphoma, somatic, 605027 |
| 601762 | Autoimmune lymphoproliferative syndrome, type II, |
| | 603909 |
| 601768 | Leukemia, acute myeloid |
| 601769 | Osteoporosis, involutional |
| 601769 | Rickets, vitamin D-resistant, 277440 |
| 601771 | Glaucoma 3A, primary infantile, 231300 |
| 601771 | Peters anomaly, 604229 |
| 601785 | Carbohydrate-deficient glycoprotein syndrome, |
| | type I, 212065 |
| 601800 | [Hair color, brown] |
| 601802 | Septooptic dysplasia, 182230 |
| 601814 | Hypomagnesemia-2, renal, 154020 |
| 601825 | Leigh syndrome, 256000 |
| 601837 | LIG4 syndrome, 606593 |
| 601843 | Hypothyroidism, congenital, 274400 |
| 601844 | Pseudohypoaldosteronism type II |
| 601846 | Muscular dystrophy with rimmed vacuoles |
| 601863 | MHC class II deficiency, complementation group C, |
| | 209920 |
| 601889 | Lymphoma, diffuse large cell |
| 601900 | Multiple myeloma |
| 601916 | Pancreatic cancer, 260350 |
| 601928 | Monilethrix, 158000 |
| 601941 | Diabetes mellitus, insulin-dependent, 6 |
| 601969 | Glioblastoma multiforme, 137800 |
| 601969 | Medulloblastoma, 155255 |
| 601990 | Neuroblastoma |
| 601992 | Friedreich ataxia, 229300 |
| 602014 | Hypomagnesemia with secondary hypocalcemia |
| 602018 | Hirschsprung disease, 142623 |
| 602023 | Bartter syndrome, 241200 |
| 602023 | Bartter syndrome, antenatal, 601678 |
| 602025 | Obesity/hyperinsulinism, susceptibility to |
| 602049 | Neutrophil immunodeficiency syndrome |
| 602063 | Transaldolase deficiency, 606003 |
| 602066 | Convulsions, infantile and paroxysmal |
| | choreoathetosis |
| 602078 | Fibrosis of extraocular muscles, congenital, 2 |
| 602082 | Corneal dystrophy, Thiel-Behnke type |
| 602085 | Postaxial polydactyly, type A2 |
| 602086 | Arrhythmogenic right ventricular dysplasia-3 |
| 602087 | Arrhythmogenic right ventricular dysplasia-4 |
| 602088 | Nephronophthisis, infantile |
| 602089 | Hemangioma, capillary infantile |
| 602096 | Alzheimer disease-5 |
| 602099 | Amytrophic lateral sclerosis-5, juvenile |
| | recessive |
| 602109 | Epiphyseal dysplasia, multiple, 5, 607078 |
| 602116 | Glioma |
| 602117 | Prader-Willi syndrome, 176270 |
| 602121 | Deafness, autosomal dominant 1, 124900 |
| 602125 | Encephalopathy, progressive mitochondrial, |
| | with proximal renal tubulopathy due to |
| | cytochrome c oxidase deficiency |
| 602134 | Tremor, familial essential, 2 |
| 602136 | Refsum disease, infantile, 266510 |
| 602136 | Zellweger syndrome-1, 214100 |
| 602136 | Adrenoleukodystrophy, neonatal, 202370 |
| 602141 | Leigh syndrome, 256000 |
| 602146 | Short stature, pituitary and cerebellar defects, |
| | and small sella turcica, 606606 |
| 602153 | Monilethrix, 158000 |
| 602201 | Lipoid proteinosis, 247100 |
| 602216 | Peutz-Jeghers syndrome, 175200 |
| 602218 | Townes-Brocks syndrome, 107480 |
| 602221 | Stem-cell leukemia/lymphoma syndrome |
| 602225 | Leber congenital amaurosis, 204000 |
| 602225 | Retinitis pigmentosa, late-onset dominant, 268000 |
| 602225 | Cone-rod retinal dystrophy-2, 120970 |
| 602229 | Waardenburg-Shah syndrome, 277580 |
| 602229 | Waardenburg-Shah syndrome, neurologic variant |
| 602229 | Yemenite deaf-blind hypopigmentation syndrome, |
| | 601706 |
| 602279 | Oculopharyngeal muscular dystorphy, 164300 |
| 602279 | Oculopharyngeal muscular dystrophy, autosomal |
| | recessive, 257950 |
| 602280 | Retinitis pigmentosa-14, 600132 |
| 602290 | Muscular dystrophy, limb-girdle, type 2H, 254110 |
| 602302 | Atrichia with papular lesions, 209500 |
| 602302 | Alopecia universalis, 203655 |
| 602322 | Dyskeratosis congenita, 127550 |
| 602365 | Haim-Munk syndrome, 245010 |
| 602365 | Papillon-Lefevre syndrome, 245000 |
| 602397 | Cholestasis, benign recurrent intrahepatic, 243300 |
| 602397 | Cholestasis, progressive familial intrahepatic-1, |
| | 211600 |
| 602402 | Lymphedema-distichiasis syndrome, 153400 |
| 602404 | Parkinson disease, familial, 168600 |
| 602413 | Paragangliomas, familial nonchromaffin, 3, 605373 |
| 602438 | Cataract, Marner type, 116800 |
| 602438 | Cataract, lamellar, 116800 |
| 602439 | Leukemia, acute myelogenous |
| 602447 | Coronary artery disease, susceptibility to |
| 602460 | Deafness, autosomal dominant 15, 602459 |
| 602476 | Convulsions, familial febrile, 1 |
| 602477 | Convulsions, familial febrile, 2 |
| 602481 | Migraine, familial hemiplegic, 2 |
| 602491 | Hyperlipidemia, familial combined, 1 |
| 602544 | Parkinson disease, juvenile, type 2, 600116 |
| 602568 | Homocystinuria-megaloblastic anemia, cbl E type, |
| | 236270 |
| 602574 | Deafness, autosomal dominant 12, 601842 |
| 602574 | Deafness, autosomal dominant 8, 601543 |
| 602574 | Deafness, autosomal recessive 21, 603629 |
| 602575 | Nail-patella syndrome with open-angle glaucoma, |
| | 137750 |
| 602575 | Nail-patella syndrome, 161200 |
| 602594 | Retinitis pigmentosa-22 |
| 602616 | Carbohydrate-deficient glycoprotein syndrome, |
| | type II, 212066 |
| 602629 | Dystonia-6, torsion |
| 602631 | Lung cancer, 211980 |
| 602631 | Rhabdomyosarcoma, 268210 |
| 602631 | Breast cancer, 114480 |
| 602639 | Hypodontia, autosomal recessive |
| 602666 | Deafness, autosomal recessive 3, 600316 |
| 602667 | Leukemia, acute lymphoblastic |
| 602667 | Nijmegen breakage syndrome, 251260 |
| 602671 | Glycogen storage disease Ib, 232220 |
| 602671 | Glycogen storage disease Ic, 232240 |
| 602686 | Lymphoma, somatic |
| 602686 | Prostate cancer, somatic, 176807 |
| 602690 | Merkel cell carcinoma, somatic |
| 602690 | Paragangliomas, familial central nervous system, |
| | 168000 |
| 602690 | Paragangliomas, familial nonchromaffin, 1, with |
| | and without deafness, 168000 |
| 602690 | Pheochromocytoma, 171300 |
| 602690 | Carcinoid tumors, intestinal, 114900 |
| 602700 | Colorectal cancer, 114500 |
| 602716 | Nephrosis-1, congenital, Finnish type, 256300 |
| 602743 | Wolff-Parkinson-White syndrome, 194200 |
| 602743 | Cardiomyopathy, hypertrophic, with WPW, 600858 |
| 602759 | Prostate cancer, susceptibility to, 176807 |
| 602768 | Spondylocostal dysostosis, autosomal recessive, |
| | 1, 277300 |
| 602772 | Retinitis pigmentosa-25 |
| 602773 | Renal cell carcinoma 4 |
| 602783 | Spastic paraplegia-7 |
| 602858 | Smith-Lemli-Opitz syndrome, type I, 270400 |
| 602858 | Smith-Lemli-Opitz syndrome, type II, 268670 |
| 602900 | Immunodeficiency-centromeric instability-facial |
| | anomalies syndrome, 242860 |
| 602966 | Orofacial cleft-2 |
| 602991 | Symphalangism, proximal, 185800 |
| 602991 | Synostoses syndrome, multiple, 1, 186500 |
| 602991 | Tarsal-carpal coalition syndrome, 186570 |
| 602997 | Megaloblastic anemia-1, 261100 |
| 603005 | SEMD, Pakistani type |
| 603009 | Miyoshi myopathy, 254130 |
| 603009 | Muscular dystrophy, limb-girdle, type 2B, 253601 |
| 603009 | Myopathy, distal, with anterior tibial onset, |
| | 606768 |
| 603010 | Deafness, autosomal recessive 17 |
| 603025 | Leukemia, acute T-cell lymphoblastic |
| 603025 | Leukemia, acute myeloid |
| 603040 | Nonsmall cell lung cancer |
| 603045 | Osteosarcoma, 259500 |
| 603073 | Holoprosencephaly-5 |
| 603075 | Macular degeneration, age-related, 1 |
| 603098 | Deafness, autosomal recessive 13 |
| 603100 | Berardinelli-Seip congenital lipodystrophy-1, |
| | 269700 |
| 603113 | Lung cancer, 211980 |
| 603128 | Obesity, severe |
| 603164 | Zellweger syndrome, complementation group G, |
| | 214100 |
| 603175 | Schizophrenia, 181500 |
| 603176 | Schizophrenia, 181500 |
| 603178 | Methylmalonate semialdehyde dehydrogenase |
| | deficiency |
| 603194 | Meckel syndrome, type 2 |
| 603196 | Meniere disease, 156000 |
| 603196 | Deafness, autosomal dominant 9, 601369 |
| 603212 | Cataract, congenital, 604219 |
| 603212 | Cataract, juvenile-onset, 604219 |
| 603221 | Myopia-3 |
| 603234 | Pseudoxanthoma elasticum, autosomal dominant, |
| | 177850 |
| 603234 | Pseudoxanthoma elasticum, autosomal recessive, |
| | 264800 |
| 603273 | Hay-Wells syndrome, 106260 |
| 603273 | ADULT syndrome, 103285 |
| 603273 | Limb-mammary syndrome, 603543 |
| 603273 | Split-hand/foot malformation, type 4, 605289 |
| 603273 | Ectrodactyly, ectodermal dysplasia, and cleft |
| | lip/palate syndrome 3, 604292 |
| 603284 | Cerebral cavernous malformations-2 |
| 603285 | Cerebral cavernous malformations-3 |
| 603288 | Cornea plana congenita, recessive, 217300 |
| 603324 | Deafness, autosomal dominant 2, 600101 |
| 603324 | Deafness, autosomal dominant, with peripheral |
| | neuropathy |
| 603324 | Deafness, autosomal recessive |
| 603324 | Erythrokeratodermia variabilis, 133200 |
| 603335 | Kartagener syndrome, 244400 |
| 603335 | Primary ciliary dyskinesia, 242650 |
| 603342 | Schizophrenia, 181500 |
| 603345 | Renal tubular acidosis, proximal, with ocular |
| | abnormalities, 604278 |
| 603358 | GRACILE syndrome |
| 603383 | Glaucoma 1F |
| 603386 | Thyroid carcinoma, nonmedullary, with cell |
| | oxyphilia |
| 603388 | Graves disease, susceptibility to, 2 |
| 603400 | Arthropathy, progressive pseudorheumatoid, of |
| | childhood, 208230 |
| 603406 | Thyroid carcinoma, papillary, 188550 |
| 603426 | Advanced sleep phase syndrome, familial, 604348 |
| 603467 | Fanconi anemia, complementation group F |
| 603474 | Anemia, Diamond-Blackfan, 105650 |
| 603490 | XY female |
| 603506 | Osteoporosis-pseudoglioma syndrome, 259770 |
| 603506 | [Bone mineral density variability 1], 601884 |
| 603513 | Spastic cerebral palsy, symmetric |
| 603516 | Spinocerebellar ataxia-10 |
| 603517 | Lymphoma, MALT |
| 603517 | Lymphoma, follicular |
| 603517 | Mesothelioma |
| 603517 | Sezary syndrome |
| 603517 | Colon cancer |
| 603517 | Germ cell tumor |
| 603537 | Deafness, autosomal dominant 2, 600101 |
| 603563 | Spastic paraplegia-8 |
| 603590 | Meningioma |
| 603593 | Lysinuric protein intolerance, 222700 |
| 603612 | Squamous cell carcinoma, head and neck, 601400 |
| 603615 | Lymphoma, non-Hodgkin |
| 603615 | Breast cancer, invasive intraductal |
| 603615 | Colon adenocarcinoma |
| 603644 | Hepatic failure, early onset, and neurologic |
| | disorder |
| 603647 | Tubulopathy, encephalopathy, and liver failure |
| | due to complex III deficiency, 606104 |
| 603673 | Medulloblastoma, 155255 |
| 603673 | Basal cell carcinoma, somatic, 605462 |
| 603678 | Deafness, autosomal recessive 14 |
| 603680 | Spinocerebellar ataxia 8 |
| 603681 | Deafness, autosomal recessive 9, 601071 |
| 603688 | Prostate cancer-brain cancer susceptibility |
| 603689 | Myopathy, proximal, with early respiratory muscle |
| | involvement |
| 603694 | Diabetes mellitus, noninsulin-dependent, 125853 |
| 603707 | Molybdenum cofactor deficiency, type A, 252150 |
| 603714 | Holoprosencephaly-2, 157170 |
| 603758 | Tyrosinemia, type Ib |
| 603776 | Hypercholesterolemia, familial, 3 |
| 603780 | Rothmund-Thomson syndrome, 268400 |
| 603816 | Hepatocellular carcinoma, 114550 |
| 603824 | Inclusion body myopathy, autosomal recessive, |
| | 600737 |
| 603824 | Sialuria, 269921 |
| 603855 | Meconium ileus in cystic fibrosis, susceptibility |
| | to |
| 603859 | Citrullinemia, adult-onset type II, 603471 |
| 603859 | Citrullinemia, type II, neonatal-onset, 605814 |
| 603860 | Medullary cystic kidney disease 2 |
| 603868 | Griscelli syndrome, 214450 |
| 603945 | Leukoencephalopathy with vanishing white matter, |
| | 603896 |
| 603959 | Hypomagnesemia, primary, 248250 |
| 603964 | Deafness, autosomal dominant 16 |
| 603967 | Hyperkalemic periodic paralysis, 170500 |
| 603967 | Hypokalemic periodic paralysis, 170400 |
| 603967 | Myotonia congenita, atypical, acetazolamide- |
| | responsive, 170500 |
| 603967 | Paramyotonia congenita, 168300 |
| 603967 | Cramps, familial, potassium-aggravated |
| 603968 | Xeroderma pigmentosum, variant type, 278750 |
| 604025 | Colorectal cancer, 114500 |
| 604032 | Wolcott-Rallison syndrome, 226980 |
| 604050 | Lung cancer, 211980 |
| 604050 | Esophageal cancer, 133239 |
| 604054 | Pseudo-Zellweger syndrome, 261510 |
| 604061 | Leukemia, acute myeloid, therapy-related |
| 604061 | Ovarian carcinoma |
| 604095 | Ectodermal dysplasia, hypohidrotic, autosomal |
| | dominant, 129490 |
| 604095 | Ectodermal dysplasia, hypohidrotic, autosomal |
| | recessive, 224900 |
| 604103 | Muscular dystrophy, limb-girdle, type 1A, 159000 |
| 604142 | Polycystic lipomembranous osteodysplasia with |
| | sclerosing leukenencephalophathy, 221770 |
| 604144 | Cystinuria, type II |
| 604144 | Cystinuria, type III |
| 604149 | Dystonia, myoclonic, 159900 |
| 604168 | Congenital cataract, facial dysmorphism, and |
| | neuropathy syndrome |
| 604185 | Moebius syndrome-3 |
| 604187 | Spastic paraplegia-10 |
| 604201 | Hepatic fibrosis susceptibility due to |
| | Schistosoma mansoni infection |
| 604210 | Leber congenital amaurosis, 204000 |
| 604210 | Retinitis pigmentosa-12, autosomal recessive, |
| | 600105 |
| 604214 | Cerebral cavernous malformations-1, 116860 |
| 604272 | Cardioencephalomyopathy, fatal infantile, due to |
| | cytochrome c oxidase deficiency, 604377 |
| 604275 | Mental retardation in cri-du-chat syndrome, |
| | 123450 |
| 604277 | Spastic paraplegia-4, 182601 |
| 604283 | Camptodactyly-arthropathy-coxa vara-pericarditis |
| | syndrome, 208250 |
| 604285 | Hyperoxaluria, primary, type 1, 259900 |
| 604288 | Cardiomyopathy, dilated, 1H |
| 604289 | Lymphoma, non-Hodgkin |
| 604289 | Colon adenocarcinoma |
| 604313 | Galactokinase deficiency with cataracts, 230200 |
| 604317 | Microcephaly, autosomal recessive 2 |
| 604321 | Microcephaly, primary autosomal recessive, 4 |
| 604322 | Salla disease, 604369 |
| 604322 | Sialic acid storage disorder, infantile, 269920 |
| 604325 | Spinocerebellar ataxia 12, 604326 |
| 604327 | Ehlers-Danlos syndrome, progeroid form, 130070 |
| 604352 | Convulsions, familial febrile, 4 |
| 604360 | Spastic paraplegia-11 |
| 604364 | Epilepsy, partial, with variable foci |
| 604365 | Retinal degeneration, autosomal recessive, |
| | prominin-related |
| 604366 | Kartagener syndrome, 244400 |
| 604366 | Primary ciliary dyskinesia, 242650 |
| 604384 | Hailey-Hailey disease, 169600 |
| 604395 | Colon cancer, hereditary nonpolypopsis, 114500 |
| 604395 | Colorectal cancer, somatic, 114500 |
| 604400 | Arrhythmogenic right ventricular dysplasia-5 |
| 604401 | Arrhythmogenic right ventricular dysplasia-6 |
| 604403 | Convulsions, familial febrile, 3 |
| 604416 | PAPA syndrome |
| 604418 | Deafness, autosomal dominant 3, 601544 |
| 604418 | Deafness, nonsyndromic neurosensory, digenic |
| 604418 | Ectodermal dysplasia 2, hidrotic, 129500 |
| 604432 | Spinocerebellar ataxia-11 |
| 604433 | Hypokalemic periodic paralysis, 170400 |
| 604443 | Myelodysplastic syndrome |
| 604443 | Myelogenous leukemia, acute |
| 604454 | Welander distal myopathy |
| 604484 | Neuropathy, hereditary motor and sensory, |
| | Okinawa type |
| 604485 | Retinitis pigmentosa, late onset, 268000 |
| 604485 | Enhanced S-cone syndrome, 268100 |
| 604489 | Alpha-methylacyl-CoA racemase deficiency |
| 604490 | Spastic ataxia, Charlevoix-Saguenay type, 270550 |
| 604515 | Hypoglobulinemia and absent B cells |
| 604537 | Leber congenital amaurosis, 204000 |
| 604559 | Heart block, progressive familial, type I, 113900 |
| 604563 | Charcot-Marie-Tooth disease, type 4B, form 2 |
| 604584 | Hepatocellular cancer, 114550 |
| 604584 | Colorectal cancer, 114500 |
| 604590 | Lymphoma, progression of |
| 604592 | Osteopetrosis, recessive, 259700 |
| 604610 | Bloom syndrome, 210900 |
| 604611 | Werner syndrome, 277700 |
| 604614 | Adrenocorticotropic hormone deficiency, 201400 |
| 604619 | Glioblastoma, somatic, 137800 |
| 604619 | Epilepsy, partial, with auditory features, 600512 |
| 604638 | Glomerulosclerosis, focal segmental, 1, 603278 |
| 604641 | Diabetes mellitus, noninsulin-dependent, 125853 |
| 604653 | Hemochromatosis, 606069 |
| 604684 | Leukemia, acute myelomonocytic |
| 604705 | Retinitis pigmentosa, MERTK-related, 268000 |
| 604717 | Deafness, autosomal dominant 20 |
| 604720 | Hemochromatosis, 604250 |
| 604763 | Leukemia, acute myeloid |
| 604766 | Nephrotic syndrome, steroid-resistant, 600995 |
| 604780 | Chanarin-Dorfman syndrome, 275630 |
| 604781 | Ichthyosis, nonlamellar and nonerythrodermic, |
| | congenital |
| 604805 | Spastic paraplegia-12 |
| 604809 | Panbronchiolitis, diffuse |
| 604827 | Epilepsy, juvenile myoclonic |
| 604860 | MALT lymphoma |
| 604901 | Cirrhosis, North American Indian childhood type |
| 604906 | Schizophrenia, 181500 |
| 604928 | Wolfram syndrome 2 |
| 604933 | Adenomatous polyposis of the colon, |
| | susceptibility to, 175100 |
| 604982 | Hermansky-Pudlak syndrome, 203300 |
| 605010 | Netherton syndrome, 256500 |
| 605010 | Atopy, 147050 |
| 605013 | Microhydranencephaly |
| 605018 | Cylindromatosis, familial, 132700 |
| 605019 | Hypobetalipoproteinemia, familial, 2 |
| 605041 | Spiegler-Brooke syndrome |
| 605073 | Mulibrey nanism, 253250 |
| 605080 | Achromatopsia-3, 262300 |
| 605113 | Hyperlysinemia, 238700 |
| 605113 | Saccharopinuria, 268700 |
| 605131 | Esophageal squamous cell carcinoma, 133239 |
| 605145 | Craniometaphyseal dysplasia, 123000 |
| 605192 | Deafness, autosomal dominant 23 |
| 605193 | Ovarian cancer |
| 605201 | Hypoalphalipoproteinemia, primary |
| 605218 | Systemic lupus erythematosus, susceptibility to, |
| | 2, 152700 |
| 605225 | Inflammatory bowel disease-7, 266600 |
| 605229 | Spastic paraplegia 14, autosomal recessive |
| 605232 | Pseudohypoaldosteronism, type IIC |
| 605238 | Asthma, susceptibility to |
| 605239 | Renal tubular acidosis, distal, autosomal |
| | recessive, 602722 |
| 605242 | Usher syndrome, type 1C, 276904 |
| 605242 | Deafness, autosomal recessive 18, 602092 |
| 605248 | Mucolipidosis IV, 252650 |
| 605257 | Immunodeficiency with hyper-IgM, type 2, 605258 |
| 605259 | Spinocereballar ataxia-13 |
| 605260 | Charcot-Marie-Tooth disease, type 4F |
| 605262 | Neuropathy, hereditary motor and sensory, Lom |
| | type, 601455 |
| 605268 | Huntington disease-like 2, 606438 |
| 605285 | Neuropathy, motor and sensory, Russe type |
| 605286 | Diabetes mellitus, non-insulin dependent, 1, |
| | 601283 |
| 605290 | Optic atrophy 1, 165500 |
| 605290 | Glaucoma, normal tension, susceptibility to, |
| | 606657 |
| 605293 | Optic atrophy-4 |
| 605294 | Macular corneal dystrophy, 217800 |
| 605317 | Speech-language disorder-1, 602081 |
| 605361 | Spinocerebellar ataxia-14 |
| 605362 | Cardiomyopathy, dilated, 1J |
| 605364 | Psoriasis, susceptibility to, 177900 |
| 605365 | Breast cancer, type 3 |
| 605370 | Leukemia, juvenile myelomonocytic |
| 605377 | Myotonic dystrophy, 160900 |
| 605378 | Achalasia-addisonianism-alacrimia syndrome, |
| | 231550 |
| 605379 | Giant axonal neuropathy-1, 256850 |
| 605392 | Myeloproliferative disorder |
| 605420 | Parietal foramina 2, 168500 |
| 605423 | Gonadal dysgenesis, 46XY, partial, with |
| | minifascicular neuropathy, 607080 |
| 605425 | Erythrokeratodermia variabilis with erythema |
| | gyratum repens, 133200 |
| 605441 | Adiponectin deficiency |
| 605459 | Sitosterolemia, 210250 |
| 605460 | Sitosterolemia, 210250 |
| 605463 | Radiation sensitivity/chromosome instability |
| | syndrome, autosomal dominant |
| 605472 | Usher syndrome, type 2C |
| 605480 | Systemic lupus erythematosus, susceptibility to, |
| | 3, 152700 |
| 605481 | Microcephaly, primary autosomal recessive, 5 |
| 605511 | Deafness, autosomal recessive 10, congenital, |
| | 605316 |
| 605511 | Deafness, autosomal recessive 8, childhood onset, |
| | 601072 |
| 605512 | Macular dystrophy, autosomal dominant, chromosome |
| | 6-linked, 600110 |
| 605512 | Stargardt disease 3, 600110 |
| 605514 | Usher syndrome, type 1F, 602083 |
| 605516 | Usher syndrome, type 1D, 601067 |
| 605516 | Deafness, autosomal recessive 12, 601386 |
| 605522 | Acheiropody, 200500 |
| 605526 | Alzheimer disease 6, 104300 |
| 605544 | Fibromatosis, gingival, 2, 135300 |
| 605549 | Cone-rod dystrophy 8 |
| 605552 | Abdominal obesity-metabolic syndrome |
| 605582 | Cardiomyopathy, dilated, 1K |
| 605583 | Deafness, autosomal dominant 25 |
| 605588 | Charcot-Marie-Tooth disease, type 2B1 |
| 605589 | Charcot-Marie-Tooth disease, type 2B2 |
| 605598 | Diabetes mellitus, insulin-dependent, 18 |
| 605608 | Deafness, autosomal recessive 29 |
| 605617 | Split hand/foot malformation type 1 with deafness |
| 605635 | Hyperaldosteronism, familial, type II |
| 605642 | Thyroid carcinoma, papillary, with papillary |
| | renal neoplasia |
| 605646 | Pendred syndrome, 274600 |
| 605646 | Deafness, autosomal recessive 4, 600791 |
| 605646 | Enlarged vestibular aqueduct, 603545 |
| 605711 | Multiple mitochondrial dysfunctions syndrome |
| 605712 | Neuropathy, hereditary sensory and autonomic, |
| | type 1, 162400 |
| 605725 | Dejerine-Sottas neuropathy, autosomal recessive, |
| | 145900 |
| 605726 | Neuropathy, distal hereditary motor, Jerash type |
| 605727 | Otosclerosis-2 |
| 605728 | Cataract, central saccular, with sutural |
| | opacities |
| 605738 | Nanophthalmos 2 |
| 605746 | Anisomastia |
| 605747 | Hypercholesterolemia, familial, autosomal |
| | recessive, 603813 |
| 605750 | Exudative vitreoretinopathy-3 |
| 605751 | Convulsions, benign familial infantile, 2 |
| 605769 | Thyroid carcinoma, papillary, 188550 |
| 605779 | Nail dysplasia, isolated congenital |
| 605803 | Dermatitis, atopic, 603165 |
| 605805 | Dermatitis, atopic, 603165 |
| 605809 | Myasthenia gravis, familial infantile, 1, 254210 |
| 605818 | Deafness, autosomal recessive 27 |
| 605828 | Epidermodysplasia verruciformis, 226400 |
| 605841 | Narcolepsy, 161400 |
| 605844 | Dermatitis, atopic, 603165 |
| 605845 | Dermatitis, atopic, 603165 |
| 605882 | Breast cancer, early-onset, 114480 |
| 605909 | Parkinson disease, 168600 |
| 605934 | Holoprosencephaly-6, 236100 |
| 605956 | Blau syndrome, 186580 |
| 605956 | Crohn disease, 266600 |
| 605967 | Acropectoral syndrome |
| 605990 | Nephrolithiasis, uric acid |
| 606068 | Retinitis pigmentosa-28 |
| 606075 | Progressive external ophthalmoplegia with |
| | mitochondrial DNA deletions, 157640 |
| 606077 | Megakaryoblastic leukemia, acute |
| 606078 | Megakaryoblastic leukemia, acute |
| 606082 | Goiter, multinodular, 3 |
| 606118 | Hermansky-Pudlak syndrome, 203300 |
| 606129 | Anemia, Diamond-Blackfan, 105650 |
| 606157 | Neurodegeneration, pantothenate kinase-associated, |
| | 234200 |
| 606158 | Berardinelli-Seip congenital lipodystrophy-2, |
| | 269700 |
| 606179 | Aneurysmal bone cysts |
| 606210 | Muscular dystrophy, rigid spine, 1, 602771 |
| 606215 | Atrioventricular canal defect, 600309 |
| 606263 | Paget disease of bone, 602080 |
| 606272 | Cystinosis, late-onset juvenile or adolescent |
| | nephropathic, 219900 |
| 606272 | Cystinosis, nephropathic, 219800 |
| 606272 | Cystinosis, ocular nonnephropathic, 219750 |
| 606324 | Parkinson disease, 168600 |
| 606325 | Heterotaxy, visceral |
| 606348 | Inflammatory bowel disease-5, 266600 |
| 606352 | Amyotrophic lateral sclerosis, juvenile, 205100 |
| 606352 | Primary lateral sclerosis, juvenile, 606353 |
| 606364 | Spinocerebellar ataxia 16 |
| 606397 | Usher syndrome, type 3, 276902 |
| 606412 | Bartter syndrome, infantile, with sensorineural |
| | deafness, 602522 |
| 606418 | Desmosterolosis, 602398 |
| 606419 | Retinitis pigmentosa-11, 600138 |
| 606439 | Spastic paraplegia-3A, 182600 |
| 606451 | Deafness, autosomal dominant 30 |
| 606460 | [Longevity], 152430 |
| 606463 | Gaucher disease with cardiovascular calcification, |
| | 231005 |
| 606463 | Gaucher disease, 230800 |
| 606521 | Microcephaly, Amish type, 607196 |
| 606530 | Cerebrotendinous xanthomatosis, 213700 |
| 606531 | Asthma, susceptibility to, 600807 |
| 606545 | Ichthyosis, lamellar, 5 |
| 606551 | Esophageal squamous cell carcinoma, 133239 |
| 606579 | Systemic lupus erythematosus, vitiligo-related, |
| | susceptibility to, 1 |
| 606580 | 3-methylglutaconicaciduria, type III, 258501 |
| 606585 | Amelogenesis imperfecta 2, hypoplastic local, |
| | 104500 |
| 606595 | Charcot-Marie-Tooth disease, type 2F |
| 606596 | Muscular dystrophy, congenital, 1C |
| 606596 | Muscular dystrophy, limb-girdle, type 2I, 607155 |
| 606598 | Neuropathy, axonal, with vocal cord paresis, |
| | autosomal recessive, 214400 |
| 606598 | Charcot-Marie-Tooth neuropathy-4A, 214400 |
| 606622 | Schimke immunoosseous dysplasia, 242900 |
| 606628 | Glycine N-methyltransferase deficiency, 606664 |
| 606640 | Amyotrophic lateral sclerosis, 105400 |
| 606642 | [Body mass index], 606641 |
| 606660 | Melanoma, uveal, susceptibility to, 1 |
| 606662 | Waardenburg syndrome, type IIC |
| 606674 | Inflammatory bowel disease-6, 266600 |
| 606675 | Inflammatory bowel disease-4, 266600 |
| 606682 | Hermansky-Pudlak syndrome, 203300 |
| 606693 | Kufor-Rakeb syndrome |
| 606702 | Polycystic kidney and hepatic disease, 263200 |
| 606713 | van der Woude syndrome 2 |
| 606718 | Atelosteogenesis II, 256050 |
| 606718 | Achondrogenesis Ib, 600972 |
| 606718 | Diastrophic dysplasia, 222600 |
| 606718 | Epiphyseal dysplasia, multiple, 226900 |
| 606725 | Ceroid-lipofuscinosis, neuronal-6, variant late |
| | infantile, 601780 |
| 606761 | Malonyl-CoA decarboxylase deficiency, 248360 |
| 606763 | Ciliary diskinesia, primary, 2, 242650 |
| 606787 | Peripheral arterial occlusive disease 1 |
| 606800 | Glycogen storage disease II, 232300 |
| 606808 | Deafness, autosomal recessive 30, 607101 |
| 606811 | Hyperprolinemia, type II, 239510 |
| 606822 | Muscle-eye-brain disease, 253280 |
| 606844 | Alstrom syndrome, 203800 |
| 606847 | Treacher Collins mandibulofacial dysostosis, |
| | 154500 |
| 606850 | Mirror-image polydactyly, 135750 |
| 606854 | Polymicrogyria, bilateral frontoparietal |
| 606856 | Pancreatic cancer, 1, 260350 |
| 606857 | Hemolytic anemia due to gamma-glutamylcysteine |
| | synthetase deficiency, 230450 |
| 606859 | Spastic paraplegia-15 |
| 606860 | Angioedema, hereditary, 106100 |
| 606869 | Tay-Sachs disease, 272800 |
| 606869 | [Hex A pseudodeficiency], 272800 |
| 606869 | GM2-gangliosidosis, several forms, 272800 |
| 606873 | Sandhoff disease, infantile, juvenile, and adult |
| | forms, 268800 |
| 606873 | Spinal muscular atrophy, juvenile |
| 606874 | Hirschsprung disease, short-segment, 2 |
| 606882 | Wilson disease, 277900 |
| 606885 | Acyl-CoA dehydrogenase, short-chain, deficiency |
| | of, 201470 |
| 606896 | Dyslexia, specific, 5 |
| 606897 | Chediak-Higashi syndrome, 214500 |
| 606928 | [Bone mineral density variability 3], 601884 |
| 606933 | Waardenburg syndrome/albinism, digenic, 103470 |
| 606933 | Albinism, oculocutaneous, type IA, 203100 |
| 606933 | Albinism, oculocutaneous, type IB, 606952 |
| 606937 | Cerebellar ataxia with mental retardation, |
| | optic atrophy, and skin abnormalities |
| 606938 | Porphyria, congenital erythropoietic, 263700 |
| 606943 | Usher syndrome, type 1G |
| 606945 | Hypercholesterolemia, familial, 143890 |
| 606953 | Galactose epimerase deficiency, 230350 |
| 606967 | Norum disease, 245900 |
| 606967 | Fish-eye disease, 136120 |
| 606996 | Senior-Loken syndrome 4 |
| 607004 | Brachydactyly, type A1, 112500 |
| 607008 | Acyl-CoA dehydrogenase, medium chain, deficiency |
| | of, 201450 |
| 607034 | Fibrosis of extraocular muscles, congenital, 3A |
| 607035 | Medulloblastoma, desmoplastic, 155255 |
| 607037 | Peroxisomal bifunctional enzyme deficiency, |
| | 261515 |
| 607038 | Deafness, autosomal recessive 22, 607039 |
| 607042 | Ceroid-lipofuscinosis, neuronal-3, juvenile, |
| | 204200 |
| 607047 | Machado-Joseph disease, 109150 |
| 607059 | Acrodermatitis enteropathica, 201100 |
| 607060 | Parkinson disease, 168600 |
| 607071 | Mucopolysaccharidosis type IX, 601492 |
| 607085 | Myasthenia gravis with thymus hyperplasia |
| 607086 | Aortic aneurysm, familial thoracic 1 |
| 607087 | Aortic aneurysm, familial thoracic 2 |
| 607088 | Spinal muscular atrophy, chronic distal, |
| | autosomal recessive |
| 607093 | Homocystinuria due to MTHFR deficiency, 236250 |
| 607096 | Hypouricemia, renal, 220150 |
| 607108 | Keratitis, 148190 |
| 607108 | Aniridia, type II, 106210 |
| 607108 | Peters anomaly, 603807 |
| 607108 | Cataract, congenital, with late-onset corneal |
| | dystrophy |
| 607108 | Ectopia pupillae, 129750 |
| 607108 | Eye anomalies, multiplex |
| 607108 | Foveal hypoplasia, isolated, 136520 |
| 607111 | Troyer syndrome, 275900 |
| 607117 | Microcephaly, autosomal recessive 1, 251200 |
| 607131 | Macrocephaly with multiple epiphyseal dysplasia |
| | and distinctive facies |
| 607151 | Moyamoya disease 2 |
| 607154 | Allergic rhinitis |
| 607199 | Popliteal pterygium syndrome, 119500 |
| 607199 | van der Woude syndrome, 119300 |

[0110] Polynucleotide and Polypeptide Variants

[0111] The present invention is also directed to variants of the polynucleotide sequence disclosed in SEQ ID NO:X or the complementary strand thereto, nucleotide sequences encoding the polypeptide of SEQ ID NO:Y, the nucleotide sequence of SEQ ID NO:X encoding the polypeptide sequence as defined in column 7 of Table 1, nucleotide sequences encoding the polypeptide as defined in column 7 of Table 1, the nucleotide sequence as defined in columns 8 and 9 of Table 2, nucleotide sequences encoding the polypeptide encoded by the nucleotide sequence as defined in columns 8 and 9 of Table 2, the cDNA sequence contained in Clone ID NO:Z, and/or nucleotide sequences encoding a polypeptide encoded by the cDNA sequence contained in Clone ID NO:Z.

[0112] The present invention also encompasses variants of the polypeptide sequence disclosed in SEQ ID NO:Y, a polypeptide sequence as defined in column 7 of Table 1, a polypeptide sequence encoded by the polynucleotide sequence in SEQ ID NO:X, a polypeptide sequence encoded by the nucleotide sequence as defined in columns 8 and 9 of Table 2, a polypeptide sequence encoded by the complement of the polynucleotide sequence in SEQ ID NO:X, and/or a polypeptide sequence encoded by the cDNA sequence contained in Clone ID NO:Z.

[0113] “Variant” refers to a polynucleotide or polypeptide differing from the polynucleotide or polypeptide of the present invention, but retaining essential properties thereof. Generally, variants are overall closely similar, and, in many regions, identical to the polynucleotide or polypeptide of the present invention.

[0114] Thus, one aspect of the invention provides an isolated nucleic acid molecule comprising, or alternatively consisting of, a polynucleotide having a nucleotide sequence selected from the group consisting of: (a) a nucleotide sequence described in SEQ ID NO:X or contained in the cDNA sequence of Clone ID NO:Z; (b) a nucleotide sequence in SEQ ID NO:X or the cDNA in Clone ID NO:Z which encodes a mature polypeptide of the invention; (c) a nucleotide sequence in SEQ ID NO:X or the cDNA sequence of Clone ID NO:Z, which encodes a biologically active fragment of a polypeptide of the invention; (d) a nucleotide sequence in SEQ ID NO:X or the cDNA sequence of Clone ID NO:Z, which encodes an antigenic fragment of a polypeptide of the invention; (e) a nucleotide sequence encoding a polypeptide of the invention having the complete amino acid sequence of SEQ ID NO:Y or the complete amino acid sequence encoded by the cDNA in Clone ID NO:Z; (f) a nucleotide sequence encoding a mature polypeptide of the amino acid sequence of SEQ ID NO:Y or the amino acid sequence encoded by the cDNA in Clone ID NO:Z; (g) a nucleotide sequence encoding a biologically active fragment of a polypeptide of the invention having the complete amino acid sequence of SEQ ID NO:Y or the complete amino acid sequence encoded by the cDNA in Clone ID NO:Z; (h) a nucleotide sequence encoding an antigenic fragment of a polypeptide having the complete amino acid sequence of SEQ ID NO:Y or the complete amino acid sequence encoded by the cDNA in Clone ID NO:Z; and (i) a nucleotide sequence complementary to any of the nucleotide sequences in (a), (b), (c), (d), (e), (f), (g), or (h), above.

[0115] The present invention is also directed to nucleic acid molecules which comprise, or alternatively consist of, a nucleotide sequence which is at least 80%, 85%, 90%, 95%, 96%, 97%, 98%, 99% or 100%, identical to, for example, any of the nucleotide sequences in (a), (b), (c), (d), (e), (f), (g), (h), or (i) above, the nucleotide coding sequence in SEQ ID NO:X or the complementary strand thereto, the nucleotide coding sequence of the cDNA contained in Clone ID NO:Z or the complementary strand thereto, a nucleotide sequence encoding the polypeptide of SEQ ID NO:Y, a nucleotide sequence encoding a polypeptide sequence encoded by the nucleotide sequence in SEQ ID NO:X, a polypeptide sequence encoded by the complement of the polynucleotide sequence in SEQ ID NO:X, a nucleotide sequence encoding the polypeptide encoded by the cDNA contained in Clone ID NO:Z, the nucleotide coding sequence in SEQ ID NO:X as defined in columns 8 and 9 of Table 2 or the complementary strand thereto, a nucleotide sequence encoding the polypeptide encoded by the nucleotide sequence in SEQ ID NO:X as defined in columns 8 and 9 of Table 2 or the complementary strand thereto, the nucleotide sequence in SEQ ID NO:X encoding the polypeptide sequence as defined in column 7 of Table 1 or the complementary strand thereto, nucleotide sequences encoding a polypeptide as defined in column 7 of Table 1 or the complementary strand thereto, and/or polynucleotide fragments of any of these nucleic acid molecules (e.g., those fragments described herein). Polynucleotides which hybridize to the complement of these nucleic acid molecules under stringent hybridization conditions or alternatively, under lower stringency conditions, are also encompassed by the invention, as are polypeptides encoded by these polynucleotides and nucleic acids.

[0116] In a preferred embodiment, the invention encompasses nucleic acid molecules which comprise, or alternatively, consist of a polynucleotide which hybridizes tinder stringent hybridization conditions, or alternatively, under lower stringency conditions, to a polynucleotide in (a), (b), (c), (d), (e), (f), (g), (h), or (i) above, as are polypeptides encoded by these polynucleotides. In another preferred embodiment, polynucleotides which hybridize to the complement of these nucleic acid molecules under stringent hybridization conditions or alternatively, under lower stringency conditions, are also encompassed by the invention, as are polypeptides encoded by these polynucleotides.

[0117] In another embodiment, the invention provides a purified protein comprising, or alternatively consisting of, a polypeptide having an amino acid sequence selected from the group consisting of: (a) the complete amino acid sequence of SEQ ID NO:Y or the complete amino acid sequence encoded by the cDNA in Clone ID NO:Z; (b) the amino acid sequence of a mature polypeptide having the amino acid sequence of SEQ ID NO:Y or the amino acid sequence encoded by the cDNA in Clone ID NO:Z; (c) the amino acid sequence of a biologically active fragment of a polypeptide having the complete amino acid sequence of SEQ ID NO:Y or the complete amino acid sequence encoded by the cDNA in Clone ID NO:Z; and (d) the amino acid sequence of an antigenic fragment of a polypeptide having the complete amino acid sequence of SEQ ID NO:Y or the complete amino acid sequence encoded by the cDNA in Clone ID NO:Z.

[0118] The present invention is also directed to proteins which comprise, or alternatively consist of, an amino acid sequence which is at least 80%, 85%, 90%, 95%, 96%, 97%, 98%, 99% or 100%, identical to, for example, any of the amino acid sequences in (a), (b), (c), or (d), above, the amino acid sequence shown in SEQ ID NO:Y, the amino acid sequence encoded by the cDNA contained in Clone ID NO:Z, the amino acid sequence of the polypeptide encoded by the nucleotide sequence in SEQ ID NO:X as defined in columns 8 and 9 of Table 2, the amino acid sequence as defined in column 7 of Table 1, an amino acid sequence encoded by the nucleotide sequence in SEQ ID NO:X, and an amino acid sequence encoded by the complement of the polynucleotide sequence in SEQ ID NO:X. Fragments of these polypeptides are also provided (e.g., those fragments described herein). Further proteins encoded by polynucleotides which hybridize to the complement of the nucleic acid molecules encoding these amino acid sequences under stringent hybridization conditions or alternatively, under lower stringency conditions, are also encompassed by the invention, as are the polynucleotides encoding these proteins.

[0119] By a nucleic acid having a nucleotide sequence at least, for example, 95% “identical” to a reference nucleotide sequence of the present invention, it is intended that the nucleotide sequence of the nucleic acid is identical to the reference sequence except that the nucleotide sequence may include up to five point mutations per each 100 nucleotides of the reference nucleotide sequence encoding the polypeptide. In other words, to obtain a nucleic acid having a nucleotide sequence at least 95% identical to a reference nucleotide sequence, up to 5% of the nucleotides in the reference sequence may be deleted or substituted with another nucleotide, or a number of nucleotides up to 5% of the total nucleotides in the reference sequence may be inserted into the reference sequence. The query sequence may be an entire sequence referred to in Table 1 or 2 as the ORF (open reading frame), or any fragment specified, as described herein.

[0120] As a practical matter, whether any particular nucleic acid molecule or polypeptide is at least 80%, 85%, 90%, 95%, 96%, 97%, 98% or 99% identical to a nucleotide sequence of the present invention can be determined conventionally using known computer programs. A preferred method for determining the best overall match between a query sequence (a sequence of the present invention) and a subject sequence, also referred to as a global sequence alignment, can be determined using the FASTDB computer program based on the algorithm of Brutlag et al. (Comp. App. Biosci. 6:237-245 (1990)). In a sequence alignment the query and subject sequences are both DNA sequences. An RNA sequence can be compared by converting U's to T's. The result of said global sequence alignment is expressed as percent identity. Preferred parameters used in a FASTDB alignment of DNA sequences to calculate percent identity are: Matrix=Unitary, k-tuple=4, Mismatch Penalty=1, Joining Penalty=30, Randomization Group Length=0, Cutoff Score=1, Gap Penalty=5, Gap Size Penalty 0.05, Window Size=500 or the length of the subject nucleotide sequence, whichever is shorter.

[0121] If the subject sequence is shorter than the query sequence because of 5′ or 3′ deletions, not because of internal deletions, a manual correction must be made to the results. This is because the FASTDB program does not account for 5′ and 3′ truncations of the subject sequence when calculating percent identity. For subject sequences truncated at the 5′ or 3′ ends, relative to the query sequence, the percent identity is corrected by calculating the number of bases of the query sequence that are 5′ and 3′ of the subject sequence, which are not matched/aligned, as a percent of the total bases of the query sequence. Whether a nucleotide is matched/aligned is determined by results of the FASTDB sequence alignment. This percentage is then subtracted from the percent identity, calculated by the above FASTDB program using the specified parameters, to arrive at a final percent identity score. This corrected score is what is used for the purposes of the present invention. Only bases outside the 5′ and 3′ bases of the subject sequence, as displayed by the FASTDB alignment, which are not matched/aligned with the query sequence, are calculated for the purposes of manually adjusting the percent identity score.

[0122] For example, a 90 base subject sequence is aligned to a 100 base query sequence to determine percent identity. The deletions occur at the 5′ end of the subject sequence and therefore, the FASTDB alignment does not show a matched/alignment of the first 10 bases at 5′ end. The 10 unpaired bases represent 10% of the sequence (number of bases at the 5′ and 3′ ends not matched/total number of bases in the query sequence) so 10% is subtracted from the percent identity score calculated by the FASTDB program. If the remaining 90 bases were perfectly matched the final percent identity would be 90%. In another example, a 90 base subject sequence is compared with a 100 base query sequence. This time the deletions are internal deletions so that there are no bases on the 5′ or 3′ of the subject sequence which are not matched/aligned with the query. In this case the percent identity calculated by FASTDB is not manually corrected. Once again, only bases 5′ and 3′ of the subject sequence which are not matched/aligned with the query sequence are manually corrected for. No other manual corrections are to be made for the purposes of the present invention.

[0123] By a polypeptide having an amino acid sequence at least, for example, 95% “identical” to a query amino acid sequence of the present invention, it is intended that the amino acid sequence of the subject polypeptide is identical to the query sequence except that the subject polypeptide sequence may include up to five amino acid alterations per each 100 amino acids of the query amino acid sequence. In other words, to obtain a polypeptide having an amino acid sequence at least 95% identical to a query amino acid sequence, up to 5% of the amino acid residues in the subject sequence may be inserted, deleted, (indels) or substituted with another amino acid. These alterations of the reference sequence may occur at the amino or carboxy terminal positions of the reference amino acid sequence or anywhere between those terminal positions, interspersed either individually among residues in the reference sequence or in one or more contiguous groups within the reference sequence.

[0124] As a practical matter, whether any particular polypeptide is at least 80%, 85%, 90%, 95%, 96%, 97%, 98% or 99% identical to, for instance, the amino acid sequence of a polypeptide referred to in Table 1 (e.g., an amino acid sequence of the polypeptide identified in columns 5 or 6) or Table 2 (e.g., the amino acid sequence encoded by the polynucleotide sequence defined in columns 8 and 9 of Table 2),) or a fragment thereof, the amino acid sequence of the polypeptide encoded by the nucleotide sequence in SEQ ID NO:X or a fragment thereof, or an amino acid sequence of the polypeptide encoded by cDNA contained in Clone ID NO:Z, or a fragment thereof, can be determined conventionally using known computer programs. A preferred method for determining the best overall match between a query sequence (a sequence of the present invention) and a subject sequence, also referred to as a global sequence alignment, can be determined using the FASTDB computer program based on the algorithm of Brutlag et al. (Comp. App. Biosci.6:237-245 (1990)). In a sequence alignment the query and subject sequences are either both nucleotide sequences or both amino acid sequences. The result of said global sequence alignment is expressed as percent identity. Preferred parameters used in a FASTDB amino acid alignment are: Matrix=PAM 0, k-tuple=2, Mismatch Penalty=1, Joining Penalty=20, Randomization Group Length=0, Cutoff Score-1, Window Size=sequence length, Gap Penalty=5, Gap Size Penalty=0.05, Window Size=500 or the length of the subject amino acid sequence, whichever is shorter.

[0125] If the subject sequence is shorter than the query sequence due to N- or C-terminal deletions, not because of internal deletions, a manual correction must be made to the results. This is because the FASTDB program does not account for N- and C-terminal truncations of the subject sequence when calculating global percent identity. For subject sequences truncated at the N- and C-termini, relative to the query sequence, the percent identity is corrected by calculating the number of residues of the query sequence that are N- and C-terminal of the subject sequence, which are not matched/aligned with a corresponding subject residue, as a percent of the total bases of the query sequence. Whether a residue is matched/aligned is determined by results of the FASTDB sequence alignment. This percentage is then subtracted from the percent identity, calculated by the above FASTDB program using the specified parameters, to arrive at a final percent identity score. This final percent identity score is what is used for the purposes of the present invention. Only residues to the N- and C-termini of the subject sequence, which are not matched/aligned with the query sequence, are considered for the purposes of manually adjusting the percent identity score. That is, only query residue positions outside the farthest N- and C-terminal residues of the subject sequence.

[0126] For example, a 90 amino acid residue subject sequence is aligned with a 100 residue query sequence to determine percent identity. The deletion occurs at the N-terminus of the subject sequence and therefore, the FASTDB alignment does not show a matching/alignment of the first 10 residues at the N-terminus. The 10 unpaired residues represent 10% of the sequence (number of residues at the N- and C-termini not matched/total number of residues in the query sequence) so 10% is subtracted from the percent identity score calculated by the FASTDB program. If the remaining 90 residues were perfectly matched the final percent identity would be 90%. In another example, a 90 residue subject sequence is compared with a 100 residue query sequence. This time the deletions are internal deletions so there are no residues at the N- or C-termini of the subject sequence which are not matched/aligned with the query. In this case the percent identity calculated by FASTDB is not manually corrected. Once again, only residue positions outside the N- and C-terminal ends of the subject sequence, as displayed in the FASTDB alignment, which are not matched/aligned with the query sequence are manually corrected for. No other manual corrections are to be made for the purposes of the present invention.

[0127] The polynucleotide variants of the invention may contain alterations in the coding regions, non-coding regions, or both. Especially preferred are polynucleotide variants containing alterations, which produce silent substitutions, additions, or deletions, but do not alter the properties or activities of the encoded polypeptide. Nucleotide variants produced by silent substitutions due to the degeneracy of the genetic code are preferred. Moreover, polypeptide variants in which less than 50, less than 40, less than 30, less than 20, less than 10, or 5-50, 5-25, 5-10, 1-5, or 1-2 amino acids are su deleted, or added in any combination are also preferred. Polynucleotide variants can be produced for a variety of reasons, e.g., to optimize codon expression for a particular host (change codons in the human mRNA to those preferred by a bacterial host such as E. coli).

[0128] Naturally occurring variants are called “allelic variants,” and refer to one of several alternate forms of a gene occupying a given locus on a chromosome of an organism. (Genes II, Lewin, B., ed., John Wiley & Sons, New York (1985).) These allelic variants can vary at either the polynucleotide and/or polypeptide level and are included in the present invention. Alternatively, non-naturally occurring variants may be produced by mutagenesis techniques or by direct synthesis.

[0129] Using known methods of protein engineering and recombinant DNA technology, variants may be generated to improve or alter the characteristics of the polypeptides of the present invention. For instance, one or more amino acids can be deleted from the N-terminus or C-terminus of the polypeptides of the present invention without substantial loss of biological function. As an example, the authors of Ron et al., J. Biol. Chem. 268: 2984-2988 (1993), reported variant KGF proteins having heparin binding activity even after deleting 3, 8, or 27 amino-terminal amino acid residues. Similarly, Interferon gamma exhibited up to ten times higher activity after deleting 8-10 amino acid residues from the carboxy terminus of this protein. (Dobeli et al., J. Biotechnology 7:199-216 (1988).)

[0130] Moreover, ample evidence demonstrates that variants often retain a biological activity similar to that of the naturally occurring protein. For example, Gayle and coworkers (J. Biol. Chem. 268:22105-22111 (1993)) conducted extensive mutational analysis of human cytokine IL-1a. They used random mutagenesis to generate over 3,500 individual IL-1a mutants that averaged 2.5 amino acid changes per variant over the entire length of the molecule. Multiple mutations were examined at every possible amino acid position. The investigators found that “[m]ost of the molecule could be altered with little effect on either [binding or biological activity].” In fact, only 23 unique amino acid sequences, out of more than 3,500 nucleotide sequences examined, produced a protein that significantly differed in activity from wild-type.

[0131] Furthermore, even if deleting one or more amino acids from the N-terminus or C-terminus of a polypeptide results in modification or loss of one or more biological functions, other biological activities may still be retained. For example, the ability of a deletion variant to induce and/or to bind antibodies which recognize the secreted form will likely be retained when less than the majority of the residues of the secreted form are removed from the N-terminus or C-terminus. Whether a particular polypeptide lacking N- or C-terminal residues of a protein retains such immunogenic activities can readily be determined by routine methods described herein and otherwise known in the art.

[0132] Thus, the invention further includes polypeptide variants which show a functional activity (e.g., biological activity) of the polypeptides of the invention. Such variants include deletions, insertions, inversions, repeats, and substitutions selected according to general rules known in the art so as have little effect on activity.

[0133] The present application is directed to nucleic acid molecules at least 80%, 85%, 90%, 95%, 96%, 97%, 98%, 99% or 100% identical to the nucleic acid sequences disclosed herein, (e.g., encoding a polypeptide having the amino acid sequence of an N and/or C terminal deletion), irrespective of whether they encode a polypeptide having functional activity. This is because even where a particular nucleic acid molecule does not encode a polypeptide having functional activity, one of skill in the art would still know how to use the nucleic acid molecule, for instance, as a hybridization probe or a polymerase chain reaction (PCR) primer. Uses of the nucleic acid molecules of the present invention that do not encode a polypeptide having, functional activity include, inter alia, (1) isolating a gene or allelic or splice variants thereof in a cDNA library; (2) in situ hybridization (e.g., “FISH”) to metaphase chromosomal spreads to provide precise chromosomal location of the gene, as described in Verma et al., Human Chromosomes: A Manual of Basic Techniques, Pergamon Press, New York (1988); (3) Northern Blot analysis for detecting mRNA expression in specific tissues (e.g., normal colon or diseased colon tissues); and (4) in situ hybridization (e.g., histochemistry) for detecting mRNA expression in specific tissues (e.g., normal colon or diseased colon tissues).

[0134] Preferred, however, are nucleic acid molecules having sequences at least 80%, 85%, 90%, 95%, 96%, 97%, 98%, 99% or 100% identical to the nucleic acid sequences disclosed herein, which do, in fact, encode a polypeptide having functional activity. By a polypeptide having “functional activity” is meant, a polypeptide capable of displaying one or more known functional activities associated with a full-length (complete) protein of the invention. Such functional activities include, but are not limited to, biological activity, antigenicity [ability to bind (or compete with a polypeptide of the invention for binding) to an anti-polypeptide of the invention antibody], immunogenicity (ability to generate antibody which binds to a specific polypeptide of the invention), ability to form multimers with polypeptides of the invention, and ability to bind to a receptor or ligand for a polypeptide of the invention.

[0135] The functional activity of the polypeptides, and fragments, variants and derivatives of the invention, can be assayed by various methods.

[0136] For example, in one embodiment where one is assaying for the ability to bind or compete with full-length polypeptide of the present invention for binding to an anti-polypeptide of the invention antibody, various immunoassays known in the art can be used, including but not limited to, competitive and non-competitive assay systems using techniques such as radioimmunoassays, ELISA (enzyme linked immunosorbent assay), “sandwich” immunoassays, immunoradiometric assays, gel diffusion precipitation reactions, immunodiffusion assays, in situ immunoassays (using colloidal gold, enzyme or radioisotope labels, for example), western blots, precipitation reactions, agglutination assays (e.g., gel agglutination assays, hemagglutination assays), complement fixation assays, immunofluorescence assays, protein A assays, and immunoelectrophoresis assays, etc. In one embodiment, antibody binding is detected by detecting a label on the primary antibody. In another embodiment, the primary antibody is detected by detecting binding of a secondary antibody or reagent to the primary antibody. In a further embodiment, the secondary antibody is labeled. Many means are known in the art for detecting binding in an immunoassay and are within the scope of the present invention.

[0137] In another embodiment, where a ligand is identified, or the ability of a polypeptide fragment, variant or derivative of the invention to multimerize is being evaluated, binding can be assayed, e.g., by means well-known in the art, such as, for example, reducing and non-reducing gel chromatography, protein affinity chromatography, and affinity blotting. See generally, Phizicky et al., Microbiol. Rev. 59:94-123 (1995). In another embodiment, the ability of physiological correlates of a polypeptide of the present invention to bind to a substrate(s) of the polypeptide of the invention can be routinely assayed using techniques known in the art.

[0138] In addition, assays described herein (see Examples) and otherwise known in the art may routinely be applied to measure the ability of polypeptides of the present invention and fragments, variants and derivatives thereof to elicit polypeptide related biological activity (either in vitro or in vivo). Other methods will be known to the skilled artisan and are within the scope of the invention.

[0139] Of course, due to the degeneracy of the genetic code, one of ordinary skill in the art will immediately recognize that a large number of the nucleic acid molecules having a sequence at least 80%, 85%, 90%, 95%, 96%, 97%, 98%, 99%, or 100% identical to, for example, the nucleic acid sequence of the cDNA contained in Clone ID NO:Z, a nucleic acid sequence referred to in Table 1 (e.g., SEQ ID NO:X), a nucleic acid sequence disclosed in Table 2 (e.g., the nucleic acid sequence delineated in columns 8 and 9) or fragments thereof, will encode polypeptides “having functional activity.” In fact, since degenerate variants of any of these nucleotide sequences all encode the same polypeptide, in many instances, this will be clear to the skilled artisan even without performing the above described comparison assay. It will be further recognized in the art that, for such nucleic acid molecules that are not degenerate variants, a reasonable number will also encode a polypeptide having functional activity. This is because the skilled artisan is fully aware of amino acid substitutions that are either less likely or not likely to significantly effect protein function (e.g., replacing one aliphatic amino acid with a second aliphatic amino acid), as further described below.

[0140] For example, guidance concerning how to make phenotypically silent amino acid substitutions is provided in Bowie et al., “Deciphering the Message in Protein Sequences: Tolerance to Amino Acid Substitutions,” Science 247:1306-1310 (1990), wherein the authors indicate that there are two main strategies for studying the tolerance of an amino acid sequence to change.

[0141] The first strategy exploits the tolerance of amino acid substitutions by natural selection during the process of evolution. By comparing amino acid sequences in different species, conserved amino acids can be identified. These conserved amino acids are likely important for protein function. In contrast, the amino acid positions where substitutions have been tolerated by natural selection indicates that these positions are not critical for protein function. Thus, positions tolerating amino acid substitution could be modified while still maintaining biological activity of the protein.

[0142] The second strategy uses genetic engineering to introduce amino acid changes at specific positions of a cloned gene to identify regions critical for protein function. For example, site directed mutagenesis or alanine-scanning mutagenesis (introduction of single alanine mutations at every residue in the molecule) can be used. See Cunningham et al., Science 244:1081-1085 (1989). The resulting mutant molecules can then be tested for biological activity.

[0143] As the authors state, these two strategies have revealed that proteins are surprisingly tolerant of amino acid substitutions. The authors further indicate which amino acid changes are likely to be permissive at certain amino acid positions in the protein. For example, most buried (within the tertiary structure of the protein) amino acid residues require nonpolar side chains, whereas few features of surface side chains are generally conserved. Moreover, tolerated conservative amino acid substitutions involve replacement of the aliphatic or hydrophobic amino acids Ala, Val, Leu and Ile; replacement of the hydroxyl residues Ser and Thr; replacement of the acidic residues Asp and Glu; replacement of the amide residues Asn and Gln, replacement of the basic residues Lys, Arg, and His; replacement of the aromatic residues Phe, Tyr, and Trp, and replacement of the small-sized amino acids Ala, Ser, Thr, Met, and Gly. Besides conservative amino acid substitutions, variants of the present invention include (i) substitutions with one or more of the non-conserved amino acid residues, where the substituted amino acid residues may or may not be one encoded by the genetic code, or (ii) substitutions with one or more of the amino acid residues having a substituent group, or (iii) fusion of the mature polypeptide with another compound, such as a compound to increase the stability and/or solubility of the polypeptide (for example, polyethylene glycol), or (iv) fusion of the polypeptide with additional amino acids, such as, for example, an IgG Fc fusion region peptide, serum albumin (preferably human serum albumin) or a fragment or variant thereof, or leader or secretory sequence, or a sequence facilitating purification. Such variant polypeptides are deemed to be within the scope of those skilled in the art from the teachings herein.

[0144] For example, polypeptide variants containing amino acid substitutions of charged amino acids with other charged or neutral amino acids may produce proteins with improved characteristics, such as less aggregation. Aggregation of pharmaceutical formulations both reduces activity and increases clearance due to the aggregate's immunogenic activity. See Pinckard et al., Clin. Exp. Immunol. 2:331-340 (1967); Robbins et al., Diabetes 36: 838-845 (1987); Cleland et al., Crit. Rev. Therapeutic Drug Carrier Systems 10:307-377 (1993).

[0145] A further embodiment of the invention relates to polypeptides which comprise the amino acid sequence of a polypeptide having an amino acid sequence which contains at least one amino acid substitution, but not more than 50 amino acid substitutions, even more preferably, not more than 40 amino acid substitutions, still more preferably, not more than 30 amino acid substitutions, and still even more preferably, not more than 20 amino acid substitutions from a polypeptide sequence disclosed herein. Of course it is highly preferable for a polypeptide to have an amino acid sequence which comprises the amino acid sequence of a polypeptide of SEQ ID NO:Y, an amino acid sequence encoded by SEQ ID NO:X, an amino acid sequence encoded by the portion of SEQ ID NO:X as defined in columns 8 and 9 of Table 2, an amino acid sequence encoded by the complement of SEQ ID NO:X, and/or the amino acid sequence encoded by cDNA contained in Clone ID NO:Z which contains, in order of ever-increasing preference, at least one, but not more than 10, 9, 8, 7, 6, 5, 4, 3, 2 or 1 amino acid substitutions.

[0146] In specific embodiments, the polypeptides of the invention comprise, or alternatively, consist of, fragments or variants of a reference amino acid sequence selected from: (a) the amino acid-sequence of SEQ ID NO:Y or fragments thereof (e.g., the mature form and/or other fragments described herein); (b) the amino acid sequence encoded by SEQ ID NO:X or fragments thereof, (c) the amino acid sequence encoded by the complement of SEQ ID NO:X or fragments thereof; (d) the amino acid sequence encoded by the portion of SEQ ID NO:X as defined in columns 8 and 9 of Table 2 or fragments thereof; and (e) the amino acid sequence encoded by cDNA contained in Clone ID NO:Z or fragments thereof, wherein the fragments or variants have 1-5, 5-10, 5-25, 5-50, 10-50 or 50-150, amino acid residue additions, substitutions, and/or deletions when compared to the reference amino acid sequence. In preferred embodiments, the amino acid substitutions are conservative. Polynucleotides encoding these polypeptides are also encompassed by the invention.

[0147] Polynucleotide and Polypeptide Fragments

[0148] The present invention is also directed to polynucleotide fragments of the polynucleotides (nucleic acids) of the invention. In the present invention, a “polynucleotide fragment” refers to a polynucleotide having a nucleic acid sequence which, for example: is a portion of the cDNA contained in Clone ID NO:Z or the complementary strand thereto; is a portion of the polynucleotide sequence encoding the polypeptide encoded by the cDNA contained in Clone ID NO:Z or the complementary strand thereto; is a portion of a polynucleotide sequence encoding the amino acid sequence encoded by the region of SEQ ID NO:X as defined in columns 8 and 9 of Table 2 or the complementary strand thereto; is a portion of the polynucleotide sequence of SEQ ID NO:X as defined in columns 8 and 9 of Table 2 or the complementary strand thereto; is a portion of the polynucleotide sequence in SEQ ID NO:X or the complementary strand thereto; is a polynucleotide sequence encoding a portion of the polypeptide of SEQ ID NO:Y; is a polynucleotide sequence encoding a portion of a polypeptide encoded by SEQ ID NO:X; or is a polynucleotide sequence encoding a portion of a polypeptide encoded by the complement of the polynucleotide sequence in SEQ ID NO:X.

[0149] The polynucleotide fragments of the invention are preferably at least about 15 nt, and more preferably at least about 20 nt, still more preferably at least about 30 nt, and even more preferably, at least about 40 nt, at least about 50 nt, at least about 75 nt, or at least about 150 nt in length. A fragment “at least 20 nt in length,” for example, is intended to include 20 or more contiguous bases from the cDNA sequence contained in Clone ID NO:Z, or the nucleotide sequence shown in SEQ ID NO:X or the complementary stand thereto. In this context “about” includes the particularly recited value or a value larger or smaller by several (5, 4, 3, 2, or 1) nucleotides, at either terminus or at both termini. These nucleotide fragments have uses that include, but are not limited to, as diagnostic probes and primers as discussed herein. Of course, larger fragments (e.g., at least 160, 170, 180, 190, 200, 250, 500, 600, 1000, or 2000 nucleotides in length) are also encompassed by the invention.

[0150] Moreover, representative examples of polynucleotide fragments of the invention, comprise, or alternatively consist of, a sequence from about nucleotide number 1-50, 51-100, 101-150, 151-200, 201-250, 251-300, 301-350, 351-400, 401-450, 451-501-550, 551-600, 651-700, 701-750, 751-800, 800-850, 851-900, 901-950, 951-1000, 1001-1050, 1051-1100, 1101-1150, 1151-1200, 1201-1250, 1251-1300, 1301-1350, 1351-1400, 1401-1450, 1451-1500, 1501-1550, 1551-1600, 1601-1650, 1651-1700, 1701-1750, 1751-1800, 1801-1850, 1851-1900, 1901-1950, 1951-2000, 2001-2050, 2051-2100, 2101-2150, 2151-2200, 2201-2250, 2251-2300, 2301-2350, 2351-2400, 2401-2450, 2451-2500, 2501-2550, 2551-2600, 2601-2650, 2651-2700, 2701-2750, 2751-2800, 2801-2850, 2851-2900, 2901-2950, 2951-3000, 3001-3050, 3051-3100, 3101-3150, 3151-3200, 3201-3250, 3251-3300, 3301-3350, 3351-3400, 3401-3450, 3451-3500, 3501-3550, 3551-3600, 3601-3650, 3651-3700, 3701-3750, 3751-3800, 3801-3850, 3851-3900, 3901-3950, 3951-4000, 4001-4050, 4051-4100, 4101-4150, 4151-4200, 4201-4250, 4251-4300, 4301-4350, 4351-4400, 4401-4450, 4451-4500, 4501-4550, 4551-4600, 4601-4650, 4651-4700, 4701-4750, 4751-4800, 4801-4850, 4851-4900, 4901-4950, 4951-5000, 5001-5050, 5051-5100, 5101-5150, 5151-5200, 5201-5250, 5251-5300, 5301-5350, 5351-5400, 5401-5450, 5451-5500, 5501-5550, 5551-5600, 5601-5650, 5651-5700, 5701-5750, 5751-5800, 5801-5850, 5851-5900, 5901-5950, 5951-6000, 6001-6050, 6051-6100, 6101-6150, 6151-6200, 6201-6250, 6251-6300, 6301-6350, 6351-6400, 6401-6450, 6451-6500, 6501-6550, 6551-6600, 6601-6650, 6651-6700, 6701-6750, 6751-6800, 6801-6850, 6851-6900, 6901-6950, 6951-7000, 7001-7050, 7051-7100, 7101-7150, 7151-7200, 7201-7250, 7251-7300 or 7301 to the end of SEQ ID NO:X, or the complementary strand thereto. In this context “about” includes the particularly recited range or a range larger or smaller by several (5, 4, 3, 2, or 1) nucleotides, at either terminus or at both termini. Preferably, these fragments encode a polypeptide, which has a functional activity (e.g., biological activity). More preferably, these polynucleotides can be used as probes or primers as discussed herein. Polynucleotides which hybridize to one or more of these polynucleotides under stringent hybridization conditions or alternatively, under lower stringency conditions are also encompassed by the invention, as are polypeptides encoded by these polynucleotides.

[0151] Further representative examples of polynucleotide fragments of the invention, comprise, or alternatively consist of, a sequence from about nucleotide number 1-50, 51-100, 101-150, 151-200, 201-250, 251-300, 301-350, 351-400, 401-450, 451-500, 501-550, 551-600, 651-700, 701-750, 751-800, 800-850, 851-900, 901-950, 951-1000, 1001-1050, 1051-1100, 1101-1150, 1151-1200, 1201-1250, 1251-1300, 1301-1350, 1351-1400, 1401-1450, 1451-1500, 1501-1550, 1551-1600, 1601-1650, 1651-1700, 1701-1750, 1751-1800, 1801-1850, 1851-1900, 1901-1950, 1951-2000, 2001-2050, 2051-2100, 2101-2150, 2151-2200, 2201-2250, 2251-2300, 2301-2350, 2351-2400, 2401-2450, 2451-2500, 2501-2550, 2551-2600, 2601-2650, 2651-2700, 2701-2750, 2751-2800, 2801-2850, 2851-2900, 2901-2950, 2951-3000, 3001-3050, 3051-3100, 3101-3150, 3151-3200, 3201-3250, 3251-3300, 3301-3350, 3351-3400, 3401-3450, 3451-3500, 3501-3550, 3551-3600, 3601-3650, 3651-3700, 3701-3750, 3751-3800, 3801-3850, 3851-3900, 3901-3950, 3951-4000, 4001-4050, 4051-4100, 4101-4150, 4151-4200, 4201-4250, 4251-4300, 4301-4350, 4351-4400, 4401-4450, 4451-4500, 4501-4550, 4551-4600, 4601-4650, 4651-4700, 4701-4750, 4751-4800, 4801-4850, 4851-4900, 4901-4950, 4951-5000, 5001-5050, 5051-5100, 5101-5150, 5151-5200, 5201-5250, 5251-5300, 5301-5350, 5351-5400, 5401-5450, 5451-5500, 5501-5550, 5551-5600, 5601-5650, 5651-5700, 5701-5750, 5751-5800, 5801-5850, 5851-5900, 5901-5950, 5951-6000, 6001-6050, 6051-6100, 6101-6150, 6151-6200, 6201-6250, 6251-6300, 6301-6350, 6351-6400, 6401-6450, 6451-6500, 6501-6550, 6551-6600, 6601-6650, 6651-6700, 6701-6750, 6751-6800, 6801-6850, 6851-6900, 6901-6950, 6951-7000, 7001-7050, 7051-7100, 7101-7150, 7151-7200, 7201-7250, 7251-7300 or 7301 to the end of the cDNA sequence contained in Clone ID NO:Z, or the complementary strand thereto. In this context “about” includes the particularly recited range or a range larger or smaller by several (5, 4, 3, 2, or 1) nucleotides, at either terminus or at both termini. Preferably, these fragments encode a polypeptide, which has a functional activity (e.g., biological activity). More preferably, these polynucleotides can be used as probes or primers as discussed herein. Polynucleotides which hybridize to one or more of these polynucleotides under stringent hybridization conditions or alternatively, under lower stringency conditions are also encompassed by the invention, as are polypeptides encoded by these polynucleotides.

[0152] In specific embodiments, polynucleotides of the invention comprise, or alternatively consist of, one, two, three, four, five, six, seven, eight, nine, ten, or more fragments of the polynucleotide sequence of SEQ ID NO:X (e.g., as defined in Table 1) or fragments or variants thereof. Polypeptides encoded by these polynucleotides, other polynucleotides that encode these polypeptides, and antibodies that bind these polypeptides are also encompassed by the invention.

[0153] In further specific embodiments, polynucleotides of the invention comprise, or alternatively consist of, one, two, three, four, five, six, seven, eight, nine, ten, or more fragments of the polynucleotide sequence of SEQ ID NO:X (e.g., as defined in Table 1) or fragments or variants thereof. Polypeptides encoded by these polynucleotides, other polynucleotides that encode these polypeptides, and antibodies that bind these polypeptides are also encompassed by the invention.

[0154] In the present invention, a “polypeptide fragment” refers to an amino acid sequence which is a portion of that contained in SEQ ID NO:Y, a portion of an amino acid sequence encoded by the portion of SEQ ID NO:X as defined in columns 8 and 9 of Table 2, a portion of an amino acid sequence encoded by the polynucleotide sequence of SEQ ID NO:X, a portion of an amino acid sequence encoded by the complement of the polynucleotide sequence in SEQ ID NO:X, and/or a portion of an amino acid sequence encoded by the cDNA contained in Clone ID NO:Z. Protein (polypeptide) fragments may be “free-standing,” or comprised within a larger polypeptide of which the fragment forms a part or region, most preferably as a single continuous region. Representative examples of polypeptide fragments of the invention, include, for example, fragments comprising, or alternatively consisting of, from about amino acid number 1-20, 21-40, 41-60, 61-80, 81-100, 102-120, 121-140, 141-160, 161-180, 181-200, 201-220, 221-240, 241-260, 261-280, 281-300, 301-320, 321-340, 341-360, 361-380, 381-400, 401-420, 421-440, 441-460, 461-480, 481-500, 501-520, 521-540, 541-560, 561-580, 581-600, 601-620, 621-640, 641-660, 661-680, 681-700, 701-720, 721-740, 741-760, 761-780, 781-800, 801-820, 821-840, 841-860, 861-880, 881-900, 901-920, 921-940, 941-960, 961-980, 981-1000, 1001-1020, 1021-1040, 1041-1060, 1061-1080, 1081-1100, 1101-1120, 1121-1140, 1141-1160, 1161-1180, 1181-1200, 1201-1220, 1221-1240, 1241-1260, 1261-1280, 1281-1300, 1301-1320, 1321-1340, 1341-1360, 1361-1380, 1381-1400, 1401-1420, 1421-1440, or 1441 to the end of the coding region. In a preferred embodiment, polypeptide fragments of the invention include, for example, fragments comprising, or alternatively consisting of, from about amino acid number 1-20, 21-40, 41-60, 61-80, 81-100, 102-120, 121-140, 141-160, 161-180, 181-200, 201-220, 221-240, 241-260, 261-280, 281-300, 301-320, 321-340, 341-360, 361-380, 381-400, 401-420, 421-440, 441-460, 461-480, 481-500, 501-520, 521-540, 541-560, 561-580, 581-600, 601-620, 621-640, 641-660, 661-680, 681-700, 701-720, 721-740, 741-760, 761-780, 781-800, 801-820, 821-840, 841-860, 861-880, 881-900, 901-920, 921-940, 941-960, 961-980, 981-1000, 1001-1020, 1021-1040, 1041-1060, 1061-1080, 1081-1100, 1101-1120, 1121-1140, 1141-1160, 1161-1180, 1181-1200, 1201-1220, 1221-1240, 1241-1260, 1261-1280, 1281-1300, 1301-1320, 1321-1340, 1341-1360, 1361-1380, 1381-1400, 1401-1420, 1421-1440, or 1441 to the end of the coding region of SEQ ID NO:Y. Moreover, polypeptide fragments of the invention may be at least about 10, 15, 20, 25, 30, 35, 40, 45, 50, 55, 60, 65, 70, 75, 80, 85, 90, 100, 110, 120, 130, 140, or 150 amino acids in length. In this context “about” includes the particularly recited ranges or values, or ranges or values larger or smaller by several (5, 4, 3, 2, or 1) amino acids, at either extreme or at both extremes. Polynucleotides encoding these polypeptide fragments are also encompassed by the invention.

[0155] Even if deletion of one or more amino acids from the N-terminus of a protein results in modification of loss of one or more biological functions of the protein, other functional activities (e.g., biological activities, ability to multimerize, ability to bind a ligand) may still be retained. For example, the ability of shortened muteins to induce and/or bind to antibodies which recognize the complete or mature forms of the polypeptides generally will be retained when less than the majority of the residues of the complete or mature polypeptide are removed from the N-terminus. Whether a particular polypeptide lacking N-terminal residues of a complete polypeptide retains such immunologic activities can readily be determined by routine methods described herein and otherwise known in the art. It is not unlikely that a mutein with a large number of deleted N-terminal amino acid residues may retain some biological or immunogenic activities. In fact, peptides composed of as few as six amino acid residues may often evoke an immune response.

[0156] Accordingly, polypeptide fragments include the secreted protein as well as the mature form. Further preferred polypeptide fragments include the secreted protein or the mature form having a continuous series of deleted residues from the amino or the carboxy terminus, or both. For example, any number of amino acids, ranging from 1-60, can be deleted from the amino terminus of either the secreted polypeptide or the mature form. Similarly, any number of amino acids, ranging from 1-30, can be deleted from the carboxy terminus of the secreted protein or mature form. Furthermore, any combination of the above amino and carboxy terminus deletions is preferred. Similarly, polynucleotides encoding these polypeptide fragments are also preferred.

[0157] The present invention further provides polypeptides having one or more residues deleted from the amino terminus of the amino acid sequence of a polypeptide disclosed herein (e.g., a polypeptide of SEQ ID NO:Y, a polypeptide encoded by the polynucleotide sequence contained in SEQ ID NO:X or the complement thereof, a polypeptide encoded by the portion of SEQ ID NO:X as defined in columns 8 and 9 of Table 2, and/or a polypeptide encoded by the cDNA contained in Clone ID NO:Z). In particular, N-terminal deletions may be described by the general formula m-q, where q is a whole integer representing the total number of amino acid residues in a polypeptide of the invention (e.g., the polypeptide disclosed in SEQ ID NO:Y, or the polypeptide encoded by the portion of SEQ ID NO:X as defined in columns 8 and 9 of Table 2), and m is defined as any integer ranging from 2 to q-6. Polynucleotides encoding these polypeptides are also encompassed by the invention.

[0158] The present invention further provides polypeptides having one or more residues from the carboxy terminus of the amino acid sequence of a polypeptide disclosed herein (e.g., a polypeptide of SEQ ID NO:Y, a polypeptide encoded by the polynucleotide sequence contained in SEQ ID NO:X, a polypeptide encoded by the portion of SEQ ID NO:X as defined in columns 8 and 9 of Table 2, and/or a polypeptide encoded by the cDNA contained in Clone ID NO:Z). In particular, C-terminal deletions may be described by the general formula 1 −n, where n is any whole integer ranging from 6 to q−1, and where n corresponds to the position of amino acid residue in a polypeptide of the invention. Polynucleotides encoding these polypeptides are also encompassed by the invention.

[0159] In addition, any of the above described N- or C-terminal deletions can be combined to produce a N- and C-terminal deleted polypeptide. The invention also provides polypeptides having one or more amino acids deleted from both the amino and the carboxyl termini, which may be described generally as having residues m−n of a polypeptide encoded by SEQ ID NO:X (e.g., including, but not limited to, the preferred polypeptide disclosed as SEQ ID NO:Y and the polypeptide encoded by the portion of SEQ ID NO:X as defined in columns 8 and 9 of Table 2), the cDNA contained in Clone ID NO:Z, and/or the complement thereof, where n and m are integers as described above. Polynucleotides encoding these polypeptides are also encompassed by the invention.

[0160] Also as mentioned above, even if deletion of one or more amino acids from the C-terminus of a protein results in modification of loss of one or more biological functions of the protein, other functional activities (e.g., biological activities, ability to multimerize, ability to bind a ligand) may still be retained. For example the ability of the shortened mutein to induce and/or bind to antibodies which recognize the complete or mature forms of the polypeptide generally will be retained when less than the majority of the residues of the complete or mature polypeptide are removed from the C-terminus. Whether a particular polypeptide lacking C-terminal residues of a complete polypeptide retains such immunologic activities can readily be determined by routine methods described herein and otherwise known in the art. It is not unlikely that a mutein with a large number of deleted C-terminal amino acid residues may retain some biological or immunogenic activities. In fact, peptides composed of as few as six amino acid residues may often evoke an immune response.

[0161] The present application is also directed to proteins containing polypeptides at least 80%, 85%, 90%, 95%, 96%, 97%, 98% or 99% identical to a polypeptide sequence set forth herein. In preferred embodiments, the application is directed to proteins containing polypeptides at least 80%, 85%, 90%, 95%, 96%, 97%, 98% or 99% identical to polypeptides having the amino acid sequence of the specific N- and C-terminal deletions. Polynucleotides encoding these polypeptides are also encompassed by the invention.

[0162] Any polypeptide sequence encoded by, for example, the polynucleotide sequences set forth as SEQ ID NO:X or the complement thereof, (presented, for example, in Tables 1A and 2), or the cDNA contained in Clone ID NO:Z may be analyzed to determine certain preferred regions of the polypeptide. For example, the amino acid sequence of a polypeptide encoded by a polynucleotide sequence of SEQ ID NO:X (e.g., the polypeptide of SEQ ID NO:Y and the polypeptide encoded by the portion of SEQ ID NO:X as defined in columns 8 and 9 of Table 2) or the cDNA contained in Clone ID NO:Z may be analyzed using the default parameters of the DNASTAR computer algorithm (DNASTAR, Inc., 1228 S. Park St., Madison, Wis. 53715 USA; http://www.dnastar.com/).

[0163] Polypeptide regions that may be routinely obtained using the DNASTAR computer algorithm include, but are not limited to, Garnier-Robson alpha-regions, beta-regions, turn-regions, and coil-regions; Chou-Fasman alpha-regions, beta-regions, and turn-regions; Kyte-Doolittle hydrophilic regions and hydrophobic regions; Eisenberg alpha- and beta-amphipathic regions; Karplus-Schulz flexible regions; Emini surface-forming regions; and Jameson-Wolf regions of high antigenic index. Among highly preferred polynucleotides of the invention in this regard are those that encode polypeptides comprising regions that combine several structural features, such as several (e.g., 1, 2, 3 or 4) of the features set out above.

[0164] Additionally, Kyte-Doolittle hydrophilic regions and hydrophobic regions, Emini surface-forming regions, and Jameson-Wolf regions of high antigenic index (i.e., containing four or more contiguous amino acids having an antigenic index of greater than or equal to 1.5, as identified using the default parameters of the Jameson-Wolf program) can routinely be used to determine polypeptide regions that exhibit a high degree of potential for antigenicity. Regions of high antigenicity are determined from data by DNASTAR analysis by choosing values which represent regions of the polypeptide which are likely to be exposed on the surface of the polypeptide in an environment in which antigen recognition may occur in the process of initiation of an immune response.

[0165] Preferred polypeptide fragments of the invention are fragments comprising, or alternatively, consisting of, an amino acid sequence that displays a functional activity (e.g. biological activity) of the polypeptide sequence of which the amino acid sequence is a fragment. By a polypeptide displaying a “functional activity” is meant a polypeptide capable of one or more known functional activities associated with a full-length protein, such as, for example, biological activity, antigenicity, immunogenicity, and/or multimerization, as described herein.

[0166] Other preferred polypeptide fragments are biologically active fragments. Biologically active fragments are those exhibiting activity similar, but not necessarily identical, to an activity of the polypeptide of the present invention. The biological-activity of the fragments may include an improved desired activity, or a decreased undesirable activity.

[0167] In preferred embodiments, polypeptides of the invention comprise, or alternatively consist of, one, two, three, four, five or more of the antigenic fragments of the polypeptide of SEQ ID NO:Y, or portions thereof. Polynucleotides encoding these polypeptides are also encompassed by the invention.

[0168] The present invention encompasses polypeptides comprising, or alternatively consisting of, an epitope of: the polypeptide sequence shown in SEQ ID NO:Y; a polypeptide sequence encoded by SEQ ID NO:X or the complementary strand thereto; the polypeptide sequence encoded by the portion of SEQ ID NO:X as defined in columns 8 and 9 of Table 2; the polypeptide sequence encoded by the cDNA contained in Clone ID NO:Z; or the polypeptide sequence encoded by a polynucleotide that hybridizes to the sequence of SEQ ID NO:X, the complement of the sequence of SEQ ID NO:X, the complement of a portion of SEQ ID NO:X as defined in columns 8 and 9 of Table 2, or the cDNA sequence contained in Clone ID NO:Z under stringent hybridization conditions or alternatively, under lower stringency hybridization as defined supra. The present invention further encompasses polynucleotide sequences encoding an epitope of a polypeptide sequence of the invention (such as, for example, the sequence disclosed in SEQ ID NO:X, or a fragment thereof), polynucleotide sequences of the complementary strand of a polynucleotide sequence encoding an epitope of the invention, and polynucleotide sequences which hybridize to the complementary strand under stringent hybridization conditions or alternatively, under lower stringency hybridization conditions defined supra.

[0169] The term “epitopes,” as used herein, refers to portions of a polypeptide having antigenic or immunogenic activity in an animal, preferably a mammal, and most preferably in a human. In a preferred embodiment, the present invention encompasses a polypeptide comprising an epitope, as well as the polynucleotide encoding this polypeptide. An “immunogenic epitope,” as used herein, is defined as a portion of a protein that elicits an antibody response in an animal, as determined by any method known in the art, for example, by the methods for generating antibodies described infra. (See, for example, Geysen et al., Proc. Natl. Acad. Sci. USA 81:3998-4002 (1983)). The term “antigenic epitope,” as used herein, is defined as a portion of a protein to which an antibody can immunospecifically bind its antigen as determined by any method well known in the art, for example, by the immunoassays described herein. Immunospecific binding excludes non-specific binding but does not necessarily exclude cross-reactivity with other antigens. Antigenic epitopes need not necessarily be immunogenic.

[0170] Fragments, which function as epitopes may be produced by any conventional means. (See, e.g., Houghten, R. A., Proc. Natl. Acad. Sci. USA 82:5131-5135 (1985) further described in U.S. Pat. No. 4,631,211.)

[0171] In the present invention, antigenic epitopes preferably contain a sequence of at least 4, at least 5, at least 6, at least 7, more preferably at least 8, at least 9, at least 10, at least 11, at least 12, at least 13, at least 14, at least 15, at least 20, at least 25, at least 30 least 40, at least 50, and, most preferably, between about 15 to about 30 amino acids. Preferred polypeptides comprising immunogenic or antigenic epitopes are at least 10, 15, 20, 25, 30, 35, 40, 45, 50, 55, 60, 65, 70, 75, 80, 85, 90, 95, or 100 amino acid residues in length. Additional non-exclusive preferred antigenic epitopes include the antigenic epitopes disclosed herein, as well as portions thereof. Antigenic epitopes are useful, for example, to raise antibodies, including monoclonal antibodies, that specifically bind the epitope. Preferred antigenic epitopes include the antigenic epitopes disclosed herein, as well as any combination of two, three, four, five or more of these antigenic epitopes. Antigenic epitopes can be used as the target molecules in immunoassays. (See, for instance, Wilson et al., Cell 37:767-778 (1984); Sutcliffe et al., Science 219:660-666 (1983)).

[0172] Non-limiting examples of epitopes of polypeptides that can be used to generate antibodies of the invention include a polypeptide comprising, or alternatively consisting of, at least one, two, three, four, five, six or more of the portion(s) of SEQ ID NO:Y specified in column 7 of Table 1. These polypeptide fragments have been determined to bear antigenic epitopes of the proteins of the invention by the analysis of the Jameson-Wolf antigenic index, which is included in the DNAStar suite of computer programs. By “comprise” it is intended that a polypeptide contains at least one, two, three, four, five, six or more of the portion(s) of SEQ ID NO:Y shown in column 7 of Table 1, but it may contain additional flanking residues on either the amino or carboxyl termini of the recited portion. Such additional flanking sequences are preferably sequences naturally found adjacent to the portion; i.e., contiguous sequence shown in SEQ ID NO:Y. The flanking sequence may, however, be sequences from a heterolgous polypeptide, such as from another protein described herein or from a heterologous polypeptide not described herein. In particular embodiments, epitope portions of a polypeptide of the invention comprise one, two, three, or more of the portions of SEQ ID NO:Y shown in column 7 of Table 1. Polynucleotides encoding these polypeptides are also encompassed by the invention.

[0173] Similarly, immunogenic epitopes can be used, for example, to induce antibodies according to methods well known in the art. See, for instance, Sutcliffe et al., supra; Wilson et al., supra; Chow et al., Proc. Natl. Acad. Sci. USA 82:910-914; and Bittle et al., J. Gen. Virol. 66:2347-2354 (1985). Preferred immunogenic epitopes include the immunogenic epitopes disclosed herein, as well as any combination of two, three, four, five or more of these immunogenic epitopes. The polypeptides comprising one or more immunogenic epitopes may be presented for eliciting an antibody response together with a carrier protein, such as an albumin, to an animal system (such as rabbit or mouse), or, if the polypeptide is of sufficient length (at least about 25 amino acids), the polypeptide may be presented without a carrier. However, immunogenic epitopes comprising as few as 8 to 10 amino acids have been shown to be sufficient to raise antibodies capable of binding to, at the very least, linear epitopes in a denatured polypeptide (e.g., in Western blotting).

[0174] Epitope-bearing polypeptides of the present invention may be used to induce antibodies according to methods well known in the art including, but not limited to, in vivo immunization, in vitro immunization, and phage display methods. See, e.g., Sutcliffe et al., supra; Wilson et al., supra, and Bittle et al., J. Gen. Virol., 66:2347-2354 (1985). If in vivo immunization is used, animals may be immunized with free peptide; however, anti-peptide antibody titer may be boosted by coupling the peptide to a macromolecular carrier, such as keyhole limpet hemacyanin (KLH) or tetanus toxoid. For instance, peptides containing cysteine residues may be coupled to a carrier using a linker such as maleimidobenzoyl-N-hydroxysuccinimide ester (MBS), while other peptides may be coupled to carriers using a more general linking agent such as glutaraldehyde. Animals such as rabbits, rats and mice are immunized with either free or carrier-coupled peptides, for instance, by intraperitoneal and/or intradermal injection of emulsions containing about 100 μg of peptide or carrier protein and Freund's adjuvant or any other adjuvant known for stimulating an immune response. Several booster injections may be needed, for instance, at intervals of about two weeks, to provide a useful titer of anti-peptide antibody which can be detected, for example, by ELISA assay using free peptide adsorbed to a solid surface. The titer of anti-peptide antibodies in serum from an immunized animal may be increased by selection of anti-peptide antibodies, for instance, by adsorption to the peptide on a solid support and elution of the selected antibodies according to methods well known in the art.

[0175] As one of skill in the art will appreciate, and as discussed above, the polypeptides of the present invention (e.g., those comprising an immunogenic or antigenic epitope) can be fused to heterologous polypeptide sequences. For example, polypeptides of the present invention (including fragments or variants thereof), may be fused with the constant domain of immunoglobulins (IgA, IgE, IgG, IgM), or portions thereof (CH1, CH2, CH3, or any combination thereof and portions thereof, resulting in chimeric polypeptides. By way of another non-limiting example, polypeptides and/or antibodies of the present invention (including fragments or variants thereof) may be fused with albumin (including but not limited to recombinant human serum albumin or fragments or variants thereof (see, e.g., U.S. Pat. No. 5,876,969, issued Mar. 2, 1999, EP Patent 0 413 622, and U.S. Pat. No. 5,766,883, issued Jun. 16, 1998, herein incorporated by reference in their entirety)). In a preferred embodiment, polypeptides and/or antibodies of the present invention (including fragments or variants thereof) are fused with the mature form of human serum albumin (i.e., amino acids 1-585 of human serum albumin as shown in FIGS. 1 and 2 of EP Patent 0 322 094) which is herein incorporated by reference in its entirety. In another preferred embodiment, polypeptides and/or antibodies of the present invention (including fragments or variants thereof) are fused with polypeptide fragments comprising, or alternatively consisting of, amino acid residues 1−z of human serum albumin, where z is an integer from 369 to 419, as described in U.S. Pat. No. 5,766,883 herein incorporated by reference in its entirety. Polypeptides and/or antibodies of the present invention (including fragments or variants thereof) may be fused to either the N- or C-terminal end of the heterologous protein (e.g., immunoglobulin Fc polypeptide or human serum albumin polypeptide). Polynucleotides encoding fusion proteins of the invention are also encompassed by the invention.

[0176] Such fusion proteins as those described above may facilitate purification and may increase half-life in vivo. This has been shown for chimeric proteins consisting of the first two domains of the human CD4-polypeptide and various domains of the constant regions of the heavy or light chains of mammalian immunoglobulins. See, e.g., EP 394,827; Traunecker et al., Nature, 331:84-86 (1988). Enhanced delivery of an antigen across the epithelial barrier to the immune system has been demonstrated for antigens (e.g., insulin) conjugated to an FcRn binding partner such as IgG or Fc fragments (see, e.g., PCT Publications WO 96/22024 and WO 99/04813). IgG Fusion proteins that have a disulfide-linked dimeric structure due to the IgG portion desulfide bonds have also been found to be more efficient in binding and neutralizing other molecules than monomeric polypeptides or fragments thereof alone. See, e.g., Fountoulakis et al., J. Biochem., 270:3958-3964 (1995). Nucleic acids encoding the above epitopes can also be recombined with a gene of interest as an epitope tag (e.g., the hemagglutinin (HA) tag or flag tag) to aid in detection and purification of the expressed polypeptide. For example, a system described by Janknecht et al. allows for the ready purification of non-denatured fusion proteins expressed in human cell lines (Janknecht et al., 1991, Proc. Natl. Acad. Sci. USA 88:8972-897). In this system, the gene of interest is subcloned into a vaccinia recombination plasmid such that the open reading frame of the gene is translationally fused to an amino-terminal tag consisting of six histidine residues. The tag serves as a matrix binding domain for the fusion protein. Extracts from cells infected with the recombinant vaccinia virus are loaded onto Ni2+ nitriloacetic acid-agarose column and histidine-tagged proteins can be selectively eluted with imidazole-containing buffers.

[0177] Fusion Proteins

[0178] Any polypeptide of the present invention can be used to generate fusion proteins. For example, the polypeptide of the present invention, when fused to a second protein, can be used as an antigenic tag. Antibodies raised against the polypeptide of the present invention can be used to indirectly detect the second protein by binding to the polypeptide. Moreover, because secreted proteins target cellular locations based on trafficking signals, polypeptides of the present invention which are shown to be secreted can be used as targeting molecules once fused to other proteins.

[0179] Examples of domains that can be fused to polypeptides of the present invention include not only heterologous signal sequences, but also other heterologous functional regions. The fusion does not necessarily need to be direct, but may occur through linker sequences.

[0180] In certain preferred embodiments, proteins of the invention are fusion proteins comprising an amino acid sequence that is an N and/or C-terminal deletion of a polypeptide of the invention. In preferred embodiments, the invention is directed to a fusion protein comprising an amino acid sequence that is at least 80%, 85%, 90%, 95%, 96%, 97%, 98% or 99% identical to a polypeptide sequence of the invention. Polynucleotides encoding these proteins are also encompassed by the invention.

[0181] Moreover, fusion proteins may also be engineered to improve characteristics of the polypeptide of the present invention. For instance, a region of additional amino acids, particularly charged amino acids, may be added to the N-terminus of the polypeptide to improve stability and persistence during purification from the host cell or subsequent handling and storage. Also, peptide moieties may be added to the polypeptide to facilitate purification. Such regions may be removed prior to final preparation of the polypeptide. The addition of peptide moieties to facilitate handling of polypeptides is familiar and routine techniques in the art.

[0182] As one of skill in the art will appreciate that, as discussed above, polypeptides of the present invention, and epitope-bearing fragments thereof, can be combined with heterologous polypeptide sequences. For example, the polypeptides of the present invention may be fused with heterologous polypeptide sequences, for example, the polypeptides of the present invention may be fused with the constant domain of immunoglobulins (IgA, IgE, IgG, IgM) or portions thereof (CH1, CH2, CH3, and any combination thereof, including both entire domains and portions thereof), or albumin (including, but not limited to, native or recombinant human albumin or fragments or variants thereof (see, e.g., U.S. Pat. No. 5,876,969, issued Mar. 2, 1999, EP Patent 0 413 622, and U.S. Pat. No. 5,766,883, issued Jun. 16, 1998, herein incorporated by reference in their entirety)), resulting in chimeric polypeptides. For example, EP-A-O 464 533 (Canadian counterpart 2045869) discloses fusion proteins comprising various portions of constant region of immunoglobulin molecules together with another human protein or part thereof. In many cases, the Fc part in a fusion protein is beneficial in therapy and diagnosis, and thus can result in, for example, improved pharmacokinetic properties (EP-A 0232 262). Alternatively, deleting the Fc part after the fusion protein has been expressed, detected, and purified, would be desired. For example, the Fc portion may hinder therapy and diagnosis if the fusion protein is used as an antigen for immunizations. In drug discovery, for example, human proteins, such as hIL-5, have been fused with Fc portions for the purpose of high-throughput screening assays to identify antagonists of hIL-5. See, D. Bennett et al., J. Molecular Recognition 8:52-58 (1995); K. Johanson et al., J. Biol. Chem. 270:9459-9471 (1995).

[0183] Moreover, the polypeptides of the present invention can be fused to marker sequences, such as a polypeptide, which facilitates purification of the fused polypeptide. In preferred embodiments, the marker amino acid sequence is a hexa-histidine peptide, such as the tag provided in a pQE vector (QIAGEN, Inc., 9259 Eton Avenue, Chatsworth, Calif., 91311), among others, many of which are commercially available. As described in Gentz et al., Proc. Natl. Acad. Sci. USA 86:821-824 (1989), for instance, hexa-histidine provides for convenient purification of the fusion protein. Another peptide tag useful for purification, the “HA” tag, corresponds to an epitope derived from the influenza hemagglutinin protein (Wilson et al., Cell 37:767 (1984).)

[0184] Additional fusion proteins of the invention may be generated through the techniques of gene-shuffling, motif-shuffling, exon-shuffling, and/or codon-shuffling (collectively referred to as “DNA shuffling”), briefly described below, and further described herein. DNA shuffling may be employed to modulate the activities of polypeptides of the invention, such methods can be used to generate polypeptides with altered activity, as well as agonists and antagonists of the polypeptides. See, generally, U.S. Pat. Nos. 5,605,793; 5,811,238; 5,830,721; 5,834,252; and 5,837,458, and Patten et al., Curr. Opinion Biotechnol. 8:724-33 (1997); Harayama, Trends Biotechnol. 16(2):76-82 (1998); Hansson et al., J. Mol. Biol. 287:265-76 (1999); and Lorenzo and Blasco, Biotechniques 24(2):308-13 (1998); each of these patents and publications are hereby incorporated by reference in its entirety). In a preferred embodiment, one or more components, motifs, sections, parts, domains, fragments, etc., of a polynucleotide encoding a polypeptide of the invention may be recombined with one or more components, motifs, sections, parts, domains, fragments, etc., of one or more heterologous molecules encoding a heterologous polypeptide.

[0185] Thus, any of these above fusions can be engineered using the polynucleotides or the polypeptides of the present invention.

[0186] Recombinant and Synthetic Production of Polypeptides of the Invention

[0187] The present invention also relates to vectors containing the polynucleotide of the present invention, host cells, and the production of polypeptides by synthetic and recombinant techniques. The vector may be, for example, a phage, plasmid, viral, or retroviral vector. Retroviral vectors may be replication competent or replication defective. In the latter case, viral propagation generally will occur only in complementing host cells.

[0188] The polynucleotides of the invention may be joined to a vector containing a selectable marker for propagation in a host. Generally, a plasmid vector is introduced in a precipitate, such as a calcium phosphate precipitate, or in a complex with a charged lipid. If the vector is a virus, it may be packaged in vitro using an appropriate packaging cell line and then transduced into host cells.

[0189] The polynucleotide insert should be operatively linked to an appropriate promoter, such as the phage lambda PL promoter, the E. coli lac, trp, phoA and tac promoters, the SV40 early and late promoters and promoters of retroviral LTRs, to name a few. Other suitable promoters will be known to the skilled artisan. The expression constructs will further contain sites for transcription initiation, termination, and, in the transcribed region, a ribosome binding site for translation. The coding portion of the transcripts expressed by the constructs will preferably include a translation initiating codon at the beginning and a termination codon (UAA, UGA or UAG) appropriately positioned at the end of the polypeptide to be translated.

[0190] As indicated, the expression vectors will preferably include at least one selectable marker. Such markers include dihydrofolate reductase, G418 or neomycin resistance, glutamine synthase, for eukaryotic cell culture and tetracycline, kanamycin or ampicillin resistance genes for culturing in E. coli and other bacteria. Representative examples of appropriate hosts include, but are not limited to, bacterial cells, such as E. coli, Streptomyces and Salmonella typhimurium cells; fungal cells, such as yeast cells (e.g., Saccharomyces cerevisiae or Pichia pastoris (ATCC Accession No. 201178)); insect cells such as Drosophila S2 and Spodoptera Sf9 cells; animal cells such as CHO, COS, 293, NSO and Bowes melanoma cells; and plant cells. Appropriate culture mediums and conditions for the above-described host cells are known in the art.

[0191] Among vectors preferred for use in bacteria include pQE70, pQE60 and pQE-9, available from QIAGEN, Inc.; pBluescript vectors, Phagescript vectors, pNH8A, pNH16a, pNH18A, pNH46A, available from Stratagene Cloning Systems, Inc.; and ptrc99a, pKK223-3, pKK233-3, pDR540, pRIT5 available from Pharmacia Biotech, Inc. Among preferred eukaryotic vectors are pWLNEO, pSV2CAT, pOG44, pXT1 and pSG available from Stratagene; and pSVK3, pBPV, pMSG and pSVL available from Pharmacia. Preferred expression vectors for use in yeast systems include, but are not limited to pYES2, pYD1, pTEF1/Zeo, pYES2/GS, pPICZ, pGAPZ, pGAPZalph, pPIC9, pPIC3.5, pHIL-D2, pHIL-S1, pPIC3.5K, pPIC9K, and PAO815 (all available from Invitrogen, Carlsbad, Calif.). Other suitable vectors will be readily apparent to the skilled artisan.

[0192] Vectors which use glutamine synthase (GS) or DHFR as the selectable markers can be amplified in the presence of the drugs methionine sulphoximine or methotrexate, respectively. An advantage of glutamine synthase based vectors is the availabilty of cell lines (e.g., the murine myeloma cell line, NS0) which are glutamine synthase negative. Glutamine synthase expression systems can also function in glutamine synthase expressing cells (e.g., Chinese Hamster Ovary (CHO) cells) by providing additional inhibitor to prevent the functioning of the endogenous gene. A glutamine synthase expression system and components thereof are detailed in PCT publications: WO87/04462; WO86/05807; WO89/01036; WO89/10404; and WO91/06657 which are hereby incorporated in their entireties by reference herein. Additionally, glutamine synthase expression vectors can be obtained from Lonza Biologics, Inc. (Portsmouth, N.H.). Expression and production of monoclonal antibodies using a GS expression system in murine myeloma cells is described in Bebbington et al., Bio/technology 10:169(1992) and in Biblia and Robinson Biotechnol. Prog. 11:1 (1995) which are herein incorporated by reference.

[0193] The present invention also relates to host cells containing the above-described vector constructs described herein, and additionally encompasses host cells containing nucleotide sequences of the invention that are operably associated with one or more heterologous control regions (e.g., promoter and/or enhancer) using techniques known of in the art. The host cell can be a higher eukaryotic cell, such as a mammalian cell (e.g., a human derived cell), or a lower eukaryotic cell, such as a yeast cell, or the host cell can be a prokaryotic cell, such as a bacterial cell. A host strain may be chosen, which modulates the expression of the inserted gene sequences, or modifies and processes the gene product in the specific fashion desired. Expression from certain promoters can be elevated in the presence of certain inducers; thus expression of the genetically engineered polypeptide may be controlled. Furthermore, different host cells have characteristics and specific mechanisms for the translational and post-translational processing and modification (e.g., phosphorylation, cleavage) of proteins. Appropriate cell lines can be chosen to ensure the desired modifications and processing of the foreign protein expressed.

[0194] Introduction of the nucleic acids and nucleic acid constructs of the invention into the host cell can be effected by calcium phosphate transfection, DEAE-dextran mediated transfection, cationic lipid-mediated transfection, electroporation, transduction, infection, or other methods. Such methods are described in many standard laboratory manuals, such as Davis et al., Basic Methods In Molecular Biology (1986). It is specifically contemplated that the polypeptides of the present invention may in fact be expressed by a host cell lacking a recombinant vector.

[0195] In addition to encompassing host cells containing the vector constructs discussed herein, the invention also encompasses primary, secondary, and immortalized host cells of vertebrate origin, particularly mammalian origin, that have been engineered to delete or replace endogenous genetic material (e.g., plasma membrane associated antigen coding sequence), and/or to include genetic material (e.g., heterologous polynucleotide sequences) that is operably associated with polynucleotides of the invention, and which activates, alters, and/or amplifies endogenous polynucleotides of the invention. For example, techniques known in the art may be used to operably associate heterologous control regions (e.g., promoter and/or enhancer) and endogenous polynucleotide sequences of the invention via homologous recombination (see, e.g., U.S. Pat. No. 5,641,670, issued Jun. 24, 1997; International Publication Number WO 96/29411; International Publication Number WO 94/12650; Koller et al., Proc. Natl. Acad. Sci. USA 86:8932-8935 (1989); and Zijlstra et al., Nature 342:435-438 (1989), the disclosures of each of which are incorporated by reference in their entireties).

[0196] Polypeptides of the present invention can also be recovered from: products purified from natural sources, including bodily fluids, tissues and cells, whether directly isolated or cultured; products of chemical synthetic procedures; and products produced by recombinant techniques from a prokaryotic or eukaryotic host, including, for example, bacterial, yeast, higher plant, insect, and mammalian cells. Depending upon the host employed in a recombinant production procedure, the polypeptides of the present invention may be glycosylated or may be non-glycosylated. In addition, polypeptides of the invention may also include an initial modified methionine residue, in some cases as a result of host-mediated processes. Thus, it is well known in the art that the N-terminal methionine encoded by the translation initiation codon generally is removed with high efficiency from any protein after translation in all eukaryotic cells. While the N-terminal methionine on most proteins also is efficiently removed in most prokaryotes, for some proteins, this prokaryotic removal process is inefficient, depending on the nature of the amino acid to which the N-terminal methionine is covalently linked.

[0197] In one embodiment, the yeast Pichia pastoris is used to express polypeptides of the invention in a eukaryotic system. Pichia pastoris is a methylotrophic yeast which can metabolize methanol as its sole carbon source. A main step in the methanol metabolization pathway is the oxidation of methanol to formaldehyde using O₂. This reaction is catalyzed by the enzyme alcohol oxidase. In order to metabolize methanol as its sole carbon source, Pichia pastoris must generate high levels of alcohol oxidase due, in part, to the relatively low affinity of alcohol oxidase for O₂. Consequently, in a growth medium depending on methanol as a main carbon source, the promoter region of one of the two alcohol oxidase genes (AOX1) is highly active. In the presence of methanol, alcohol oxidase produced from the AOX1 gene comprises up to approximately 30% of the total soluble protein in Pichia pastoris. See, Ellis, S. B., et al., Mol. Cell. Biol. 5:1111-21 (1985); Koutz, P. J, et al., Yeast 5:167-77 (1989); Tschopp, J. F., et al., Nucl. Acids Res. 15:3859-76 (1987). Thus, a heterologous coding sequence, such as, for example, a polynucleotide of the present invention, under the transcriptional regulation of all or part of the AOX1 regulatory sequence is expressed at exceptionally high levels in Pichia yeast grown in the presence of methanol.

[0198] In one example, the plasmid vector pPIC9K is used to express DNA encoding a polypeptide of the invention, as set forth herein, in a Pichea yeast system essentially as described in “Pichia Protocols: Methods in Molecular Biology,” D. R. Higgins and J. Cregg, eds. The Humana Press, Totowa, N.J., 1998. This expression vector allows expression and secretion of a polypeptide of the invention by virtue of the strong AOX1 promoter linked to the Pichia pastoris alkaline phosphatase (PHO) secretory signal peptide (i.e., leader) located upstream of a multiple cloning site.

[0199] Many other yeast vectors could be used in place of pPIC9K, such as, pYES2, pYD1, pTEF1/Zeo, pYES2/GS, pPICZ, pGAPZ, pGAPZalpha, pPIC9, pPIC3.5, pHIL-D2, pHIL-S1, pPIC3.5K, and PAO815, as one skilled in the art would readily appreciate, as long as the proposed expression construct provides appropriately located signals for transcription, translation, secretion (if desired), and the like, including an in-frame AUG as required.

[0200] In another embodiment, high-level expression of a heterologous coding sequence, such as, for example, a polynucleotide of the present invention, may be achieved by cloning the heterologous polynucleotide of the invention into an expression vector such as, for example, pGAPZ or pGAPZalpha, and growing the yeast culture in the absence of methanol.

[0201] In addition to encompassing host cells containing the vector constructs discussed herein, the invention also encompasses primary, secondary, and immortalized host cells of vertebrate origin, particularly mammalian origin, that have been engineered to delete or replace endogenous genetic material (e.g., coding sequence), and/or to include genetic material (e.g., heterologous polynucleotide sequences) that is operably associated with polynucleotides of the invention, and which activates, alters, and/or amplifies endogenous polynucleotides. For example, techniques known in the art may be used to operably associate heterologous control regions (e.g., promoter and/or enhancer) and endogenous polynucleotide sequences via homologous recombination (see, e.g., U.S. Pat. No. 5,641,670, issued Jun. 24, 1997; International Publication No. WO 96/29411, published Sep. 26, 1996; International Publication No. WO 94/12650, published Aug. 4, 1994; Koller et al., Proc. Natl. Acad. Sci. USA 86:8932-8935 (1989); and Zijlstra et al., Nature 342:435-438 (1989), the disclosures of each of which are incorporated by reference in their entireties).

[0202] In addition, polypeptides of the invention can be chemically synthesized using techniques known in the art (e.g., see Creighton, 1983, Proteins: Structures and Molecular Principles, W. H. Freeman & Co., N.Y., and Hunkapiller et al., Nature, 310:105-111 (1984)). For example, a polypeptide corresponding to a fragment of a polypeptide can be synthesized by use of a peptide synthesizer. Furthermore, if desired, nonclassical amino acids or chemical amino acid analogs can be introduced as a substitution or addition into the polypeptide sequence. Non-classical amino acids include, but are not limited to, to the D-isomers of the common amino acids, 2,4-diaminobutyric acid, a-amino isobutyric acid, 4-aminobutyric acid, Abu, 2-amino butyric acid, g-Abu, e-Ahx, 6-amino hexanoic acid, Aib, 2-amino isobutyric acid, 3-amino propionic acid, ornithine, norleucine, norvaline, hydroxyproline, sarcosine, citrulline, homocitrulline, cysteic acid, t-butylglycine, t-butylalanine, phenylglycine, cyclohexylalanine, b-alanine, fluoro-amino acids, designer amino acids such as b-methyl amino acids, Ca-methyl amino acids, Na-methyl amino acids, and amino acid analogs in general. Furthermore, the amino acid can be D (dextrorotary) or L (levorotary).

[0203] The invention encompasses polypeptides of the present invention which are differentially modified during or after translation, e.g., by glycosylation, acetylation, phosphorylation, amidation, derivatization by known protecting/blocking groups, proteolytic cleavage, linkage to an antibody molecule or other cellular ligand, etc. Any of numerous chemical modifications may be carried out by known techniques, including but not limited, to specific chemical cleavage by cyanogen bromide, trypsin, chymotrypsin, papain, V8 protease, NaBH₄; acetylation, formylation, oxidation, reduction; metabolic synthesis in the presence of tunicamycin; etc.

[0204] Additional post-translational modifications encompassed by the invention include, for example, e.g., N-linked or O-linked carbohydrate chains, processing of N-terminal or C-terminal ends), attachment of chemical moieties to the amino acid backbone, chemical modifications of N-linked or O-linked carbohydrate chains, and addition or deletion of an N-terminal methionine residue as a result of procaryotic host cell expression. The polypeptides may also be modified with a detectable label, such as an enzymatic, fluorescent, isotopic or affinity label to allow for detection and isolation of the protein.

[0205] Examples of suitable enzymes include horseradish peroxidase, alkaline phosphatase, beta-galactosidase, or acetylcholinesterase; examples of suitable prosthetic group complexes include streptavidin/biotin and avidin/biotin; examples of suitable fluorescent materials include umbelliferone, fluorescein, fluorescein isothiocyanate, rhodamine, dichlorotriazinylamine fluorescein, dansyl chloride or phycoerythrin; an example of a luminescent material includes luminol; examples of bioluminescent materials include luciferase, luciferin, and aequorin; and examples of suitable radioactive material include iodine (¹²¹I, ¹²³I, ¹²⁵I, ¹³¹I), carbon (¹⁴C), sulfur (³⁵S), tritium (³H), indium (¹¹¹In, ¹¹²In, ^{113m}In, ^{115m}In), technetium (⁹⁹Tc,^{99m}Tc), thallium (²⁰¹Ti), gallium (⁶⁸Ga, ⁶⁷Ga), palladium (¹⁰³Pd), molybdenum (⁹⁹Mo), xenon (¹³³Xe), fluorine (¹⁸F), ¹⁵³Sm, ¹⁷⁷Lu, ¹⁵⁹Gd, ¹⁴⁹Pm, ¹⁴⁰La, ¹⁷⁵Yb, ¹⁶⁶Ho, ⁹⁰Y, ⁴⁷Sc, ¹⁸⁶Re, ¹⁸⁸Re, ¹⁴²Pr, ¹⁰⁵Rh, and ⁹⁷Ru.

[0206] In specific embodiments, a polypeptide of the present invention or fragment or variant thereof is attached to macrocyclic chelators that associate with radiometal ions, including but not limited to, ¹⁷⁷Lu, ⁹⁰Y, ¹⁶⁶Ho, and ¹⁵³Sm, to polypeptides. In a preferred embodiment, the radiometal ion associated with the macrocyclic chelators is ¹¹¹In. In another preferred embodiment, the radiometal ion associated with the macrocyclic chelator is ⁹⁰Y. In specific embodiments, the macrocyclic chelator is 1,4,7,10-tetraazacyclododecane-N,N′,N″,N′″-tetraacetic acid (DOTA). In other specific embodiments, DOTA is attached to an antibody of the invention or fragment thereof via a linker molecule. Examples of linker molecules useful for conjugating DOTA to a polypeptide are commonly known in the art—see, for example, DeNardo et al., Clin Cancer Res. 4(10):2483-90 (1998); Peterson et al., Bioconjug. Chem. 10(4):553-7 (1999); and Zimmerman et al, Nucl. Med. Biol. 26(8):943-50 (1999); which are hereby incorporated by reference in their entirety.

[0207] As mentioned, the proteins of the invention may be modified by either natural processes, such as posttranslational processing, or by chemical modification techniques which are well known in the art. It will be appreciated that the same type of modification may be present in the same or varying degrees at several sites in a given polypeptide. Polypeptides of the invention may be branched, for example, as a result of ubiquitination, and they may be cyclic, with or without branching. Cyclic, branched, and branched cyclic polypeptides of the invention may result from posttranslation natural processes or may be made by synthetic methods. Modifications include acetylation, acylation, ADP-ribosylation, amidation, covalent attachment of flavin, covalent attachment of a heme moiety, covalent attachment of a nucleotide or nucleotide derivative, covalent attachment of a lipid or lipid derivative, covalent attachment of phosphotidylinositol, cross-linking, cyclization, disulfide bond formation, demethylation, formation of covalent cross-links, formation of cysteine, formation of pyroglutamate, formylation, gamma-carboxylation, glycosylation, GPI anchor formation, hydroxylation, iodination, methylation, myristoylation, oxidation, pegylation, proteolytic processing, phosphorylation, prenylation, racemization, selenoylation, sulfation, transfer-RNA mediated addition of amino acids to proteins such as arginylation, and ubiquitination. (See, for instance, PROTEINS—STRUCTURE AND MOLECULAR PROPERTIES, 2nd Ed., T. E. Creighton, W. H. Freeman and Company, New York (1993); POSTTRANSLATIONAL COVALENT MODIFICATION OF PROTEINS, B. C. Johnson, Ed., Academic Press, New York, pgs. 1-12 (1983); Seifter et al., Meth. Enzymol. 182:626-646 (1990); Rattan et al., Ann. N.Y. Acad. Sci. 663:48-62 (1992)).

[0208] Also provided by the invention are chemically modified derivatives of the polypeptides of the invention which may provide additional advantages such as increased solubility, stability and circulating time of the polypeptide, or decreased immunogenicity (see U.S. Pat. No. 4,179,337). The chemical moieties for derivitization may be selected from water soluble polymers such as polyethylene glycol, ethylene glycol/propylene glycol copolymers, carboxymethylcellulose, dextran, polyvinyl alcohol and the like. The polypeptides may be modified at random positions within the molecule, or at predetermined positions within the molecule and may include one, two, three or more attached chemical moieties.

[0209] The polymer may be of any molecular weight, and may be branched or unbranched. For polyethylene glycol, the preferred molecular weight is between about 1 kDa and about 100 kDa (the term “about” indicating that in preparations of polyethylene glycol, some molecules will weigh more, some less, than the stated molecular weight) for ease in handling and manufacturing. Other sizes may be used, depending on the desired therapeutic profile (e.g., the duration of sustained release desired, the effects, if any on biological activity, the ease in handling, the degree or lack of antigenicity and other known effects of the polyethylene glycol to a therapeutic protein or analog). For example, the polyethylene glycol may have an average molecular weight of about 200, 500, 1000, 1500, 2000, 2500, 3000, 3500, 4000, 4500, 5000, 5500, 6000, 6500, 7000, 7500, 8000, 8500, 9000, 9500, 10,000, 10,500, 11,000, 11,500, 12,000, 12,500, 13,000, 13,500, 14,000, 14,500, 15,000, 15,500, 16,000, 16,500, 17,000, 17,500, 18,000, 18,500, 19,000, 19,500, 20,000, 25,000, 30,000, 35,000, 40,000, 50,000, 55,000, 60,000, 65,000, 70,000, 75,000, 80,000, 85,000, 90,000, 95,000, or 100,000 kDa.

[0210] As noted above, the polyethylene glycol may have a branched structure. Branched polyethylene glycols are described, for example, in U.S. Pat. No. 5,643,575; Morpurgo et al., Appl. Biochem. Biotechnol. 56:59-72 (1996); Vorobjev et al., Nucleosides Nucleotides 18:2745-2750 (1999); and Caliceti et al., Bioconjug. Chem. 10:638-646 (1999), the disclosures of each of which are incorporated herein by reference.

[0211] The polyethylene glycol molecules (or other chemical moieties) should be attached to the protein with consideration of effects on functional or antigenic domains of the protein. There are a number of attachment methods available to those skilled in the art, such as, for example, the method disclosed in EP 0 401 384 (coupling PEG to G-CSF), herein incorporated by reference; see also Malik et al., Exp. Hematol. 20:1028-1035 (1992), reporting pegylation of GM-CSF using tresyl chloride. For example, polyethylene glycol may be covalently bound through amino acid residues via a reactive group, such as a free amino or carboxyl group. Reactive groups are those to which an activated polyethylene glycol molecule may be bound. The amino acid residues having a free amino group may include lysine residues and the N-terminal amino acid residues; those having a free carboxyl group may include aspartic acid residues glutamic acid residues and the C-terminal amino acid residue. Sulfhydryl groups may also be used as a reactive group for attaching the polyethylene glycol molecules. Preferred for therapeutic purposes is attachment at an amino group, such as attachment at the N-terminus or lysine group.

[0212] As suggested above, polyethylene glycol may be attached to proteins via linkage to any of a number of amino acid residues. For example, polyethylene glycol can be linked to proteins via covalent bonds to lysine, histidine, aspartic acid, glutamic acid, or cysteine residues. One or more reaction chemistries may be employed to attach polyethylene glycol to specific amino acid residues (e.g., lysine, histidine, aspartic acid, glutamic acid, or cysteine) of the protein or to more than one type of amino acid residue (e.g., lysine, histidine, aspartic acid, glutamic acid, cysteine and combinations thereof) of the protein.

[0213] One may specifically desire proteins chemically modified at the N-terminus. Using polyethylene glycol as an illustration of the present composition, one may select from a variety of polyethylene glycol molecules (by molecular weight, branching, etc.), the proportion of polyethylene glycol molecules to protein (polypeptide) molecules in the reaction mix, the type of pegylation reaction to be performed, and the method of obtaining the selected N-terminally pegylated protein. The method of obtaining the N-terminally pegylated preparation (i.e., separating this moiety from other monopegylated moieties if necessary) may be by purification of the N-terminally pegylated. material from a population of pegylated protein molecules. Selective proteins chemically modified at the N-terminus modification may be accomplished by reductive alkylation which exploits differential reactivity of different types of primary amino groups (lysine versus the N-terminal) available for derivatization in a particular protein. Under the appropriate reaction conditions, substantially selective derivatization of the protein at the N-terminus with a carbonyl group containing polymer is achieved.

[0214] As indicated above, pegylation of the proteins of the invention may be accomplished by any number of means. For example, polyethylene glycol may be attached to the protein either directly or by an intervening linker. Linkerless systems for attaching polyethylene glycol to proteins are described in Delgado et al., Crit. Rev. Thera. Drug Carrier Sys. 9:249-304 (1992); Francis et al., Intern. J. of Hematol. 68:1-18 (1998); U.S. Pat. No. 4,002,531; U.S. Pat. No. 5,349,052; WO 95/06058; and WO 98/32466, the disclosures of each of which are incorporated herein by reference.

[0215] One system for attaching polyethylene glycol directly to amino acid residues of proteins without an intervening linker employs tresylated MPEG, which is produced by the modification of monmethoxy polyethylene glycol (MPEG) using tresylchloride (ClSO₂CH₂CF₃). Upon reaction of protein with tresylated MPEG, polyethylene glycol is directly attached to amine groups of the protein. Thus, the invention includes protein-polyethylene glycol conjugates produced by reacting proteins of the invention with a polyethylene glycol molecule having a 2,2,2-trifluoreothane sulphonyl group.

[0216] Polyethylene glycol can also be attached to proteins using a number of different intervening linkers. For example, U.S. Pat. No. 5,612,460, the entire disclosure of which is incorporated herein by reference, discloses urethane linkers for connecting polyethylene glycol to proteins. Protein-polyethylene glycol conjugates wherein the polyethylene glycol is attached to the protein by a linker can also be produced by reaction of proteins with compounds such as MPEG-succinimidylsuccinate, MPEG activated with 1,1′-carbonyldiimidazole, MPEG-2,4,5-trichloropenylcarbonate, MPEG-p-nitrophenolcarbonate, and various MPEG-succinate derivatives. A number of additional polyethylene glycol derivatives and reaction chemistries for attaching polyethylene glycol to proteins are described in International Publication No. WO 98/32466, the entire disclosure of which is incorporated herein by reference. Pegylated protein products produced using the reaction chemistries set out herein are included within the scope of the invention.

[0217] The number of polyethylene glycol moieties attached to each protein of the invention (i.e., the degree of substitution) may also vary. For example, the pegylated proteins of the invention may be linked, on average, to 1, 2, 3, 4, 5, 6, 7, 8, 9, 10, 12, 15, 17, 20, or more polyethylene glycol molecules. Similarly, the average degree of substitution within ranges such as 1-3, 2-4, 3-5, 4-6, 5-7, 6-8, 7-9, 8-10, 9-11, 10-12, 11-13, 12-14, 13-15, 14-16, 15-17, 16-18, 17-19, or 18-20 polyethylene glycol moieties per protein molecule. Methods for determining the degree of substitution are discussed, for example, in Delgado et al., Crit. Rev. Thera. Drug Carrier Sys. 9:249-304 (1992).

[0218] The polypeptides of the invention can be recovered and purified from chemical synthesis and recombinant cell cultures by standard methods which include, but are not limited to, ammonium sulfate or ethanol precipitation, acid extraction, anion or cation exchange chromatography, phosphocellulose chromatography, hydrophobic interaction chromatography, affinity chromatography, hydroxylapatite chromatography and lectin chromatography. Most preferably, high performance liquid chromatography (“HPLC”) is employed for purification. Well known techniques for refolding protein may be employed to regenerate active conformation when the polypeptide is denatured during isolation and/or purification.

[0219] Polynucleotides and polypeptides of the invention may be used in accordance with the present invention for a variety of applications, particularly those that make use of the chemical and biological properties of plasma membrane associated antigens. Among these are applications in the detection, prevention, diagnosis and/or treatment of diseases associated with these novel polypeptides, including, but not limited to, diseases associated with cell proliferation and cell signaling, particularly cancer, immune response and neuronal disorders; in addition to providing new targets for immune based therapies. Additional applications relate to diagnosis and to treatment of disorders of cells, tissues and organisms. These aspects of the invention are discussed further below.

[0220] In a preferred embodiment, polynucleotides expressed in a particular tissue type are used to detect, diagnose, treat, prevent and/or prognose disorders associated with the tissue type.

[0221] The polypeptides of the invention may be in monomers or multimers (i.e., dimers, trimers, tetramers and higher multimers). Accordingly, the present invention relates to monomers and multimers of the polypeptides of the invention, their preparation, and compositions (preferably, Therapeutics) containing them. In specific embodiments, the polypeptides of the invention are monomers, dimers, trimers or tetramers. In additional embodiments, the multimers of the invention are at least dimers, at least trimers, or at least tetramers.

[0222] Multimers encompassed by the invention may be homomers or heteromers. As used herein, the term homomer refers to a multimer containing only polypeptides corresponding to a protein of the invention (e.g., the amino acid sequence of SEQ ID NO:Y, an amino acid sequence encoded by SEQ ID NO:X or the complement of SEQ ID NO:X, the amino acid sequence encoded by the portion of SEQ ID NO:X as defined in columns 8 and 9 of Table 2, and/or an amino acid sequence encoded by cDNA contained in Clone ID NO:Z (including fragments, variants, splice variants, and fusion proteins, corresponding to these as described herein)). These homomers may contain polypeptides having identical or different amino acid sequences. In a specific embodiment, a homomer of the invention is a multimer containing only polypeptides having an identical amino acid sequence. In another specific embodiment, a homomer of the invention is a multimer containing polypeptides having different amino acid sequences. In specific embodiments, the multimer of the invention is a homodimer (e.g., containing two polypeptides having identical or different amino acid sequences) or a homotrimer (e.g., containing three polypeptides having identical and/or different amino acid sequences). In additional embodiments, the homomeric multimer of the invention is at least a homodimer, at least a homotrimer, or at least a homotetramer.

[0223] As used herein, the term heteromer refers to a multimer containing two or more heterologous polypeptides (i.e., polypeptides of different proteins) in addition to the polypeptides of the invention. In a specific embodiment, the multimer of the invention is a heterodimer, a heterotrimer, or a heterotetramer. In additional embodiments, the heteromeric multimer of the invention is at least a heterodimer, at least a heterotrimer, or at least a heterotetramer.

[0224] Multimers of the invention may be the result of hydrophobic, hydrophilic, ionic and/or covalent associations and/or may be indirectly linked by, for example, liposome formation. Thus, in one embodiment, multimers of the invention, such as, for example, homodimers or homotrimers, are formed when polypeptides of the invention contact one another in solution. In another embodiment, heteromultimers of the invention, such as, for example, heterotrimers or heterotetramers, are formed when polypeptides of the invention contact antibodies to the polypeptides of the invention (including antibodies to the heterologous polypeptide sequence in a fusion protein of the invention) in solution. In other embodiments, multimers of the invention are formed by covalent associations with and/or between the polypeptides of the invention. Such covalent associations may involve one or more amino acid residues contained in the polypeptide sequence (e.g., that recited in SEQ ID NO:Y, encoded by the portion of SEQ ID NO:X as defined in columns 8 and 9 of Table 2, and/or encoded by the cDNA contained in Clone ID NO:Z). In one instance, the covalent associations are cross-linking between cysteine residues located within the polypeptide sequences which interact in the native (i.e., naturally occurring) polypeptide. In another instance, the covalent associations are the consequence of chemical or recombinant manipulation. Alternatively, such covalent associations may involve one or more amino acid residues contained in the heterologous polypeptide sequence in a fusion protein. In one example, covalent associations are between the heterologous sequence contained in a fusion protein of the invention (see, e.g., U.S. Pat. No. 5,478,925). In a specific example, the covalent associations are between the heterologous sequence contained in a Fc fusion protein of the invention (as described herein). In another specific example, covalent associations of fusion proteins of the invention are between heterologous polypeptide sequence from another protein that is capable of forming covalently associated multimers, such as for example, osteoprotegerin (see, e.g., International Publication NO: WO 98/49305, the contents of which are herein incorporated by reference in its entirety). In another embodiment, two or more polypeptides of the invention are joined through peptide linkers. Examples include those peptide linkers described in U.S. Pat. No. 5,073,627 (hereby incorporated by reference). Proteins comprising multiple polypeptides of the invention separated by peptide linkers may be produced using conventional recombinant DNA technology.

[0225] Another method for preparing multimer polypeptides of the invention involves use of polypeptides of the invention fused to a leucine zipper or isoleucine zipper polypeptide sequence. Leucine zipper and isoleucine zipper domains are polypeptides that promote multimerization of the proteins in which they are found. Leucine zippers were originally identified in several DNA-binding proteins (Landschulz et al., Science 240:1759, (1988)), and have since been found in a variety of different proteins. Among the known leucine zippers are naturally occurring peptides and derivatives thereof that dimerize or trimerize. Examples of leucine zipper domains suitable for producing soluble multimeric proteins of the invention are those described in PCT application WO 94/10308, hereby incorporated by reference. Recombinant fusion proteins comprising a polypeptide of the invention fused to a polypeptide sequence that dimerizes or trimerizes in solution are expressed in suitable host cells, and the resulting soluble multimeric fusion protein is recovered from the culture supernatant using techniques known in the art.

[0226] Trimeric polypeptides of the invention may offer the advantage of enhanced biological activity. Preferred leucine zipper moieties and isoleucine moieties are those that preferentially form trimers. One example is a leucine zipper derived from lung surfactant protein D (SPD), as described in Hoppe et al. (FEBS Letters 344:191, (1994)) and in U.S. patent application Ser. No. 08/446,922, hereby incorporated by reference. Other peptides derived from naturally occurring trimeric proteins may be employed in preparing trimeric polypeptides of the invention.

[0227] In another example, proteins of the invention are associated by interactions between Flag® polypeptide sequence contained in fusion proteins of the invention containing Flag® polypeptide sequence. In a further embodiment, proteins of the invention are associated by interactions between heterologous polypeptide sequence contained in Flag® fusion proteins of the invention and anti-Flag® antibody.

[0228] The multimers of the invention may be generated using chemical techniques known in the art. For example, polypeptides desired to be contained in the multimers of the invention may be chemically cross-linked using linker molecules and linker molecule length optimization techniques known in the art (see, e.g., U.S. Pat. No. 5,478,925, which is herein incorporated by reference in its entirety). Additionally, multimers of the invention may be generated using techniques known in the art to form one or more inter-molecule cross-links between the cysteine residues located within the sequence of the polypeptides desired to be contained in the multimer (see, e.g., U.S. Pat. No. 5,478,925, which is herein incorporated by reference in its entirety). Further, polypeptides of the invention may be routinely modified by the addition of cysteine or biotin to the C-terminus or N-terminus of the polypeptide and techniques known in the art may be applied to generate multimers containing one or more of these modified polypeptides (see, e.g., U.S. Pat. No. 5,478,925, which is herein incorporated by reference in its entirety). Additionally, techniques known in the art may be applied to generate liposomes containing the polypeptide components desired to be contained in the multimer of the invention (see, e.g., U.S. Pat. No. 5,478,925, which is herein incorporated by reference in its entirety).

[0229] Alternatively, multimers of the invention may be generated using genetic engineering techniques known in the art. In one embodiment, polypeptides contained in multimers of the invention are produced recombinantly using fusion protein technology described herein or otherwise known in the art (see, e.g., U.S. Pat. No. 5,478,925, which is herein incorporated by reference in its entirety). In a specific embodiment, polynucleotides coding for a homodimer of the invention are generated by ligating a polynucleotide sequence encoding a polypeptide of the invention to a sequence encoding a linker polypeptide and then further to a synthetic polynucleotide encoding the translated product of the polypeptide in the reverse orientation from the original C-terminus to the N-terminus (lacking the leader sequence) (see, e.g., U.S. Pat. No. 5,478,925, which is herein incorporated by reference in its entirety). In another embodiment, recombinant techniques described herein or otherwise known in the art are applied to generate recombinant polypeptides of the invention which contain a transmembrane domain (or hydrophobic or signal peptide) and which can be incorporated by membrane reconstitution techniques into liposomes (see, e.g., U.S. Pat. No. 5,478,925, which is herein incorporated by reference in its entirety).

[0230] Antibodies

[0231] Further polypeptides of the invention relate to antibodies and T-cell antigen receptors (TCR) which immunospecifically bind a polypeptide, polypeptide fragment, or variant of the invention (e.g., a polypeptide or fragment or variant of the amino acid sequence of SEQ ID NO:Y or a polypeptide encoded by the cDNA contained in Clone ID NO:Z, and/or an epitope, of the present invention) as determined by immunoassays well known in the art for assaying specific antibody-antigen binding. Antibodies of the invention include, but are not limited to, polyclonal, monoclonal, multispecific, human, humanized or chimeric antibodies, single chain antibodies, Fab fragments, F(ab′) fragments, fragments produced by a Fab expression library, anti-idiotypic (anti-Id) antibodies (including, e.g., anti-Id antibodies to antibodies of the invention), intracellularly-made antibodies (i.e., intrabodies), and epitope-binding fragments of any of the above. The term “antibody,” as used herein, refers to immunoglobulin molecules and immunologically active portions of immunoglobulin molecules, i.e., molecules that contain an antigen binding site that immunospecifically binds an antigen. The immunoglobulin molecules of the invention can be of any type (e.g., IgG, IgE, IgM, IgD, IgA and IgY), class (e.g., IgG1, IgG2, IgG3, IgG4, IgA1 and IgA2) or subclass of immunoglobulin molecule. In preferred embodiments, the immunoglobulin molecules of the invention are IgG1. In other preferred embodiments, the immunoglobulin molecules of the invention are IgG4.

[0232] Most preferably the antibodies are human antigen-binding antibody fragments of the present invention and include, but are not limited to, Fab, Fab′ and F(ab′)2, Fd, single-chain Fvs (scFv), single-chain antibodies, disulfide-linked Fvs (sdFv) and fragments comprising either a VL or VH domain. Antigen-binding antibody fragments, including single-chain antibodies, may comprise the variable region(s) alone or in combination with the entirety or a portion of the following: hinge region, CH1, CH2, and CH3 domains. Also included in the invention are antigen-binding fragments also comprising any combination of variable region(s) with a hinge region, CH1, CH2, and CH3 domains. The antibodies of the invention may be from any animal origin including birds and mammals. Preferably, the antibodies are human, murine (e.g., mouse and rat), donkey, ship rabbit, goat, guinea pig, camel, horse, or chicken. As used herein, “human” antibodies include antibodies having the amino acid sequence of a human immunoglobulin and include antibodies isolated from human immunoglobulin libraries or from animals transgenic for one or more human immunoglobulin and that do not express endogenous immunoglobulins, as described infra and, for example in, U.S. Pat. No. 5,939,598 by Kucherlapati et al.

[0233] The antibodies of the present invention may be monospecific, bispecific, trispecific or of greater multispecificity. Multispecific antibodies may be specific for different epitopes of a polypeptide of the present invention or may be specific for both a polypeptide of the present invention as well as for a heterologous epitope, such as a heterologous polypeptide or solid support material. See, e.g., PCT publications WO 93/17715; WO 92/08802; WO 91/00360; WO 92/05793; Tutt, et al., J. Immunol. 147:60-69 (1991); U.S. Pat. Nos. 4,474,893; 4,714,681; 4,925,648; 5,573,920; 5,601,819; Kostelny et al., J. Immunol. 148:1547-1553 (1992).

[0234] Antibodies of the present invention may be described or specified in terms of the epitope(s) or portion(s) of a polypeptide of the present invention which they recognize or specifically bind. The epitope(s) or polypeptide portion(s) may be specified as described herein, e.g., by N-terminal and C-terminal positions, or by size in contiguous amino acid residues, or listed in the Tables and Figures. Preferred epitopes of the invention include those shown in column 7 of Table 1, as well as polynucleotides that encode these epitopes. Antibodies, which specifically bind any epitope or polypeptide of the present invention may also be excluded. Therefore, the present invention includes antibodies that specifically bind polypeptides of the present invention, and allows for the exclusion of the same.

[0235] Antibodies of the present invention may also be described or specified in terms of their cross-reactivity. Antibodies that do not bind any other analog, ortholog, or homolog of a polypeptide of the present invention are included. Antibodies that bind polypeptides with at least 95%, at least 90%, at least 85%, at least 80%, at least 75%, at least 70%, at least 65%, at least 60%, at least 55%, and at least 50% identity (as calculated using methods known in the art and described herein) to a polypeptide of the present invention are also included in the present invention. In specific embodiments, antibodies of the present invention cross-react with murine, rat and/or rabbit homologs of human proteins and the corresponding epitopes thereof. Antibodies that do not bind polypeptides with less than 95%, less than 90%, less than 85%, less than 80%, less than 75%, less than 70%, less than 65%, less than 60%, less than 55%, and less than 50% identity (as calculated using methods known in the art and described herein) to a polypeptide of the present invention are also included in the present invention. In a specific embodiment, the above-described cross-reactivity is with respect to any single specific antigenic or immunogenic polypeptide, or combination(s) of 2, 3, 4, 5, or more of the specific antigenic and/or immunogenic polypeptides disclosed herein. Further included in the present invention are antibodies which bind polypeptides encoded by polynucleotides which hybridize to a polynucleotide of the present invention under stringent hybridization conditions (as described herein). Antibodies of the present invention may also be described or specified in terms of their binding affinity to a polypeptide of the invention. Preferred binding affinities include those with a dissociation constant or Kd less than 5×10⁻² M, 10⁻² M, 5×10⁻³ M, 10⁻³ M, 5×10⁻⁴ M, 10⁻⁴ M, 5×10⁻⁵ M, 10⁻⁵ M, 5×10⁻⁶ M, 10⁻⁶M, 5×10⁻⁷ M, 10⁷ M, 5×10⁻⁸ M, 10⁻⁸ M, 5×10⁻⁹ M, 10⁻⁹ M, 5×10⁻¹⁰ M, 10⁻¹⁰ M, 5×10⁻¹¹ M, 10⁻¹¹ M, 5×10⁻¹² M, 10⁻¹² M, 5×10⁻¹³ M, 10⁻¹³ M, 5×10⁻¹⁴ M, 10⁻¹⁴ M, 5×10⁻¹⁵ M, 10⁻¹⁵ M.

[0236] The invention also provides antibodies that competitively inhibit binding of an antibody to an epitope of the invention as determined by any method known in the art for determining competitive binding, for example, the immunoassays described herein. In preferred embodiments, the antibody competitively inhibits binding to the epitope by at least 95%, at least 90%, at least 85%, at least 80%, at least 75%, at least 70%, at least 60%, or at least 50%.

[0237] Antibodies of the present invention may act as agonists or antagonists of the polypeptides of the present invention. For example, the present invention includes antibodies which disrupt the receptor/ligand interactions with the polypeptides of the invention either partially or fully. Preferably, antibodies of the present invention bind an antigenic epitope disclosed herein, or a portion thereof. The invention features both receptor-specific antibodies and ligand-specific antibodies. The invention also features receptor-specific antibodies, which do not prevent ligand binding but prevent receptor activation. Receptor activation (i.e., signaling) may be determined by techniques described herein or otherwise known in the art. For example, receptor activation can be determined by detecting the phosphorylation (e.g., tyrosine or serine/threonine) of the receptor or its substrate by immunoprecipitation followed by western blot analysis (for example, as described supra). In specific embodiments, antibodies are provided that inhibit ligand activity or receptor activity by at least 95%, at least 90%, at least 85%, at least 80%, at least 75%, at least 70%, at least 60%, or at least 50% of the activity in absence of the antibody.

[0238] The invention also features receptor-specific antibodies which both prevent ligand binding and receptor activation as well as antibodies that recognize the receptor-ligand complex, and, preferably, do not specifically recognize the unbound receptor or the unbound ligand. Likewise, included in the invention are neutralizing antibodies which bind the ligand and prevent binding of the ligand to the receptor, as well as antibodies which bind the ligand, thereby preventing receptor activation, but do not prevent the ligand from binding the receptor. Further included in the invention are antibodies, which activate the receptor. These antibodies may act as receptor agonists, i.e., potentiate or activate either all or a subset of the biological activities of the ligand-mediated receptor activation, for example, by inducing dimerization of the receptor. The antibodies may be specified as agonists, antagonists or inverse agonists for biological activities comprising the specific biological activities of the peptides of the invention disclosed herein. The above antibody agonists can be made using methods known in the art. See, e.g., PCT publication WO 96/40281; U.S. Pat. No. 5,811,097; Deng et al., Blood 92(6):1981-1988 (1998); Chen et al., Cancer Res. 58(16):3668-3678 (1998); Harrop et al., J. Immunol. 161(4):1786-1794 (1998); Zhu et al., Cancer Res. 58(15):3209-3214 (1998); Yoon et al., J. Immunol. 160(7):3170-3179 (1998); Prat et al., J. Cell. Sci. 111(Pt2):237-247 (1998); Pitard et al., J. Immunol. Methods 205(2):177-190 (1997); Liautard et al., Cytokine 9(4):233-241 (1997); Carlson et al., J. Biol. Chem. 272(17):11295-11301 (1997); Taryman et al., Neuron 14(4):755-762 (1995); Muller et al., Structure 6(9):1153-1167 (1998); Bartunek et al., Cytokine 8(1):14-20 (1996) (which are all incorporated by reference herein in their entireties).

[0239] Antibodies of the present invention may be used, for example, to purify, detect, and target the polypeptides of the present invention, including both in vitro and in vivo diagnostic and therapeutic methods. For example, the antibodies have utility in immunoassays for qualitatively and quantitatively measuring levels of the polypeptides of the present invention in biological samples. See, e.g., Harlow et al., Antibodies: A Laboratory Manual, (Cold Spring Harbor Laboratory Press, 2nd ed. 1988); incorporated by reference herein in its entirety.

[0240] As discussed in more detail below, the antibodies of the present invention may be used either alone or in combination with other compositions. The antibodies may further be recombinantly fused to a heterologous polypeptide at the N- or C-terminus or chemically conjugated (including covalent and non-covalent conjugations) to polypeptides or other compositions. For example, antibodies of the present invention may be recombinantly fused or conjugated to molecules useful as labels in detection assays and effector molecules such as heterologous polypeptides, drugs, radionuclides, or toxins. See, .e.g., PCT publications WO 92/08495; WO 91/14438; WO 89/12624; U.S. Pat. No. 5,314,995; and EP 396,387; the disclosures of which are incorporated herein by reference in their entireties.

[0241] The antibodies of the invention include derivatives that are modified, i.e., by the covalent attachment of any type of molecule to the antibody such that covalent attachment does not prevent the antibody from generating an anti-idiotypic response. For example, but not by way of limitation, the antibody derivatives include antibodies that have been modified, e.g., by glycosylation, acetylation, pegylation, phosphylation, amidation, derivatization by known protecting/blocking groups, proteolytic cleavage, linkage to a cellular ligand or other protein, etc. Any of numerous chemical modifications may be carried out by known techniques, including, but not limited to specific chemical cleavage, acetylation, formylation, metabolic synthesis of tunicamycin, etc. Additionally, the derivative may contain one or more non-classical amino acids.

[0242] The antibodies of the present invention may be generated by any suitable method known in the art. Polyclonal antibodies to an antigen-of-interest can be produced by various procedures well known in the art. For example, a polypeptide of the invention can be administered to various host animals including, but not limited to, rabbits, mice, rats, etc. to induce the production of sera containing polyclonal antibodies specific for the antigen. Various adjuvants may be used to increase the immunological response, depending on the host species, and include but are not limited to, Freund's (complete and incomplete), mineral gels such as aluminum hydroxide, surface active substances such as lysolecithin, pluronic polyols, polyanions, peptides, oil emulsions, keyhole limpet hemocyanins, dinitrophenol, and potentially useful human adjuvants such as BCG (bacille Calmette-Guerin) and corynebacterium parvum. Such adjuvants are also well known in the art.

[0243] Monoclonal antibodies can be prepared using a wide variety of techniques known in the art including the use of hybridoma, recombinant, and phage display technologies, or a combination thereof. For example, monoclonal antibodies can be produced using hybridoma techniques including those known in the art and taught, for example, in Harlow et al., Antibodies: A Laboratory Manual, (Cold Spring Harbor Laboratory Press, 2nd ed. 1988); Hammerling, et al., in: Monoclonal Antibodies and T-Cell Hybridomas 563-681 (Elsevier, N.Y., 1981) (said references incorporated by reference in their entireties). The term “monoclonal antibody” as used herein is not limited to antibodies produced through hybridoma technology. The term “monoclonal antibody” refers to an antibody that is derived from a single clone, including any eukaryotic, prokaryotic, or phage clone, and not the method by which it is produced.

[0244] Methods for producing and screening for specific antibodies using hybridoma technology are routine and well known in the art and are discussed in detail in the Examples. In a non-limiting example, mice can be immunized with a polypeptide of the invention or a cell expressing such peptide. Once an immune response is detected, e.g., antibodies specific for the antigen are detected in the mouse serum, the mouse spleen is harvested and splenocytes isolated. The splenocytes are then fused by well known techniques to any suitable myeloma cells, for example cells from cell line SP20 available from the ATCC. Hybridomas are selected and cloned by limited dilution. The hybridoma clones are then assayed by methods known in the art for cells that secrete antibodies capable of binding a polypeptide of the invention. Ascites fluid, which generally contains high levels of antibodies, can be generated by immunizing mice with positive hybridoma clones.

[0245] Accordingly, the present invention provides methods of generating monoclonal antibodies as well as antibodies produced by the method comprising culturing a hybridoma cell secreting an antibody of the invention wherein, preferably, the hybridoma is generated by fusing splenocytes isolated from a mouse immunized with an antigen of the invention with myeloma cells and then screening the hybridomas resulting from the fusion for hybridoma clones that secrete an antibody able to bind a polypeptide of the invention.

[0246] Another well known method for producing both polyclonal and monoclonal human B cell lines is transformation using Epstein Barr Virus (EBV). Protocols for generating EBV-transformed B cell lines are commonly known in the art, such as, for example, the protocol outlined in Chapter 7.22 of Current Protocols in Immunology, Coligan et al., Eds., 1994, John Wiley & Sons, NY, which is hereby incorporated in its entirety by reference herein. The source of B cells for transformation is commonly human peripheral blood, but B cells for transformation may also be derived from other sources including, but not limited to, lymph nodes, tonsil, spleen, tumor tissue, and infected tissues. Tissues are generally made into single cell suspensions prior to EBV transformation. Additionally, steps may be taken to either physically remove or inactivate T cells (e.g., by treatment with cyclosporin A) in B cell-containing samples, because T cells from individuals seropositive for anti-EBV antibodies can suppress B cell immortalization by EBV.

[0247] In general, the sample containing human B cells is innoculated with EBV, and cultured for 3-4 weeks. A typical source of EBV is the culture supernatant of the B95-8 cell line (ATCC #VR-1492). Physical signs of EBV transformation can generally be seen towards the end of the 3-4 week culture period. By phase-contrast microscopy, transformed cells may appear large, clear, hairy and tend to aggregate in tight clusters of cells. Initially, EBV lines are generally polyclonal. However, over prolonged periods of cell cultures, EBV lines may become monoclonal or polyclonal as a result of the selective outgrowth of particular B cell clones. Alternatively, polyclonal EBV transformed lines may be subcloned (e.g., by limiting dilution culture) or fused with a suitable fusion partner and plated at limiting dilution to obtain monoclonal B cell lines. Suitable fusion partners for EBV transformed cell lines include mouse myeloma cell lines (e.g., SP2/0, X63-Ag8.653), heteromyeloma cell lines (human×mouse; e.g, SPAM-8, SBC-H20, and CB-F7), and human cell lines (e.g., GM 1500, SKO-007, RPMI 8226, and KR-4). Thus, the present invention also provides a method of generating polyclonal or monoclonal human antibodies against polypeptides of the invention or fragments thereof, comprising EBV-transformation of human B cells.

[0248] Antibody fragments, which recognize specific epitopes may be generated by known techniques. For example, Fab and F(ab′)2 fragments of the invention may be produced by proteolytic cleavage of immunoglobulin molecules, using enzymes such as papain (to produce Fab fragments) or pepsin (to produce F(ab′)2 fragments). F(ab′)2 fragments contain the variable region, the light chain constant region and the CH1 domain of the heavy chain. For example, the antibodies of the present invention can also be generated using various phage display methods known in the art and as discussed in detail in the Examples (e.g., Example 10). In phage display methods, functional antibody domains are displayed on the surface of phage particles, which carry the polynucleotide sequences encoding them. In a particular embodiment, such phage can be utilized to display antigen binding domains expressed from a repertoire or combinatorial antibody library (e.g., human or murine). Phage expressing an antigen binding domain that binds the antigen of interest can be selected or identified with antigen, e.g., using labeled antigen or antigen bound or captured to a solid surface or bead. Phage used in these methods are typically filamentous phage including fd and M13 binding domains expressed from phage with Fab, Fv or disulfide stabilized Fv antibody domains recombinantly fused to either the phage gene III or gene VIII protein. Examples of phage display methods that can be used to make the antibodies of the present invention include those disclosed in Brinkman et al., J. Immunol. Methods 182:41-50 (1995); Ames et al., J. Immunol. Methods 184:177-186 (1995); Kettleborough et al., Eur. J. Immunol. 24:952-958 (1994); Persic et al., Gene 187 9-18 (1997); Burton et al., Advances in Immunology 57:191-280 (1994); PCT application No. PCT/GB91/01134; PCT publications WO 90/02809; WO 91/10737; WO 92/01047; WO 92/18619; WO 93/11236; WO 95/15982; WO 95/20401; and U.S. Pat. Nos. 5,698,426; 5,223,409; 5,403,484; 5,580,717; 5,427,908; 5,750,753; 5,821,047; 5,571,698; 5,427,908; 5,516,637; 5,780,225; 5,658,727; 5,733,743 and 5,969,108; each of which is incorporated herein by reference in its entirety.

[0249] As described in the above references, after phage selection, the antibody coding regions from the phage can be isolated and used to generate whole antibodies, including human antibodies, or any other desired antigen binding fragment, and expressed in any desired host, including mammalian cells, insect cells, plant cells, yeast, and bacteria, e.g., as described in detail below. For example, techniques to recombinantly produce Fab, Fab′ and F(ab′)2 fragments can also be employed using methods known in the art such as those disclosed in PCT publication WO 92/22324; Mullinax et al., BioTechniques 12(6):864-869 (1992); and Sawai et al., AJRI 34:26-34 (1995); and Better et al., Science 240:1041-1043 (1988) (said references incorporated by reference in their entireties).

[0250] Examples of techniques which can be used to produce single-chain Fvs and antibodies include those described in U.S. Pat. Nos. 4,946,778 and 5,258,498; Huston et al., Methods in Enzymology 203:46-88 (1991); Shu et al., PNAS 90:7995-7999 (1993); and Skerra et al., Science 240:1038-1040 (1988). For some uses, including in vivo use of antibodies in humans and in vitro detection assays, it may be preferable to use chimeric, humanized, or human antibodies. A chimeric antibody is a molecule in which different portions of the antibody are derived from different animal species, such as antibodies having a variable region derived from a murine monoclonal antibody and a human immunoglobulin constant region. Methods for producing chimeric antibodies are known in the art. See e.g., Morrison, Science 229:1202 (1985); Oi et al., BioTechniques 4:214 (1986); Gillies et al., (1989) J. Immunol. Methods 125:191-202; U.S. Pat. Nos. 5,807,715; 4,816,567; and 4,816397, which are incorporated herein by reference in their entirety. Humanized antibodies are antibody molecules from non-human species antibody that binds the desired antigen having one or more complementarity determining regions (CDRs) from the non-human species and a framework regions from a human immunoglobulin molecule. Often, framework residues in the human framework regions will be substituted with the corresponding residue from the CDR donor antibody to alter, preferably improve, antigen binding. These framework substitutions are identified by methods well known in the art, e.g., by modeling of the interactions of the CDR and framework residues to identify framework residues important for antigen binding and sequence comparison to identify unusual framework residues at particular positions. (See, e.g., Queen et al., U.S. Pat. No. 5,585,089; Riechmann et al., Nature 332:323 (1988), which are incorporated herein by reference in their entireties.) Antibodies can be humanized using a variety of techniques known in the art including, for example, CDR-grafting (EP 239,400; PCT publication WO 91/09967; U.S. Pat. Nos. 5,225,539; 5,530,101; and 5,585,089), veneering or resurfacing (EP 592,106; EP 519,596; Padlan, Molecular Immunology 28(4/5):489-498 (1991); Studnicka et al., Protein Engineering 7(6):805-814 (1994); Roguska. et al., PNAS 91:969-973 (1994)), and chain shuffling (U.S. Pat. No. 5,565,332).

[0251] Completely human antibodies are particularly desirable for therapeutic treatment of human patients. Human antibodies can be made by a variety of methods known in the art including phage display methods described above using antibody libraries derived from human immunoglobulin sequences. See also, U.S. Pat. Nos. 4,444,887 and 4,716,111; and PCT publications WO 98/46645, WO 98/50433, WO 98/24893, WO 98/16654, WO 96/34096, WO 96/33735, and WO 91/10741; each of which is incorporated herein by reference in its entirety.

[0252] Human antibodies can also be produced using transgenic mice which are incapable of expressing functional endogenous immunoglobulins, but which can express human immunoglobulin genes. For example, the human heavy and light chain immunoglobulin gene complexes may be introduced randomly or by homologous recombination into mouse embryonic stem cells. Alternatively, the human variable region, constant region, and diversity region may be introduced into mouse embryonic stem cells in addition to the human heavy and light chain genes. The mouse heavy and light chain immunoglobulin genes may be rendered non-functional separately or simultaneously with the introduction of human immunoglobulin loci by homologous recombination. In particular, homozygous deletion of the JH region prevents endogenous antibody production. The modified embryonic stem cells are expanded and microinjected into blastocysts to produce chimeric mice. The chimeric mice are then bred to produce homozygous offspring, which express human antibodies. The transgenic mice are immunized in the normal fashion with a selected antigen, e.g., all or a portion of a polypeptide of the invention. Monoclonal antibodies directed against the antigen can be obtained from the immunized, transgenic mice using conventional hybridoma technology. The human immunoglobulin transgenes harbored by the transgenic mice rearrange during B cell differentiation, and subsequently undergo class switching and somatic mutation. Thus, using such a technique, it is possible to produce therapeutically useful IgG, IgA, IgM and IgE antibodies. For an overview of this technology for producing human antibodies, see Lonberg and Huszar, Int. Rev. Immunol. 13:65-93 (1995). For a detailed discussion of this technology for producing human antibodies and human monoclonal antibodies and protocols for producing such antibodies, see, e.g., PCT publications WO 98/24893; WO 92/01047; WO 96/34096; WO 96/33735; European Patent No. 0 598 877; U.S. Pat. Nos. 5,413,923; 5,625,126; 5,633,425; 5,569,825; 5,661,016; 5,545,806; 5,814,318; 5,885,793; 5,916,771; 5,939,598; 6,075,181 and 6,114,598, which are incorporated by reference herein in their entirety. In addition, companies such as Abgenix, Inc. (Freemont, Calif.) and Genpharm (San Jose, Calif.) can be engaged to provide human antibodies directed against a selected antigen using technology similar to that described above.

[0253] Completely human antibodies which recognize a selected epitope can be generated using a technique referred to as “guided selection.” In this approach a selected non-human monoclonal antibody, e.g., a mouse antibody, is used to guide the selection of a completely human antibody recognizing the same epitope. (Jespers et al., Bio/technology 12:899-903 (1988)).

[0254] Further, antibodies to the polypeptides of the invention can, in turn, be utilized to generate anti-idiotype antibodies that “mimic” polypeptides of the invention using techniques well known to those skilled in the art. (See, e.g., Greenspan & Bona, FASEB J. 7(5):437-444; (1989) and Nissinoff, J. Immunol. 147(8):2429-2438 (1991)). For example, antibodies which bind to and competitively inhibit polypeptide multimerization and/or binding of a polypeptide of the invention to a ligand can be used to generate anti-idiotypes that “mimic” the polypeptide multimerization and/or binding domain and, as a consequence, bind to and neutralize polypeptide and/or its ligand. Such neutralizing anti-idiotypes or Fab fragments of such anti-idiotypes can be used in therapeutic regimens to neutralize polypeptide ligand/receptor. For example, such anti-idiotypic antibodies can be used to bind a polypeptide of the invention and/or to bind its ligand(s)/receptor(s), and thereby block its biological activity. Alternatively, antibodies which bind to and enhance polypeptide multimerization and/or binding, and/or receptor/ligand multimerization, binding and/or signaling can be used to generate anti-idiotypes that function as agonists of a polypeptide of the invention and/or its ligand/receptor. Such agonistic anti-idiotypes or Fab fragments of such anti-idiotypes can be used in therapeutic regimens as agonists of the polypeptides of the invention or its ligand(s)/receptor(s). For example, such anti-idiotypic antibodies can be used to bind a polypeptide of the invention and/or to bind its ligand(s)/receptor(s), and thereby promote or enhance its biological activity.

[0255] Intrabodies of the invention can be produced using methods known in the art, such as those disclosed and reviewed in Chen et al., Hum. Gene Ther. 5:595-601 (1994); Marasco, W. A., Gene Ther. 4:11-15 (1997); Rondon and Marasco, Annu. Rev. Microbiol. 51:257-283 (1997); Proba et al., J. Mol. Biol. 275:245-253 (1998); Cohen et al., Oncogene 17:2445-2456 (1998); Ohage and Steipe, J. Mol. Biol. 291:1119-1128 (1999); Ohage et al., J. Mol. Biol. 291:1129-1134 (1999); Wirtz and Steipe, Protein Sci. 8:2245-2250 (1999); Zhu et al., J. Immunol. Methods 231:207-222 (1999); and references cited therein.

[0256] Polynucleotides Encoding Antibodies

[0257] The invention further provides polynucleotides comprising a nucleotide sequence encoding an antibody of the invention and fragments thereof. The invention also encompasses polynucleotides that hybridize under stringent or alternatively, under lower stringency hybridization conditions, e.g., as defined supra, to polynucleotides that encode an antibody, preferably, that specifically binds to a polypeptide of the invention, preferably, an antibody that binds to a polypeptide having the amino acid sequence of SEQ ID NO:Y, to a polypeptide encoded by a portion of SEQ ID NO:X as defined in columns 8 and 9 of Table 2, and/or to a polypeptide encoded by the cDNA contained in Clone ID NO:Z.

[0258] The polynucleotides may be obtained, and the nucleotide sequence of the polynucleotides determined, by any method known in the art. For example, if the nucleotide sequence of the antibody is known, a polynucleotide encoding the antibody may be assembled from chemically synthesized oligonucleotides (e.g., as described in Kutmeier et al., BioTechniques 17:242 (1994)), which, briefly, involves the synthesis of overlapping oligonucleotides containing portions of the sequence encoding the antibody, annealing and ligating of those oligonucleotides, and then amplification of the ligated oligonucleotides by PCR.

[0259] Alternatively, a polynucleotide encoding an antibody may be generated from nucleic acid from a suitable source. If a clone containing a nucleic acid encoding a particular antibody is not available, but the sequence of the antibody molecule is known, a nucleic acid encoding the immunoglobulin may be chemically synthesized or obtained from a suitable source (e.g., an antibody cDNA library, or a cDNA library generated from, or nucleic acid, preferably poly A+ RNA, isolated from, any tissue or cells expressing the antibody, such as hybridoma cells selected to express an antibody of the invention) by PCR amplification using synthetic primers hybridizable to the 3′ and 5′ ends of the sequence or by cloning using an oligonucleotide probe specific for the particular gene sequence to identify, e.g., a cDNA clone from a cDNA library that encodes the antibody. Amplified nucleic acids generated by PCR may then be cloned into replicable cloning vectors using any method well known in the art.

[0260] Once the nucleotide sequence and corresponding amino acid sequence of the antibody is determined, the nucleotide sequence of the antibody may be manipulated using methods well known in the art for the manipulation of nucleotide sequences, e.g., recombinant DNA techniques, site directed mutagenesis, PCR, etc. (see, for example, the techniques described in Sambrook et al., 1990, Molecular Cloning, A Laboratory Manual, 2d Ed., Cold Spring Harbor Laboratory, Cold Spring Harbor, N.Y. and Ausubel et al., eds., 1998, Current Protocols in Molecular Biology, John Wiley & Sons, NY, which are both incorporated by reference herein in their entireties), to generate antibodies having a different amino acid sequence, for example to create amino acid substitutions, deletions, and/or insertions.

[0261] In a specific embodiment, the amino acid sequence of the heavy and/or light chain variable domains may be inspected to identify the sequences of the complementarity determining regions (CDRs) by methods that are well know in the art, e.g., by comparison to known amino acid sequences of other heavy and light chain variable regions to determine the regions of sequence hypervariability. Using routine recombinant DNA techniques, one or more of the CDRs may be inserted within framework regions, e.g., into human framework regions to humanize a non-human antibody, as described supra. The framework regions may be naturally occurring or consensus framework regions, and preferably human framework regions (see, e.g., Chothia et al., J. Mol. Biol. 278: 457-479 (1998) for a listing of human framework regions). Preferably, the polynucleotide generated by the combination of the framework regions and CDRs encodes an antibody that specifically binds a polypeptide of the invention. Preferably, as discussed supra, one or more amino acid substitutions may be made within the framework regions, and, preferably, the amino acid substitutions improve binding of the antibody to its antigen. Additionally, such methods may be used to make amino acid substitutions or deletions of one or more variable region cysteine residues participating in an intrachain disulfide bond to generate antibody molecules lacking one or more intrachain disulfide bonds. Other alterations to the polynucleotide are encompassed by the present invention and within the skill of the art.

[0262] In addition, techniques developed for the production of “chimeric antibodies” (Morrison et al., Proc. Natl. Acad. Sci. 81:851-855 (1984); Neuberger et al., Nature 312:604-608 (1984); Takeda et al., Nature 314:452-454 (1985)) by splicing genes from a mouse antibody molecule of appropriate antigen specificity together with genes from a human antibody molecule of appropriate biological activity can be used. As described supra, a chimeric antibody is a molecule in which different portions are derived from different animal species, such as those having a variable region derived from a murine mAb and a human immunoglobulin constant region, e.g., humanized antibodies.

[0263] Alternatively, techniques described for the production of single chain antibodies (U.S. Pat. No. 4,946,778; Bird, Science 242:423-42 (1988); Huston et al., Proc. Natl. Acad. Sci. USA 85:5879-5883 (1988); and Ward et al., Nature 334:544-54 (1989)) can be adapted to produce single chain antibodies. Single chain antibodies are formed by linking the heavy and light chain fragments of the Fv region via an amino acid bridge, resulting in a single chain polypeptide. Techniques for the assembly of functional Fv fragments in E. coli may also be used (Skerra et al., Science 242:1038-1041 (1988)).

[0264] Methods of Producing Antibodies

[0265] The antibodies of the invention can be produced by any method known in the art for the synthesis of antibodies, in particular, by chemical synthesis or preferably, by recombinant expression techniques. Methods of producing antibodies include, but are not limited to, hybridoma technology, EBV transformation, and other methods discussed herein as well as through the use recombinant DNA technology, as discussed below.

[0266] Recombinant expression of an antibody of the invention, or fragment, derivative or analog thereof, (e.g., a heavy or light chain of an antibody of the invention or a single chain antibody of the invention), requires construction of an expression vector containing a polynucleotide that encodes the antibody. Once a polynucleotide encoding an antibody molecule or a heavy or light chain of an antibody, or portion thereof (preferably containing the heavy or light chain variable domain), of the invention has been obtained, the vector for the production of the antibody molecule may be produced by recombinant DNA technology using techniques well known in the art. Thus, methods for preparing a protein by expressing a polynucleotide containing an antibody encoding nucleotide sequence are described herein. Methods which are well known to those skilled in the art can be used to construct expression vectors containing antibody coding sequences and appropriate transcriptional and translational control signals. These methods include, for example, in vitro recombinant DNA techniques, synthetic techniques, and in vivo genetic recombination. The invention, thus, provides replicable vectors comprising a nucleotide sequence encoding an antibody molecule of the invention, or a heavy or light chain thereof, or a heavy or light chain variable domain, operably linked to a promoter. Such vectors may include the nucleotide sequence encoding the constant region of the antibody molecule (see, e.g., PCT Publication WO 86/05807; PCT Publication WO 89/01036; and U.S. Pat. No. 5,122,464) and the variable domain of the antibody may be cloned into such a vector for expression of the entire heavy or light chain.

[0267] The expression vector is transferred to a host cell by conventional techniques and the transfected cells are then cultured by conventional techniques to produce an antibody of the invention. Thus, the invention includes host cells containing a polynucleotide encoding an antibody of the invention, or a heavy or light chain thereof, or a single chain antibody of the invention, operably linked to a heterologous promoter. In preferred embodiments for the expression of double-chained antibodies, vectors encoding both the heavy and light chains may be co-expressed in the host cell for expression of the entire immunoglobulin molecule, as detailed below.

[0268] A variety of host-expression vector systems may be utilized to express the antibody molecules of the invention. Such host-expression systems represent vehicles by which the coding sequences of interest may be produced and subsequently purified, but also represent cells which may, when transformed or transfected with the appropriate nucleotide coding sequences, express an antibody molecule of the invention in situ. These include but are not limited to microorganisms such as bacteria (e.g., E. coli, B. subtilis) transformed with recombinant bacteriophage DNA, plasmid DNA or cosmid DNA expression vectors containing antibody coding sequences; yeast (e.g., Saccharomyces, Pichia) transformed with recombinant yeast expression vectors containing antibody coding sequences; insect cell systems infected with recombinant virus expression vectors (e.g., baculovirus) containing antibody coding sequences; plant cell systems infected with recombinant virus expression vectors (e.g., cauliflower mosaic virus, CaMV; tobacco mosaic virus, TMV) or transformed with recombinant plasmid expression vectors (e.g., Ti plasmid) containing antibody coding sequences; or mammalian cell systems (e.g., COS, CHO, BHK, 293, 3T3 cells) harboring recombinant expression constructs containing promoters derived from the genome of mammalian cells (e.g., metallothionein promoter) or from mammalian viruses (e.g., the adenovirus late promoter; the vaccinia virus 7.5K promoter). Preferably, bacterial cells such as Escherichia coli, and more preferably, eukaryotic cells, especially for the expression of whole recombinant antibody molecule, are used for the expression of a recombinant antibody molecule. For example, mammalian cells such as Chinese hamster ovary cells (CHO), in conjunction with a vector such as the major intermediate early gene promoter element from human cytomegalovirus is an effective expression system for antibodies (Foecking et al., Gene 45:101 (1986); Cockett et al., Bio/Technology 8:2 (1990)).

[0269] In bacterial systems, a number of expression vectors may be advantageously selected depending upon the use intended for the antibody molecule being expressed. For example, when a large quantity of such a protein is to be produced, for the generation of pharmaceutical compositions of an antibody molecule, vectors which direct the expression of high levels of fusion protein products that are readily purified may be desirable. Such vectors include, but are not limited, to the E. coli expression vector pUR278 (Ruther et al., EMBO J. 2:1791 (1983)), in which the antibody coding sequence may be ligated individually into the vector in frame with the lac Z coding region so that a fusion protein is produced; pIN vectors (Inouye & Inouye, Nucleic Acids Res. 13:3101-3109 (1985); Van Heeke & Schuster, J. Biol. Chem. 24:5503-5509 (1989)); and the like. pGEX vectors may also be used to express foreign polypeptides as fusion proteins with glutathione S-transferase (GST). In general, such fusion proteins are soluble and can easily be purified from lysed cells by adsorption and binding to matrix glutathione-agarose beads followed by elution in the presence of free glutathione. The pGEX vectors are designed to include thrombin or factor Xa protease cleavage sites so that the cloned target gene product can be released from the GST moiety.

[0270] In an insect system, Autographa californica nuclear polyhedrosis virus (AcNPV) is used as a vector to express foreign genes. The virus grows in Spodoptera frugiperda cells. The antibody coding sequence may be cloned individually into non-essential regions (for example the polyhedrin gene) of the virus and placed under control of an AcNPV promoter (for example the polyhedrin promoter).

[0271] In mammalian host cells, a number of viral-based expression systems may be utilized. In cases where an adenovirus is used as an expression vector, the antibody coding sequence of interest may be ligated to an adenovirus transcription/translation control complex, e.g., the late promoter and tripartite leader sequence. This chimeric gene may then be inserted in the adenovirus genome by in vitro or in vivo recombination. Insertion in a non-essential region of the viral genome (e.g., region E1 or E3) will result in a recombinant virus that is viable and capable of expressing the antibody molecule in infected hosts. (e.g., see Logan & Shenk, Proc. Natl. Acad. Sci. USA 81:355-359 (1984)). Specific initiation signals may also be required for efficient translation of inserted antibody coding sequences. These signals include the ATG initiation codon and adjacent sequences. Furthermore, the initiation codon must be in phase with the reading frame of the desired coding sequence to ensure translation of the entire insert. These exogenous translational control signals and initiation codons can be of a variety of origins, both natural and synthetic. The efficiency of expression may be enhanced by the inclusion of appropriate transcription enhancer elements, transcription terminators, etc. (see Bittner et al., Methods in Enzymol. 153:51-544 (1987)).

[0272] In addition, a host cell strain may be chosen which modulates the expression of the inserted sequences, or modifies and processes the gene product in the specific fashion desired. Such modifications (e.g., glycosylation) and processing (e.g., cleavage) of protein products may be important for the function of the protein. Different host cells have characteristic and specific mechanisms for the post-translational processing and modification of proteins and gene products. Appropriate cell lines or host systems can be chosen to ensure the correct modification and processing of the foreign protein expressed. To this end, eukaryotic host cells which possess the cellular machinery for proper processing of the primary transcript, glycosylation, and phosphorylation of the gene product may be used. Such mammalian host cells include but are not limited to CHO, VERY, BHK, Hela, COS, MDCK, 293, 3T3, W138, and in particular, breast cancer cell lines such as, for example, BT483, Hs578T, HTB2, BT20 and T47D, and normal mammary gland cell line such as, for example, CRL7030 and Hs578Bst.

[0273] For long-term, high-yield production of recombinant proteins, stable expression is preferred. For example, cell lines, which stably express the antibody molecule may be engineered. Rather than using expression vectors which contain viral origins of replication, host cells can be transformed with DNA controlled by appropriate expression control elements (e.g., promoter, enhancer, sequences, transcription terminators, polyadenylation sites, etc.), and a selectable marker. Following the introduction of the foreign DNA, engineered cells may be allowed to grow for 1-2 days in an enriched media, and then are switched to a selective media. The selectable marker in the recombinant plasmid confers resistance to the selection and allows cells to stably integrate the plasmid into their chromosomes and grow to form foci which in turn can be cloned and expanded into cell lines. This method may advantageously be used to engineer cell lines, which express the antibody molecule. Such engineered cell lines may be particularly useful in screening and evaluation of compounds that interact directly or indirectly with the antibody molecule.

[0274] A number of selection systems may be used, including but not limited to the herpes simplex virus thymidine kinase (Wigler et al., Cell. 1-1:223 (1977)), hypoxanthine-guanine phosphoribosyltransferase (Szybalska & Szybalski, Proc. Natl. Acad. Sci. USA 48:202 (1992)), and adenine phosphoribosyltransferase (Lowy et al., Cell 22:817 (1980)) genes can be employed in tk-, hgprt- or aprt-cells, respectively. Also, antimetabolite resistance can be used as the basis of selection for the following genes: dhfr, which confers resistance to methotrexate (Wigler et al., Natl. Acad. Sci. USA 77:357 (1980); O'Hare et al., Proc. Natl. Acad. Sci. USA 78:1527 (1981)); gpt, which confers resistance to mycophenolic acid (Mulligan & Berg, Proc. Natl. Acad. Sci. USA 78:2072 (1981)); neo, which confers resistance to the aminoglycoside G-418 Clinical Pharmacy 12:488-505; Wu and Wu, Biotherapy 3:87-95 (1991); Tolstoshev, Ann. Rev. Pharmacol. Toxicol. 32:573-596 (1993); Mulligan, Science 260:926-932 (1993); and Morgan and Anderson, Ann. Rev. Biochem. 62:191-217 (1993); TIB TECH 11(5):155-215 (1993)); and hygro, which confers resistance to hygromycin (Santerre et al., Gene 30:147 (1984)). Methods commonly known in the art of recombinant DNA technology may be routinely applied to select the desired recombinant clone, and such methods are described, for example, in Ausubel et al. (eds.), Current Protocols in Molecular Biology, John Wiley & Sons, NY (1993); Kriegler, Gene Transfer and Expression, A Laboratory Manual, Stockton Press, NY (1990); and in Chapters 12 and 13, Dracopoli et al. (eds), Current Protocols in Human Genetics, John Wiley & Sons, NY (1994); Colberre-Garapin et al., J. Mol. Biol. 150:1 (1981), which are incorporated by reference herein in their entireties.

[0275] The expression levels of an antibody molecule can be increased by vector amplification (for a review, see Bebbington and Hentschel, The use of vectors based on gene amplification for the expression of cloned genes in mammalian cells in DNA cloning, Vol.3. (Academic Press, New York, 1987)). When a marker in the vector system expressing antibody is amplifiable, increase in the level of inhibitor present in culture of host cell will increase the number of copies of the marker gene. Since the amplified region is associated with the antibody gene, production of the antibody will also increase (Crouse et al., Mol. Cell. Biol. 3:257 (1983)).

[0276] Vectors, which use glutamine synthase (GS) or DHFR as the selectable markers can be amplified in the presence of the drugs methionine sulphoximine or methotrexate, respectively. An advantage of glutamine synthase based vectors are the availabilty of cell lines (e.g., the murine myeloma cell line, NS0) which are glutamine synthase negative. Glutamine synthase expression systems can also function in glutamine synthase expressing cells (e.g., Chinese Hamster Ovary (CHO) cells) by providing additional inhibitor to prevent the functioning of the endogenous gene. A glutamine synthase expression system and components thereof are detailed in PCT publications: WO87/04462; WO86/05807; WO89/01036; WO89/10404; and WO91/06657, which are incorporated in their entireties by reference herein. Additionally, glutamine synthase expression vectors that may be used according to the present invention are commercially available from suplliers, including, for example Lonza Biologics, Inc. (Portsmouth, N.H.). Expression and production of monoclonal antibodies using a GS expression system in murine mycloma cells is described in Bebbington et al., Bio/technology 10:169(1992) and in Biblia and Robinson Biotechnol. Prog. 11:1 (1995) which are incorporated in their entirities by reference herein.

[0277] The host cell may be co-transfected with two expression vectors of the invention, the first vector encoding a heavy chain derived polypeptide and the second vector encoding a light chain derived polypeptide. The two vectors may contain identical selectable markers, which enable equal expression of heavy and light chain polypeptides. Alternatively, a single vector may be used which encodes, and is capable of expressing, both heavy and light chain polypeptides. In such situations, the light chain should be placed before the heavy chain to avoid an excess of toxic free heavy chain (Proudfoot, Nature 322:52 (1986); Kohler, Proc. Natl. Acad. Sci. USA 77:2197 (1980)). The coding sequences for the heavy and light chains may comprise cDNA or genomic DNA.

[0278] Once an antibody molecule of the invention has been produced by an animal, chemically synthesized, or recombinantly expressed, it may be purified by any method known in the art for purification of an immunoglobulin molecule, for example, by chromatography (e.g., ion exchange, affinity, particularly by affinity for the specific antigen after Protein A, and sizing column chromatography), centrifugation, differential solubility, or by any other standard technique for the purification of proteins. In addition, the antibodies of the present invention or fragments thereof can be fused to heterologous polypeptide sequences described herein or otherwise known in the art, to facilitate purification.

[0279] The present invention encompasses antibodies recombinantly fused or chemically conjugated (including both covalently and non-covalently conjugations) to a polypeptide (or portion thereof, preferably at least 10, 20, 30, 40, 50, 60, 70, 80, 90 or 100 amino acids of the polypeptide) of the present invention to generate fusion proteins. The fusion does not necessarily need to be direct, but may occur through linker sequences. The antibodies may be specific for antigens other than polypeptides (or portion thereof, preferably at least 10, 20, 30, 40, 50, 60, 70, 80, 90 or 100 amino acids of the polypeptide) of the present invention. For example, antibodies may be used to target the polypeptides of the present invention to particular cell types, either in vitro or in vivo, by fusing or conjugating the polypeptides of the present invention to antibodies specific for particular cell surface receptors. Antibodies fused or conjugated to the polypeptides of the present invention may also be used in in vitro immunoassays and purification methods using methods known in the art. See e.g., Harbor et al., supra, and PCT publication WO 93/21232; EP 439,095; Naramura et al., Immunol. Lett. 39:91-99 (1994); U.S. Pat. No. 5,474,981; Gillies et al., PNAS 89:1428-1432 (1992); Fell et al., J. Immunol. 146:2446-2452 (1991), which are incorporated by reference in their entireties.

[0280] The present invention further includes compositions comprising the polypeptides of the present invention fused or conjugated to antibody domains other than the variable regions. For example, the polypeptides of the present invention may be fused or conjugated to an antibody Fc region, or portion thereof. The antibody portion fused to a polypeptide of the present invention may comprise the constant region, hinge region, CH1 domain, CH2 domain, and CH3 domain or any combination of whole domains or portions thereof. The polypeptides may also be fused or conjugated to the above antibody portions to form multimers. For example, Fc portions fused to the polypeptides of the present invention can form dimers through disulfide bonding between the Fc portions. Higher multimeric forms can be made by fusing the polypeptides to portions of IgA and IgM. Methods for fusing or conjugating the polypeptides of the present invention to antibody portions are known in the art. See, e.g., U.S. Pat. Nos. 5,336,603; 5,622,929; 5,359,046; 5,349,053; 5,447,851; 5,112,946; EP 307,434; EP 367,166; PCT publications WO 96/04388; WO 91/06570; Ashkenazi et al., Proc. Natl. Acad. Sci. USA 88:10535-10539 (1991); Zheng et al., J. Immunol. 154:5590-5600 (1995); and Vil et al., Proc. Natl. Acad. Sci. USA 89:11337-11341 (1992) (said references incorporated by reference in their entireties).

[0281] As discussed, supra, the polypeptides corresponding to a polypeptide, polypeptide fragment, or a variant of SEQ ID NO:Y may be fused or conjugated to the above antibody portions to increase the in vivo half life of the polypeptides or for use in immunoassays using methods known in the art. Further, the polypeptides corresponding to SEQ ID NO:Y may be fused or conjugated to the above antibody portions to facilitate purification. One reported example describes chimeric proteins consisting of the first two domains of the human CD4-polypeptide and various domains of the constant regions of the heavy or light chains of mammalian immunoglobulins. See EP 394,827; Traunecker et al., Nature 331:84-86 (1988). The polypeptides of the present invention fused or conjugated to an antibody having disulfide-linked dimeric structures (due to the IgG) may also be more efficient in binding and neutralizing other molecules, than the monomeric secreted protein or protein fragment alone. See, for example, Fountoulakis et al., J. Biochem. 270:3958-3964 (1995). In many cases, the Fc part in a fusion protein is beneficial in therapy and diagnosis, and thus can result in, for example, improved pharmacokinetic properties. See, for example, EP A 232,262. Alternatively, deleting the Fc part after the fusion protein has been expressed, detected, and purified, would be desired. For example, the Fc portion may hinder therapy and diagnosis if the fusion protein is used as an antigen for immunizations. In drug discovery, for example, human proteins, such as hIL-5, have been fused with Fc portions for the purpose of high-throughput screening assays to identify antagonists of hIL-5. (See, Bennett et al., J. Molecular Recognition 8:52-58 (1995); Johanson et al., J. Biol. Chem. 270:9459-9471 (1995)).

[0282] Moreover, the antibodies or fragments thereof of the present invention can be fused to marker sequences, such as a peptide to facilitate purification. In preferred embodiments, the marker amino acid sequence is a hexa-histidine peptide, such as the tag provided in a pQE vector (QIAGEN, Inc., 9259 Eton Avenue, Chatsworth, Calif., 91311), among others, many of which are commercially available. As described in Gentz et al., Proc. Natl. Acad. Sci. USA 86:821-824 (1989), for instance, hexa-histidine provides for convenient purification of the fusion protein. Other peptide tags useful for purification include, but are not limited to, the “HA” tag, which corresponds to an epitope derived from the influenza hemagglutinin protein (Wilson et al., Cell 37:767 (1984)) and the “flag” tag.

[0283] The present invention further encompasses antibodies or fragments thereof conjugated to a diagnostic or therapeutic agent. The antibodies can be used diagnostically to, for example, monitor the development or progression of a tumor as part of a clinical testing procedure to, e.g., determine the efficacy of a given treatment regimen. Detection can be facilitated by coupling the antibody to a detectable substance. Examples of detectable substances include various enzymes, prosthetic groups, fluorescent materials, luminescent materials, bioluminescent materials, radioactive materials, positron emitting metals using various positron emission tomographies, and nonradioactive paramagnetic metal ions. The detectable substance may be coupled or conjugated either directly to the antibody (or fragment thereof) or indirectly, through an intermediate (such as, for example, a linker known in the art) using techniques known in the art. See, for example, U.S. Pat. No. 4,741,900 for metal ions which can be conjugated to antibodies for use as diagnostics according to the present invention.

[0284] Further, an antibody or fragment thereof may be conjugated to a therapeutic moiety such as a cytotoxin, e.g., a cytostatic or cytocidal agent, a therapeutic agent or a radioactive metal ion, e.g., alpha-emitters such as, for example, 213Bi. A cytotoxin or cytotoxic agent includes any agent that is detrimental to cells. Examples include paclitaxol, cytochalasin B, gramicidin D, ethidium bromide, emetine, mitomycin, etoposide, tenoposide, vincristine, vinblastine, colchicin, doxorubicin, daunorubicin, dihydroxy anthracin dione, mitoxantrone, mithramycin, actinomycin D, 1-dehydrotestosterone, glucocorticoids, procaine, tetracaine, lidocaine, propranolol, and puromycin and analogs or homologs thereof. Therapeutic agents include, but are not limited to, antimetabolites (e.g., methotrexate, 6-mercaptopurine, 6-thioguanine, cytarabine, 5-fluorouracil decarbazine), alkylating agents (e.g., mechlorethamine, thioepa chlorambucil, melphalan, carmustine (BSNU) and lomustine (CCNU), cyclothosphamide, busulfan, dibromomannitol, streptozotocin, mitomycin C, and cis-dichlorodiamine platinum (II) (DDP) cisplatin), anthracyclines (e.g., daunorubicin (formerly daunomycin) and doxorubicin), antibiotics (e.g., dactinomycin (formerly actinomycin), bleomycin, mithramycin, and anthramycin (AMC)), and anti-mitotic agents (e.g., vincristine and vinblastine).

[0285] The conjugates of the invention can be used for modifying a given biological response, the therapeutic agent or drug moiety is not to be construed as limited to classical chemical therapeutic agents. For example, the drug moiety may be a protein or polypeptide possessing a desired biological activity. Such proteins may include, for example, a toxin such as abrin, ricin A, pseudomonas exotoxin, or diphtheria toxin; a protein such as tumor necrosis factor, a-interferon, β-interferon, nerve growth factor, platelet derived growth factor, tissue plasminogen activator, an apoptotic agent, e.g., TNF-alpha, TNF-beta, AIM I (See, International Publication No. WO 97/33899), AIM II (See, International Publication No. WO 97/34911), Fas Ligand (Takahashi et al., Int. Immunol., 6:1567-1574 (1994)), VEGI (See, International Publication No. WO 99/23105), a thrombotic agent or an anti-angiogenic agent, e.g., angiostatin or endostatin; or, biological response modifiers such as, for example, lymphokines, interleukin-1 (“IL-1”), interleukin-2 (“IL-2”), interleukin-6 (“IL-6”), granulocyte macrophage colony stimulating factor (“GM-CSF”), granulocyte colony stimulating factor (“G-CSF”), or other growth factors.

[0286] Antibodies may also be attached to solid supports, which are particularly useful for immunoassays or purification of the target antigen. Such solid supports include, but are not limited to, glass, cellulose, polyacrylamide, nylon, polystyrene, polyvinyl chloride or polypropylene.

[0287] Techniques for conjugating such therapeutic moiety to antibodies are well known. See, for example, Arnon et al., “Monoclonal Antibodies For Immunotargeting Of Drugs In Cancer Therapy”, in Monoclonal Antibodies And Cancer Therapy, Reisfeld et al. (eds.), pp. 243-56 (Alan R. Liss, Inc. 1985); Hellstrom et al., “Antibodies For Drug Delivery”, in Controlled Drug Delivery (2nd Ed.), Robinson et al. (eds.), pp. 623-53 (Marcel Dekker, Inc. 1987); Thorpe, “Antibody Carriers Of Cytotoxic Agents In Cancer Therapy: A Review”, in Monoclonal Antibodies '84: Biological And Clinical Applications, Pinchera et al. (eds.), pp. 475-506 (1985); “Analysis, Results, And Future Prospective Of The Therapeutic Use Of Radiolabeled Antibody In Cancer Therapy”, in Monoclonal Antibodies For Cancer Detection And Therapy, Baldwin et al. (eds.), pp. 303-16 (Academic Press 1985), and Thorpe et al., “The Preparation And Cytotoxic Properties Of Antibody-Toxin Conjugates”, Immunol. Rev. 62:119-58 (1982).

[0288] Alternatively, an antibody can be conjugated to a second antibody to form an antibody heteroconjugate as described by Segal in U.S. Pat. No. 4,676,980, which is incorporated herein by reference in its entirety.

[0289] An antibody, with or without a therapeutic moiety conjugated to it, administered alone or in combination with cytotoxic factor(s) and/or cytokine(s) can be used as a therapeutic.

[0290] Immunophenotyping

[0291] The antibodies of the invention may be utilized for immunophenotyping of cell lines and biological samples. Translation products of the genes of the present invention may be useful as cell specific markers, or more specifically as cellular markers that are differentially expressed at various stages of differentiation and/or maturation of particular cell types. Monoclonal antibodies directed against a specific epitope, or combination of epitopes, will allow for the screening of cellular populations expressing the marker. Various techniques can be utilized using monoclonal antibodies to screen for cellular populations expressing the marker(s), and include magnetic separation using antibody-coated magnetic beads, “panning” with antibody attached to a solid matrix (i.e., plate), and flow cytometry (See, e.g., U.S. Pat. No. 5,985,660; and Morrison et al., Cell, 96:737-49 (1999)).

[0292] These techniques allow for the screening of particular populations of cells, such as might be found with hematological malignancies (i.e. minimal residual disease (MRD) in acute leukemic patients) and “non-self”cells in transplantations to prevent Graft-versus-Host Disease (GVHD). Alternatively, these techniques allow for the screening of hematopoietic stem and progenitor cells capable of undergoing proliferation and/or differentiation, as might be found in human umbilical cord blood.

[0293] Assays for Antibody Binding

[0294] The antibodies of the invention may be assayed for immunospecific binding by any method known in the art. The immunoassays which can be used include but are not limited to competitive and non-competitive assay systems using techniques such as western blots, radioimmunoassays, ELISA (enzyme linked immunosorbent assay), “sandwich” immunoassays, immunoprecipitation assays, precipitin reactions, gel diffusion precipitin reactions, immunodiffusion assays, agglutination assays, complement-fixation assays, immunoradiometric assays, fluorescent immunoassays, and protein A immunoassays, to name but a few. Such assays are routine and well known in the art (see, e.g., Ausubel et al, eds, 1994, Current Protocols in Molecular Biology, Vol. 1, John Wiley & Sons, Inc., New York, which is incorporated by reference herein in its entirety). Exemplary immunoassays are described briefly below (but are not intended by way of limitation).

[0295] Immunoprecipitation protocols generally comprise lysing a population of cells in a lysis buffer such as RIPA buffer (1% NP-40 or Triton X-100, 1% sodium deoxycholate, 0.1% SDS, 0.15 M NaCl, 0.01 M sodium phosphate at pH 7.2, 1% Trasylol) supplemented with protein phosphatase and/or protease inhibitors (e.g., EDTA, PMSF, aprotinin, sodium vanadate), adding the antibody of interest to the cell lysate, incubating for a period of time (e.g., 1-4 hours) at 4° C., adding protein A and/or protein G sepharose beads to the cell lysate, incubating for about an hour or more at 4° C., washing the beads in lysis buffer and resuspending the beads in SDS/sample buffer. The ability of the antibody of interest to immunoprecipitate a particular antigen can be assessed by, e.g., western blot analysis. One of skill in the art would be knowledgeable as to the parameters that can be modified to increase the binding of the antibody to an antigen and decrease the background (e.g., pre-clearing the cell lysate with sepharose beads). For further discussion regarding immunoprecipitation protocols see, e.g., Ausubel et al., eds., (1994), Current Protocols in Molecular Biology, Vol. 1, John Wiley & Sons, Inc., New York, section 10.16.1.

[0296] Western blot analysis generally comprises preparing protein samples, electrophoresis of the protein samples in a polyacrylamide gel (e.g., 8%-20% SDS-PAGE depending on the molecular weight of the antigen), transferring the protein sample from the polyacrylamide gel to a membrane such as nitrocellulose, PVDF or nylon, blocking the membrane in blocking solution (e.g., PBS with 3% BSA or non-fat milk), washing the membrane in washing buffer (e.g., PBS-Tween 20), blocking the membrane with primary antibody (the antibody of interest) diluted in blocking buffer, washing the membrane in washing buffer, blocking the membrane with a secondary antibody (which recognizes the primary antibody, e.g., an anti-human antibody) conjugated to an enzymatic substrate (e.g., horseradish peroxidase or alkaline phosphatase) or radioactive molecule (e.g., 32P or 125I) diluted in blocking buffer, washing the membrane in wash buffer, and detecting the presence of the antigen. One of skill in the art would be knowledgeable as to the parameters that can be modified to increase the signal detected and to reduce the background noise. For further discussion regarding western blot protocols see, e.g., Ausubel et al., eds., (1994), Current Protocols in Molecular Biology, Vol. 1, John Wiley & Sons, Inc., New York, section 10.8.1.

[0297] ELISAs comprise preparing antigen, coating the well of a 96 well microtiter plate with the antigen, adding the antibody of interest conjugated to a detectable compound such as an enzymatic substrate (e.g., horseradish peroxidase or alkaline phosphatase) to the well and incubating for a period of time, and detecting the presence of the antigen. In ELISAs the antibody of interest does not have to be conjugated to a detectable compound; instead, a second antibody (which recognizes the antibody of interest) conjugated to a detectable compound may be added to the well. Further, instead of coating the well with the antigen, the antibody may be coated to the well. In this case, a second antibody conjugated to a detectable compound may be added following the addition of the antigen of interest to the coated well. One of skill in the art would be knowledgeable as to the parameters that can be modified to increase the signal detected as well as other variations of ELISAs known in the art. For further discussion regarding ELISAs see, e.g., Ausubel et al., eds, (1994), Current Protocols in Molecular Biology, Vol. 1, John Wiley & Sons, Inc., New York, section 11.2.1.

[0298] The binding affinity of an antibody to an antigen and the off-rate of an antibody-antigen interaction can be determined by competitive binding assays. One example of a competitive binding assay is a radioimmunoassay comprising the incubation of labeled antigen (e.g., 3H or 125I) with the antibody of interest in the presence of increasing amounts of unlabeled antigen, and the detection of the antibody bound to the labeled antigen. The affinity of the antibody of interest for a particular antigen and the binding off-rates can be determined from the data by scatchard plot analysis. Competition with a second antibody can also be determined using radioimmunoassays. In this case, the antigen is incubated with antibody of interest conjugated to a labeled compound (e.g., 3H or 125I) in the presence of increasing amounts of an unlabeled second antibody.

[0299] Antibodies of the invention may be characterized using immunocytochemisty methods on cells (e.g., mammalian cells, such as CHO cells) transfected with a vector enabling the expression of a plasma membrane associated antigen or with vector alone using techniques commonly known in the art. Antibodies that bind plasma membrane associated antigen transfected cells, but not vector-only transfected cells, are plasma membrane assoicated antigen specific.

[0300] Therapeutic Uses

[0301] The present invention is further directed to antibody-based therapies which involve administering antibodies of the invention to an animal, preferably a mammal, and most preferably a human, patient for treating one or more of the disclosed diseases, disorders, or conditions. Therapeutic compounds of the invention include, but are not limited to, antibodies of the invention (including fragments, analogs and derivatives thereof as described herein) and nucleic acids encoding antibodies of the invention (including fragments, analogs and derivatives thereof and anti-idiotypic antibodies as described herein). The antibodies of the invention can be used to treat, inhibit or prevent diseases, disorders or conditions associated with aberrant expression and/or activity of a polypeptide of the invention, including, but not limited to, any one or more of the diseases, disorders, or conditions described herein. The treatment and/or prevention of diseases, disorders, or conditions associated with aberrant expression and/or activity of a polypeptide of the invention includes, but is not limited to, alleviating symptoms associated with those diseases, disorders or conditions. Antibodies of the invention may be provided in pharmaceutically acceptable compositions as known in the art or as described herein.

[0302] In a specific and preferred embodiment, the present invention is directed to antibody-based therapies which involve administering antibodies of the invention to an animal, preferably a mammal, and most preferably a human, patient for treating one or more of the diseases, disorders, or conditions associated with the novel polypeptides, including, but not limited to, diseases associated with cell proliferation and cell signaling, particularly cancer, immune response and neuronal disorders; in addition to providing new targets for immune based therapies. Therapeutic compounds of the invention include, but are not limited to, antibodies of the invention (e.g., antibodies directed to the full length protein expressed on the cell surface of a mammalian cell; antibodies directed to an epitope of a polypeptide of the invention (such as, a linear epitope (shown in Table 1, column 7) or a conformational epitope), including fragments, analogs and derivatives thereof as described herein) and nucleic acids encoding antibodies of the invention (including fragments, analogs and derivatives thereof and anti-idiotypic antibodies as described herein). The antibodies of the invention can be used to treat, inhibit or prevent diseases, disorders or conditions associated with aberrant expression and/or activity of a polypeptide of the invention as described herein. The treatment and/or prevention of diseases, disorders, or conditions associated with aberrant expression and/or activity of a polypeptide of the invention includes, but is not limited to, alleviating symptoms associated with those diseases, disorders or conditions. Antibodies of the invention may be provided in pharmaceutically acceptable compositions as known in the art or as described herein.

[0303] A summary of the ways in which the antibodies of the present invention may be used therapeutically includes binding polynucleotides or polypeptides of the present invention locally or systemically in the body or by direct cytotoxicity of the antibody, e.g. as mediated by complement (CDC) or by effector cells (ADCC). Some of these approaches are described in more detail below. Armed with the teachings provided herein, one of ordinary skill in the art will know how to use the antibodies of the present invention for diagnostic, monitoring or therapeutic purposes without undue experimentation.

[0304] The antibodies of this invention may be advantageously utilized in combination with other monoclonal or chimeric antibodies, or with lymphokines or hematopoictic growth factors (such as, e.g., IL-2, IL-3 and IL-7), for example, which serve to increase the number or activity of effector cells which interact with the antibodies.

[0305] The antibodies of the invention may be administered alone or in combination with other types of treatments (e.g., radiation therapy, chemotherapy, hormonal therapy, immunotherapy and anti-tumor agents). Generally, administration of products of a species origin or species reactivity (in the case of antibodies) that is the same species as that of the patient is preferred. Thus, in a preferred embodiment, human antibodies, fragments derivatives, analogs, or nucleic acids, are administered to a human patient for therapy or prophylaxis.

[0306] It is preferred to use high affinity and/or potent in vivo inhibiting and/or neutralizing antibodies against polypeptides or polynucleotides of the present invention, fragments or regions thereof, for both immunoassays directed to and therapy of disorders related to polynucleotides or polypeptides, including fragments thereof, of the present invention. Such antibodies, fragments, or regions, will preferably have an affinity for polynucleotides or polypeptides of the invention, including fragments thereof. Preferred binding affinities include those with a dissociation constant or Kd less than 5×10⁻² M, 10⁻² M, 5×10⁻³ M, 10⁻³ M, 5×10⁻⁴ M, 10⁻⁴ M, 5×10⁻⁵ M, 10⁻⁵ M, 5×10⁻⁶ M, 10⁻⁶ M, 5×10⁻⁷ M, 10⁻⁷ M, 5×10⁻⁸ M, 10⁻⁸ M, 10×10⁻⁹ M, 10⁻⁹ M, 5×10⁻¹⁰ M, 10⁻¹⁰ M, 5×10⁻¹¹ M, 10⁻¹¹ M, 5×10⁻¹² M, 10⁻¹² M, 5×10⁻¹³ M, 10⁻¹³ M, 5×10⁻¹⁴ M, 10⁻¹⁴ M, 5×10⁻¹⁵ M, and 10⁻¹⁵ M.

[0307] Gene Therapy

[0308] In a specific embodiment, nucleic acids comprising sequences encoding antibodies or functional derivatives thereof, are administered to treat, inhibit or prevent a disease or disorder associated with aberrant expression and/or activity of a polypeptide of the invention, by way of gene therapy. Gene therapy refers to therapy performed by the administration to a subject of an expressed or expressible nucleic acid. In this embodiment of the invention, the nucleic acids produce their encoded protein that mediates a therapeutic effect.

[0309] Any of the methods for gene therapy available in the art can be used according to the present invention. Exemplary methods are described below.

[0310] For general reviews of the methods of gene therapy, see Goldspiel et al., Clinical Pharmacy 12:488-505 (1993); Wu and Wu, Biotherapy 3:87-95 (1991); Tolstoshev, Ann. Rev. Pharmacol. Toxicol. 32:573-596 (1993); Mulligan, Science 260:926-932 (1993); and Morgan and Anderson, Ann. Rev. Biochem. 62:191-217 (1993); May, TIBTECH 11(5):155-215 (1993). Methods commonly known in the art of recombinant DNA technology which can be used are described in Ausubel et al. (eds.), Current Protocols in Molecular Biology, John Wiley & Sons, NY (1993); and Kriegler, Gene Transfer and Expression, A Laboratory Manual, Stockton Press, NY (1990).

[0311] In a preferred embodiment, the compound comprises nucleic acid sequences encoding an antibody, said nucleic acid sequences being part of expression vectors that express the antibody or fragments or chimeric proteins or heavy or light chains thereof in a suitable host. In particular, such nucleic acid sequences have promoters operably linked to the antibody coding region, said promoter being inducible or constitutive, and, optionally, tissue-specific. In another particular embodiment, nucleic acid molecules are used in which the antibody coding sequences and any other desired sequences are flanked by regions that promote homologous recombination at a desired site in the genome, thus providing for intrachromosomal expression of the antibody encoding nucleic acids (Koller and Smithies, Proc. Natl. Acad. Sci. USA 86:8932-8935 (1989); Zijlstra et al., Nature 342:435-438 (1989). In specific embodiments, the expressed antibody molecule is a single chain antibody; alternatively, the nucleic acid sequences include sequences encoding both the heavy and light chains, or fragments thereof, of the antibody.

[0312] Delivery of the nucleic acids into a patient may be either direct, in which case the patient is directly exposed to the nucleic acid or nucleic acid carrying vectors, or indirect, in which case, cells are first transformed with the nucleic acids in vitro, then transplanted into the patient. These two approaches are known, respectively, as in vivo or ex vivo gene therapy.

[0313] In a specific embodiment, the nucleic acid sequences are directly administered in vivo, where it is expressed to produce the encoded product. This can be accomplished by any of numerous methods known in the art, e.g., by constructing them as part of an appropriate nucleic acid expression vector and administering it so that they become intracellular, e.g., by infection using defective or attenuated retrovirals or other viral vectors (see U.S. Pat. No. 4,980,286), or by direct injection of naked DNA, or by use of microparticle bombardment (e.g., a gene gun; Biolistic, Dupont), or coating with lipids or cell-surface receptors or transfecting agents, encapsulation in liposomes, microparticles, or microcapsules, or by administering them in linkage to a peptide which is known to enter the nucleus, by administering it in linkage to a ligand subject to receptor-mediated endocytosis (see, e.g., Wu and Wu, J. Biol. Chem. 262:4429-4432 (1987)) (which can be used to target cell types specifically expressing the receptors), etc. In another embodiment, nucleic acid-ligand complexes can be formed in which the ligand comprises a fusogenic viral peptide to disrupt endosomes, allowing the nucleic acid to avoid lysosomal degradation. In yet another embodiment, the nucleic acid can be targeted in vivo for cell specific uptake and expression, by targeting a specific receptor (see, e.g., PCT Publications WO 92/06180; WO 92/22635; WO92/20316; WO93/14188, WO 93/20221). Alternatively, the nucleic acid can be introduced intracellularly and incorporated within host cell DNA for expression, by homologous recombination (Koller and Smithies, Proc. Natl. Acad. Sci. USA 86:8932-8935 (1989); Zijlstra et al., Nature 342:435-438 (1989)).

[0314] In a specific embodiment, viral vectors that contains nucleic acid sequences encoding an antibody of the invention are used. For example, a retroviral vector can be used (see Miller et al., Meth. Enzymol. 217:581-599 (1993)). These retroviral vectors contain the components necessary for the correct packaging of the viral genome and integration into the host cell DNA. The nucleic acid sequences encoding the antibody to be used in gene therapy are cloned into one or more vectors, which facilitates delivery of the gene into a patient. More detail about retroviral vectors can be found in Boesen et al., Biotherapy 6:291-302 (1994), which describes the use of a retroviral vector to deliver the mdr1 gene to hematopoietic stem cells in order to make the stem cells more resistant to chemotherapy. Other references illustrating the use of retroviral vectors in gene therapy are: Clowes et al., J. Clin. Invest. 93:644-651 (1994); Kiem et al., Blood 83:1467-1473 (1994); Salmons and Gunzberg, Human Gene Therapy 4:129-141 (1993); and Grossman and Wilson, Curr. Opin. in Genetics and Devel. 3:110-114 (1993).

[0315] Adenoviruses are other viral vectors that can be used in gene therapy. Adenoviruses are especially attractive vehicles for delivering genes to respiratory epithelia. Adenoviruses naturally infect respiratory epithelia where they cause a mild disease. Other targets for adenovirus-based delivery systems are liver, the central nervous system, endothelial cells, and muscle. Adenoviruses have the advantage of being capable of infecting non-dividing cells. Kozarsky and Wilson, Current Opinion in Genetics and Development 3:499-503 (1993) present a review of adenovirus-based gene therapy. Bout et al., Human Gene Therapy 5:3-10 (1994) demonstrated the use of adenovirus vectors to transfer genes to the respiratory epithelia of rhesus monkeys. Other instances of the use of adenoviruses in gene therapy can be found in Rosenfeld et al., Science 252:431-434 (1991); Rosenfeld et al., Cell 68:143-155 (1992); Mastrangeli et al., J. Clin. Invest. 91:225-234 (1993); PCT Publication WO94/12649; and Wang, et al., Gene Therapy 2:775-783 (1995). In a preferred embodiment, adenovirus vectors are used.

[0316] Adeno-associated virus (AAV) has also been proposed for use in gene therapy (Walsh et al., Proc. Soc. Exp. Biol. Med. 204:289-300 (1993); U.S. Pat. No. 5,436,146).

[0317] Another approach to gene therapy involves transferring a gene to cells in tissue culture by such methods as electroporation, lipofection, calcium phosphate mediated transfection, or viral infection. Usually, the method of transfer includes the transfer of a selectable marker to the cells. The cells are then placed under selection to isolate those cells that have taken up and are expressing the transferred gene. Those cells are then delivered to a patient.

[0318] In this embodiment, the nucleic acid is introduced into a cell prior to administration in vivo of the resulting recombinant cell. Such introduction can be carried out by any method known in the art, including but not limited to transfection, electroporation, microinjection, infection with a viral or bacteriophage vector containing the nucleic acid sequences, cell fusion, chromosome-mediated gene transfer, microcell-mediated gene transfer, spheroplast fusion, etc. Numerous techniques are known in the art for the introduction of foreign genes into cells (see, e.g., Loeffler and Behr, Meth. Enzymol. 217:599-618 (1993); Cohen et al., Meth. Enzymol. 217:618-644 (1993); Cline, Pharmac. Ther. 29:69-92m (1985) and may be used in accordance with the present invention, provided that the necessary developmental and physiological functions of the recipient cells are not disrupted. The technique should provide for the stable transfer of the nucleic acid to the cell, so that the nucleic acid is expressible by the cell and preferably heritable and expressible by its cell progeny.

[0319] The resulting recombinant cells can be delivered to a patient by various methods known in the art. Recombinant blood cells (e.g., hematopoietic stem or progenitor cells) are preferably administered intravenously. The amount of cells envisioned for use depends on the desired effect, patient state, etc., and can be determined by one skilled in the art.

[0320] Cells into which a nucleic acid can be introduced for purposes of gene therapy encompass any desired, available cell type, and include but are not limited to epithelial cells, endothelial cells, keratinocytes, fibroblasts, muscle cells, hepatocytes; blood cells such as T lymphocytes, B lymphocytes, monocytes, macrophages, neutrophils, eosinophils, megakaryocytes, granulocytes; various stem or progenitor cells, in particular hematopoietic stem or progenitor cells, e.g., as obtained from bone marrow, umbilical cord blood, peripheral blood, fetal liver, etc.

[0321] In a preferred embodiment, the cell used for gene therapy is autologous to the patient.

[0322] In an embodiment in which recombinant cells are used in gene therapy, nucleic acid sequences encoding an antibody are introduced into the cells such that they are expressible by the cells or their progeny, and the recombinant cells are then administered in vivo for therapeutic effect. In a specific embodiment, stem or progenitor cells are used. Any stem and/or progenitor cells which can be isolated and maintained in vitro can potentially be used in accordance with this embodiment of the present invention (see e.g. PCT Publication WO 94/08598; Stemple and Anderson, Cell 71:973-985 (1992); Rheinwald, Meth. Cell Bio. 21A:229 (1980); and Pittelkow and Scott, Mayo Clinic Proc. 61:771 (1986)).

[0323] In a specific embodiment, the nucleic acid to be introduced for purposes of gene therapy comprises an inducible promoter operably linked to the coding region, such that expression of the nucleic acid is controllable by the presence or absence of an appropriate inducer of transcription.

[0324] Demonstration of Therapeutic or Prophylactic Activity

[0325] The compounds or pharmaceutical compositions of the invention are preferably tested in vitro, and then in vivo for the desired therapeutic or prophylactic activity, prior to use in humans. For example, in vitro assays to demonstrate the therapeutic or prophylactic utility of a compound or pharmaceutical composition include, the effect of a compound on a cell line or a patient tissue sample. The effect of the compound or composition on the cell line and/or tissue sample can be determined utilizing techniques known to those of skill in the art including, but not limited to, rosette formation assays and cell lysis assays. In accordance with the invention, in vitro assays which can be used to determine whether administration of a specific compound is indicated, include in vitro cell culture assays in which a patient tissue sample is grown in culture, and exposed to or otherwise administered a compound, and the effect of such compound upon the tissue sample is observed.

[0326] Therapeutic/Prophylactic Administration and Composition

[0327] The invention provides methods of treatment, inhibition and prophylaxis by administration to a subject of an effective amount of a compound or pharmaceutical composition of the invention, preferably a polypeptide or antibody of the invention. In a preferred embodiment, the compound is substantially purified (e.g., substantially free from substances that limit its effect or produce undesired side-effects). The subject is preferably an animal, including but not limited to animals such as cows, pigs, horses, chickens, cats, dogs, etc., and is preferably a mammal, and most preferably human.

[0328] Formulations and methods of administration that can be employed when the compound comprises a nucleic acid or an immunoglobulin are described above; additional appropriate formulations and routes of administration can be selected from among those described herein below.

[0329] Various delivery systems are known and can be used to administer a compound of the invention, e.g., encapsulation in liposomes, microparticles, microcapsules, recombinant cells capable of expressing the compound, receptor-mediated endocytosis (see, e.g., Wu and Wu, J. Biol. Chem. 262:4429-4432 (1987)), construction of a nucleic acid as part of a retroviral or other vector, etc. Methods of introduction include but are not limited to intradermal, intramuscular, intraperitoneal, intravenous, subcutaneous, intranasal, epidural, and oral routes. The compounds or compositions may be administered by any convenient route, for example by infusion or bolus injection, by absorption through epithelial or mucocutaneous linings (e.g., oral mucosa, rectal and intestinal mucosa, etc.) and may be administered together with other biologically active agents. Administration can be systemic or local. In addition, it may be desirable to introduce the pharmaceutical compounds or compositions of the invention into the central nervous system by any suitable route, including intraventricular and intrathecal injection; intraventricular injection may be facilitated by an intraventricular catheter, for example, attached to a reservoir, such as an Ommaya reservoir. Pulmonary administration can also be employed, e.g., by use of an inhaler or nebulizer, and formulation with an aerosolizing agent.

[0330] In a specific embodiment, it may be desirable to administer the pharmaceutical compounds or compositions of the invention locally to the area in need of treatment; this may be achieved by, for example, and not by way of limitation, local infusion during surgery, topical application, e.g., in conjunction with a wound dressing after surgery, by injection, by means of a catheter, by means of a suppository, or by means of an implant, said implant being of a porous, non-porous, or gelatinous material, including membranes, such as sialastic membranes, or fibers. Preferably, when administering a protein, including an antibody, of the invention, care must be taken to use materials to which the protein does not absorb.

[0331] In another embodiment, the compound or composition can be delivered in a vesicle, in particular a liposome (see Langer, Science 249:1527-1533 (1990); Treat et al., in Liposomes in the Therapy of Infectious Disease and Cancer, Lopez-Berestein and Fidler (eds.), Liss, New York, pp. 353-365 (1989); Lopez-Berestein, ibid., pp. 317-327; see generally ibid.)

[0332] In yet another embodiment, the compound or composition can be delivered in a controlled release system. In one embodiment, a pump may be used (see Langer, supra; Sefton, CRC Crit. Ref. Biomed. Eng. 14:201 (1987); Buchwald et al., Surgery 88:507 (1980); Saudek et al., N. Engl. J. Med. 321:574 (1989)). In another embodiment, polymeric materials can be used (see Medical Applications of Controlled Release, Langer and Wise (eds.), CRC Pres., Boca Raton, Fla. (1974); Controlled Drug Bioavailability, Drug Product Design and Performance, Smolen and Ball (eds.), Wiley, N.Y. (1984); Ranger and Peppas, J., Macromol. Sci. Rev. Macromol. Chem. 23:61 (1983); see also Levy et al., Science 228:190 (1985); During et al., Ann. Neurol. 25:351 (1989); Howard et al., J.Neurosurg. 71:105 (1989)). In yet another embodiment, a controlled release system can be placed in proximity of the therapeutic target, e.g., the brain, thus requiring only a fraction of the systemic dose (see, e.g., Goodson, in Medical Applications of Controlled Release, supra, vol. 2, pp. 115-138 (1984)).

[0333] Other controlled release systems are discussed in the review by Langer (Science 249:1527-1533 (1990)).

[0334] In a specific embodiment where the compound of the invention is a nucleic acid encoding a protein, the nucleic acid can be administered in vivo to promote expression of its encoded protein, by constructing it as part of an appropriate nucleic acid expression vector and administering it so that it becomes intracellular, e.g., by use of a retroviral vector (see U.S. Pat. No. 4,980,286), or by direct injection, or by use of microparticle bombardment (e.g., a gene gun; Biolistic, Dupont), or coating with lipids or cell-surface receptors or transfecting agents, or by administering it in linkage to a homeobox-like peptide which is known to enter the nucleus (see e.g., Joliot et al., Proc. Natl. Acad. Sci. USA 88:1864-1868 (1991)), etc. Alternatively, a nucleic acid can be introduced intracellularly and incorporated within host cell DNA for expression, by homologous recombination.

[0335] The present invention also provides pharmaceutical compositions. Such compositions comprise a therapeutically effective amount of a compound, and a pharmaceutically acceptable carrier. In a specific embodiment, the term “pharmaceutically acceptable” means approved by a regulatory agency of the Federal or a state government or listed in the U.S. Pharmacopeia or other generally recognized pharmacopeia for use in animals, and more particularly in humans. The term “carrier” refers to a diluent, adjuvant, excipient, or vehicle with which the therapeutic is administered. Such pharmaceutical carriers can be sterile liquids, such as water and oils, including those of petroleum, animal, vegetable or synthetic origin, such as peanut oil, soybean oil, mineral oil, sesame oil and the like. Water is a preferred carrier when the pharmaceutical composition is administered intravenously. Saline solutions and aqueous dextrose and glycerol solutions can also be employed as liquid carriers, particularly for injectable solutions. Suitable pharmaceutical excipients include starch, glucose, lactose, sucrose, gelatin, malt, rice, flour, chalk, silica gel, sodium stearate, glycerol monostearate, talc, sodium chloride, dried skim milk, glycerol, propylene, glycol, water, ethanol and the like. The composition, if desired, can also contain minor amounts of wetting or emulsifying agents, or pH buffering agents. These compositions can take the form of solutions, suspensions, emulsion, tablets, pills, capsules, powders, sustained-release formulations and the like. The composition can be formulated as a suppository, with traditional binders and carriers such as triglycerides. Oral formulation can include standard carriers such as pharmaceutical grades of mannitol, lactose, starch, magnesium stearate, sodium saccharine, cellulose, magnesium carbonate, etc. Examples of suitable pharmaceutical carriers are described in “Remington's Pharmaceutical Sciences” by E. W. Martin. Such compositions will contain a therapeutically effective amount of the compound, preferably in purified form, together with a suitable amount of carrier so as to provide the form for proper administration to the patient. The formulation should suit the mode of administration.

[0336] In a preferred embodiment, the composition is formulated in accordance with routine procedures as a pharmaceutical composition adapted for intravenous administration to human beings. Typically, compositions for intravenous administration are solutions in sterile isotonic aqueous buffer. Where necessary, the composition may also include a solubilizing agent and a local anesthetic such as lignocaine to ease pain at the site of the injection. Generally, the ingredients are supplied either separately or mixed together in unit dosage form, for example, as a dry lyophilized powder or water free concentrate in a hermetically sealed container such as an ampoule or sachette indicating the quantity of active agent. Where the composition is to be administered by infusion, it can be dispensed with an infusion bottle containing sterile pharmaceutical grade water or saline. Where the composition is administered by injection, an ampoule of sterile water for injection or saline can be provided so that the ingredients may be mixed prior to administration.

[0337] The compounds of the invention can be formulated as neutral or salt forms. Pharmaceutically acceptable salts include those formed with anions such as those derived from hydrochloric, phosphoric, acetic, oxalic, tartaric acids, etc., and those formed with cations such as those derived from sodium, potassium, ammonium, calcium, ferric hydroxides, isopropylamine, triethylamine, 2-ethylamino ethanol, histidine, procaine, etc.

[0338] The amount of the compound of the invention, which will be effective in the treatment, inhibition and prevention of a disease or disorder associated with aberrant expression and/or activity of a polypeptide of the invention can be determined by standard clinical techniques. In addition, in vitro assays may optionally be employed to help identify optimal dosage ranges. The precise dose to be employed in the formulation will also depend on the route of administration, and the seriousness of the disease or disorder, and should be decided according to the judgment of the practitioner and each patient's circumstances. Effective doses may be extrapolated from dose-response curves derived from in vitro or animal model test systems.

[0339] For antibodies, the dosage administered to a patient is typically 0.1 mg/kg to 100 mg/kg of the patient's body weight. Preferably, the dosage administered to a patient is between 0.1 mg/kg and 20 mg/kg of the patient's body weight, more preferably 1 mg/kg to 10 mg/kg of the patient's body weight. Generally, human antibodies have a longer half-life within the human body than antibodies from other species due to the immune response to the foreign polypeptides. Thus, lower dosages of human antibodies and less frequent administration is often possible. Further, the dosage and frequency of administration of antibodies of the invention may be reduced by enhancing uptake and tissue penetration (e.g., into the brain) of the antibodies by modifications such as, for example, lipidation.

[0340] The invention also provides a pharmaceutical pack or kit comprising one or more containers filled with one or more of the ingredients of the pharmaceutical compositions of the invention. Optionally associated with such container(s) can be a notice in the form prescribed by a governmental agency regulating the manufacture, use or sale of pharmaceuticals or biological products, which notice reflects approval by the agency of manufacture, use or sale for human administration.

[0341] Diagnosis and Imaging

[0342] Labeled antibodies, and derivatives and analogs thereof, which specifically bind to a polypeptide of interest can be used for diagnostic purposes to detect, diagnose, or monitor diseases, disorders, and/or conditions associated with the aberrant expression and/or activity of a polypeptide of the invention. The invention provides for the detection of aberrant expression of a polypeptide of interest, comprising (a) assaying the expression of the polypeptide of interest in cells or body fluid of an individual using one or more antibodies specific to the polypeptide interest and (b) comparing the level of gene expression with a standard gene expression level, whereby an increase or decrease in the assayed polypeptide gene expression level compared to the standard expression level is indicative of aberrant expression.

[0343] The invention provides a diagnostic assay for diagnosing a colon disorder, comprising (a) assaying the expression of the polypeptide of interest in cells or body fluid of an individual using one or more antibodies specific to the polypeptide interest and (b) comparing the level of gene expression with a standard gene expression level, whereby an increase or decrease in the assayed polypeptide gene expression level compared to the standard expression level is indicative of a particular disorder. With respect to cancer, the presence of a relatively high amount of transcript in biopsied tissue from an individual may indicate a predisposition for the development of the disease, or may provide a means for detecting the disease prior to the appearance of actual clinical symptoms. A more definitive diagnosis of this type may allow health professionals to employ preventative measures or aggressive treatment earlier thereby preventing the development or further progression of the cancer.

[0344] Antibodies of the invention can be used to assay protein levels in a biological sample using classical immunohistological methods known to those of skill in the art (e.g., see Jalkanen et al., J. Cell. Biol. 101:976-985 (1985); Jalkanen et al., J. Cell. Biol. 105:3087-3096 (1987)). Other antibody-based methods useful for detecting protein gene expression include immunoassays, such as the enzyme linked immunosorbent assay (ELISA) and the radioimmunoassay (RIA). Suitable antibody assay labels are known in the art and include enzyme labels, such as, glucose oxidase; radioisotopes, such as iodine (125I, 121I), carbon (14C), sulfur (35S), tritium (3H), indium (112In), and technetium (99Tc); luminescent labels, such as luminol; and fluorescent labels, such as fluorescein and rhodamine, and biotin.

[0345] One facet of the invention is the detection and diagnosis of a disease or disorder associated with aberrant expression of a polypeptide of interest in an animal, preferably a mammal and most preferably a human. A preferred embodiment of the invention is the detection and diagnosis of a disease or disorder associated with aberrant expression of a plasma membrane associated antigen in an animal, preferably a mammal and most preferably a human. In one embodiment, diagnosis comprises: a) administering (for example, parenterally, subcutaneously, or intraperitoneally) to a subject an effective amount of a labeled molecule which specifically binds to the polypeptide of interest; b) waiting for a time interval following the administering for permitting the labeled molecule to preferentially concentrate at sites in the subject where the polypeptide is expressed (and for unbound labeled molecule to be cleared to background level); c) determining background level; and d) detecting the labeled molecule in the subject, such that detection of labeled molecule above the background level indicates that the subject has a particular disease or disorder associated with aberrant expression of the polypeptide of interest. Background level can be determined by various methods including, comparing the amount of labeled molecule detected to a standard value previously determined for a particular system.

[0346] It will be understood in the art that the size of the subject and the imaging system used will determine the quantity of imaging moiety needed to produce diagnostic images. In the case of a radioisotope moiety, for a human subject, the quantity of radioactivity injected will normally range from about 5 to 20 millicuries of 99mTc. The labeled antibody or antibody fragment will then preferentially accumulate at the location of cells which contain the specific protein. In vivo tumor imaging is described in S. W. Burchiel et al., “Immunopharmacokinetics of Radiolabeled Antibodies and Their Fragments.” (Chapter 13 in Tumor Imaging: The Radiochemical Detection of Cancer, S. W. Burchiel and B. A. Rhodes, eds., Masson Publishing Inc. (1982)).

[0347] Depending on several variables, including the type of label used and the mode of administration, the time interval following the administration for permitting the labeled molecule to preferentially concentrate at sites in the subject and for unbound labeled molecule to be cleared to background level is 6 to 48 hours or 6 to 24 hours or 6 to 12 hours. In another embodiment the time interval following administration is 5 to 20 days or 5 to 10 days.

[0348] In an embodiment, monitoring of the disease or disorder is carried out by repeating the method for diagnosing the disease or disorder, for example, one month after initial diagnosis, six months after initial diagnosis, one year after initial diagnosis, etc.

[0349] Presence of the labeled molecule can be detected in the patient using methods known in the art for in vivo scanning. These methods depend upon the type of label used. Skilled artisans will be able to determine the appropriate method for detecting a particular label. Methods and devices that may be used in the diagnostic methods of the invention include, but are not limited to, computed tomography (CT), whole body scan such as position emission tomography (PET), magnetic resonance imaging (MRI), and sonography.

[0350] In a specific embodiment, the molecule is labeled with a radioisotope and is detected in the patient using a radiation responsive surgical instrument (Thurston et al., U.S. Pat. No. 5,441,050). In another embodiment, the molecule is labeled with a fluorescent compound and is detected in the patient using a fluorescence responsive scanning instrument. In another embodiment, the molecule is labeled with a positron emitting metal and is detected in the patent using positron emission-tomography. In yet another embodiment, the molecule is labeled with a paramagnetic label and is detected in a patient using magnetic resonance imaging (MRI).

[0351] Kits

[0352] The present invention provides kits that can be used in the above methods. In one embodiment, a kit comprises an antibody of the invention, preferably a purified antibody, in one or more containers. In a specific embodiment, the kits of the present invention contain a substantially isolated polypeptide comprising an epitope which is specifically immunoreactive with an antibody included in the kit. Preferably, the kits of the present invention further comprise a control antibody which does not react with the polypeptide of interest. In another specific embodiment, the kits of the present invention contain a means for detecting the binding of an antibody to a polypeptide of interest (e.g., the antibody may be conjugated to a detectable substrate such as a fluorescent compound, an enzymatic substrate, a radioactive compound or a luminescent compound, or a second antibody which recognizes the first antibody may be conjugated to a detectable substrate).

[0353] In another specific embodiment of the present invention, the kit is a diagnostic kit for use in screening serum containing antibodies specific against proliferative and/or cancerous polynucleotides and polypeptides. Such a kit may include a control antibody that does not react with the polypeptide of interest. Such a kit may include a substantially isolated polypeptide antigen comprising an epitope, which is specifically immunoreactive with at least one anti-polypeptide antigen antibody. Further, such a kit includes means for detecting the binding of said antibody to the antigen (e.g., the antibody may be conjugated to a fluorescent compound such as fluorescein or rhodamine, which can be detected by flow cytometry). In specific embodiments, the kit may include a recombinantly produced or chemically synthesized polypeptide antigen. The polypeptide antigen of the kit may also be attached to a solid support.

[0354] In a more specific embodiment the detecting means of the above-described kit includes a solid support to which said polypeptide antigen is attached. Such a kit may also include a non-attached reporter-labeled anti-human antibody. In this embodiment, binding of the antibody to the polypeptide antigen can be detected by binding of the said reporter-labeled antibody.

[0355] In an additional embodiment, the invention includes a diagnostic kit for use in screening serum containing antigens of the polypeptide of the invention. The diagnostic kit includes a substantially isolated antibody specifically immunoreactive with polypeptide or polynucleotide antigens, and means for detecting the binding of the polynucleotide or polypeptide antigen to the antibody. In one embodiment, the antibody is attached to a solid support. In a specific embodiment, the antibody may be a monoclonal antibody. The detecting means of the kit may include a second, labeled monoclonal antibody. Alternatively, or in addition, the detecting means may include a labeled, competing antigen.

[0356] In one diagnostic configuration, test serum is reacted with a solid phase reagent having a surface-bound antigen obtained by the methods of the present invention. After binding with specific antigen antibody to the reagent and removing unbound serum components by washing, the reagent is reacted with reporter-labeled anti-human antibody to bind reporter to the reagent in proportion to the amount of bound anti-antigen antibody on the solid support. The reagent is again washed to remove unbound labeled antibody, and the amount of reporter associated with the reagent is determined. Typically, the reporter is an enzyme, which is detected by incubating the solid phase in the presence of a suitable fluorometric, luminescent or colorimetric substrate (Sigma, St. Louis, Mo.).

[0357] The solid surface reagent in the above assay is prepared by known techniques for attaching protein material to solid support material, such as polymeric beads, dip sticks, 96-well plate or filter material. These attachment methods generally include non-specific adsorption of the protein to the support or covalent attachment of the protein, typically through a free amine group, to a chemically reactive group on the solid support, such as an activated carboxyl, hydroxyl, or aldehyde group. Alternatively, streptavidin coated plates can be used in conjunction with biotinylated antigen(s).

[0358] Thus, the invention provides an assay system or kit for carrying out this diagnostic method. The kit generally includes a support with surface-bound recombinant antigens, and a reporter-labeled anti-human antibody for detecting surface-bound anti-antigen antibody.

[0359] Uses of the Polynucleotides

[0360] Each of the polynucleotides identified herein can be used in numerous ways as reagents. The following description should be considered exemplary and utilizes known techniques.

[0361] The polynucleotides of the present invention are useful for chromosome identification. There exists an ongoing need to identify new chromosome markers, since few chromosome marking reagents, based on actual sequence data (repeat polymorphisms), are presently available. Each sequence is specifically targeted to and can hybridize with a particular location on an individual human chromosome, thus each polynucleotide of the present invention can routinely be used as a chromosome marker using techniques known in the art. Table 1, column 9 provides the chromosome location of some of the polynucleotides of the invention.

[0362] Briefly, sequences can be mapped to chromosomes by preparing PCR primers (preferably at least 15 bp (e.g., 15-25 bp) from the sequences shown in SEQ ID NO:X. Primers can optionally be selected using computer analysis so that primers do not span more than one predicted exon in the genomic DNA. These primers are then used for PCR screening of somatic cell hybrids containing individual human chromosomes. Only those hybrids containing the human gene corresponding to SEQ ID NO:X will yield an amplified fragment.

[0363] Similarly, somatic hybrids provide a rapid method of PCR mapping the polynucleotides to particular chromosomes. Three or more clones can be assigned per day using a single thermal cycler. Moreover, sublocalization of the polynucleotides can be achieved with panels of specific chromosome fragments. Other gene mapping strategies that can be used include in situ hybridization, prescreening with labeled flow-sorted chromosomes, preselection by hybridization to construct chromosome specific-cDNA libraries, and computer mapping techniques (See, e.g., Shuler, Trends Biotechnol 16:456-459 (1998) which is hereby incorporated by reference in its entirety).

[0364] Precise chromosomal location of the polynucleotides can also be achieved using fluorescence in situ hybridization (FISH) of a metaphase chromosomal spread. This technique uses polynucleotides as short as 500 or 600 bases; however, polynucleotides 2,000-4,000 bp are preferred. For a review of this technique, see Verma et al., “Human Chromosomes: a Manual of Basic Techniques,” Pergamon Press, New York (1988).

[0365] For chromosome mapping, the polynucleotides can be used individually (to mark a single chromosome or a single site on that chromosome) or in panels (for marking multiple sites and/or multiple chromosomes).

[0366] Thus, the present invention also provides a method for chromosomal localization which involves (a) preparing PCR primers from the polynucleotide sequences in Table 1 and/or Table 2 and SEQ ID NO:X and (b) screening somatic cell hybrids containing individual chromosomes.

[0367] The polynucleotides of the present invention would likewise be useful for radiation hybrid mapping, HAPPY mapping, and long range restriction mapping. For a review of these techniques and others known in the art, see, e.g. Dear, “Genome Mapping: A Practical Approach,” IRL Press at Oxford University Press, London (1997); Aydin, J. Mol. Med. 77:691-694 (1999); Hacia et al., Mol. Psychiatry 3:483-492 (1998); Herrick et al., Chromosome Res. 7:409-423 (1999); Hamilton et al., Methods Cell Biol. 62:265-280 (2000); and/or Ott, J. Hered. 90:68-70 (1999), each of which is hereby incorporated by reference in its entirety.

[0368] Once a polynucleotide has been mapped to a precise chromosomal location, the physical position of the polynucleotide can be used in linkage analysis. Linkage analysis establishes coinheritance between a chromosomal location and presentation of a particular disease. (Disease mapping data are found, for example, in V. McKusick, Mendelian Inheritance in Man (available on line through Johns Hopkins University Welch Medical Library).) Column 10 of Table 1 provides an OMIM reference identification number of diseases associated with the cytologic band disclosed in column 9 of Table 1, as determined using techniques described herein and by reference to Table 5. Assuming 1 megabase mapping resolution and one gene per 20 kb, a cDNA precisely localized to a chromosomal region associated with the disease could be one of 50-500 potential causative genes.

[0369] Thus, once coinheritance is established, differences in a polynucleotide of the invention and the corresponding gene between affected and unaffected individuals can be examined. First, visible structural alterations in the chromosomes, such as deletions or translocations, are examined in chromosome spreads or by PCR. If no structural alterations exist, the presence of point mutations are ascertained. Mutations observed in some or all affected individuals, but not in normal individuals, indicate that the mutation may cause the disease. However, complete sequencing of the polypeptide and the corresponding gene from several normal individuals is required to distinguish the mutation from a polymorphism. If a new polymorphism is identified, this polymorphic polypeptide can be used for further linkage analysis.

[0370] Furthermore, increased or decreased expression of the gene in affected individuals as compared to unaffected individuals can be assessed using the polynucleotides of the invention. Any of these alterations (altered expression, chromosomal rearrangement, or mutation) can be used as a diagnostic or prognostic marker. Diagnostic and prognostic methods, kits and reagents encompassed by the present invention are briefly described below and more thoroughly elsewhere herein (see e.g., the sections labeled “Antibodies”, “Diagnostic Assays”, and “Methods for Detecting Cancer”).

[0371] Thus, the invention also provides a diagnostic method useful during diagnosis of a disorder, involving measuring the expression level of polynucleotides of the present invention in cells or body fluid from an individual and comparing the measured gene expression level with a standard level of polynucleotide expression level, whereby an increase or decrease in the gene expression level compared to the standard is indicative of a disorder. Additional non-limiting examples of diagnostic methods encompassed by the present invention are more thoroughly described elsewhere herein (see, e.g., Example 12).

[0372] In still another embodiment, the invention includes a kit for analyzing samples for the presence of proliferative and/or cancerous polynucleotides derived from a test subject, as further described herein. In a general embodiment, the kit includes at least one polynucleotide probe containing a nucleotide sequence that will specifically hybridize with a polynucleotide of the invention and a suitable container. In a specific embodiment, the kit includes two polynucleotide probes defining an internal region of the polynucleotide of the invention, where each probe has one strand containing a 31′mer-end internal to the region. In a further embodiment, the probes may be useful as primers for polymerase chain reaction amplification.

[0373] Where a diagnosis of a related disorder, including, for example, diagnosis of a tumor, has already been made according to conventional methods, the present invention is useful as a prognostic indicator, whereby patients exhibiting enhanced or depressed polynucleotide of the invention expression will experience a worse clinical outcome relative to patients expressing the gene at a level nearer the standard level.

[0374] By “measuring the expression level of polynucleotides of the invention” is intended qualitatively or quantitatively measuring or estimating the level of the polypeptide of the invention or the level of the mRNA encoding the polypeptide of the invention in a first biological sample either directly (e.g., by determining or estimating absolute protein level or mRNA level) or relatively (e.g., by comparing to the polypeptide level or mRNA level in a second biological sample). Preferably, the polypeptide level or mRNA level in the first biological sample is measured or estimated and compared to a standard polypeptide level or mRNA level, the standard being taken from a second biological sample obtained from an individual not having the related disorder or being determined by averaging levels from a population of individuals not having a related disorder. As will be appreciated in the art, once a standard polypeptide level or mRNA level is known, it can be used repeatedly as a standard for comparison.

[0375] By “biological sample” is intended any biological sample obtained from an individual, body fluid, cell line, tissue culture, or other source which contains polypeptide of the present invention or the corresponding mRNA. As indicated, biological samples include body fluids (such as semen, lymph, vaginal pool, sera, plasma, urine, synovial fluid and spinal fluid) which contain the polypeptide of the present invention, and tissue sources found to express the polypeptide of the present invention. Methods for obtaining tissue biopsies and body fluids from mammals are well known in the art. Where the biological sample is to include mRNA, a tissue biopsy is the preferred source.

[0376] The method(s) provided above may preferably be applied in a diagnostic method and/or kits in which polynucleotides and/or polypeptides of the invention are attached to a solid support. In one exemplary method, the support may be a “gene chip” or a “biological chip” as described in U.S. Pat. Nos. 5,837,832, 5,874,219, and 5,856,174. Further, such a gene chip with polynucleotides of the invention attached may be used to identify polymorphisms between the isolated polynucleotide sequences of the invention, with polynucleotides isolated from a test subject. The knowledge of such polymorphisms (i.e., their location, as well as, their existence) would be beneficial in identifying disease loci for many disorders, such as for example, in neural disorders, immune system disorders, muscular disorders, reproductive disorders, gastrointestinal disorders, pulmonary disorders, digestive disorders, cardiovascular disorders, renal disorders, proliferative disorders, and/or cancerous diseases and conditions. Such a method is described in U.S. Pat. Nos. 5,858,659 and 5,856,104. The U.S. Patents referenced supra are hereby incorporated by reference in their entirety herein.

[0377] The present invention encompasses polynucleotides of the present invention that are chemically synthesized, or reproduced as peptide nucleic acids (PNA), or according to other methods known in the art. The use of PNAs would serve as the preferred form if the polynucleotides of the invention are incorporated onto a solid support, or gene chip. For the purposes of the present invention, a peptide nucleic acid (PNA) is a polyamide type of DNA analog and the monomeric units for adenine, guanine, thymine and cytosine are available commercially (Perceptive Biosystems). Certain components of DNA, such as phosphorus, phosphorus oxides, or deoxyribose derivatives, are not present in PNAs. As disclosed by Nielsen et al., Science 254:1497 (1991); and Egholm et al., Nature 365:666 (1993), PNAs bind specifically and tightly to complementary DNA strands and are not degraded by nucleases. In fact, PNA binds more strongly to DNA than DNA itself does. This is probably because there is no electrostatic repulsion between the two strands, and also the polyamide backbone is more flexible. Because of this, PNA/DNA duplexes bind under a wider range of stringency conditions than DNA/DNA duplexes, making it easier to perform multiplex hybridization. Smaller probes can be used than with DNA due to the strong binding. In addition, it is more likely that single base mismatches can be determined with PNA/DNA hybridization because a single mismatch in a PNA/DNA 15-mer lowers the melting point (T.sub.m) by 8°-20° C., vs. 4°-16° C. for the DNA/DNA 15-mer duplex. Also, the absence of charge groups in PNA means that hybridization can be done at low ionic strengths and reduce possible interference by salt during the analysis.

[0378] The compounds of the present invention have uses which include, but are not limited to, detecting cancer in mammals. In particular the invention is useful during diagnosis of pathological cell proliferative neoplasias which include, but are not limited to: acute myelogenous leukemias including acute monocytic leukemia, acute myeloblastic leukemia, acute promyelocytic leukemia, acute myelomonocytic leukemia, acute erythroleukemia, acute megakaryocytic leukemia, and acute undifferentiated leukemia, etc.; and chronic myelogenous leukemias including chronic myclomonocytic leukemia, chronic granulocytic leukemia, etc. Preferred mammals include monkeys, apes, cats, dogs, cows, pigs, horses, rabbits and humans. Particularly preferred are humans.

[0379] The compounds of the present invention have preferred uses which include, but are not limited to, detecting cancer in mammals. In particular the invention is useful during diagnosis of pathological cell proliferative neoplasias. Preferred mammals include monkeys, apes, cats, dogs, cows, pigs, horses, rabbits and humans. Particularly preferred are humans.

[0380] Pathological cell proliferative disorders are often associated with inappropriate activation of proto-oncogenes. (Gelmann, E. P. et al., “The Etiology of Acute Leukemia: Molecular Genetics and Viral Oncology,” in Neoplastic Diseases of the Blood, Vol 1., Wiemik, P. H. et al. eds., 161-182 (1985)). Neoplasias are now believed to result from the qualitative alteration of a normal cellular gene product, or from the quantitative modification of gene expression by insertion into the chromosome of a viral sequence, by chromosomal translocation of a gene to a more actively transcribed region, or by some other mechanism. (Gelmann et al., supra) It is likely that mutated or altered expression of specific genes is involved in the pathogenesis of some leukemias, among other tissues and cell types. (Gelmann et al., supra) Indeed, the human counterparts of the oncogenes involved in some animal neoplasias have been amplified or translocated in some cases of human leukemia and carcinoma. (Gelmann et al., supra)

[0381] For example, c-myc expression is highly amplified in the non-lymphocytic leukemia cell line HL-60. When HL-60 cells are chemically induced to stop proliferation, the level of c-myc is found to be downregulated. (International Publication Number WO 91/15580). However, it has been shown that exposure of HL-60 cells to a DNA construct that is complementary to the 5′ end of c-myc or c-myb blocks translation of the corresponding mRNAs which downregulates expression of the c-myc or c-myb proteins and causes arrest of cell proliferation and differentiation of the treated cells. (International Publication Number WO 91/15580; Wickstrom et al., Proc. Natl. Acad. Sci. 85:1028 (1988); Anfossi et al., Proc. Natl. Acad. Sci. 86:3379 (1989)). However, the skilled artisan would appreciate the present invention's usefulness is not be limited to treatment, prevention, diagnosis and/or prognosis, of proliferative disorders of cells and tissues of hematopoietic origin, in light of the numerous cells and cell types of varying origins which are known to exhibit proliferative phenotypes. In preferred embodiments, the compounds and/or methods of the invention are used to treat, prevent, diagnose, and/or prognose, proliferative disorders of cells and tissues in which they are expressed.

[0382] In addition to the foregoing, a polynucleotide of the present invention can be used to control gene expression through triple helix formation or through antisense DNA or RNA. Antisense techniques are discussed, for example, in Okano, J. Neurochem. 56: 560 (1991); “Oligodeoxynucleotides as Antisense Inhibitors of Gene Expression, CRC Press, Boca Raton, Fla. (1988). Triple helix formation is discussed in, for instance Lee et al., Nucleic Acids Research 6: 3073 (1979); Cooney et al., Science 241: 456 (1988); and Dervan et al., Science 251: 1360 (1991). Both methods rely on binding of the polynucleotide to a complementary DNA or RNA. For these techniques, preferred polynucleotides are usually oligonucleotides 20 to 40 bases in length and complementary to either the region of the gene involved in transcription (triple helix—see Lee et al., Nucl. Acids Res. 6:3073 (1979); Cooney et al., Science 241:456 (1988); and Dervan et al., Science 251:1360 (1991)) or to the mRNA itself (antisense—Okano, J. Neurochem. 56:560 (1991); Oligodeoxy-nucleotides as Antisense Inhibitors of Gene Expression, CRC Press, Boca Raton, Fla. (1988).) Triple helix formation optimally results in a shut-off of RNA transcription from DNA, while antisense RNA hybridization blocks translation of an mRNA molecule into polypeptide. The oligonucleotide described above can also be delivered to cells such that the antisense RNA or DNA may be expressed in vivo to inhibit production of polypeptide of the present invention antigens. Both techniques are effective in model systems, and the information disclosed herein can be used to design antisense or triple helix polynucleotides in an effort to treat disease, and in particular, for the treatment of proliferative diseases and/or conditions. Non-limiting antisense and triple helix methods encompassed by the present invention are more thoroughly described elsewhere herein (see, e.g., the section labeled “Antisense and Ribozyme (Antagonists)”).

[0383] Polynucleotides of the present invention are also useful in gene therapy. One goal of gene therapy is to insert a normal gene into an organism having a defective gene, in an effort to correct the genetic defect. The polynucleotides disclosed in the present invention offer a means of targeting such genetic defects in a highly accurate manner. Another goal is to insert a new gene that was not present in the host genome, thereby producing a new trait in the host cell. Additional non-limiting examples of gene therapy methods encompassed by the present invention are more thoroughly described elsewhere herein (see, e.g., the sections labeled “Gene Therapy Methods” and Examples 16, 17 and 18).

[0384] The polynucleotides are also useful for identifying individuals from minute biological samples. The United States military, for example, is considering the use of restriction fragment length polymorphism (RFLP) for identification of its personnel. In this technique, an individual's genomic. DNA is digested with one or more restriction enzymes, and probed on a Southern blot to yield unique bands for identifying personnel. This method does not suffer from the current limitations of “Dog Tags” which can be lost, switched, or stolen, making positive identification difficult. The polynucleotides of the present invention can be used as additional DNA markers for RFLP.

[0385] The polynucleotides of the present invention can also be used as an alternative to RFLP, by determining the actual base-by-base DNA sequence of selected portions of an individual's genome. These sequences can be used to prepare PCR primers for amplifying and isolating such selected DNA, which can then be sequenced. Using this technique, individuals can be identified because each individual will have a unique set of DNA sequences. Once a unique ID database is established for an individual, positive identification of that individual, living or dead, can be made from extremely small tissue samples.

[0386] Forensic biology also benefits from using DNA-based identification techniques as disclosed herein. DNA sequences taken from very small biological samples such as tissues, e.g., hair or skin, or body fluids, e.g., blood, saliva, semen, synovial fluid, amniotic fluid, breast milk, lymph, pulmonary sputum or surfactant, urine, fecal matter, etc., can be amplified using PCR. In one prior art technique, gene sequences amplified from polymorphic loci, such as DQa class II HLA gene, are used in forensic biology to identify individuals. (Erlich, H., PCR Technology, Freeman and Co. (1992).) Once these specific polymorphic loci are amplified, they are digested with one or more restriction enzymes, yielding an identifying set of bands on a Southern blot probed with DNA corresponding to the DQa class II HLA gene. Similarly, polynucleotides of the present invention can be used as polymorphic markers for forensic purposes.

[0387] There is also a need for reagents capable of identifying the source of a particular tissue. Such need arises, for example, in forensics when presented with tissue of unknown origin. Appropriate reagents can comprise, for example, DNA probes or primers prepared from the sequences of the present invention, specific to tissues, including but not limited to, those sequences referred to in Table 1. Panels of such reagents can identify tissue by species and/or by organ type. In a similar fashion, these reagents can be used to screen tissue cultures for contamination. Additional non-limiting examples of such uses are further described herein.

[0388] The polynucleotides of the present invention are also useful as hybridization probes for differential identification of the tissue(s) or cell type(s) present in a biological sample. Similarly, polypeptides and antibodies directed to polypeptides of the present invention are useful to provide immunological probes for differential identification of the tissue(s) (e.g., immunohistochemistry assays) or cell type(s) (e.g., immunocytochemistry assays). In a specific embodiment, the polynucleotides of the present invention are also useful as hybridization probes for differential identification of tissue(s) or cell type(s) present in a biological sample. Similarly, polypeptides and antibodies directed to polypeptides of the present invention are useful to provide immunological probes for differential identification of tissue(s) (e.g., immunohistochemistry assays) or cell type(s) (e.g., immunocytochemistry assays). In addition, for a number of disorders of the tissues or cells in which the plasma membrane associated antigens are expressed, significantly higher or lower levels of gene expression of the polynucleotides/polypeptides of the present invention may be detected in certain tissues (e.g., tissues expressing polypeptides and/or polynucleotides of the present invention, for example, corresponding to the library source relating to a polynucleotide sequence of the invention as disclosed in column 8 of Table 1, and/or cancerous and/or wounded tissues) or bodily fluids (e.g., semen, lymph, vaginal pool, serum, plasma, urine, synovial fluid or spinal fluid) taken from an individual having such a disorder, relative to a “standard” gene expression level, i.e., the expression level in healthy tissue from an individual not having the disorder.

[0389] Thus, the invention provides a diagnostic method of a disorder, which involves: (a) assaying gene expression level in cells or body fluid of an individual; (b) comparing the gene expression level with a standard gene expression level, whereby an increase or decrease in the assayed gene expression level compared to the standard expression level is indicative of a disorder.

[0390] In the very least, the polynucleotides of the present invention can be used as molecular weight markers on Southern gels, as diagnostic probes for the presence of a specific mRNA in a particular cell type, as a probe to “subtract-out” known sequences in the process of discovering novel polynucleotides, for selecting and making oligomers for attachment to a “gene chip” or other support, to raise anti-DNA antibodies using DNA immunization techniques, and as an antigen to elicit an immune response.

[0391] Uses of the Polypeptides

[0392] Each of the polypeptides identified herein can be used in numerous ways. The following description should be considered exemplary and utilizes known techniques.

[0393] Polypeptides and antibodies directed to polypeptides of the present invention are useful to provide immunological probes for differential identification of the tissue(s) (e.g., immunohistochemistry assays such as, for example, ABC immunoperoxidase (Hsu et al., J. Histochem. Cytochem. 29:577-580 (1981)) or cell type(s) (e.g., immunocytochemistry assays).

[0394] Antibodies can be used to assay levels of polypeptides encoded by polynucleotides of the invention in a biological sample using classical immunohistological methods known to those of skill in the art (see, e.g., Jalkanen, et al., J. Cell. Biol. 101:976-985 (1985); Jalkanen, et al., J. Cell. Biol. 105:3087-3096 (1987)). Other antibody-based methods useful for detecting protein gene expression include immunoassays, such as the enzyme linked immunosorbent assay (ELISA) and the radioimmunoassay (RIA). Suitable antibody assay labels are known in the art and include enzyme labels, such as, glucose oxidase; radioisotopes, such as iodine (¹³¹I, ¹²⁵I, ¹²³I, ¹²¹I), carbon (¹⁴C), sulfur (³⁵S), tritium (³H), indium (^{115m}In, ^{113m}In, ¹¹²In, ¹¹¹In), and technetium (⁹⁹Tc, ^{99m}Tc), thallium (²⁰¹Ti), gallium (⁶⁸Ga, ⁶⁷Ga), palladium (¹⁰³Pd), molybdenum (⁹⁹Mo), xenon (¹³³Xe), fluorine (¹⁸F), ¹⁵³Sm, ¹⁷⁷Lu, ¹⁵⁹Gd, ¹⁴⁹Pm, ¹⁴⁰La, ¹⁷⁵YB, ¹⁶⁶Ho, ⁹⁰Y, ⁴⁷Sc, ¹⁸⁶Re, ¹⁸⁸Re, ¹⁴²Pr, ¹⁰⁵Rh, ⁹⁷Ru; luminescent labels, such as luminol; and fluorescent labels, such as fluorescein and rhodamine, and biotin.

[0395] In addition to assaying levels of polypeptide of the present invention in a biological sample, proteins can also be detected in vivo by imaging. Antibody labels or markers for in vivo imaging of protein include those detectable by X-radiography, NMR or ESR. For X-radiography, suitable labels include radioisotopes such as barium or cesium, which emit detectable radiation but are not overtly harmful to the subject. Suitable markers for NMR and ESR include those with a detectable characteristic spin, such as deuterium, which may be incorporated into the antibody by labeling of nutrients for the relevant hybridoma.

[0396] A plasma membrane associated antigen-specific antibody or antibody fragment which has been labeled with an appropriate detectable imaging moiety, such as a radioisotope (for example, ¹³¹I, ¹¹²In, ^{99m}Tc, (¹³¹I, ¹²⁵I, ¹²³I, ¹²¹I), carbon (¹⁴C), sulfur (³⁵S), tritium (³H), indium (^{115m}In, ^{113m}In, ¹¹²In, ¹¹¹In), and technetium (⁹⁹Tc, ^{99m}Tc), thallium (²⁰¹Ti), gallium (⁶⁸Ga, ⁶⁷Ga), palladium (¹⁰³Pd), molybdenum (⁹⁹Mo), xenon (¹³³Xe), fluorine (¹⁸F, ¹⁵³Sm, ¹⁷⁷Lu, ¹⁵⁹Gd, ¹⁴⁹Pm, ¹⁴⁰La, ¹⁷⁵Yb, ¹⁶⁶Ho, ⁹⁰Y, ⁴⁷Sc, ¹⁸⁶Re, ¹⁸⁸Re, ¹⁴²Pr, ¹⁰⁵Rh, ⁹⁷Ru), a radio-opaque substance, or a material detectable by nuclear magnetic resonance, is introduced (for example, parenterally, subcutaneously or intraperitoneally) into the mammal to be examined for colon disorder. It will be understood in the art that the size of the subject and the imaging system used will determine the quantity of imaging moiety needed to produce diagnostic images. In the case of a radioisotope moiety, for a human subject, the quantity of radioactivity injected will normally range from about 5 to 20 millicuries of ^{99m}Tc. The labeled antibody or antibody fragment will then preferentially accumulate at the location of cells which express the polypeptide encoded by a polynucleotide of the invention. In vivo tumor imaging is described in S. W. Burchiel et al., “Immunopharmacokinetics of Radiolabeled Antibodies and Their Fragments” (Chapter 13 in Tumor Imaging: The Radiochemical Detection of Cancer, S. W. Burchiel and B. A. Rhodes, eds., Masson Publishing Inc. (1982)).

[0397] In one embodiment, the invention provides a method for the specific delivery of compositions of the invention to cells by administering polypeptides of the invention (e.g., polypeptides encoded by polynucleotides of the invention and/or antibodies) that are associated with heterologous polypeptides or nucleic acids. In one example, the invention provides a method for delivering a therapeutic protein into the targeted cell. In another example, the invention provides a method for delivering a single stranded nucleic acid (e.g., antisense or ribozymes) or double stranded nucleic acid (e.g., DNA that can integrate into the cell's genome or replicate episomally and that can be transcribed) into the targeted cell.

[0398] In another embodiment, the invention provides a method for the specific destruction of cells (e.g., the destruction of tumor cells) by administering polypeptides of the invention in association with toxins or cytotoxic prodrugs.

[0399] In a preferred embodiment, the invention provides a method for the specific destruction of cells (e.g., aberrant cells, neoplasms) by administering polypeptides of the invention (e.g., polypeptides encoded by polynucleotides of the invention and/or antibodies) in association with toxins or cytotoxic prodrugs. In another preferred embodiment the invention provides a method for the specific destruction of tissues/cells corresponding to the library source relating to a polynucleotide sequence of the invention as disclosed in column 8 of Table 1 by administering polypeptides of the invention in association with toxins or cytotoxic prodrugs.

[0400] By “toxin” is meant one or more compounds that bind and activate endogenous cytotoxic effector systems, radioisotopes, holotoxins, modified toxins, catalytic subunits of toxins, or any molecules or enzymes not normally present in or on the surface of a cell that under defined conditions cause the cell's death. Toxins that may be used according to the methods of the invention include, but are not limited to, radioisotopes known in the art, compounds such as, for example, antibodies (or complement fixing containing portions thereof) that bind an inherent or induced endogenous cytotoxic effector system, thymidine kinase, endonuclease, RNAse, alpha toxin, ricin, abrin, Pseudomonas exotoxin A, diphtheria toxin, saporin, momordin, gelonin, pokeweed antiviral protein, alpha-sarcin and cholera toxin. “Toxin” also includes a cytostatic or cytocidal agent, a therapeutic agent or a radioactive metal ion, e.g., alpha-emitters such as, for example, ²¹³Bi, or other radioisotopes such as, for example, ¹⁰³Pd, ¹³³Xe, ¹³¹I, ¹¹¹In, ⁶⁸Ge, ⁵⁷Co, ⁶⁵Zn, ⁸⁵Sr, ³²P, ³⁵S, ⁹⁰Y, ¹⁵³Sm, ¹⁵³Gd, ¹⁶⁹Yb, ⁵¹Cr, ⁵⁴Mn, ⁷⁵Se, ¹¹³Sn, ⁹⁰Yttrium, ¹¹⁷Tin, ¹⁸⁶Rhenium, ¹⁶⁶Holmium, and ¹⁸⁸Rhenium; luminescent labels, such as luminol; and fluorescent labels, such as fluorescein and rhodamine, and biotin.

[0401] In a specific embodiment, the invention provides a method for the specific destruction of cells (e.g., the destruction of tumor cells) by administering polypeptides of the invention or antibodies of the invention in association with the radioisotope ⁹⁰Y. In another specific embodiment, the invention provides a method for the specific destruction of cells (e.g., the destruction of tumor cells) by administering polypeptides of the invention or antibodies of the invention in association with the radioisotope ¹¹¹In. In a further specific embodiment, the invention provides a method for the specific destruction of cells (e.g., the destruction of tumor cells) by administering polypeptides of the invention or antibodies of the invention in association with the radioisotope ¹³¹I.

[0402] Techniques known in the art may be applied to label polypeptides of the invention (including antibodies). Such techniques include, but are not limited to, the use of bifunctional conjugating agents (see e.g., U.S. Pat. Nos. 5,756,065; 5,714,631; 5,696,239; 5,652,361; 5,505,931; 5,489,425; 5,435,990; 5,428,139; 5,342,604; 5,274,119; 4,994,560; and 5,808,003; the contents of each of which are hereby incorporated by reference in its entirety).

[0403] Thus, the invention provides a diagnostic method of a disorder, which involves (a) assaying the expression level of a polypeptide of the present invention in cells or body fluid of an individual; and (b) comparing the assayed polypeptide expression level with a standard polypeptide expression level, whereby an increase or decrease in the assayed polypeptide expression level compared to the standard expression level is indicative of a disorder. With respect to cancer, the presence of a relatively high amount of transcript in biopsied tissue from an individual may indicate a predisposition for the development of the disease, or may provide a means for detecting the disease prior to the appearance of actual clinical symptoms. A more definitive diagnosis of this type may allow health professionals to employ preventative measures or aggressive treatment earlier thereby preventing the development or further progression of the cancer.

[0404] Moreover, in preferred embodiments, polynucleotides expressed in a particular tissue type (see, e.g., Table 1, column 8) are used to diagnose, detect, prevent, treat and/or prognose disorders associated with the tissue type. For example, patients can be administered a polypeptide of the present invention in an effort to replace absent or decreased levels of the polypeptide (e.g., insulin), to supplement absent or decreased levels of a different polypeptide (e.g., hemoglobin S for hemoglobin B, SOD, catalase, DNA repair proteins), to inhibit the activity of a polypeptide (e.g., an oncogene or tumor supressor), to activate the activity of a polypeptide (e.g., by binding to a receptor), to reduce the activity of a membrane bound receptor by competing with it for free ligand (e.g., soluble TNF receptors used in reducing inflammation), or to bring about a desired response (e.g., blood vessel growth inhibition, enhancement of the immune response to proliferative cells or tissues).

[0405] Similarly, antibodies directed to a polypeptide of the present invention can also be used to treat disease (as described supra, and elsewhere herein). For example, administration of an antibody directed to a polypeptide of the present invention can bind, and/or neutralize the polypeptide, and/or reduce overproduction of the polypeptide. Similarly, administration of an antibody can activate the polypeptide, such as by binding to a polypeptide bound to a membrane (receptor).

[0406] At the very least, the polypeptides of the present invention can be used as molecular weight markers on SDS-PAGE gels or on molecular sieve gel filtration columns using methods well known to those of skill in the art. Polypeptides can also be used to raise antibodies, which in turn are used to measure protein expression from a recombinant cell, as a way of assessing transformation of the host cell. Moreover, the polypeptides of the present invention can be used to test the biological activities described herein.

[0407] Diagnostic Asssays

[0408] The compounds of the present invention are useful for diagnosis, treatment, prevention and/or prognosis of various disorders in mammals, preferably humans. Such disorders include, but are not limited to, diseases associated with cell proliferation and cell signaling, particularly cancer, immune response and neuronal disorders. In preferred embodiments, polynucleotides expressed in a particular tissue type (see, e.g., Table 1, column 8) are used to diagnose, detect, prevent, treat and/or prognose disorders associated with the tissue type.

[0409] In specific embodiments, the invention provides a diagnostic method useful during diagnosis of a disorder of a normal or diseased tissue/cell source corresponding to column 8 of Table 1, which involves measuring the expression level of the coding sequence of a polynucleotide sequence associated with this tissue/cell source as disclosed in Table 1 in the tissue/cell source or other cells or body fluid from an individual and comparing the expression level of the coding sequence with a standard expression level of the coding sequence of a polynucleotide sequence, whereby an increase or decrease in the gene expression level(s) compared to the standard is indicative of a disorder of a normal or diseased tissue/cell source corresponding to column 8 of Table 1.

[0410] In particular, it is believed that certain tissues, particularly cancerous tissues, in mammals express significantly enhanced or reduced levels of normal or altered plasma membrane associated antigen expression and mRNA encoding the plasma membrane associated polypeptide when compared to a corresponding “standard” level. Further, it is believed that enhanced or depressed levels of the plasma membrane associated polypeptide can be detected in certain body fluids (e.g., sera, plasma, urine, and spinal fluid) or cells or tissue from mammals with such a cancer when compared to sera from mammals of the same species not having the cancer.

[0411] For example, polynucleotides of the invention (e.g., polynucleotide sequences complementary to all or a portion of a mRNA nucleotide sequence of SEQ ID NO:X, nucleotide sequence encoding SEQ ID NO:Y, nucleotide sequence encoding a polypeptide encoded by SEQ ID NO:X and/or a nucleotide sequence delineated by columns 8 and 9 of Table 2) and antibodies (and antibody fragments) directed against the polypeptides of the invention may be used to quantitate or qualitate concentrations of cells expressing plasma membrane associated antigens, preferrably on their cell surfaces. These polynucleotides and antibodies additionally have diagnostic applications in detecting abnormalities in the level of plasma membrane associated antigens gene expression, or abnormalities in the structure and/or temporal, tissue, cellular, or subcellular location of plasma membrane associated antigens. These diagnostic assays may be performed in vivo or in vitro, such as, for example, on blood samples, biopsy tissue or autopsy tissue. In specific embodiments, polynucleotides and antibodies of the invention are used to quantitate or qualitate tissues/cells corresponding to the library source disclosed in column 8 of Table 1 expressing the corresponding sequence disclosed in the same row of Table 1, preferrably on their cell surface.

[0412] Thus, the invention provides a diagnostic method useful during diagnosis of a disorder associated with the polypeptides of the invention, including cancers, which involves measuring the expression level of the gene encoding the plasma membrane associated antigen polypeptide in tissue or other cells or body fluid from an individual and comparing the measured gene expression level with a standard plasma membrane associated antigen gene expression level, whereby an increase or decrease in the gene expression level compared to the standard is indicative of a disorder related to the polypeptide of the invention. In specific embodiments, polynucleotides and antibodies of the invention are used to quantitate or qualitate tissues/cells corresponding to the library source disclosed in column 8 of Table 1 expressing the corresponding sequence disclosed in the same row of Table 1, preferrably on their cell surface.

[0413] Where a diagnosis of a disorder related to the polypeptides of the invention, including diagnosis of a tumor, has already been made according to conventional methods, the present invention is useful as a prognostic indicator, whereby patients exhibiting enhanced or depressed plasma membrane antigen gene expression will experience a worse clinical outcome relative to patients expressing the gene at a level nearer the standard level.

[0414] By “assaying the expression level of the gene encoding the polypeptide of the invention” is intended qualitatively or quantitatively measuring or estimating the level of the plasma membrane associated antigen polypeptide or the level of the mRNA encoding the plasma membrane associated antigen polypeptide in a first biological sample either directly (e.g., by determining or estimating absolute protein level or nRNA level) or relatively (e.g., by comparing to the level of the polypeptide or mRNA of the invention in a second biological sample). Preferably, the expression level of the polypeptide or mRNA of the present invention in the first biological sample is measured or estimated and compared to a standard level of the polypeptide or mRNA of the invention, the standard being taken from a second biological sample obtained from an individual not having the disorder or being determined by averaging levels from a population of individuals not having a disorder. As will be appreciated in the art, once a standard level of the polypeptide or mRNA of the invention is known, it can be used repeatedly as a standard for comparison.

[0415] By “biological sample” is intended any biological sample obtained from an individual, cell line, tissue culture, or other source containing the polypeptides (including portions thereof) or mRNA of the invention. As indicated, biological samples include body fluids (such as sera, plasma, urine, synovial fluid and spinal fluid) which contain cells expressing the polypeptides of the invention, and other tissue sources found to express the full length or fragments thereof of a plasma membrane associated antigen. Methods for obtaining tissue biopsies and body fluids from mammals are well known in the art. Where the biological sample is to include mRNA, a tissue biopsy is the preferred source.

[0416] Total cellular RNA can be isolated from a biological sample using any suitable technique such as the single-step guanidinium-thiocyanate-phenol-chloroform method described in Chomczynski and Sacchi, Anal. Biochem. 162:156-159 (1987). Levels of mRNA encoding the polypeptides of the invention are then assayed using any appropriate method. These include Northern blot analysis, S1 nuclease mapping, the polymerase chain reaction (PCR), reverse transcription in combination with the polymerase chain reaction (RT-PCR), and reverse transcription in combination with the ligase chain reaction (RT-LCR).

[0417] The present invention also relates to diagnostic assays such as quantitative and diagnostic assays for detecting levels of the polypeptides of the invention, in a biological sample (e.g., cells and tissues), including determination of normal and abnormal levels of polypeptides. Thus, for instance, a diagnostic assay in accordance with the invention for detecting over-expression of plasma membrane associated antigens compared to normal control tissue samples may be used to detect the presence of tumors. Assay techniques that can be used to determine levels of a polypeptide, such as a polypeptide of the present invention in a sample derived from a host are well-known to those of skill in the art. Such assay methods include radioimmunoassays, competitive-binding assays, Western Blot analysis and ELISA assays. Assaying polypeptide levels in a biological sample can occur using any art-known method.

[0418] Assaying levels of the polypeptide of the invention in a biological sample can occur using antibody-based techniques. For example, polypeptide expression in tissues can be studied with classical immunohistological methods (Jalkanen et al., J. Cell. Biol. 101:976-985 (1985); Jalkanen, M., et al., J. Cell. Biol. 105:3087-3096 (1987)). Other antibody-based methods useful for detecting gene expression of the polypeptide of the invention include immunoassays, such as the enzyme linked inimunosorbent assay (ELISA) and the radioimmunoassay (RIA). Suitable antibody assay labels are known in the art and include enzyme labels, such as, glucose oxidase, and radioisotopes, such as iodine (¹²⁵I, ¹²¹I), carbon (¹⁴C), sulfur (³⁵S), tritium (³H), indium (¹¹²In), and technetium (^{99m}TC), and fluorescent labels, such as fluorescein and rhodamine, and biotin.

[0419] The tissue or cell type to be analyzed will generally include those which are known, or suspected, to express the gene of the invetnion. The protein isolation methods employed herein may, for example, be such as those described in Harlow and Lane (Harlow, E. and Lane, D., 1988, “Antibodies: A Laboratory Manual”, Cold Spring Harbor Laboratory Press, Cold Spring Harbor, N.Y.), which is incorporated herein by reference in its entirety. The isolated cells can be derived from cell culture or from a patient. The analysis of cells taken from culture may be a necessary step in the assessment of cells that could be used as part of a cell-based gene therapy technique or, alternatively, to test the effect of compounds on the expression of the gene of the invention.

[0420] For example, antibodies, or fragments of antibodies, such as those described herein, may be used to quantitatively or qualitatively detect the presence of gene products of the invention or conserved variants or peptide fragments thereof. This can be accomplished, for example, by immunofluorescence techniques employing a fluorescently labeled antibody coupled with light microscopic, flow cytometric, or fluorimetric detection.

[0421] In a preferred embodiment, antibodies, or fragments of antibodies directed to any one or all of the predicted epitope domains of the polypeptides of the invention (Shown in Table 1, column 7) may be used to quantitatively or qualitatively detect the presence of gene products of the invention or conserved variants or peptide fragments thereof. This can be accomplished, for example, by immunofluorescence techniques employing a fluorescently labeled antibody coupled with light microscopic, flow cytometric, or fluorimetric detection.

[0422] In an additional preferred embodiment, antibodies, or fragments of antibodies directed to a conformational epitope of a plasma membrane associated antigen may be used to quantitatively or qualitatively detect the presence of gene products of the invention or conserved variants or peptide fragments thereof. This can be accomplished, for example, by immunofluorescence techniques employing a fluorescently labeled antibody coupled with light microscopic, flow cytometric, or fluorimetric detection.

[0423] The antibodies (or fragments thereof), and/or polypeptides of the present invention may, additionally, be employed histologically, as in immunofluorescence, immunoelectron microscopy or non-immunological assays, for in situ detection of colon or colon cancer antigen gene products or conserved variants or peptide fragments thereof. In situ detection may be accomplished by removing a histological specimen from a patient, and applying thereto a labeled antibody or polypeptide of the present invention. The antibody (or fragment thereof) or polypeptide is preferably applied by overlaying the labeled antibody (or fragment) onto a biological sample. Through the use of such a procedure, it is possible to determine not only the presence of the gene product, or conserved variants or peptide fragments, or polypeptide binding, but also its distribution in the examined tissue. Using the present invention, those of ordinary skill will readily perceive that any of a wide variety of histological methods (such as staining procedures) can be modified in order to achieve such in situ detection.

[0424] Immunoassays and non-immunoassays for gene products of the invention or conserved variants or peptide fragments thereof will typically comprise incubating a sample, such as a biological fluid, a tissue extract, freshly harvested cells, or lysates of cells which have been incubated in cell culture, in the presence of a detectably labeled antibody capable of binding gene products of the invention or conserved variants or peptide fragments thereof, and detecting the bound antibody by any of a number of techniques well-known in the art.

[0425] The biological sample may be brought in contact with and immobilized onto a solid phase support or carrier such as nitrocellulose, or other solid support which is capable of immobilizing cells, cell particles or soluble proteins. The support may then be washed with suitable buffers followed by treatment with the detectably labeled anti-plasma membrane associated antigen antibody or detectable plasma membrane associated antigen polypeptide. The solid phase support may then be washed with the buffer a second time to remove unbound antibody or polypeptide. Optionally the antibody is subsequently labeled. The amount of bound label on solid support may then be detected by conventional means.

[0426] By “solid phase support or carrier” is intended any support capable of binding an antigen or an antibody. Well-known supports or carriers include glass, polystyrene, polypropylene, polyethylene, dextran, nylon, amylases, natural and modified celluloses, polyacrylamides, gabbros, and magnetite. The nature of the carrier can be either soluble to some extent or insoluble for the purposes of the present invention. The support material may have virtually any possible structural configuration so long as the coupled molecule is capable of binding to an antigen or antibody. Thus, the support configuration may be spherical, as in a bead, or cylindrical, as in the inside surface of a test tube, or the external surface of a rod. Alternatively, the surface may be flat such as a sheet, test strip, etc. Preferred supports include polystyrene beads. Those skilled in the art will know many other suitable carriers for binding antibody or antigen, or will be able to ascertain the same by use of routine experimentation.

[0427] The binding activity of a given lot of anti-plasma membrane associated antigen antibody or plasma membrane associated antigen polypeptide may be determined according to well known methods. Those skilled in the art will be able to determine operative and optimal assay conditions for each determination by employing routine experimentation.

[0428] In addition to assaying levels of the polypeptide or polynucleotide of the invention in a biological sample obtained from an individual, plasma membrane associated antigen polypeptides or polynucleotides can also be detected in vivo by imaging. For example, in one embodiment of the invention, plasma membrane associated antigen polypeptide and/or anti-plasma membrane associated antigen antibodies are used to image diseased cells, such as neoplasms. In another embodiment, plasma membrane associated antigen polynucleotides of the invention (e.g., polynucleotides complementary to all or a portion of plasma membrane associated antigen mRNA) and/or anti-plasma membrane associated antigen antibodies (e.g., antibodies directed to any one or a combination of the epitopes of plasma membrane associated antigens, antibodies directed to a conformational epitope of plasma membrane associated antigens, antibodies directed to the full length polypeptide expressed on the cell surface of a mammalian cell) are used to image diseased or neoplastic cells in the tissues in which the plasma membrane associated antigens are expressed.

[0429] Antibody labels or markers for in vivo imaging of polypeptides of the invention include those detectable by X-radiography, NMR, MRI, CAT-scans or ESR. For X-radiography, suitable labels include radioisotopes such as barium or cesium, which emit detectable radiation but are not overtly harmful to the subject. Suitable markers for NMR and ESR include those with a detectable characteristic spin, such as deuterium, which may be incorporated into the antibody by labeling of nutrients for the relevant hybridoma. Where in vivo imaging is used to detect enhanced levels of the polypeptides of the invention for diagnosis in humans, it may be preferable to use human antibodies or “humanized” chimeric monoclonal antibodies. Such antibodies can be produced using techniques described herein or otherwise known in the art. For example methods for producing chimeric antibodies are known in the art. See, for review, Morrison, Science 229:1202 (1985); Oi et al., BioTechniques 4:214 (1986); Cabilly et al., U.S. Pat. No. 4,816,567; Taniguchi et al., EP 171496; Morrison et al., EP 173494; Neuberger et al., WO 8601533; Robinson et al., WO 8702671; Boulianne et al, Nature 312:643 (1984); Neuberger et al., Nature 314:268 (1985).

[0430] Additionally, any polypeptides of the invention whose presence can be detected, can be administered. For example, polypeptides of the invention labeled with a radio-opaque or other appropriate compound can be administered and visualized in vivo, as discussed, above for labeled antibodies. Further such polypeptides can be utilized for in vitro diagnostic procedures.

[0431] A plasma membrane associated antigen polypeptide-specific antibody or antibody fragment which has been labeled with an appropriate detectable imaging moiety, such as a radioisotope (for example, ¹³¹I, ¹¹²In, ^{99m}Tc), a radio-opaque substance, or a material detectable by nuclear magnetic resonance, is introduced (for example, parenterally, subcutaneously or intraperitoneally) into the mammal to be examined for a disorder associated with the plasma membrane associated antigen. It will be understood in the art that the size of the subject and the imaging system used will determine the quantity of imaging moiety needed to produce diagnostic images. In the case of a radioisotope moiety, for a human subject, the quantity of radioactivity injected will normally range from about 5 to 20 millicuries of ^{99m}Tc. The labeled antibody or antibody fragment will then preferentially accumulate at the location of cells which contain the plasma membrane associated antigen protein. In vivo tumor imaging is described in S. W. Burchiel et al., “Immunopharmacokinetics of Radiolabeled Antibodies and Their Fragments” (Chapter 13 in Tumor Imaging: The Radiochemical Detection of Cancer, S. W. Burchiel and B. A. Rhodes, eds., Masson Publishing Inc. (1982)).

[0432] With respect to antibodies, one of the ways in which the anti-plasma membrane associated antigen antibody can be detectably labeled is by linking the same to an enzyme and using the linked product in an enzyme immunoassay (EIA) (Voller, A., “The Enzyme Linked Immunosorbent Assay (ELISA)”, 1978, Diagnostic Horizons 2:1-7, Microbiological Associates Quarterly Publication, Walkersville, Md.); Voller et al., J. Clin. Pathol. 31:507-520 (1978); Butler, J. E., Meth. EnzymoL 73:482-523 (1981); Maggio, E. (ed.), 1980, Enzyme Immunoassay, CRC Press, Boca Raton, Fla.,; Ishikawa, E. et al., (eds.), 1981, Enzyme Immunoassay, Kgaku Shoin, Tokyo). The enzyme, which is bound to the antibody will react with an appropriate substrate, preferably a chromogenic substrate, in such a manner as to produce a chemical moiety which can be detected, for example, by spectrophotometric, fluorimetric or by visual means. Enzymes which can be used to detectably label the antibody include, but are not limited to, malate dehydrogenase, staphylococcal nuclease, delta-5-steroid isomerase, yeast alcohol dehydrogenase, alpha-glycerophosphate, dehydrogenase, triose phosphate isomerase, horseradish peroxidase, alkaline phosphatase, asparaginase, glucose oxidase, beta-galactosidase, ribonuclease, urease, catalase, glucose-6-phosphate dehydrogenase, glucoamylase and acetylcholinesterase. Additionally, the detection can be accomplished by colorimetric methods which employ a chromogenic substrate for the enzyme. Detection may also be accomplished by visual comparison of the extent of enzymatic reaction of a substrate in comparison with similarly prepared standards.

[0433] Detection may also be accomplished using any of a variety of other immunoassays. For example, by radioactively labeling the antibodies or antibody fragments, it is possible to detect the plasma membrane associated antigens through the use of a radioimmunoassay (RIA) (see, for example, Weintraub, B., Principles of Radioimmunoassays, Seventh Training Course on Radioligand Assay Techniques, The Endocrine Society, March, 1986, which is incorporated by reference herein). The radioactive isotope can be detected by means including, but not limited to, a gamma counter, a scintillation counter, or autoradiography.

[0434] It is also possible to label the antibody with a fluorescent compound. When the fluorescently labeled antibody is exposed to light of the proper wave length, its presence can then be detected due to fluorescence. Among the most commonly used fluorescent labeling compounds are fluorescein isothiocyanate, rhodamine, phycoerythrin, phycocyanin, allophycocyanin, ophthaldehyde and fluorescamine.

[0435] The antibody can also be detectably labeled using fluorescence emitting metals such as ¹⁵²Eu, or others of the lanthanide series. These metals can be attached to the antibody using such metal chelating groups as diethylenetriaminepentacetic acid (DTPA) or ethylenediaminetetraacetic acid (EDTA).

[0436] The antibody also can be detectably labeled by coupling it to a chemiluminescent compound. The presence of the chemiluminescent-tagged antibody is then determined by detecting the presence of luminescence that arises during the course of a chemical reaction. Examples of particularly useful chemiluminescent labeling compounds are luminol, isoluminol, theromatic acridinium ester, imidazole, acridinium salt and oxalate ester.

[0437] Likewise, a bioluminescent compound may be used to label the antibody of the present invention. Bioluminescence is a type of chemiluminescence found in biological systems in, which a catalytic protein increases the efficiency of the chemiluminescent reaction. The presence of a bioluminescent protein is determined by detecting the presence of luminescence. Important bioluminescent compounds for purposes of labeling are luciferin, luciferase and aequorin.

[0438] Methods for Detecting Cancer

[0439] In general, a cancer may be detected in a patient based on the presence of one or more proteins of the invention and/or polynucleotides encoding such proteins in a biological sample (for example, blood, sera, urine, and/or tumor biopsies) obtained from the patient. In other words, such proteins and/or polynucleotides may be used as markers to indicate the presence or absence of a disease or disorder, including cancer. In addition, such proteins and/or polynucleotides may be useful for the detection of other diseases and cancers, including cancers of tissues/cells corresponding to the library source disclosed in column 8 of Table 1 expressing the corresponding sequence disclosed in the same row of Table 1. The binding agents provided herein generally permit detection of the level of antigen that binds to the agent in the biological sample. Polynucleotide primers and probes may be used to detect the level of mRNA encoding the polypeptides of the invention, which is also indicative of the presence or absence of a disease or disorder, including cancer. In general, polypeptides of the invention should be present at a level that is at least three fold higher in diseased tissue than in normal tissue.

[0440] There are a variety of assay formats known to those of ordinary skill in the art for using a binding agent to detect polypeptide markers in a sample. See, e.g., Harlow and Lane, supra. In general, the presence or absence of a disease, in particular, cancer in a patient may be determined by (a) contacting a biological sample obtained from a patient with a binding agent; (b) detecting in the sample a level of polypeptide that binds to the binding agent; and (c) comparing the level of polypeptide with a predetermined cut-off value.

[0441] In a preferred embodiment, the assay involves the use of binding agent immobilized on a solid support to bind to and remove the polypeptide of the invention from the remainder of the sample. The bound polypeptide may then be detected using a detection reagent that contains a reporter group and specifically binds to the binding agent/polypeptide complex. Such detection reagents may comprise, for example, a binding agent that specifically binds to the polypeptide or an antibody or other agent that specifically binds to the binding agent, such as an anti-immunoglobulin, protein G, protein A or a lectin. Alternatively, a competitive assay may be utilized, in which a polypeptide is labeled with a reporter group and allowed to bind to the immobilized binding agent after incubation of the binding agent with the sample. The extent to which components of the sample inhibit the binding of the labeled polypeptide to the binding agent is indicative of the reactivity of the sample with the immobilized binding agent. Suitable polypeptides for use within such assays include polypeptides of the inventions and portions thereof, or antibodies, to which the binding agent binds, as described above.

[0442] The solid support may be any material known to those of skill in the art to which polypeptides of the invention may be attached. For example, the solid support may be a test well in a microtiter plate or a nitrocellulose or other suitable membrane. Alternatively, the support may be a bead or disc, such as glass fiberglass, latex or a plastic material such as polystyrene or polyvinylchloride. The support may also be a magnetic particle or a fiber optic sensor, such as those disclosed, for example, in U.S. Pat. No. 5,359,681. The binding agent may be immobilized on the solid support using a variety of techniques known to those of skill in the art, which are amply described in the patent and scientific literature. In the context of the present invention, the term “immobilization” refers to both noncovalent association, such as adsorption, and covalent attachment (which may be a direct linkage between the agent and functional groups on the support or may be a linkage by way of a cross-linking agent). Immobilization by adsorption to a well in a microtiter plate or to a membrane is preferred. In such cases, adsorption may be achieved by contacting the binding agent, in a suitable buffer, with the solid support for the suitable amount of time. The contact time varies with temperature, but is typically between about 1 hour and about 1 day. In general, contacting a well of plastic microtiter plate (such as polystyrene or polyvinylchloride) with an amount of binding agent ranging from about 10 ng to about 10 ug, and preferably about 100 ng to about 1 ug, is sufficient to immobilize an adequate amount of binding agent.

[0443] Covalent attachment of binding agent to a solid support may generally be achieved by first reacting the support with a bifunctional reagent that will react with both the support and a functional group, such as a hydroxyl or amino group, on the binding agent. For example, the binding agent may be covalently attached to supports having an appropriate polymer coating using benzoquinone or by condensation of an aldehyde group on the support with an amine and an active hydrogen on the binding partner (see, e.g., Pierce Immunotechnology Catalog and Handbook, 1991, at A12-A13).

[0444] Gene Therapy Methods

[0445] Also encompassed by the present invention are gene therapy methods for treating or preventing disorders, diseases and conditions. The gene therapy methods relate to the introduction of nucleic acid (DNA, RNA and antisense DNA or RNA) sequences into an animal to achieve expression of a plama membrane associated antigen of the present invention. This method requires a polynucleotide which codes for a polypeptide of the present invention operatively linked to a promoter and any other genetic elements necessary for the expression of the polypeptide by the target tissue. Such gene therapy and delivery techniques are known in the art, see, for example, WO90/11092, which is herein incorporated by reference.

[0446] Thus, for example, cells from a patient may be engineered with a polynucleotide (DNA or RNA) comprising a promoter operably linked to a polynucleotide of the present invention ex vivo, with the engineered cells then being provided to a patient to be treated with the polypeptide of the present invention. Such methods are well-known in the art. For example, see Belldegrun, A., et al., J. Natl. Cancer Inst. 85: 207-216 (1993); Ferrantini, M. et al., Cancer Research 53: 1107-1112 (1993); Ferrantini, M. et al., J. Immunology 153: 4604-4615 (1994); Kaido, T., et al., Int. J. Cancer 60: 221-229 (1995); Ogura, H., et al., Cancer Research 50: 5102-5106 (1990); Santodonato, L., et al., Human Gene Therapy 7:1-10 (1996); Santodonato, L., et al., Gene Therapy 4:1246-1255 (1997); and Zhang, J.-F. et al., Cancer Gene Therapy 3: 31-38 (1996)), which are herein incorporated by reference. In one embodiment, the cells, which are engineered are arterial cells. The arterial cells may be reintroduced into the patient through direct injection to the artery, the tissues surrounding the artery, or through catheter injection.

[0447] As discussed in more detail below, the polynucleotide constructs can be delivered by any method that delivers injectable materials to the cells of an animal, such as, injection into the interstitial space of tissues (heart, muscle, skin, lung, liver, and the like). The polynucleotide constructs may be delivered in a pharmaceutically acceptable liquid or aqueous carrier.

[0448] In one embodiment, the polynucleotide of the present invention is delivered as a naked polynucleotide. The term “naked” polynucleotide, DNA or RNA refers to sequences that are free from any-delivery vehicle that acts to assist, promote or facilitate entry into the cell, including viral sequences, viral particles, liposome formulations, lipofectin or precipitating agents and the like. However, the polynucleotide of the present invention can also be delivered in liposome formulations and lipofectin formulations and the like can be prepared by methods well known to those skilled in the art. Such methods are described, for example, in U.S. Pat. Nos. 5,593,972, 5,589,466, and 5,580,859, which are herein incorporated by reference.

[0449] The polynucleotide vector constructs used in the gene therapy method are preferably constructs that will not integrate into the host genome nor will they contain sequences that allow for replication. Appropriate vectors include pWLNEO, pSV2CAT, pOG44, pXT1 and pSG available from Stratagene; pSVK3, pBPV, pMSG and pSVL available from Pharmacia; and pEF1/V5, pcDNA3.1, and pRc/CMV2 available from Invitrogen. Other suitable vectors will be readily apparent to the skilled artisan.

[0450] Any strong promoter known to those skilled in the art can be used for driving the expression of the polynucleotide sequence. Suitable promoters include adenoviral promoters, such as the adenoviral major late promoter; or heterologous promoters, such as the cytomegalovirus (CMV) promoter; the respiratory syncytial virus (RSV) promoter; inducible promoters, such as the MMT promoter, the metallothionein promoter; heat shock promoters; the albumin promoter; the ApoAl promoter; human globin promoters; viral thymidine kinase promoters, such as the Herpes Simplex thymidine kinase promoter; retroviral LTRs; the b-actin promoter; and human growth hormone promoters. The promoter also may be the native promoter for the polynucleotide of the present invention.

[0451] Unlike other gene therapy techniques, one major advantage of introducing naked nucleic acid sequences into target cells is the transitory nature of the polynucleotide synthesis in the cells. Studies have shown that non-replicating DNA sequences can be introduced into cells to provide production of the desired polypeptide for periods of up to six months.

[0452] The polynucleotide construct can be delivered to the interstitial space of tissues within the an animal, including of muscle, skin, brain, lung, liver, spleen, bone marrow, thymus, heart, lymph, blood, bone, cartilage, pancreas, kidney, gall bladder, stomach, intestine, testis, ovary, uterus, rectum, nervous system, eye, gland, and connective tissue. Interstitial space of the tissues comprises the intercellular, fluid, mucopolysaccharide matrix among the reticular fibers of organ tissues, elastic fibers in the walls of vessels or chambers, collagen fibers of fibrous tissues, or that same matrix within connective tissue ensheathing muscle cells or in the lacunae of bone. It is similarly the space occupied by the plasma of the circulation and the lymph fluid of the lymphatic channels. Delivery to the interstitial space of muscle tissue is preferred for the reasons discussed below. They may be conveniently delivered by injection into the tissues comprising these cells. They are preferably delivered to and expressed in persistent, non-dividing cells which are differentiated, although delivery and expression may be achieved in non-differentiated or less completely differentiated cells, such as, for example, stem cells of blood or skin fibroblasts. In vivo muscle cells are particularly competent in their ability to take up and express polynucleotides.

[0453] For the naked nucleic acid sequence injection, an effective dosage amount of DNA or RNA will be in the range of from about 0.05 mg/kg body weight to about 50 mg/kg body weight. Preferably the dosage will be from about 0.005 mg/kg to about 20 mg/kg and more preferably from about 0.05 mg/kg to about 5 mg/kg. Of course, as the artisan of ordinary skill will appreciate, this dosage will vary according to the tissue site of injection. The appropriate and effective dosage of nucleic acid sequence can readily be determined by those of ordinary skill in the art and may depend on the condition being treated and the route of administration.

[0454] The preferred route of administration is by the parenteral route of injection into the interstitial space of tissues. However, other parenteral routes may also be used, such as, inhalation of an aerosol formulation particularly for delivery to lungs or bronchial tissues, throat or mucous membranes of the nose. In addition, naked DNA constructs can be delivered to arteries during angioplasty by the catheter used in the procedure.

[0455] The naked polynucleotides are delivered by any method known in the art, including, but not limited to, direct needle injection at the delivery site, intravenous injection, topical administration, catheter infusion, and so-called “gene guns”. These delivery methods are known in the art.

[0456] The constructs may also be delivered with delivery vehicles such as viral sequences, viral particles, liposome formulations, lipofectin, precipitating agents, etc. Such methods of delivery are known in the art.

[0457] In certain embodiments, the polynucleotide constructs are complexed in a liposome preparation. Liposomal preparations for use in the instant invention include cationic (positively charged), anionic (negatively charged) and neutral preparations. However, cationic liposomes are particularly preferred because a tight charge complex can be formed between the cationic liposome and the polyanionic nucleic acid. Cationic liposomes have been shown to mediate intracellular delivery of plasmid DNA (Felgner et al., Proc. Natl. Acad. Sci. USA (1987) 84:7413-7416, which is herein incorporated by reference); mRNA (Malone et al., Proc. Natl. Acad. Sci. USA (1989) 86:6077-6081, which wherein incorporated by reference); and purified transcription factors (Debs et al., J. Biol. Chem. (1990) 265:10189-10192, which is herein incorporated by reference), in functional form.

[0458] Cationic liposomes are readily available. For example, N[1-2,3-dioleyloxy)propyl]-N,N,N-triethylammonium (DOTMA) liposomes are particularly useful and are available under the trademark Lipofectin, from GIBCO BRL, Grand Island, N.Y., (see, also, Felgner et al., Proc. Natl Acad. Sci. USA (1987) 84:7413-7416, which is herein incorporated by reference). Other commercially available es include transfectace (DDAB/DOPE) and DOTAP/DOPE (Boehringer).

[0459] Other cationic liposomes can be prepared from readily available materials using techniques well known in the art. See, e.g. PCT Publication No. WO 90/11092 (which is herein incorporated by reference) for a description of the synthesis of DOTAP (1,2-bis(oleoyloxy)-3-(trimethylammonio)propane) liposomes. Preparation of DOTMA liposomes is explained in the literature, see, e.g., P. Felgner et al., Proc. Natl. Acad. Sci. USA 84:7413-7417, which is herein incorporated by reference. Similar methods can be used to prepare liposomes from other cationic lipid materials.

[0460] Similarly, anionic and neutral liposomes are readily available, such as from Avanti Polar Lipids (Birmingham, Ala.), or can be easily prepared using readily available materials. Such materials include phosphatidyl choline, cholesterol, phosphatidyl ethanolamine, dioleoylphosphatidyl choline (DOPC), dioleoylphosphatidyl glycerol (DOPG), dioleoylphoshatidyl ethanolamine (DOPE), among others. These materials can also be mixed with the DOTMA and DOTAP starting materials in appropriate ratios. Methods for making liposomes using these materials are well known in the art.

[0461] For example, commercially dioleoylphosphatidyl choline (DOPC), dioleoylphosphatidyl glycerol (DOPG), and dioleoylphosphatidyl ethanolamine (DOPE) can be used in various combinations to make conventional liposomes, with or without the addition of cholesterol. Thus, for example, DOPG/DOPC vesicles can be prepared by drying 50 mg each of DOPG and DOPC under a stream of nitrogen gas into a sonication vial. The sample is placed under a vacuum pump overnight and is hydrated the following day with deionized water. The sample is then sonicated for 2 hours in a capped vial, using a Heat Systems model 350 sonicator equipped with an inverted cup (bath type) probe at the maximum setting while the bath is circulated at 15EC. Alternatively, negatively charged vesicles can be prepared without sonication to produce multilamellar vesicles or by extrusion through nucleopore membranes to produce unilamellar vesicles of discrete size. Other methods are known and available to those of skill in the art.

[0462] The liposomes can comprise multilamellar vesicles (MLVs), small unilamellar vesicles (SUVs), or large unilamellar vesicles (LUVs), with SUVs being preferred. The various liposome-nucleic acid complexes are prepared using methods well known in the art. See, e.g., Straubinger et al., Methods of Immunology (1983), 101:512-527, which is herein incorporated by reference. For example, MLVs containing nucleic acid can be prepared by depositing a thin film of phospholipid on the walls of a glass tube and subsequently hydrating with a solution of the material to be encapsulated. SUVs are prepared by extended sonication of MLVs to produce a homogeneous population of unilamellar liposomes. The material to be entrapped is added to a suspension of preformed MLVs and then sonicated. When using liposomes containing cationic lipids, the dried lipid film is resuspended in an appropriate solution such as sterile water or an isotonic buffer solution such as 10 mM Tris/NaCl, sonicated, and then the preformed liposomes are mixed directly with the DNA. The liposome and DNA form a very stable complex due to binding of the positively charged liposomes to the cationic DNA. SUVs find use with small nucleic acid fragments. LUVs are prepared by a number of methods, well known in the art. Commonly used methods include Ca²⁺-EDTA chelation (Papahadjopoulos et al., Biochim. Biophys. Acta (1975) 394:483; Wilson et al., Cell 17:77 (1979); ether injection (Deamer, D. and Bangham, A., Biochim. Biophys. Acta 443:629 (1976); Ostro et al., Biochem. Biophys. Res. Commun. 76:836 (1977); Fraley et al., Proc. Natl. Acad. Sci. USA 76:3348 (1979)); detergent dialysis (Enoch, H. and Strittmatter, P., Proc. Natl. Acad. Sci. USA 76:145 (1979)); and reverse-phase evaporation (REV) (Fraley et al., J. Biol. Chem. 255:10431 (1980); Szoka et al., Proc. Natl. Acad. Sci. USA 75:145 (1978); Schaefer-Ridder et al., Science 215:166 (1982)), which are herein incorporated by reference.

[0463] Generally, the ratio of DNA to liposomes will be from about 10:1 to about 1:10. Preferably, the ration will be from about 5:1 to about 1:5. More preferably, the ration will be about 3:1 to about 1:3. Still more preferably, the ratio will be about 1:1.

[0464] U.S. Pat. No. 5,676,954 (which is herein incorporated by reference) reports on the injection of genetic material, complexed with cationic liposomes carriers, into mice. U.S. Pat. Nos. 4,897,355, 4,946,787, 5,049,386, 5,459,127, 5,589,466, 5,693,622, 5,580,859, 5,703,055, and international publication no. WO 94/9469 (which are herein incorporated by reference) provide cationic lipids for use in transfecting DNA into cells and mammals. U.S. Pat. Nos. 5,589,466, 5,693,622, 5,580,859, 5,703,055, and International Publication No. WO 94/9469 provide methods for delivering DNA-cationic lipid complexes to mammals.

[0465] In certain embodiments, cells are engineered, ex vivo or in vivo, using a retroviral particle containing RNA, which comprises a sequence encoding a polypeptide of the present invention. Retroviruses from which the retroviral plasmid vectors may be derived include, but are not limited to, Moloney Murine Leukemia Virus, spleen necrosis virus, Rous sarcoma Virus, Harvey Sarcoma Virus, avian leukosis virus, gibbon ape leukemia virus, human immunodeficiency virus, Myeloproliferative Sarcoma Virus, and mammary tumor virus.

[0466] The retroviral plasmid vector is employed to transduce packaging cell lines to form producer cell lines. Examples of packaging cells which may be transfected include, but are not limited to, the PE501, PA317, R-2, R-AM, PA12, T19-14X, VT-19-17-H2, RCRE, RCRIP, GP+E-86, GP+envAm12, and DAN cell lines as described in Miller, Human Gene Therapy 1:5-14 (1990), which is incorporated herein by reference in its entirety. The vector may transduce the packaging cells through any means known in the art. Such means include, but are not limited to, electroporation, the use of liposomes, and CaPO₄ precipitation. In one alternative, the retroviral plasmid vector may be encapsulated into a liposome, or coupled to a lipid, and then administered to a host.

[0467] The producer cell line generates infectious retroviral vector particles, which include polynucleotide encoding a polypeptide of the present invention. Such, retroviral vector particles then may be employed, to transduce eukaryotic cells, either in vitro or in vivo. The transduced eukaryotic cells will express a polypeptide of the present invention.

[0468] In certain other embodiments, cells are engineered, ex vivo or in vivo, with polynucleotide contained in an adenovirus vector. Adenovirus can be manipulated such that it encodes and expresses a polypeptide of the present invention, and at the same time is inactivated in terms of its ability to replicate in a normal lytic viral life cycle. Adenovirus expression is achieved without integration of the viral DNA into the host cell chromosome, thereby alleviating concerns about insertional mutagenesis. Furthermore, adenoviruses have been used as live enteric vaccines for many years with an excellent safety profile (Schwartz, et al., Am. Rev. Respir. Dis.109:233-238 (1974)). Finally, adenovirus mediated gene transfer has been demonstrated in a number of instances including transfer of alpha-1-antitrypsin and CFTR to the lungs of cotton rats (Rosenfeld et al., Science 252:431-434 (1991); Rosenfeld et al., Cell 68:143-155 (1991)). Furthermore, extensive studies to attempt to establish adenovirus as a causative agent in human cancer were uniformly negative (Green et al., Proc. Natl. Acad. Sci. USA 76:6606 (1979)).

[0469] Suitable adenoviral vectors useful in the present invention are described, for example, in Kozarsky and Wilson, Curr. Opin. Genet. Devel. 3:499-503 (1993); Rosenfeld et al., Cell 68:143-155 (1992); Engelhardt et al., Human Genet. Ther. 4:759-769 (1993); Yang et al., Nature Genet. 7:362-369 (1994); Wilson et al., Nature 365:691-692 (1993); and U.S. Pat. No. 5,652,224, which are herein incorporated by reference. For example, the adenovirus vector Ad2 is useful and can be grown in human 293 cells. These cells contain the E1 region of adenovirus and constitutively express E1a and E1b, which complement the defective adenoviruses by providing the products of the genes deleted from the vector. In addition to Ad2, other varieties of adenovirus (e.g., Ad3, Ad5, and Ad7) are also useful in the present invention.

[0470] Preferably, the adenoviruses used in the present invention are replication deficient. Replication deficient adenoviruses require the aid of a helper virus and/or packaging cell line to form infectious particles. The resulting virus is capable of infecting cells and can express a polynucleotide of interest which is operably linked to a promoter, but cannot replicate in most cells. Replication deficient adenoviruses may be deleted in one or more of all or a portion of the following genes: E1a, E1b, E3, E4, E2a, or L1 through L5.

[0471] In certain other embodiments, the cells are engineered, ex vivo or in vivo, using an adeno-associated virus (AAV). AAVs are naturally occurring defective viruses that require helper viruses to produce infectious particles (Muzyczka, N., Curr. Topics in Microbiol. Imnunol. 158:97 (1992)). It is also one of the few viruses that may integrate its DNA into non-dividing cells. Vectors containing as little as 300 base pairs of AAV can be packaged and can integrate, but space for exogenous DNA is limited to about 4.5 kb. Methods for producing and using such AAVs are known in the art. See, for example, U.S. Pat. Nos. 5,139,941, 5,173,414, 5,354,678, 5,436,146, 5,474,935, 5,478,745, and 5,589,377.

[0472] For example, an appropriate AAV vector for use in the present invention will include all the sequences necessary for DNA replication, encapsidation, and host-cell integration. The polynucleotide construct is inserted into the AAV vector using standard cloning methods, such as those found in Sambrook et al., Molecular Cloning: A Laboratory Manual, Cold Spring Harbor Press (1989). The recombinant AAV vector is then transfected into packaging cells which are infected with a helper virus, using any standard technique, including lipofection, electroporation, calcium phosphate precipitation, etc. Appropriate helper viruses include adenoviruses, cytomegaloviruses, vaccinia viruses, or herpes viruses. Once the packaging cells are transfected and infected, they will produce infectious AAV viral particles, which contain the polynucleotide construct. These viral particles are then used to transduce eukaryotic cells, either ex vivo or in vivo. The transduced cells will contain the polynucleotide construct integrated into its genome, and will express a polypeptide of the invention.

[0473] Another method of gene therapy involves operably associating heterologous control regions and endogenous plasma membrane associated antigen polynucleotide sequences (e.g., encoding a polypeptide of the present invention) via homologous recombination (see, e.g., U.S. Pat. No. 5,641,670, issued Jun. 24, 1997; International Publication No. WO 96/29411, published Sep. 26, 1996; International Publication No. WO 94/12650, published Aug. 4, 1994; Koller et al., Proc. Natl. Acad. Sci. USA 86:8932-8935 (1989); and Zijlstra et al., Nature 342:435-438 (1989), which are herein incorporated by reference. This method involves the activation of a gene which is present in the target cells, but which is not normally expressed in the cells, or is expressed at a lower level than desired.

[0474] Polynucleotide constructs are made, using standard techniques known in the art, which contain the promoter with targeting sequences flanking the promoter. Suitable promoters are described herein. The targeting sequence is sufficiently complementary to an endogenous sequence to permit homologous recombination of the promoter-targeting sequence with the endogenous sequence. The targeting sequence will be sufficiently near the 5′ end of the desired endogenous polynucleotide sequence so the promoter will be operably linked to the endogenous sequence upon homologous recombination.

[0475] The promoter and the targeting sequences can be amplified using PCR. Preferably, the amplified promoter contains distinct restriction enzyme sites on the 5′ and 3′ ends. Preferably, the 3′ end of the first targeting sequence contains the same restriction enzyme site as the 5′ end of the amplified promoter and the 5′ end of the second targeting sequence contains the same restriction site as the 3′ end of the amplified promoter. The amplified promoter and targeting sequences are digested and ligated together.

[0476] The promoter-targeting sequence construct is delivered to the cells, either as naked polynucleotide, or in conjunction with transfection-facilitating agents, such as liposomes, viral sequences, viral particles, whole viruses, lipofection, precipitating agents, etc., described in more detail above. The P promoter-targeting sequence can be delivered by any method, included direct needle injection, intravenous injection, topical administration, catheter infusion, particle accelerators, etc. The methods are described in more detail below.

[0477] The promoter-targeting sequence construct is taken up by cells. Homologous recombination between the construct and the endogenous sequence takes place, such that an endogenous sequence is placed under the control of the promoter. The promoter then drives the expression of the endogenous sequence.

[0478] The polynucleotide encoding a polypeptide of the present invention may contain a secretory signal sequence that facilitates secretion of the protein. Typically, the signal sequence is positioned in the coding region of the polynucleotide to be expressed towards or at the 5′ end of the coding region. The signal sequence may be homologous or heterologous to the plasma membrane associated antigen polynucleotide of interest and may be homologous or heterologous to the cells to be transfected. Additionally, the signal sequence may be chemically synthesized using methods known in the art.

[0479] Any mode of administration of any of the above-described polynucleotides constructs can be used so long as the mode results in the expression of one or more molecules in an amount sufficient to provide a therapeutic effect. This includes direct needle injection, systemic injection, catheter infusion, biolistic injectors, particle accelerators (i.e., “gene guns”), gelfoam sponge depots, other commercially available depot materials, osmotic pumps (e.g., Alza minipumps), oral or suppositorial solid (tablet or pill) pharmaceutical formulations, and decanting or topical applications during surgery. For example, direct injection of naked calcium phosphate-precipitated plasmid into rat liver and rat spleen or a protein-coated plasmid into the portal vein has resulted in gene expression of the foreign gene in the rat livers (Kaneda et al., Science 243:375 (1989)).

[0480] A preferred method of local administration is by direct injection. Preferably, a recombinant molecule of the present invention complexed with a delivery vehicle is administered by direct injection into or locally within the area of arteries. Administration of a composition locally within the area of arteries refers to injecting the composition centimeters and preferably, millimeters within arteries.

[0481] Another method of local administration is to contact a polynucleotide construct of the present invention in or around a surgical wound. For example, a patient can undergo surgery and the polynucleotide construct can be coated on the surface of tissue inside the wound or the construct can be injected into areas of tissue inside the wound.

[0482] Therapeutic compositions useful in systemic administration, include recombinant molecules of the present invention complexed to a targeted delivery vehicle of the present invention. Suitable delivery vehicles for use with systemic administration comprise liposomes comprising ligands for targeting the vehicle to a particular site. In specific embodiments, suitable delivery vehicles for use with systemic administration comprise liposomes comprising polypeptides of the invention for targeting the vehicle to a particular site.

[0483] Preferred methods of systemic administration, include intravenous injection, aerosol, oral and percutaneous (topical) delivery. Intravenous injections can be performed using methods standard in the art. Aerosol delivery can also be performed using methods standard in the art (see, for example, Stribling et al., Proc. Natl. Acad. Sci. USA 189:11277-11281, 1992, which is incorporated herein by reference). Oral delivery can be performed by complexing a polynucleotide construct of the present invention to a carrier capable of withstanding degradation by digestive enzymes in the gut of an animal. Examples of such carriers, include plastic capsules or tablets, such as those known in the art. Topical delivery can be performed by mixing a polynucleotide construct of the present invention with a lipophilic reagent (e.g., DMSO) that is capable of passing into the skin.

[0484] Determining an effective amount of substance to be delivered can depend upon a number of factors including, for example, the chemical structure and biological activity of the substance, the age and weight of the animal, the precise condition requiring treatment and its severity, and the route of administration. The frequency of treatments depends upon a number of factors, such as the amount of polynucleotide constructs administered per dose, as well as the health and history of the subject. The precise amount, number of doses, and timing of doses will be determined by the attending physician or veterinarian.

[0485] Therapeutic compositions of the present invention can be administered to any animal, preferably to mammals and birds. Preferred mammals include humans, dogs, cats, mice, rats, rabbits sheep, cattle, horses and pigs, with humans being particularly preferred.

[0486] Biological Activities

[0487] Polynucleotides or polypeptides, or agonists or antagonists of the present invention, can be used in assays to test for one or more biological activities. If these polynucleotides or polypeptides, or agonists or antagonists of the present invention, do exhibit activity in a particular assay, it is likely that these molecules may be involved in the diseases associated with the biological activity. Thus, the polynucleotides and polypeptides, and agonists or antagonists could be used to treat, prevent diagnose and/or prognose the associated disease.

[0488] The polynucleotides and polypeptides of the invention are predicted to have predominant expression in the tissues/cells corresponding to the library source disclosed in column 8 of Table 1 expressing the corresponding sequence disclosed in the same row of Table 1.

[0489] Thus, the plasma membrane associated antigens of the invention may be useful as therapeutic molecules. Each would be useful for diagnosis, detection, treatment and/or prevention of diseases or disorders related to the novel polypeptides, including, but not limited to diseases associated with cell proliferation and cell signaling, particularly cancer, immune response and neuronal disorders; in addition to providing new targets for immune based therapies.

[0490] In a preferred embodiment, polynucleotides of the invention (e.g., a nucleic acid sequence of SEQ ID NO:X or the complement thereof; or the cDNA sequence contained in Clone ID NO:Z, or fragments or variants thereof) and/or polypeptides of the invention (e.g., an amino acid sequence contained in SEQ ID NO:Y, an amino acid sequence encoded by SEQ ID NO:X, or the complement threof, an amino acid sequence encoded by the cDNA sequence contained in Clone ID NO:Z and fragments or variants thereof as described herein) are useful for the diagnosis, detection, treatement, and/or prevention of diseases or disorders of the tissues/cells corresponding to the library source disclosed in column 8 of Table 1 expressing the corresponding colon or colon cancer sequence disclosed in the same row of Table 1. In certain embodiments, a polypeptide of the invention, or polynucleotides, antibodies, agonists, or antagonists corresponding to that polypeptide, may be used to diagnose and/or prognose diseases and/or disorders associated with the tissue(s) in which the polypeptide of the invention is expressed, including one, two, three, four, five, or more tissues disclosed in Table 1, column 8 (Tissue Distribution Library Code).

[0491] Treatment, diagnosis, detection, and/or prevention of disorders associated with the plasma membrane associated antigens could be carried out using a plasma membrane associated antigen or soluble form of a plasma membrane associated antigen, a plasma membrane associated antigen ligand, gene therapy, or ex vivo applications. Moreover, inhibitors of a plasma membrane associated antigen, either blocking antibodies or mutant forms, could modulate the expression of the plasma membrane associated antigen. These inhibitors may be useful to treat, diagnose, detect, and/or prevent diseases associated with the misregulation of a plasma membrane associated antigen.

[0492] In one embodiment, the invention provides a method for the specific delivery of compositions of the invention to cells (e.g., normal or diseased cells) by administering polypeptides of the invention (e.g., polypeptides of the invention or antibodies raised against the polypeptides of the invention) that are associated with heterologous polypeptides or nucleic acids. In one example, the invention provides a method for delivering a therapeutic protein into the targeted cell (e.g., an aberrant cell or cancer cell). In another example, the invention provides a method for delivering a single stranded nucleic acid (e.g., antisense or ribozymes) or double stranded nucleic acid (e.g., DNA that can integrate into the cell's genome or replicate episomally and that can be transcribed) into the targeted cell.

[0493] In another embodiment, the invention provides a method for the specific destruction of cells (e.g., the destruction of aberrant cells, including, but not limited to, tumor cells) by administering polypeptides of the invention (e.g., polypeptides of the invetnion, fragments of the polypeptides of the invention, or antibodies raised against of the polypeptides of the invention, thereof) in association with toxins or cytotoxic prodrugs.

[0494] By “toxin” is meant compounds that bind and activate endogenous cytotoxic effector systems, radioisotopes, holotoxins, modified toxins, catalytic subunits of toxins, cytotoxins (cytotoxic agents), or any molecules or enzymes not normally present in or on the surface of a cell that under defined conditions cause the cell's death. Toxins that may be used according to the methods of the invention include, but are not limited to, radioisotopes known in the art, compounds such as, for example, antibodies (or complement fixing containing portions thereof) that bind an inherent or induced endogenous cytotoxic effector system, thymidine kinase, endonuclease, RNAse, alpha toxin, ricin, abrin, Pseudomonas exotoxin A, diphtheria toxin, saporin, momordin, gelonin, pokeweed antiviral protein, alpha-sarcin and cholera toxin. “Toxin” also includes a cytostatic or cytocidal agent, a therapeutic agent or a radioactive metal ion, e.g., alpha-emitters such as, for example, ²¹³Bi, or other radioisotopes such as, for example, ¹⁰³Pd, ¹³³Xe, ¹³¹I, ⁶⁸Ge, ⁵⁷Co, ⁶⁶Zn, ⁸⁵Sr, ³²P, ³⁵S, ⁹⁰Y, ¹⁵³Sm, ¹⁵³Gd, ¹⁶⁹Yb, ⁵¹Cr, ⁵⁴Mn, ⁷⁵Se, ¹¹³Sn, ⁹⁰Yttrium, ¹¹⁷Tin, ¹⁸⁶Rhenium, ¹⁶⁶Holmium, and ¹⁸⁸Rhenium; luminescent labels, such as luminol; and fluorescent labels, such as fluorescein and rhodamine, and biotin.

[0495] Techniques known in the art may be applied to label antibodies of the invention. Such techniques include, but are not limited to, the use of bifunctional conjugating agents (see e.g., U.S. Pat. Nos. 5,756,065; 5,714,631; 5,696,239; 5,652,361; 5,505,931; 5,489,425; 5,435,990; 5,428,139; 5,342,604; 5,274,119; 4,994,560; and 5,808,003; the contents of each of which are hereby incorporated by reference in its entirety). A cytotoxin or cytotoxic agent includes any agent that is detrimental to cells. Examples include paclitaxol, cytochalasin B, gramicidin D, ethidium bromide, emetine, mitomycin, etoposide, tenoposide, vincristine, vinblastine, colchicin, doxorubicin, daunorubicin, dihydroxy anthracin dione, mitoxantrone, mithramycin, actinomycin D, 1-dehydrotestosterone, glucocorticoids, procaine, tetracaine, lidocaine, propranolol, and puromycin and analogs or homologs thereof. Therapeutic agents include, but are not limited to, antimetabolites (e.g., methotrexate, 6-mercaptopurine, 6-thioguanine, cytarabine, 5-fluorouracil decarbazine), alkylating agents (e.g., mechlorethamine, thioepa chlorambucil, melphalan, carmustine (BSNU) and lomustine (CCNU), cyclothosphamide, busulfan, dibromomannitol, streptozotocin, mitomycin C, and cis-dichlorodiamine platinum (II) (DDP) cisplatin), anthracyclines (e.g., daunorubicin (formerly daunomycin) and doxorubicin), antibiotics (e.g., dactinomycin (formerly actinomycin), bleomycin, mithramycin, and anthramycin (AMC)), and anti-mitotic agents (e.g., vincristine and vinblastine).

[0496] By “cytotoxic prodrug” is meant a non-toxic compound that is converted by an enzyme, normally present in the cell, into a cytotoxic compound. Cytotoxic prodrugs that may be used according to the methods of the invention include, but are not limited to, glutamyl derivatives of benzoic acid mustard alkylating agent, phosphate derivatives of etoposide or mitomycin C, cytosine arabinoside, daunorubisin, and phenoxyacetamide derivatives of doxorubicin.

[0497] It will be appreciated that conditions caused by a decrease in the standard or normal level of a plasma membrane associated antigen activity in an individual, can be treated by administration of a polypeptide of the invention (e.g., such as, for example, the complete plasma membrane associated antigen polypeptide, the soluble form of the extracellular domain of a plasma membrane associated antigen polypeptide, or cells expressing the complete protein) or agonist. Thus, the invention also provides a method of treatment of an individual in need of an increased level of plasma membrane associated antigen activity comprising administering to such an individual a pharmaceutical composition comprising an amount of an isolated polypeptide of the invention, or agonist thereof (e.g., an agonistic anti-plasma membrane associated antigen antibody), effective to increase the plasma membrane associated antigen activity level in such an individual.

[0498] It will also be appreciated that conditions caused by a increase in the standard or normal level of plasma membrane associated antigen activity in an individual can be treated by administration of polypeptides of the invention (e.g., such as, for example, the complete plasma membrane associated antigen polypeptide, the soluble form of the extracellular domain of a plasma membrane associated antigen polypeptide, or cells expressing the complete protein) or antagonist (e.g., an antagonistic plasma membrane associated antigen antibody). Thus, the invention also provides a method of treatment of an individual in need of an decreased level of plasma membrane associated antigen activity comprising administering to such an individual a pharmaceutical composition comprising an amount of an isolated polypeptide of the invention, or antagonist thereof (e.g., an antagonistic anti-plasma membrane associated antigen antibody), effective to decrease the plasma membrane associated antigen activity level in such an individual.

[0499] More generally, polynucleotides, translation products and antibodies corresponding to this gene may be useful for the diagnosis, prognosis, prevention, and/or treatment of diseases and/or disorders associated with the following systems.

[0500] Immune Activity

[0501] Polynucleotides, polypeptides, antibodies, and/or agonists or antagonists of the present invention may be useful in treating, preventing, diagnosing and/or prognosing diseases, disorders, and/or conditions of the immune system, by, for example, activating or inhibiting the proliferation, differentiation, or mobilization (chemotaxis) of immune cells. Immune cells develop through a process called hematopoiesis, producing myeloid (platelets, red blood cells, neutrophils, and macrophages) and lymphoid (B and T lymphocytes) cells from pluripotent stem cells. The etiology of these immune diseases, disorders, and/or conditions may be genetic, somatic, such as cancer and some autoimmune diseases, acquired (e.g., by chemotherapy or toxins), or infectious. Moreover, polynucleotides, polypeptides, antibodies, and/or agonists or antagonists of the present invention can be used as a marker or detector of a particular immune system disease or disorder.

[0502] In another embodiment, a polypeptide of the invention, or polynucleotides, antibodies, agonists, or antagonists corresponding to that polypeptide, may be used to treat diseases and disorders of the immune system and/or to inhibit or enhance an immune response generated by cells associated with the tissue(s) in which the polypeptide of the invention is expressed, including one, two, three, four, five, or more tissues disclosed in Table 1, column 8 (Tissue Distribution Library Code).

[0503] Polynucleotides, polypeptides, antibodies, and/or agonists or antagonists of the present invention may be useful in treating, preventing, diagnosing, and/or prognosing immunodeficiencies, including both congenital and acquired immunodeficiencies. Examples of B cell immunodeficiencies in which immunoglobulin levels B cell function and/or B cell numbers are decreased include: X-linked agammaglobulinemia (Bruton's disease), X-linked infantile agammaglobulinemia, X-linked immunodeficiency with hyper IgM, non X-linked immunodeficiency with hyper IgM, X-linked lymphoproliferative syndrome (XLP), agammaglobulinemia including congenital and acquired agammaglobulinemia, adult onset agammaglobulinemia, late-onset agammaglobulinemia, dysgammaglobulinemia, hypogammaglobulinemia, unspecified hypogammaglobulinemia, recessive agammaglobulinemia (Swiss type), Selective IgM deficiency, selective IgA deficiency, selective IgG subclass deficiencies, IgG subclass deficiency (with or without IgA deficiency), Ig deficiency with increased IgM, IgG and IgA deficiency with increased IgM, antibody deficiency with normal or elevated Igs, Ig heavy chain deletions, kappa chain deficiency, B cell lymphoproliferative disorder (BLPD), common variable immunodeficiency (CVID), common variable immunodeficiency (CVI) (acquired), and transient hypogammaglobulinemia of infancy.

[0504] In specific embodiments, ataxia-telangiectasia or conditions associated with ataxia-telangiectasia are treated, prevented, diagnosed, and/or prognosing using the polypeptides or polynucleotides of the invention, and/or agonists or antagonists thereof.

[0505] Examples of congenital immunodeficiencies in which T cell and/or B cell function and/or number is decreased include, but are not limited to: DiGeorge anomaly, severe combined immunodeficiencies (SCID) (including, but not limited to, X-linked SCID, autosomal recessive SCID, adenosine deaminase deficiency, purine nucleoside phosphorylase (PNP) deficiency, Class II MHC deficiency (Bare lymphocyte syndrome), Wiskott-Aldrich syndrome, and ataxia telangiectasia), thymic hypoplasia, third and fourth pharyngeal pouch syndrome, 22q11.2 deletion, chronic mucocutaneous candidiasis, natural killer cell deficiency (NK), idiopathic CD4+ T-lymphocytopenia, immunodeficiency with predominant T cell defect (unspecified), and unspecified immunodeficiency of cell mediated immunity.

[0506] In specific embodiments, DiGeorge anomaly or conditions associated with DiGeorge anomaly are treated, prevented, diagnosed, and/or prognosed using polypeptides or polynucleotides of the invention, or antagonists or agonists thereof.

[0507] Other immunodeficiencies that may be treated, prevented, diagnosed, and/or prognosed using polypeptides or polynucleotides of the invention, and/or agonists or antagonists thereof, include, but are not limited to, chronic granulomatous disease, Chédiak-Higashi syndrome, myeloperoxidase deficiency, leukocyte glucose-6-phosphate dehydrogenase deficiency, X-linked lymphoproliferative syndrome (XLP), leukocyte adhesion deficiency, complement component deficiencies (including C1, C2, C3, C4, C5, C6, C7, C8 and/or C9 deficiencies), reticular dysgenesis, thymic alymphoplasia-aplasia, immunodeficiency with thymoma, severe congenital leukopenia, dysplasia with immunodeficiency, neonatal neutropenia, short limbed dwarfism, and Nezelof syndrome-combined immunodeficiency with Igs.

[0508] In a preferred embodiment, the immunodeficiencies and/or conditions associated with the immunodeficiencies recited above are treated, prevented, diagnosed and/or prognosed using polynucleotides, polypeptides, antibodies, and/or agonists or antagonists of the present invention.

[0509] In a preferred embodiment polynucleotides, polypeptides, antibodies, and/or agonists or antagonists of the present invention could be used as an agent to boost immunoresponsiveness among immunodeficient individuals. In specific embodiments, polynucleotides, polypeptides, antibodies, and/or agonists or antagonists of the present invention could be used as an agent to boost immunoresponsiveness among B cell and/or T cell immunodeficient individuals.

[0510] The polynucleotides, polypeptides, antibodies, and/or agonists or antagonists of the present invention may be useful in treating, preventing, diagnosing and/or prognosing autoimmune disorders. Many autoimmune disorders result from inappropriate recognition of self as foreign material by immune cells. This inappropriate recognition results in an immune response leading to the destruction of the host tissue. Therefore, the administration of polynucleotides and polypeptides of the invention that can inhibit an immune response, particularly the proliferation, differentiation, or chemotaxis of T-cells, may be an effective therapy in preventing autoimmune disorders.

[0511] Autoimmune diseases or disorders that may be treated, prevented, diagnosed and/or prognosed by polynucleotides, polypeptides, antibodies, and/or agonists or antagonists of the present invention include, but are not limited to, one or more of the following: systemic lupus erythematosus, rheumatoid arthritis, ankylosing spondylitis, multiple sclerosis, autoimmune thyroiditis, Hashimoto's thyroiditis, autoimmune hemolytic anemia, hemolytic anemia, thrombocytopenia, autoimmune thrombocytopenia purpura, autoimmune neonatal thrombocytopenia, idiopathic thrombocytopenia purpura, purpura (e.g., Henloch-Scoenlein purpura), autoimmunocytopenia, Goodpasture's syndrome, Pemphigus vulgaris, myasthenia gravis, Grave's disease (hyperthyroidism), and insulin-resistant diabetes mellitus.

[0512] Additional disorders that are likely to have an autoimmune component that may be treated, prevented, and/or diagnosed with the compositions of the invention include, but are not limited to, type II collagen-induced arthritis, antiphospholipid syndrome, dermatitis, allergic encephalomyelitis, myocarditis, relapsing polychondritis, rheumatic heart disease, neuritis, uveitis ophthalmia, polyendocrinopathies, Reiter's Disease, Stiff-Man Syndrome, autoimmune pulmonary inflammation, autism, Guillain-Barre Syndrome, insulin dependent diabetes mellitus, and autoimmune inflammatory eye disorders.

[0513] Additional disorders that are likely to have an autoimmune component that may be treated, prevented, diagnosed and/or prognosed with the compositions of the invention include, but are not limited to, scleroderma with anti-collagen antibodies (often characterized, e.g., by nucleolar and other nuclear antibodies), mixed connective tissue disease (often characterized, e.g., by antibodies to extractable nuclear antigens (e.g., ribonucleoprotein)), polymyositis (often characterized, e.g., by nonhistone ANA), pernicious anemia (often characterized, e.g., by antiparietal cell, microsomes, and intrinsic factor antibodies), idiopathic Addison's disease (often characterized, e.g., by humoral and cell-mediated adrenal cytotoxicity, infertility (often characterized, e.g., by antispermatozoal antibodies), glomerulonephritis (often characterized, e.g., by glomerular basement membrane antibodies or immune complexes), bullous pemphigoid (often characterized, e.g., by IgG and complement in basement membrane), Sjogren's syndrome (often characterized, e.g., by multiple tissue antibodies, and/or a specific nonhistone ANA (SS-B)), diabetes mellitus (often characterized, e.g., by cell-mediated and humoral islet cell antibodies), and adrenergic drug resistance (including adrenergic drug resistance with asthma or cystic fibrosis) (often characterized, e.g., by beta-adrenergic receptor antibodies).

[0514] Additional disorders that may have an autoimmune component that may be treated, prevented, diagnosed and/or prognosed with the compositions of the invention include, but are not limited to, chronic active hepatitis (often characterized, e.g., by smooth muscle antibodies), primary biliary cirrhosis (often characterized, e.g., by mitochondria antibodies), other endocrine gland failure (often characterized, e.g., by specific tissue antibodies in some cases), vitiligo (often characterized, e.g., by melanocyte antibodies), vasculitis (often characterized, e.g., by Ig and complement in vessel walls and/or low serum complement), post-MI (often characterized, e.g., by myocardial antibodies), cardiotomy syndrome (often characterized, e.g., by myocardial antibodies), urticaria (often characterized, e.g., by IgG and IgM antibodies to IgE), atopic dermatitis (often characterized, e.g., by IgG and IgM antibodies to IgE), asthma (often characterized, e.g., by IgG and IgM antibodies to IgE), and many other inflammatory, granulomatous, degenerative, and atrophic disorders.

[0515] In a preferred embodiment, the autoimmune diseases and disorders and/or conditions associated with the diseases and disorders recited above are treated, prevented, diagnosed and/or prognosed using for example, antagonists or agonists, polypeptides or polynucleotides, or antibodies of the present invention. In a specific preferred embodiment, rheumatoid arthritis is treated, prevented, and/or diagnosed using polynucleotides, polypeptides, antibodies, and/or agonists or antagonists of the present invention.

[0516] In another specific preferred embodiment, systemic lupus erythematosus is treated, prevented, and/or diagnosed using polynucleotides, polypeptides, antibodies, and/or agonists or antagonists of the present invention. In another specific preferred embodiment, idiopathic thrombocytopenia purpura is treated, prevented, and/or diagnosed using polynucleotides, polypeptides, antibodies, and/or agonists or antagonists of the present invention.

[0517] In another specific preferred embodiment IgA nephropathy is treated, prevented, and/or diagnosed using polynucleotides, polypeptides, antibodies, and/or agonists or antagonists of the present invention.

[0518] In a preferred embodiment, the autoimmune diseases and disorders and/or conditions associated with the diseases and disorders recited above are treated, prevented, diagnosed and/or prognosed using polynucleotides, polypeptides, antibodies, and/or agonists or antagonists of the present invention.

[0519] In preferred embodiments, polypeptides, antibodies, polynucleotides and/or agonists or antagonists of the present invention are used as a immunosuppressive agent(s).

[0520] Polynucleotides, polypeptides, antibodies, and/or agonists or antagonists of the present invention may be useful in treating, preventing, prognosing, and/or diagnosing diseases, disorders, and/or conditions of hematopoietic cells. Polynucleotides, polypeptides, antibodies, and/or agonists or antagonists of the present invention could be used to increase differentiation and proliferation of hematopoietic cells, including the pluripotent stem cells, in an effort to treat or prevent those diseases, disorders, and/or conditions associated with a decrease in certain (or many) types hematopoietic cells, including but not limited to, leukopenia, neutropenia, anemia, and thrombocytopenia. Alternatively, Polynucleotides, polypeptides, antibodies, and/or agonists or antagonists of the present invention could be used to increase differentiation and proliferation of hematopoietic cells, including the pluripotent stem cells, in an effort to treat or prevent those diseases, disorders, and/or conditions associated with an increase in certain (or many) types of hematopoietic cells, including but not limited to, histiocytosis.

[0521] Allergic reactions and conditions, such as asthma (particularly allergic asthma) or other respiratory problems, may also be treated, prevented, diagnosed and/or prognosed using polypeptides, antibodies, or polynucleotides of the invention, and/or agonists or antagonists thereof. Moreover, these molecules can be used to treat, prevent, prognose, and/or diagnose anaphylaxis, hypersensitivity to an antigenic molecule, or blood group incompatibility.

[0522] Additionally, polypeptides or polynucleotides of the invention, and/or agonists or antagonists thereof, may be used to treat, prevent, diagnose and/or prognose IgE-mediated allergic reactions. Such allergic reactions include, but are not limited to, asthma, rhinitis, and eczema. In specific embodiments, polynucleotides, polypeptides, antibodies, and/or agonists or antagonists of the present invention may be used to modulate IgE concentrations in vitro or in vivo.

[0523] Moreover, polynucleotides, polypeptides, antibodies, and/or agonists or antagonists of the present invention have uses in the diagnosis, prognosis, prevention, and/or treatment of inflammatory conditions. For example, since polypeptides, antibodies, or polynucleotides of the invention, and/or agonists or antagonists of the invention may inhibit the activation, proliferation and/or differentiation of cells involved in an inflammatory response, these molecules can be used to prevent and/or treat chronic and acute inflammatory conditions. Such inflammatory conditions include, but are not limited to, for example, inflammation associated with infection (e.g., septic shock, sepsis, or systemic inflammatory response syndrome), ischemia-reperfusion injury, endotoxin lethality, complement-mediated hyperacute rejection, nephritis, cytokine or chemokine induced lung injury, inflammatory bowel disease, Crohn's disease, over production of cytokines (e.g., TNF or IL-1.), respiratory disorders (e.g., asthma and allergy); gastrointestinal disorders (e.g., inflammatory bowel disease); cancers (e.g., gastric, ovarian, lung, bladder, liver, and breast); CNS disorders (e.g., multiple sclerosis; ischemic brain injury and/or stroke, traumatic brain injury, neurodegenerative disorders (e.g., Parkinson's disease and Alzheimer's disease); AIDS-related dementia; and prion disease); cardiovascular disorders (e.g., atherosclerosis, myocarditis, cardiovascular disease, and cardiopulmonary bypass complications); as well as many additional diseases, conditions, and disorders that are characterized by inflammation (e.g., hepatitis, rheumatoid arthritis, gout, trauma, pancreatitis, sarcoidosis, dermatitis, renal ischemia-reperfusion injury, Grave's disease, systemic lupus erythematosus, diabetes mellitus, and allogenic transplant rejection).

[0524] Because inflammation is a fundamental defense mechanism, inflammatory disorders can effect virtually any tissue of the body. Accordingly, polynucleotides, polypeptides, and antibodies of the invention, as well as agonists or antagonists thereof, have uses in the treatment of tissue-specific inflammatory disorders, including, but not limited to, adrenalitis, alveolitis, angiocholecystitis, appendicitis, balanitis, blepharitis, bronchitis, bursitis, carditis, cellulitis, cervicitis, cholecystitis, chorditis, cochlitis, colitis, conjunctivitis, cystitis, dermatitis, diverticulitis, encephalitis, endocarditis, esophagitis, eustachitis, fibrositis, folliculitis, gastritis, gastroenteritis, gingivitis, glossitis, hepatosplenitis, keratitis, labyrinthitis, laryngitis, lymphangitis, mastitis, media otitis, meningitis, metritis, mucitis, myocarditis, myosititis, myringitis, nephritis, neuritis, orchitis, osteochondritis, otitis, pericarditis, peritendonitis, peritonitis, pharyngitis, phlebitis, poliomyelitis, prostatitis, pulpitis, retinitis, rhinitis, salpingitis, scleritis, sclerochoroiditis, scrotitis, sinusitis, spondylitis, steatitis, stomatitis, synovitis, syringitis, tendonitis, tonsillitis, urethritis, and vaginitis.

[0525] In specific embodiments, polypeptides, antibodies, or polynucleotides of the invention, and/or agonists or antagonists thereof, are useful to diagnose, prognose, prevent, and/or treat organ transplant rejections and graft-versus-host disease. Organ rejection occurs by host immune cell destruction of the transplanted tissue through an immune response. Similarly, an immune response is also involved in GVHD, but, in this case, the foreign transplanted immune cells destroy the host tissues. Polypeptides, antibodies, or polynucleotides of the invention, and/or agonists or antagonists thereof, that inhibit an immune response, particularly the activation, proliferation, differentiation, or chemotaxis of T-cells, may be an effective therapy in preventing organ rejection or GVHD. In specific embodiments, polypeptides, antibodies, or polynucleotides of the invention, and/or agonists or antagonists thereof, that inhibit an immune response, particularly the activation, proliferation, differentiation, or chemotaxis of T-cells, may be an effective therapy in preventing experimental allergic and hyperacute xenograft rejection.

[0526] In other embodiments, polypeptides, antibodies, or polynucleotides of the invention, and/or agonists or antagonists thereof, are useful to diagnose, prognose, prevent, and/or treat immune complex diseases, including, but not limited to, serum sickness, post streptococcal glomerulonephritis, polyarteritis nodosa, and immune complex-induced vasculitis.

[0527] Polypeptides, antibodies, polynucleotides and/or agonists or antagonists of the invention can be used to treat, detect, and/or prevent infectious agents. For example, by increasing the immune response, particularly increasing the proliferation activation and/or differentiation of B and/or T cells, infectious diseases may be treated, detected, and/or prevented. The immune response may be increased by either enhancing an existing immune response, or by initiating a new immune response. Alternatively, polynucleotides, polypeptides, antibodies, and/or agonists or antagonists of the present invention may also directly inhibit the infectious agent (refer to section of application listing infectious agents, etc), without necessarily eliciting an immune response.

[0528] In another embodiment, polypeptides, antibodies, polynucleotides and/or agonists or antagonists of the present invention are used as a vaccine adjuvant that enhances immune responsiveness to an antigen. In a specific embodiment, polypeptides, antibodies, polynucleotides and/or agonists or antagonists of the present invention are used as an adjuvant to enhance tumor-specific immune responses.

[0529] In another specific embodiment, polypeptides, antibodies, polynucleotides and/or agonists or antagonists of the present invention are used as an adjuvant to enhance anti-viral immune responses. Anti-viral immune responses that may be enhanced using the compositions of the invention as an adjuvant, include virus and virus associated diseases or symptoms described herein or otherwise known in the art. In specific embodiments, the compositions of the invention are used as an adjuvant to enhance an immune response to a virus, disease, or symptom selected from the group consisting of: AIDS, meningitis, Dengue, EBV, and hepatitis (e.g., hepatitis B). In another specific embodiment, the compositions of the invention are used as an adjuvant to enhance an immune response to a virus, disease, or symptom selected from the group consisting of: HIV/AIDS, respiratory syncytial virus, Dengue, rotavirus, Japanese B encephalitis, influenza A and B, parainfluenza, measles, cytomegalovirus, rabies, Junin, Chikungunya, Rift Valley Fever, herpes simplex, and yellow fever.

[0530] In another specific embodiment, polypeptides, antibodies, polynucleotides and/or agonists or antagonists of the present invention are used as an adjuvant to enhance anti-bacterial or anti-fungal immune responses. Anti-bacterial or anti-fungal immune responses that may be enhanced using the compositions of the invention as an adjuvant, include bacteria or fungus and bacteria or fungus associated diseases or symptoms described herein or otherwise known in the art. In specific embodiments, the compositions of the invention are used as an adjuvant to enhance an immune response to a bacteria or fungus, disease, or symptom selected from the group consisting of: tetanus, Diphtheria, botulism, and meningitis type B.

[0531] In another specific embodiment, the compositions of the invention are used as an adjuvant to enhance an immune response to a bacteria or fungus, disease, or symptom selected from the group consisting of: Vibrio cholerae, Mycobacterium leprae, Salmonella typhi, Salmonella paratyphi, Meisseria meningitidis, Streptococcus pneumoniae, Group B streptococcus, Shigella spp., Enterotoxigenic Escherichia coli, Enterohemorrhagic E. coli, and Borrelia burgdorferi.

[0532] In another specific embodiment, polypeptides, antibodies, polynucleotides and/or agonists or antagonists of the present invention are used as an adjuvant to enhance anti-parasitic immune responses. Anti-parasitic immune responses that may be enhanced using the compositions of the invention as an adjuvant, include parasite and parasite associated diseases or symptoms described herein or otherwise known in the art. In specific embodiments, the compositions of the invention are used as an adjuvant to enhance an immune response to a parasite. In another specific embodiment, the compositions of the invention are used as an adjuvant to enhance an immune response to Plasmodium (malaria) or Leishmania.

[0533] In another specific embodiment, polypeptides, antibodies, polynucleotides and/or agonists or antagonists of the present invention may also be employed to treat infectious diseases including silicosis, sarcoidosis, and idiopathic pulmonary fibrosis; for example, by preventing the recruitment and activation of mononuclear phagocytes.

[0534] In another specific embodiment, polypeptides, antibodies, polynucleotides and/or agonists or antagonists of the present invention are used as an antigen for the generation of antibodies to inhibit or enhance immune mediated responses against polypeptides of the invention.

[0535] In one embodiment, polypeptides, antibodies, polynucleotides and/or agonists or antagonists of the present invention are administered to an animal (e.g., mouse, rat, rabbit, hamster, guinea pig, pigs, micro-pig, chicken, camel, goat, horse, cow, sheep, dog, cat, non-human primate, and human, most preferably human) to boost the immune system to produce increased quantities of one or more antibodies (e.g., IgG, IgA, IgM, and IgE), to induce higher affinity antibody production and immunoglobulin class switching (e.g., IgG, IgA, IgM, and IgE), and/or to increase an immune response.

[0536] In another specific embodiment, polypeptides, antibodies, polynucleotides and/or agonists or antagonists of the present invention are used as a stimulator of B cell responsiveness to pathogens.

[0537] In another specific embodiment, polypeptides, antibodies, polynucleotides and/or agonists or antagonists of the present invention are used as an activator of T cells.

[0538] In another specific embodiment, polypeptides, antibodies, polynucleotides and/or agonists or antagonists of the present invention are used as an agent that elevates the immune status of an individual prior to their receipt of immunosuppressive therapies.

[0539] In another specific embodiment, polypeptides, antibodies, polynucleotides and/or agonists or antagonists of the present invention are used as an agent to induce higher affinity antibodies.

[0540] In another specific embodiment, polypeptides, antibodies, polynucleotides and/or agonists or antagonists of the present invention are used as an agent to increase serum immunoglobulin concentrations.

[0541] In another specific embodiment, polypeptides, antibodies, polynucleotides and/or agonists or antagonists of the present invention are used as an agent to accelerate recovery of immunocompromised individuals.

[0542] In another specific embodiment, polypeptides, antibodies, polynucleotides and/or agonists or antagonists of the present invention are used as an agent to boost immunoresponsiveness among aged populations and/or neonates.

[0543] In another specific embodiment, polypeptides, antibodies, polynucleotides and/or agonists or antagonists of the present invention are used as an immune system enchancer prior to, during, or after bone marrow transplant and/or other transplants (e.g., allogeneic or xenogeneic organ transplantation). With respect to transplantation, compositions of the invention may be administered prior to, concomitant with, and/or after transplantation. In a specific embodiment, compositions of the invention are administered after transplantation, prior to the beginning of recovery of T-cell populations. In another specific embodiment, compositions of the invention are first administered after transplantation after the beginning of recovery of T cell populations, but prior to full recovery of B cell populations.

[0544] In another specific embodiment, polypeptides, antibodies, polynucleotides and/or agonists or antagonists of the present invention are used as an agent to boost immunoresponsiveness among individuals having an acquired loss of B cell function. Conditions resulting in an acquired loss of B cell function that may be ameliorated or treated by administering the polypeptides, antibodies, polynucleotides and/or agonists or antagonists thereof, include, but are not limited to, HIV Infection, AIDS, bone marrow transplant, and B cell chronic lymphocytic leukemia (CLL).

[0545] In another specific embodiment, polypeptides, antibodies, polynucleotides and/or agonists or antagonists of the present invention are used as an agent to boost immunoresponsiveness among individuals having a temporary immune deficiency. Conditions resulting in a temporary immune deficiency that may be ameliorated or treated by administering the polypeptides, antibodies, polynucleotides and/or agonists or antagonists thereof, include, but are not limited to, recovery from viral infections (e.g., influenza), conditions associated with malnutrition, recovery from infectious mononucleosis, or conditions associated with stress, recovery from measles, recovery from blood transfusion, and recovery from surgery.

[0546] In another specific embodiment, polypeptides, antibodies, polynucleotides and/or agonists or antagonists of the present invention are used as a regulator of antigen presentation by monocytes, dendritic cells, and/or B-cells. In one embodiment, polynucleotides, polypeptides, antibodies, and/or agonists or antagonists of the present invention enhance antigen presentation or antagonizes antigen presentation in vitro or in vivo. Moreover, in related embodiments, said enhancement or antagonism of antigen presentation may be useful as an anti-tumor treatment or to modulate the immune system.

[0547] In another specific embodiment, polypeptides, antibodies, polynucleotides and/or agonists or antagonists of the present invention are used as an agent to direct an individual's immune system towards development of a humoral response (i.e. TH2) as opposed to a TH1 cellular response.

[0548] In another specific embodiment, polypeptides, antibodies, polynucleotides and/or agonists or antagonists of the present invention are used as a means to induce tumor proliferation and thus make it more susceptible to anti-neoplastic agents. For example, multiple mycloma is a slowly dividing disease and is thus refractory to virtually all anti-neoplastic regimens. If these cells were forced to proliferate more rapidly their susceptibility profile would likely change.

[0549] In another specific embodiment, polypeptides, antibodies, polynucleotides and/or agonists or antagonists of the present invention are used as a stimulator of B cell production in pathologies such as AIDS, chronic lymphocyte disorder and/or Common Variable Immunodificiency.

[0550] In another specific embodiment, polypeptides, antibodies, polynucleotides and/or agonists or antagonists of the present invention are used as a therapy for generation and/or regeneration of lymphoid tissues following surgery, trauma or genetic defect. In another specific embodiment, polypeptides, antibodies, polynucleotides and/or agonists or antagonists of the present invention are used in the pretreatment of bone marrow samples prior to transplant.

[0551] In another specific embodiment, polypeptides, antibodies, polynucleotides and/or agonists or antagonists of the present invention are used as a gene-based therapy for genetically inherited disorders resulting in immuno-incompetence/immunodeficiency such as observed among SCID patients.

[0552] In another specific embodiment, polypeptides, antibodies, polynucleotides and/or agonists or antagonists of the present invention are used as a means of activating monocytes/macrophages to defend against parasitic diseases that effect monocytes such as Leishmania.

[0553] In another specific embodiment, polypeptides, antibodies, polynucleotides and/or agonists or antagonists of the present invention are used as a means of regulating secreted cytokines that are elicited by polypeptides of the invention.

[0554] In another embodiment, polypeptides, antibodies, polynucleotides and/or agonists or antagonists of the present invention are used in one or more of the applications decribed herein, as they may apply to veterinary medicine.

[0555] In another specific embodiment, polypeptides, antibodies, polynucleotides and/or agonists or antagonists of the present invention are used as a means of blocking various aspects of immune responses to foreign agents or self. Examples of diseases or conditions in which blocking of certain aspects of immune responses may be desired include autoimmune disorders such as lupus, and arthritis, as well as immunoresponsiveness to skin allergies, inflammation, bowel disease, injury and diseases/disorders associated with pathogens.

[0556] In another specific embodiment, polypeptides, antibodies, polynucleotides and/or agonists or antagonists of the present invention are used as a therapy for preventing the B cell proliferation and Ig secretion associated with autoimmune diseases such as idiopathic thrombocytopenic purpura, systemic lupus erythematosus and multiple sclerosis.

[0557] In another specific embodiment, polypeptides, antibodies, polynucleotides and/or agonists or antagonists of the present invention are used as a inhibitor of B and/or T cell migration in endothelial cells. This activity disrupts tissue architecture or cognate responses and is useful, for example in disrupting immune responses, and blocking sepsis.

[0558] In another specific embodiment, polypeptides, antibodies, polynucleotides and/or agonists or antagonists of the present invention are used as a therapy for chronic hypergammaglobulinemia evident in such diseases as monoclonal gammopathy of undetermined significance (MGUS), Waldenstrom's disease, related idiopathic monoclonal gammopathies, and plasmacytomas.

[0559] In another specific embodiment, polypeptides, antibodies, polynucleotides and/or agonists or antagonists of the present invention may be employed for instance to inhibit polypeptide chemotaxis and activation of macrophages and their precursors, and of neutrophils, basophils, B lymphocytes and some T-cell subsets, e.g., activated and CD8 cytotoxic T cells and natural killer cells, in certain autoimmune and chronic inflammatory and infective diseases. Examples of autoimmune diseases are described herein and include multiple sclerosis, and insulin-dependent diabetes.

[0560] The polypeptides, antibodies, polynucleotides and/or agonists or antagonists of the present invention may also be employed to treat idiopathic hyper-eosinophilic syndrome by, for example, preventing eosinophil production and migration.

[0561] In another specific embodiment, polypeptides, antibodies, polynucleotides and/or agonists or antagonists of the present invention are used to enhance or inhibit complement mediated cell lysis.

[0562] In another specific embodiment, polypeptides, antibodies, polynucleotides and/or agonists or antagonists of the present invention are used to enhance or inhibit antibody dependent cellular cytotoxicity.

[0563] In another specific embodiment, polypeptides, antibodies, polynucleotides and/or agonists or antagonists of the present invention may also be employed for treating atherosclerosis, for example, by preventing monocyte infiltration in the artery wall.

[0564] In another specific embodiment, polypeptides, antibodies, polynucleotides and/or agonists or antagonists of the present invention may be employed to treat adult respiratory distress syndrome (ARDS).

[0565] In another specific embodiment, polypeptides, antibodies, polynucleotides and/or agonists or antagonists of the present invention may be useful for stimulating wound and tissue repair, stimulating angiogenesis, and/or stimulating the repair of vascular or lymphatic diseases or disorders. Additionally, agonists and antagonists of the invention may be used to stimulate the regeneration of mucosal surfaces.

[0566] In a specific embodiment, polynucleotides or polypeptides, and/or agonists thereof are used to diagnose, prognose, treat, and/or prevent a disorder characterized by primary or acquired immunodeficiency, deficient serum immunoglobulin production, recurrent infections, and/or immune system dysfunction. Moreover, polynucleotides or polypeptides, and/or agonists thereof may be used to treat or prevent infections of the joints, bones, skin, and/or parotid glands, blood-borne infections (e.g., sepsis, meningitis, septic arthritis, and/or osteomyelitis), autoimmune diseases (e.g., those disclosed herein), inflammatory disorders, and malignancies, and/or any disease or disorder or condition associated with these infections, diseases, disorders and/or malignancies) including, but not limited to, CVID, other primary immune deficiencies, HIV disease, CLL, recurrent bronchitis, sinusitis, otitis media, conjunctivitis, pneumonia, hepatitis, meningitis, herpes zoster (e.g., severe herpes zoster), and/or pneumocystis carnii. Other diseases and disorders that may be prevented, diagnosed, prognosed, and/or treated with polynucleotides or polypeptides, and/or agonists of the present invention include, but are not limited to, HIV infection, HTLV-BLV infection, lymphopenia, phagocyte bactericidal dysfunction anemia, thrombocytopenia, and hemoglobinuria.

[0567] In another embodiment, polynucleotides, polypeptides, antibodies, and/or agonists or antagonists of the present invention are used to treat, and/or diagnose an individual having common variable immunodeficiency disease (“CVID”; also known as “acquired agammaglobulinemia” and “acquired hypogammaglobulinemia”) or a subset of this disease.

[0568] In a specific embodiment, polynucleotides, polypeptides, antibodies, and/or agonists or antagonists of the present invention may be used to diagnose, prognose, prevent, and/or treat cancers or neoplasms including immune cell or immune tissue-related cancers or neoplasms. Examples of cancers or neoplasms that may be prevented, diagnosed, or treated by polynucleotides, polypeptides, antibodies, and/or agonists or antagonists of the present invention include, but are not limited to, acute myelogenous leukemia, chronic myelogenous leukemia, Hodgkin's disease, non-Hodgkin's lymphoma, acute lymphocytic anemia (ALL) Chronic lymphocyte leukemia, plasmacytomas, multiple myeloma, Burkitt's lymphoma, EBV-transformed diseases, and/or diseases and disorders described in the section entitled “Hyperproliferative Disorders” elsewhere herein.

[0569] In another specific embodiment, polypeptides, antibodies, polynucleotides and/or agonists or antagonists of the present invention are used as a therapy for decreasing cellular proliferation of Large B-cell Lymphomas.

[0570] In another specific embodiment, polypeptides, antibodies, polynucleotides and/or agonists or antagonists of the present invention are used as a means of decreasing the involvement of B cells and Ig associated with Chronic Myelogenous Leukemia.

[0571] In specific embodiments, the compositions of the invention are used as an agent to boost immunoresponsiveness among B cell immunodeficient individuals, such as, for example, an individual who has undergone a partial or complete splenectomy.

[0572] Antagonists of the invention include, for example, binding and/or inhibitory antibodies, antisense nucleic acids, ribozymes or soluble forms of the polypeptides of the present invention (e.g., Fc fusion protein; see, e.g., Example 9). Agonists of the invention include, for example, binding or stimulatory antibodies, and soluble forms of the polypeptides (e.g., Fc fusion proteins; see, e.g., Example 9). Polypeptides, antibodies, polynucleotides and/or agonists or antagonists of the present invention may be employed in a composition with a pharmaceutically acceptable carrier, e.g., as described herein.

[0573] In another embodiment, polypeptides, antibodies, polynucleotides and/or agonists or antagonists of the present invention are administered to an animal (including, but not limited to, those listed above, and also including transgenic animals) incapable of producing functional endogenous antibody molecules or having an otherwise compromised endogenous immune system, but which is capable of producing human immunoglobulin molecules by means of a reconstituted or partially reconstituted immune system from another animal (see, e.g., published PCT Application Nos. WO98/24893, WO/9634096, WO/9633735, and WO/9110741). Administration of polypeptides, antibodies, polynucleotides and/or agonists or antagonists of the present invention to such animals is useful for the generation of monoclonal antibodies against the polypeptides, antibodies, polynucleotides and/or agonists or antagonists of the present invention.

[0574] Gastrointestinal Disorders

[0575] Polynucleotides or polypeptides, or agonists or antagonists of the present invention, may be used to treat, prevent, diagnose, and/or prognose gastrointestinal disorders, including inflammatory diseases and/or conditions, infections, cancers (e.g., intestinal neoplasms (carcinoid tumor of the small intestine, non-Hodgkin's lymphoma of the small intestine, small bowl lymphoma)), and ulcers, such as peptic ulcers.

[0576] Gastrointestinal disorders include dysphagia, odynophagia, inflammation of the esophagus, peptic esophagitis, gastric reflux, submucosal fibrosis and stricturing, Mallory-Weiss lesions, leiomyomas, lipomas, epidermal cancers, adeoncarcinomas, gastric retention disorders, gastroenteritis, gastric atrophy, gastric/stomach cancers, polyps of the stomach, autoimmune disorders such as pernicious anemia, pyloric stenosis, gastritis (bacterial, viral, eosinophilic, stress-induced, chronic erosive, atrophic, plasma cell, and Ménétrier's), and peritoneal diseases (e.g., chyloperioneum, hemoperitoneum, mesenteric cyst, mesenteric lymphadenitis, mesenteric vascular occlusion, panniculitis, neoplasms, peritonitis, pneumoperitoneum, bubphrenic abscess).

[0577] Gastrointestinal disorders also include disorders associated with the small intestine, such as malabsorption syndromes, distension, irritable bowel syndrome, sugar intolerance, celiac disease, duodenal ulcers, duodenitis, tropical sprue, Whipple's disease, intestinal lymphangiectasia, Crohn's disease, appendicitis, obstructions of the ileum, Meckel's diverticulum, multiple diverticula, failure of complete rotation of the small and large intestine, lymphoma, and bacterial and parasitic diseases (such as Traveler's diarrhea, typhoid and paratyphoid, cholera, infection by Roundworms (Ascariasis lumbricoides), Hookworms (Ancylostoma duodenale), Threadworms (Enterobius vermicularis), Tapeworms (Taenia saginata, Echinococcus granulosus, Diphyllobothrium spp., and T. solium).

[0578] Liver diseases and/or disorders include intrahepatic cholestasis (alagille syndrome, biliary liver cirrhosis), fatty liver (alcoholic fatty liver, reye syndrome), hepatic vein thrombosis, hepatolentricular degeneration, hepatomegaly, hepatopulmonary syndrome, hepatorenal syndrome, portal hypertension (esophageal and gastric varices), liver abscess (amebic liver abscess), liver cirrhosis (alcoholic, biliary and experimental), alcoholic liver diseases (fatty liver, hepatitis, cirrhosis), parasitic (hepatic echinococcosis, fascioliasis, amebic liver abscess), jaundice (hemolytic, hepatocellular, and cholestatic), cholestasis, portal hypertension, liver enlargement, ascites, hepatitis (alcoholic hepatitis, animal hepatitis, chronic hepatitis (autoimmune, hepatitis B, hepatitis C, hepatitis D, drug induced), toxic hepatitis, viral human hepatitis (hepatitis A, hepatitis B, hepatitis C, hepatitis D, hepatitis E), Wilson's disease, granulomatous hepatitis, secondary biliary cirrhosis, hepatic encephalopathy, portal hypertension, varices, hepatic encephalopathy, primary biliary cirrhosis, primary sclerosing cholangitis, hepatocellular adenoma, hemangiomas, bile stones, liver failure (hepatic encephalopathy, acute liver failure), and liver neoplasms (angiomyolipoma, calcified liver metastases, cystic liver metastases, epithelial tumors, fibrolamellar hepatocarcinoma, focal nodular hyperplasia, hepatic adenoma, hepatobiliary cystadenoma, hepatoblastoma, hepatocellular carcinoma, hepatoma, liver cancer, liver hemangioendothelioma, mesenchymal hamartoma, mesenchymal tumors of liver, nodular regenerative hyperplasia, benign liver tumors (Hepatic cysts [Simple cysts, Polycystic liver disease, Hepatobiliary cystadenoma, Choledochal cyst], Mesenchymal tumors [Mesenchymal hamartoma, Infantile hemangioendothelioma, Hemangioma, Peliosis hepatis, Lipomas, Inflammatory pseudotumor, Miscellaneous], Epithelial tumors [Bile duct epithelium (Bile duct hamartoma, Bile duct adenoma), Hepatocyte (Adenoma, Focal nodular hyperplasia, Nodular regenerative hyperplasia)], malignant liver tumors [hepatocellular, hepatoblastoma, hepatocellular carcinoma, cholangiocellular, cholangiocarcinoma, cystadenocarcinoma, tumors of blood vessels, angiosarcoma, Karposi's sarcoma, hemangioendothelioma, other tumors, embryonal sarcoma, fibrosarcoma, leiomyosarcoma, rhabdomyosarcoma, carcinosarcoma, teratoma, carcinoid, squamous carcinoma, primary lymphoma]), peliosis hepatis, erythrohepatic porphyria, hepatic porphyria (acute intermittent porphyria, porphyria cutanea tarda), Zellweger syndrome).

[0579] Pancreatic diseases and/or disorders include acute pancreatitis, chronic pancreatitis (acute necrotizing pancreatitis, alcoholic pancreatitis), neoplasms (adenocarcinoma of the pancreas, cystadenocarcinoma, insulinoma, gastrinoma, and glucagonoma, cystic neoplasms, islet-cell tumors, pancreoblastoma), and other pancreatic diseases (e.g., cystic fibrosis, cyst (pancreatic pseudocyst, pancreatic fistula, insufficiency)).

[0580] Gallbladder diseases include gallstones (cholelithiasis and choledocholithiasis), postcholecystectomy syndrome, diverticulosis of the gallbladder, acute cholecystitis, chronic cholecystitis, bile duct tumors, and mucocele.

[0581] Diseases and/or disorders of the large intestine include antibiotic-associated colitis, diverticulitis, ulcerative colitis, acquired megacolon, abscesses, fungal and bacterial infections, anorectal disorders (e.g., fissures, hemorrhoids), colonic diseases (colitis, colonic neoplasms [colon cancer, adenomatous colon polyps (e.g., villous adenoma), colon carcinoma, colon cancer], colonic diverticulitis, colonic diverticulosis, megacolon [Hirschsprung disease, toxic megacolon]; sigmoid diseases [proctocolitis, sigmoin neoplasms]), constipation, Crohn's disease, diarrhea (infantile diarrhea, dysentery), duodenal diseases (duodenal neoplasms, duodenal obstruction, duodenal ulcer, duodenitis), enteritis (enterocolitis), HIV enteropathy, ileal diseases (ileal neoplasms, ileitis), immunoproliferative small intestinal disease, inflammatory bowel disease (ulcerative colitis, Crohn's disease), intestinal atresia, parasitic diseases (anisakiasis, balantidiasis, blastocystis infections, cryptosporidiosis, dientamoebiasis, amebic dysentery, giardiasis), intestinal fistula (rectal fistula), intestinal neoplasms (cecal neoplasms, colonic neoplasms, duodenal neoplasms, ileal neoplasms, intestinal polyps, jejunal neoplasms, rectal neoplasms), intestinal obstruction (afferent loop syndrome, duodenal obstruction, impacted feces, intestinal pseudo-obstruction [cecal volvulus], intussusception), intestinal perforation, intestinal polyps (colonic polyps, gardner syndrome, peutz-jeghers syndrome), jejunal diseases (jejunal neoplasms), malabsorption syndromes (blind loop syndrome, celiac disease, lactose intolerance, short bowl syndrome, tropical sprue, whipple's disease), mesenteric vascular occlusion, pneumatosis cystoides intestinalis, protein-losing enteropathies (intestinal lymphagiectasis), rectal diseases (anus diseases, fecal incontinence, hemorrhoids, proctitis, rectal fistula, rectal prolapse, rectocele), peptic ulcer (duodenal ulcer, peptic esophagitis, hemorrhage, perforation, stomach ulcer, Zollinger-Ellison syndrome), postgastrectomy syndromes (dumping syndrome), stomach diseases (e.g., achlorhydria, duodenogastric reflux (bile reflux), gastric antral vascular ectasia, gastric fistula, gastric outlet obstruction, gastritis (atrophic or hypertrophic), gastroparesis, stomach dilatation, stomach diverticulum, stomach neoplasms (gastric cancer, gastric polyps, gastric adenocarcinoma, hyperplastic gastric polyp), stomach rupture, stomach ulcer, stomach volvulus), tuberculosis, visceroptosis, vomiting (e.g., hematemesis, hyperemesis gravidarum, postoperative nausea and vomiting) and hemorrhagic colitis.

[0582] Further diseases and/or disorders of the gastrointestinal system include biliary tract diseases, such as, gastroschisis, fistula (e.g., biliary fistula, esophageal fistula, gastric fistula, intestinal fistula, pancreatic fistula), neoplasms (e.g., biliary tract neoplasms, esophageal neoplasms, such as adenocarcinoma of the esophagus, esophageal squamous cell carcinoma, gastrointestinal neoplasms, pancreatic neoplasms, such as adenocarcinoma of the pancreas, mucinous cystic neoplasm of the pancreas, pancreatic cystic neoplasms, pancreatoblastoma, and peritoneal neoplasms), esophageal disease (e.g., bullous diseases, candidiasis, glycogenic acanthosis, ulceration, barrett esophagus varices, atresia, cyst, diverticulum (e.g., Zenker's diverticulum), fistula (e.g., tracheoesophageal fistula), motility disorders (e.g., CREST syndrome, deglutition disorders, achalasia, spasm, gastroesophageal reflux), neoplasms, perforation (e.g., Boerhaave syndrome, Mallory-Weiss syndrome), stenosis, esophagitis, diaphragmatic hernia (e.g., hiatal hernia); gastrointestinal diseases, such as, gastroenteritis (e.g., cholera morbus, norwalk virus infection), hemorrhage (e.g., hematemesis, melena, peptic ulcer hemorrhage), stomach neoplasms (gastric cancer, gastric polyps, gastric adenocarcinoma, stomach cancer)), hernia (e.g., congenital diaphragmatic hernia, femoral hernia, inguinal hernia, obturator hernia, umbilical hernia, ventral hernia), and intestinal diseases (e.g., cecal diseases (appendicitis, cecal neoplasms)).

[0583] Blood-Related Disorders

[0584] The polynucleotides, polypeptides, antibodies, and/or agonists or antagonists of the present invention may be used to modulate hemostatic (the stopping of bleeding) or thrombolytic (clot dissolving) activity. For example, by increasing hemostatic or thrombolytic activity, polynucleotides or polypeptides, and/or agonists or antagonists of the present invention could be used to treat or prevent blood coagulation diseases, disorders, and/or conditions (e.g., afibrinogenemia, factor deficiencies, hemophilia), blood platelet diseases, disorders, and/or conditions (e.g., thrombocytopenia), or wounds resulting from trauma, surgery, or other causes. Alternatively, polynucleotides, polypeptides, antibodies, and/or agonists or antagonists of the present invention that can decrease hemostatic or thrombolytic activity could be used to inhibit or dissolve clotting. These molecules could be important in the treatment or prevention of heart attacks (infarction), strokes, or scarring.

[0585] In specific embodiments, the polynucleotides, polypeptides, antibodies, and/or agonists or antagonists of the present invention may be used to prevent, diagnose, prognose, and/or treat thrombosis, arterial thrombosis, venous thrombosis, thromboembolism, pulmonary embolism, atherosclerosis, myocardial infarction, transient ischemic attack, unstable angina. In specific embodiments, the polynucleotides, polypeptides, antibodies, and/or agonists or antagonists of the present invention may be used for the prevention of occulsion of saphenous grafts, for reducing the risk of periprocedural thrombosis as might accompany angioplasty procedures, for reducing the risk of stroke in patients with atrial fibrillation including nonrheumatic atrial fibrillation, for reducing the risk of embolism associated with mechanical heart valves and or mitral valves disease. Other uses for the polynucleotides, polypeptides, antibodies, and/or agonists or antagonists of the present invention, include, but are not limited to, the prevention of occlusions in extrcorporeal devices (e.g., intravascular canulas, vascular access shunts in hemodialysis patients, hemodialysis machines, and cardiopulmonary bypass machines).

[0586] In another embodiment, a polypeptide of the invention, or polynucleotides, antibodies, agonists, or antagonists corresponding to that polypeptide, may be used to prevent, diagnose, prognose, and/or treat diseases and disorders of the blood and/or blood forming organs associated with the tissue(s) in which the polypeptide of the invention is expressed, including one, two, three, four, five, or more tissues disclosed in Table 1, column 8 (Tissue Distribution Library Code).

[0587] The polynucleotides, polypeptides, antibodies, and/or agonists or antagonists of the present invention may be used to modulate hematopoietic activity (the formation of blood cells). For example, the polynucleotides, polypeptides, antibodies, and/or agonists or antagonists of the present invention may be used to increase the quantity of all or subsets of blood cells, such as, for example, erythrocytes, lymphocytes (B or T cells), myeloid cells (e.g., basophils, eosinophils, neutrophils, mast cells, macrophages) and platelets. The ability to decrease the quantity of blood cells or subsets of blood cells may be useful in the prevention, detection, diagnosis and/or treatment of anemias and leukopenias described below. Alternatively, the polynucleotides, polypeptides, antibodies, and/or agonists or antagonists of the present invention may be used to decrease the quantity of all or subsets of blood cells, such as, for example, erythrocytes, lymphocytes (B or T cells), myeloid cells (e.g., basophils, eosinophils, neutrophils, mast cells, macrophages) and platelets.. The ability to decrease the quantity of blood cells or subsets of blood cells may be useful in the prevention, detection, diagnosis and/or treatment of leukocytoses, such as, for example eosinophilia.

[0588] The polynucleotides, polypeptides, antibodies, and/or agonists or antagonists of the present invention may be used to prevent, treat, or diagnose blood dyscrasia.

[0589] Anemias are conditions in which the number of red blood cells or amount of hemoglobin (the protein that carries oxygen) in them is below normal. Anemia may be caused by excessive bleeding, decreased red blood cell production, or increased red blood cell destruction (hemolysis). The polynucleotides, polypeptides, antibodies, and/or agonists or antagonists of the present invention may be useful in treating, preventing, and/or diagnosing anemias. Anemias that may be treated prevented or diagnosed by the polynucleotides, polypeptides, antibodies, and/or agonists or antagonists of the present invention include iron deficiency anemia, hypochromic anemia, microcytic anemia, chlorosis, hereditary siderob;astic anemia, idiopathic acquired sideroblastic anemia, red cell aplasia, megaloblastic anemia (e.g., pernicious anemia, (vitamin B12 deficiency) and folic acid deficiency anemia), aplastic anemia, hemolytic anemias (e.g., autoimmune helolytic anemia, microangiopathic hemolytic anemia, and paroxysmal nocturnal hemoglobinuria). The polynucleotides, polypeptides, antibodies, and/or agonists or antagonists of the present invention may be useful in treating, preventing, and/or diagnosing anemias associated with diseases including but not limited to, anemias associated with systemic lupus erythematosus, cancers, lymphomas, chronic renal disease, and enlarged spleens. The polynucleotides, polypeptides, antibodies, and/or agonists or antagonists of the present invention may be useful in treating, preventing, and/or diagnosing anemias arising from drug treatments such as anemias associated with methyldopa, dapsone, and/or sulfadrugs. Additionally, rhe polynucleotides, polypeptides, antibodies, and/or agonists or antagonists of the present invention may be useful in treating, preventing, and/or diagnosing anemias associated with abnormal red blood cell architecture including but not limited to, hereditary spherocytosis, hereditary elliptocytosis, glucose-6-phosphate dehydrogenase deficiency, and sickle cell anemia.

[0590] The polynucleotides, polypeptides, antibodies, and/or agonists or antagonists of the present invention may be useful in treating, preventing, and/or diagnosing hemoglobin abnormalities, (e.g., those associated with sickle cell anemia, hemoglobin C disease, hemoglobin S-C disease, and hemoglobin E disease). Additionally, the polynucleotides, polypeptides, antibodies, and/or agonists or antagonists of the present invention may be useful in diagnosing, prognosing, preventing, and/or treating thalassemias, including, but not limited to major and minor forms of alpha-thalassemia and beta-thalassemia.

[0591] In another embodiment, the polynucleotides, polypeptides, antibodies, and/or agonists or antagonists of the present invention may be useful in diagnosing, prognosing, preventing, and/or treating bleeding disorders including, but not limited to, thrombocytopenia (e.g., idiopathic thrombocytopenic purpura, and thrombotic thrombocytopenic purpura), Von Willebrand's disease, hereditary platelet disorders (e.g., storage pool disease such as Chediak-Higashi and Hermansky-Pudlak syndromes, thromboxane A2 dysfunction, thromboasthenia, and Bernard-Soulier syndrome), hemolytic-uremic syndrome, hemophelias such as hemophelia A or Factor VII deficiency and Christmas disease or Factor IX deficiency, Hereditary Hemorhhagic Telangiectsia, also known as Rendu-Osler-Weber syndrome, allergic purpura (Henoch Schonlein purpura) and disseminated intravascular coagulation.

[0592] The effect of the polynucleotides, polypeptides, antibodies, and/or agonists or antagonists of the present invention on the clotting time of blood may be monitored using any of the clotting tests known in the art including, but not limited to, whole blood partial thromboplastin time (PTT), the activated partial thromboplastin time (aPTT), the activated clotting time (ACT), the recalcified activated clotting time, or the Lee-White Clotting time.

[0593] Several diseases and a variety of drugs can cause platelet dysfunction. Thus, in a specific embodiment, the polynucleotides, polypeptides, antibodies, and/or agonists or antagonists of the present invention may be useful in diagnosing, prognosing, preventing, and/or treating acquired platelet dysfunction such as platelet dysfunction accompanying kidney failure, leukemia, multiple myeloma, cirrhosis of the liver, and systemic lupus erythematosus as well as platelet dysfunction associated with drug treatments, including treatment with aspirin, ticlopidine, nonsteroidal anti-inflammatory drugs (used for arthritis, pain, and sprains), and penicillin in high doses.

[0594] In another embodiment, the polynucleotides, polypeptides, antibodies, and/or agonists or antagonists of the present invention may be useful in diagnosing, prognosing, preventing, and/or treating diseases and disorders characterized by or associated with increased or decreased numbers of white blood cells. Leukopenia occurs when the number of white blood cells decreases below normal. Leukopenias include, but are not limited to, neutropenia and lymphocytopenia. An increase in the number of white blood cells compared to normal is known as leukocytosis. The body generates increased numbers of white blood cells during infection. Thus, leukocytosis may simply be a normal physiological parameter that reflects infection. Alternatively, leukocytosis may be an indicator of injury or other disease such as cancer. Leokocytoses, include but are not limited to, eosinophilia, and accumulations of macrophages. In specific embodiments, the polynucleotides, polypeptides, antibodies, and/or agonists or antagonists of the present invention may be useful in diagnosing, prognosing, preventing, and/or treating leukopenia. In other specific embodiments, the polynucleotides, polypeptides, antibodies, and/or agonists or antagonists of the present invention may be useful in diagnosing, prognosing, preventing, and/or treating leukocytosis

[0595] Leukopenia may be a generalized decreased in all types of white blood cells, or may be a specific depletion of particular types of white blood cells. Thus, in specific embodiments, the polynucleotides, polypeptides, antibodies, and/or agonists or antagonists of the present invention may be useful in diagnosing, prognosing, preventing, and/or treating decreases in neutrophil numbers, known as neutropenia. Neutropenias that may be diagnosed, prognosed, prevented, and/or treated by the polynucleotides, polypeptides, antibodies, and/or agonists or antagonists of the present invention include, but are not limited to, infantile genetic agranulocytosis, familial neutropenia, cyclic neutropenia, neutropenias resulting from or associated with dietary deficiencies (e.g., vitamin B 12 deficiency or folic acid deficiency), neutropenias resulting from or associated with drug treatments (e.g., antibiotic regimens such as penicillin treatment, sulfonamide treatment, anticoagulant treatment, anticonvulsant drugs, anti-thyroid drugs, and cancer chemotherapy), and neutropenias resulting from increased neutrophil destruction that may occur in association with some bacterial or viral infections, allergic disorders, autoimmune diseases, conditions in which an individual has an enlarged spleen (e.g., Felty syndrome, malaria and sarcoidosis), and some drug treatment regimens.

[0596] The polynucleotides, polypeptides, antibodies, and/or agonists or antagonists of the present invention may be useful in diagnosing, prognosing, preventing, and/or treating lymphocytopenias (decreased numbers of B and/or T lymphocytes), including, but not limited lymphocytopenias resulting from or associated with stress, drug treatments (e.g., drug treatment with corticosteroids, cancer chemotherapies, and/or radiation therapies), AIDS infection and/or other diseases such as, for example, cancer, rheumatoid arthritis, systemic lupus erythematosus, chronic infections, some viral infections and/or hereditary disorders (e.g., DiGeorge syndrome, Wiskott-Aldrich Syndome, severe combined immunodeficiency, ataxia telangiectsia).

[0597] The polynucleotides, polypeptides, antibodies, and/or agonists or antagonists of the present invention may be useful in diagnosing, prognosing, preventing, and/or treating diseases and disorders associated with macrophage numbers and/or macrophage function including, but not limited to, Gaucher's disease, Niemann-Pick disease, Letterer-Siwe disease and Hand-Schuller-Christian disease.

[0598] In another embodiment, the polynucleotides, polypeptides, antibodies, and/or agonists or antagonists of the present invention may be useful in diagnosing, prognosing, preventing, and/or treating diseases and disorders associated with eosinophil numbers and/or eosinophil function including, but not limited to, idiopathic hypereosinophilic syndrome, eosinophilia-myalgia syndrome, and Hand-Schuller-Christian disease.

[0599] In yet another embodiment, the polynucleotides, polypeptides, antibodies, and/or agonists or antagonists of the present invention may be useful in diagnosing, prognosing, preventing, and/or treating leukemias and lymphomas including, but not limited to, acute lymphocytic (lymphpblastic) leukemia (ALL), acute myeloid (myelocytic, myelogenous, myeloblastic, or myelomonocytic) leukemia, chronic lymphocytic leukemia (e.g., B cell leukemias, T cell leukemias, Sezary syndrome, and Hairy cell leukenia), chronic myelocytic (myeloid, myelogenous, or granulocytic) leukemia, Hodgkin's lymphoma, non-hodgkin's lymphoma, Burkitt's lymphoma, and mycosis fungoides.

[0600] In other embodiments, the polynucleotides, polypeptides, antibodies, and/or agonists or antagonists of the present invention may be useful in diagnosing, prognosing, preventing, and/or treating diseases and disorders of plasma cells including, but not limited to, plasma cell dyscrasias, monoclonal gammaopathies, monoclonal gammopathies of undetermined significance, multiple myeloma, macroglobulinemia, Waldenstrom's macroglobulinemia, cryoglobulinemia, and Raynaud's phenomenon.

[0601] In other embodiments, the polynucleotides, polypeptides, antibodies, and/or agonists or antagonists of the present invention may be useful in treating, preventing, and/or diagnosing myeloproliferative disorders, including but not limited to, polycythemia vera, relative polycythemia, secondary polycythemia, myelofibrosis, acute myelofibrosis, agnogenic myclod metaplasia, thrombocythemia, (including both primary and seconday thrombocythemia) and chronic myelocytic leukemia.

[0602] In other embodiments, the polynucleotides, polypeptides, antibodies, and/or agonists or antagonists of the present invention may be useful as a treatment prior to surgery, to increase blood cell production.

[0603] In other embodiments, the polynucleotides, polypeptides, antibodies, and/or agonists or antagonists of the present invention may be useful as an agent to enhance the migration, phagocytosis, superoxide production, antibody dependent cellular cytotoxicity of neutrophils, eosionophils and macrophages.

[0604] In other embodiments, the polynucleotides, polypeptides, antibodies, and/or agonists or antagonists of the present invention may be useful as an agent to increase the number of stem cells in circulation prior to stem cells pheresis. In another specific embodiment, the polynucleotides, polypeptides, antibodies, and/or agonists or antagonists of the present invention may be useful as an agent to increase the number of stem cells in circulation prior to platelet pheresis.

[0605] In other embodiments, the polynucleotides, polypeptides, antibodies, and/or agonists or antagonists of the present invention may be useful as an agent to increase cytokine production.

[0606] In other embodiments, the polynucleotides, polypeptides, antibodies, and/or agonists or antagonists of the present invention may be useful in preventing, diagnosing, and/or treating primary hematopoietic disorders.

[0607] Hyperproliferative Disorders

[0608] Polynucleotides or polypeptides of the invention, or agonists or antagonists thereof, can be used to treat, prevent, diagnose and/or prognose hyperproliferative diseases, disorders, and/or conditions, including neoplasms.

[0609] In a specific embodiment, polynucleotides or polypeptides of the invention, or agonists or antagonists thereof, can be used to treat, prevent, and/or diagnose hyperproliferative diseases, disorders, and/or conditions related to the polypeptides of the invention.

[0610] Polynucleotides or polypeptides of the invention, or agonists or antagonists of the invention, may inhibit the proliferation of the disorder through direct or indirect interactions. Alternatively, polynucleotides or polypeptides of the invention, or agonists or antagonists thereof, may proliferate other cells, which can inhibit the hyperproliferative disorder.

[0611] For example, by increasing an immune response, particularly increasing antigenic qualities of the hyperproliferative disorder or by proliferating, differentiating, or mobilizing T-cells, hyperproliferative diseases, disorders, and/or conditions can be treated, prevented, and/or diagnosed. This immune response may be increased by either enhancing an existing immune response, or by initiating a new immune response. Alternatively, decreasing an immune response may also be a method of treating, preventing, and/or diagnosing hyperproliferative diseases, disorders, and/or conditions, such as a chemotherapeutic agent.

[0612] Examples of hyperproliferative diseases, disorders, and/or conditions that can be treated, prevented, and/or diagnosed by polynucleotides or polypeptides of the invention, or agonists or antagonists thereof, include, but are not limited to neoplasms located in the: prostate, colon, abdomen, bone, breast, digestive system, liver, pancreas, peritoneum, endocrine glands (adrenal, parathyroid, pituitary, testicles, ovary, thymus, thyroid), eye, head and neck, nervous (central and peripheral), lymphatic system, pelvic, skin, soft tissue, spleen, thoracic, and urogenital.

[0613] Similarly, other hyperproliferative disorders can also be treated or detected by polynucleotides or polypeptides, or agonists or antagonists of the present invention. Examples of such hyperproliferative disorders include, but are not limited to: Acute Childhood Lymphoblastic Leukemia, Acute Lymphoblastic Leukemia, Acute Lymphocytic Leukemia, Acute Myeloid Leukemia, Adrenocortical Carcinoma, Adult (Primary) Hepatocellular Cancer, Adult (Primary) Liver Cancer, Adult Acute Lymphocytic Leukemia, Adult Acute Myeloid Leukemia, Adult Hodgkin's Disease, Adult Hodgkin's Lymphoma, Adult Lymphocytic Leukemia, Adult Non-Hodgkin's Lymphoma, Adult Primary Liver Cancer, Adult Soft Tissue Sarcoma, AIDS-Related Lymphoma, AIDS-Related Malignancies, Anal Cancer, Astrocytoma, Bile Duct Cancer, Bladder Cancer, Bone Cancer, Brain Stem Glioma, Brain Tumors, Breast Cancer, Cancer of the Renal Pelvis and Ureter, Central Nervous System (Primary) Lymphoma, Central Nervous System Lymphoma, Cerebellar Astrocytoma, Cerebral Astrocytoma, Cervical Cancer, Childhood (Primary) Hepatocellular Cancer, Childhood (Primary) Liver Cancer, Childhood Acute Lymphoblastic Leukemia, Childhood Acute Myeloid Leukemia, Childhood Brain Stem Glioma, Childhood Cerebellar Astrocytoma, Childhood Cerebral Astrocytoma, Childhood Extracranial Germ Cell Tumors, Childhood Hodgkin's Disease, Childhood Hodgkin's Lymphoma, Childhood Hypothalamic and Visual Pathway Glioma, Childhood Lymphoblastic Leukemia, Childhood Medulloblastoma, Childhood Non-Hodgkin's Lymphoma, Childhood Pineal and Supratentorial Primitive Neuroectodermal Tumors, Childhood Primary Liver Cancer, Childhood Rhabdomyosarcoma, Childhood Soft Tissue Sarcoma, Childhood Visual Pathway and Hypothalamic Glioma, Chronic Lymphocytic Leukemia, Chronic Myelogenous Leukemia, Colon Cancer, Cutaneous T-Cell Lymphoma, Endocrine Pancreas Islet Cell Carcinoma, Endometrial Cancer, Ependymoma, Epithelial Cancer, Esophageal Cancer, Ewing's Sarcoma and Related Tumors, Exocrine Pancreatic Cancer, Extracranial Germ Cell Tumor, Extragonadal Germ Cell Tumor, Extrahepatic Bile Duct Cancer, Eye Cancer, Female Breast Cancer, Gaucher's Disease, Gallbladder Cancer, Gastric Cancer, Gastrointestinal Carcinoid Tumor, Gastrointestinal Tumors, Germ Cell Tumors, Gestational Trophoblastic Tumor, Hairy Cell Leukemia, Head and Neck Cancer, Hepatocellular Cancer, Hodgkin's Disease, Hodgkin's Lymphoma, Hypergammaglobulinemia, Hypopharyngeal Cancer, Intestinal Cancers, Intraocular Melanoma, Islet Cell Carcinoma, Islet Cell Pancreatic Cancer, Kaposi's Sarcoma, Kidney Cancer, Laryngeal Cancer, Lip and Oral Cavity Cancer, Liver Cancer, Lung Cancer, Lymphoproliferative Disorders, Macroglobulinemia, Male Breast Cancer, Malignant Mesothelioma, Malignant Thymoma, Medulloblastoma, Melanoma, Mesothelioma, Metastatic Occult Primary Squamous Neck Cancer, Metastatic Primary Squamous Neck Cancer, Metastatic Squamous Neck Cancer, Multiple Myeloma, Multiple Myeloma/Plasma Cell Neoplasm, Myelodysplastic Syndrome, Myelogenous Leukemia, Myeloid Leukemia, Myeloproliferative Disorders, Nasal Cavity and Paranasal Sinus Cancer, Nasopharyngeal Cancer, Neuroblastoma, Non-Hodgkin's Lymphoma During Pregnancy, Nonmelanoma Skin Cancer, Non-Small Cell Lung Cancer, Occult Primary Metastatic Squamous Neck Cancer, Oropharyngeal Cancer, Osteo-/Malignant Fibrous Sarcoma, Osteosarcoma/Malignant Fibrous Histiocytoma, Osteosarcoma/Malignant Fibrous Histiocytoma of Bone, Ovarian Epithelial Cancer, Ovarian Germ Cell Tumor, Ovarian Low Malignant Potential Tumor, Pancreatic Cancer, Paraproteinemias, Purpura, Parathyroid Cancer, Penile Cancer, Pheochromocytoma, Pituitary Tumor, Plasma Cell Neoplasm/Multiple Myeloma, Primary Central Nervous System Lymphoma, Primary Liver Cancer, Prostate Cancer, Rectal Cancer, Renal Cell Cancer, Renal Pelvis and Ureter Cancer, Retinoblastoma, Rhabdomyosarcoma, Salivary Gland Cancer, Sarcoidosis Sarcomas, Sezary Syndrome, Skin Cancer, Small Cell Lung Cancer, Small Intestine Cancer, Soft Tissue Sarcoma, Squamous Neck Cancer, Stomach Cancer, Supratentorial Primitive Neuroectodermal and Pineal Tumors, T-Cell Lymphoma, Testicular Cancer, Thymoma, Thyroid Cancer, Transitional Cell Cancer of the Renal Pelvis and Ureter, Transitional Renal Pelvis and Ureter Cancer, Trophoblastic Tumors, Ureter and Renal Pelvis Cell Cancer, Urethral Cancer, Uterine Cancer, Uterine Sarcoma, Vaginal Cancer, Visual Pathway and Hypothalamic Glioma, Vulvar Cancer, Waldenstrom's Macroglobulinemia, Wilms' Tumor, and any other hyperproliferative disease, besides neoplasia, located in an organ system listed above.

[0614] In another preferred embodiment, polynucleotides or polypeptides, or agonists or antagonists of the present invention are used to diagnose, prognose, prevent, and/or treat premalignant conditions and to prevent progression to a neoplastic or malignant state, including but not limited to those disorders described above. Such uses are indicated in conditions known or suspected of preceding progression to neoplasia or cancer, in particular, where non-neoplastic cell growth consisting of hyperplasia, metaplasia, or most particularly, dysplasia has occurred (for review of such abnormal growth conditions, see Robbins and Angell, 1976, Basic Pathology, 2d Ed., W. B. Saunders Co., Philadelphia, pp. 68-79.)

[0615] Hyperplasia is a form of controlled cell proliferation, involving an increase in cell number in a tissue or organ, without significant alteration in structure or function. Hyperplastic disorders which can be diagnosed, prognosed, prevented, and/or treated with compositions of the invention (including polynucleotides, polypeptides, agonists or antagonists) include, but are not limited to, angiofollicular mediastinal lymph node hyperplasia, angiolymphoid hyperplasia with eosinophilia, atypical melanocytic hyperplasia, basal cell hyperplasia, benign giant lymph node hyperplasia, cementum hyperplasia, congenital adrenal hyperplasia, congenital sebaceous hyperplasia, cystic hyperplasia, cystic hyperplasia of the breast, denture hyperplasia, ductal hyperplasia, endometrial hyperplasia, fibromuscular hyperplasia, focal epithelial hyperplasia, gingival hyperplasia, inflammatory fibrous hyperplasia, inflammatory papillary hyperplasia, intravascular papillary endothelial hyperplasia, nodular hyperplasia of prostate, nodular regenerative hyperplasia, pseudoepitheliomatous hyperplasia, senile sebaceous hyperplasia, and verrucous hyperplasia.

[0616] Metaplasia is a form of controlled cell growth in which one type of adult or fully differentiated cell substitutes for another type of adult cell. Metaplastic disorders which can be diagnosed, prognosed, prevented, and/or treated with compositions of the invention (including polynucleotides, polypeptides, agonists or antagonists) include, but are not limited to, agnogenic myeloid metaplasia, apocrine metaplasia, atypical metaplasia, autoparenchymatous metaplasia, connective tissue metaplasia, epithelial metaplasia, intestinal metaplasia, metaplastic anemia, metaplastic ossification, metaplastic polyps, myeloid metaplasia, primary myeloid metaplasia, secondary myeloid metaplasia, squamous metaplasia, squamous metaplasia of amnion, and symptomatic myeloid metaplasia.

[0617] Dysplasia is frequently a forerunner of cancer, and is found mainly in the epithelia; it is the most disorderly form of non-neoplastic cell growth, involving a loss in individual cell uniformity and in the architectural orientation of cells. Dysplastic cells often have abnormally large, deeply stained nuclei, and exhibit pleomorphism. Dysplasia characteristically occurs where there exists chronic irritation or inflammation. Dysplastic disorders which can be diagnosed, prognosed, prevented, and/or treated with compositions of the invention (including polynucleotides, polypeptides, agonists or antagonists) include, but are not limited to, anhidrotic ectodermal dysplasia, anterofacial dysplasia, asphyxiating thoracic dysplasia, atriodigital dysplasia, bronchopulmonary dysplasia, cerebral dysplasia, cervical dysplasia, chondroectodermal dysplasia, cleidocranial dysplasia, congenital ectodermal dysplasia, craniodiaphysial dysplasia, craniocarpotarsal dysplasia, craniometaphysial dysplasia, dentin dysplasia, diaphysial dysplasia, ectodermal dysplasia, enamel dysplasia, encephalo-ophthalmic dysplasia, dysplasia epiphysialis hemimelia, dysplasia epiphysialis multiplex, dysplasia epiphysialis punctata, epithelial dysplasia, faciodigitogenital dysplasia, familial fibrous dysplasia of jaws, familial white folded dysplasia, fibromuscular dysplasia, fibrous dysplasia of bone, florid osseous dysplasia, hereditary renal-retinal dysplasia, hidrotic ectodermal dysplasia, hypohidrotic ectodermal dysplasia, lymphopenic thymic dysplasia, mammary dysplasia, mandibulofacial dysplasia, metaphysial dysplasia, Mondini dysplasia, monostotic fibrous dysplasia, mucoepithelial dysplasia, multiple epiphysial dysplasia, oculoauriculovertebral dysplasia, oculodentodigital dysplasia, oculovertebral dysplasia, odontogenic dysplasia, ophthalmomandibulomelic dysplasia, periapical cemental dysplasia, polyostotic fibrous dysplasia, pseudoachondroplastic spondyloepiphysial dysplasia, retinal dysplasia, septo-optic dysplasia, spondyloepiphysial dysplasia, and ventriculoradial dysplasia.

[0618] Additional pre-neoplastic disorders which can be diagnosed, prognosed, prevented, and/or treated with compositions of the invention (including polynucleotides, polypeptides, agonists or antagonists) include, but are not limited to, benign dysproliferative disorders (e.g., benign tumors, fibrocystic conditions, tissue hypertrophy, intestinal polyps, colon polyps, and esophageal dysplasia), leukoplakia, keratoses, Bowen's disease, Farmer's Skin, solar cheilitis, and solar keratosis.

[0619] In another embodiment, a polypeptide of the invention, or polynucleotides, antibodies, agonists, or antagonists corresponding to that polypeptide, may be used to diagnose and/or prognose disorders associated with the tissue(s) in which the polypeptide of the invention is expressed, including one, two, three, four, five, or more tissues disclosed in Table 1, 7 (Tissue Distribution Library Code).

[0620] In another embodiment, polynucleotides, polypeptides, antibodies, and/or agonists or antagonists of the present invention conjugated to a toxin or a radioactive isotope, as described herein, may be used to treat cancers and neoplasms, including, but not limited to those described herein. In a further preferred embodiment, polynucleotides, polypeptides, antibodies, and/or agonists or antagonists of the present invention conjugated to a toxin or a radioactive isotope, as described herein, may be used to treat acute myelogenous leukemia.

[0621] Additionally, polynucleotides, polypeptides, and/or agonists or antagonists of the invention may affect apoptosis, and therefore, would be useful in treating a number of diseases associated with increased cell survival or the inhibition of apoptosis. For example, diseases associated with increased cell survival or the inhibition of apoptosis that could be diagnosed, prognosed, prevented, and/or treated by polynucleotides, polypeptides, and/or agonists or antagonists of the invention, include cancers (such as follicular lymphomas, carcinomas with p53 mutations, and hormone-dependent tumors, including, but not limited to colon cancer, cardiac tumors, pancreatic cancer, melanoma, retinoblastoma, glioblastoma, lung cancer, intestinal cancer, testicular cancer, stomach cancer, neuroblastoma, myxoma, myoma, lymphoma, endothelioma, osteoblastoma, osteoclastoma, osteosarcoma, chondrosarcoma, adenoma, breast cancer, prostate cancer, Kaposi's sarcoma and ovarian cancer); autoimmune disorders such as, multiple sclerosis, Sjogren's syndrome, Hashimoto's thyroiditis, biliary cirrhosis, Behcet's disease, Crohn's disease, polymyositis, systemic lupus erythematosus and immune-related glomerulonephritis and rheumatoid arthritis) and viral infections (such as herpes viruses, pox viruses and adenoviruses), inflammation, graft v. host disease, acute graft rejection, and chronic graft rejection.

[0622] In preferred embodiments, polynucleotides, polypeptides, and/or agonists or antagonists of the invention are used to inhibit growth, progression, and/or metastasis of cancers, in particular those listed above.

[0623] Additional diseases or conditions associated with increased cell survival that could be diagnosed, prognosed, prevented, and/or treated by polynucleotides, polypeptides, and/or agonists or antagonists of the invention, include, but are not limited to, progression, and/or metastases of malignancies and related disorders such as leukemia (including acute leukemias (e.g., acute lymphocytic leukemia, acute myelocytic leukemia (including myeloblastic, promyelocytic, myelomonocytic, monocytic, and erythroleukemia)) and chronic leukemias (e.g., chronic myelocytic (granulocytic) leukemia and chronic lymphocytic leukemia)), polycythemia vera, lymphomas (e.g., Hodgkin's disease and non-Hodgkin's disease), multiple myeloma, Waldenstrom's macroglobulinemia, heavy chain disease, and solid tumors including, but not limited to, sarcomas and carcinomas such as fibrosarcoma, myxosarcoma, liposarcoma, chondrosarcoma, osteogenic sarcoma, chordoma, angiosarcoma, endotheliosarcoma, lymphangiosarcoma, lymphangioendotheliosarcoma, synovioma, mesothelioma, Ewing's tumor, leiomyosarcoma, rhabdomyosarcoma, colon carcinoma, pancreatic cancer, breast cancer, ovarian cancer, prostate cancer, squamous cell carcinoma, basal cell carcinoma, adenocarcinoma, sweat gland carcinoma, sebaceous gland carcinoma, papillary carcinoma, papillary adenocarcinomas, cystadenocarcinoma, medullary carcinoma, bronchogenic carcinoma, renal cell carcinoma, hepatoma, bile duct carcinoma, choriocarcinoma, seminoma, embryonal carcinoma, Wilm's tumor, cervical cancer, testicular tumor, lung carcinoma, small cell lung carcinoma, bladder carcinoma, epithelial carcinoma, glioma, astrocytoma, medulloblastoma, craniopharyngioma, ependymoma, pinealoma, emangioblastoma, acoustic neuroma, oligodendroglioma, menangioma, melanoma, neuroblastoma, and retinoblastoma.

[0624] Diseases associated with increased apoptosis that could be diagnosed, prognosed, prevented, and/or treated by polynucleotides, polypeptides, and/or agonists or antagonists of the invention, include AIDS; neurodegenerative disorders (such as Alzheimer's disease, Parkinson's disease, amyotrophic lateral sclerosis, retinitis pigmentosa, cerebellar degeneration and brain tumor or prior associated disease); autoimmune disorders (such as, multiple sclerosis, Sjogren's syndrome, Hashimoto's thyroiditis, biliary cirrhosis, Behcet's disease, Crohn's disease, polymyositis, systemic lupus erythematosus and immune-related glomerulonephritis and rheumatoid arthritis) myelodysplastic syndromes (such as aplastic anemia), graft v. host disease, ischemic injury (such as that caused by myocardial infarction, stroke and reperfusion injury), liver injury (e.g., hepatitis related liver injury, ischemia/reperfusion injury, cholestosis (bile duct injury) and liver cancer); toxin-induced liver disease (such as that caused by alcohol), septic shock, cachexia and anorexia.

[0625] Hyperproliferative diseases and/or disorders that could be diagnosed, prognosed, prevented, and/or treated by polynucleotides, polypeptides, and/or agonists or antagonists of the invention, include, but are not limited to, neoplasms located in the liver, abdomen, bone, breast, digestive system, pancreas, peritoneum, endocrine glands (adrenal, parathyroid, pituitary, testicles, ovary, thymus, thyroid), eye, head and neck, nervous system (central and peripheral), lymphatic system, pelvis, skin, soft tissue, spleen, thorax, and urogenital tract.

[0626] Similarly, other hyperproliferative disorders can also be diagnosed, prognosed, prevented, and/or treated by polynucleotides, polypeptides, and/or agonists or antagonists of the invention. Examples of such hyperproliferative disorders include, but are not limited to: hypergammaglobulinemia, lymphoproliferative disorders, paraproteinemias, purpura, sarcoidosis, Sezary Syndrome, Waldenstron's macroglobulinemia, Gaucher's Disease, histiocytosis, and any other hyperproliferative disease, besides neoplasia, located in an organ system listed above.

[0627] One preferred embodiment utilizes polynucleotides of the present invention to inhibit aberrant cellular division, by gene therapy using the present invention, and/or protein fusions or fragments thereof.

[0628] Thus, the present invention provides a method for treating cell proliferative diseases, disorders, and/or conditions by inserting into an abnormally proliferating cell a polynucleotide of the present invention, wherein said polynucleotide represses said cell proliferation, disease, disorder, and/or condition.

[0629] In a preferred embodiment, the present invention provides a method for treating cell proliferative diseases, disorders and/or conditions of the colon cancer by inserting into a cell, a polynucleotide of the present invention, wherein said polynucleotide represses said cell proliferation, disease and/or disorder.

[0630] Another embodiment of the present invention provides a method of treating cell-proliferative diseases, disorders, and/or conditions in individuals comprising administration of one or more active gene copies of the present invention to an abnormally proliferating cell or cells. In a preferred embodiment, polynucleotides of the present invention is a DNA construct comprising a recombinant expression vector effective in expressing a DNA sequence encoding said polynucleotides. In another preferred embodiment of the present invention, the DNA construct encoding the polynucleotides of the present invention is inserted into cells to be treated utilizing a retrovirus, or more preferably an adenoviral vector (see, e.g., G J. Nabel, et. al., PNAS 96: 324-326 (1999), which is hereby incorporated by reference). In a most preferred embodiment, the viral vector is defective and will not transform non-proliferating cells, only proliferating cells. Moreover, in a preferred embodiment, the polynucleotides of the present invention inserted into proliferating cells either alone, or in combination with or fused to other polynucleotides, can then be modulated via an external stimulus (i.e., magnetic, specific small molecule, chemical, or drug administration, etc.), which acts upon the promoter upstream of said polynucleotides to induce expression of the encoded protein product. As such the beneficial therapeutic affect of the present invention may be expressly modulated (i.e., to increase, decrease, or inhibit expression of the present invention) based upon said external stimulus.

[0631] Polynucleotides of the present invention may be useful in repressing expression of oncogenic genes or antigens. By “repressing expression of the oncogenic genes ” is intended the suppression of the transcription of the gene, the degradation of the gene transcript (pre-message RNA), the inhibition of splicing, the destruction of the messenger RNA, the prevention of the post-translational modifications of the protein, the destruction of the protein, or the inhibition of the normal function of the protein.

[0632] For local administration to abnormally proliferating cells, polynucleotides of the present invention may be administered by any method known to those of skill in the art including, but not limited to transfection, electroporation, microinjection of cells, or in vehicles such as liposomes, lipofectin, or as naked polynucleotides, or any other method described throughout the specification. The polynucleotide of the present invention may be delivered by known gene delivery systems such as, but not limited to, retroviral vectors (Gilboa, J. Virology 44:845 (1982); Hocke, Nature 320:275 (1986); Wilson, et al., Proc. Natl. Acad. Sci. U.S.A. 85:3014), vaccinia virus system (Chakrabarty et al., Mol. Cell Biol. 5:3403 (1985) or other efficient DNA delivery systems (Yates et al., Nature 313:812 (1985)) known to those skilled in the art. These references are exemplary only and are hereby incorporated by reference. In order to specifically deliver or transfect cells which are abnormally proliferating and spare non-dividing cells, it is preferable to utilize a retrovirus, or adenoviral (as described in the art and elsewhere herein) delivery system known to those of skill in the art. Since host DNA replication is required for retroviral DNA to integrate and the retrovirus will be unable to self replicate due to the lack of the retrovirus genes needed for its life cycle. Utilizing such a retroviral delivery system for polynucleotides of the present invention will target said gene and constructs to abnormally proliferating cells and will spare the non-dividing normal cells.

[0633] The polynucleotides of the present invention may be delivered directly to cell proliferative disorder/disease sites in internal organs, body cavities and the like by use of imaging devices used to guide an injecting needle directly to the disease site. The polynucleotides of the present invention may also be administered to disease sites at the time of surgical intervention.

[0634] By “cell proliferative disease” is meant any human or animal disease or disorder, affecting any one or any combination of organs, cavities, or body parts, which is characterized by single or multiple local abnormal proliferations of cells, groups of cells, or tissues, whether benign or malignant.

[0635] Any amount of the polynucleotides of the present invention may be administered as long as it has a biologically inhibiting effect on the proliferation of the treated cells. Moreover, it is possible to administer more than one of the polynucleotide of the present invention simultaneously to the same site. By “biologically inhibiting” is meant partial or total growth inhibition as well as decreases in the rate of proliferation or growth of the cells. The biologically inhibitory dose may be determined by assessing the effects of the polynucleotides of the present invention on target malignant or abnormally proliferating cell growth in tissue culture, tumor growth in animals and cell cultures, or any other method known to one of ordinary skill in the art.

[0636] The present invention is further directed to antibody-based therapies which involve administering of anti-polypeptides and anti-polynucleotide antibodies to a mammalian, preferably human, patient for treating one or more of the described diseases, disorders, and/or conditions. Methods for producing anti-polypeptides and anti-polynucleotide antibodies polyclonal and monoclonal antibodies are described in detail elsewhere herein. Such antibodies may be provided in pharmaceutically acceptable compositions as known in the art or as described herein.

[0637] A summary of the ways in which the antibodies of the present invention may be used therapeutically includes binding polynucleotides or polypeptides of the present invention locally or systemically in the body or by direct cytotoxicity of the antibody, e.g., as mediated by complement (CDC) or by effector cells (ADCC). Some of these approaches are described in more detail below. Armed with the teachings provided herein, one of ordinary skill in the art will know how to use the antibodies of the present invention for diagnostic, monitoring or therapeutic purposes without undue experimentation.

[0638] In particular, the antibodies, fragments and derivatives of the present invention are useful for treating a subject having or developing cell proliferative and/or differentiation diseases, disorders, and/or conditions as described herein. Such treatment comprises administering a single or multiple doses of the antibody, or a fragment, derivative, or a conjugate thereof.

[0639] The antibodies of this invention may be advantageously utilized in combination with other monoclonal or chimeric antibodies, or with lymphokines or hematopoietic growth factors, for example, which serve to increase the number or activity of effector cells which interact with the antibodies.

[0640] It is preferred to use high affinity and/or potent in vivo inhibiting and/or neutralizing antibodies against polypeptides or polynucleotides of the present invention, fragments or regions thereof, for both immunoassays directed to and therapy of diseases, disorders, and/or conditions related to polynucleotides or polypeptides, including fragments thereof, of the present invention. Such antibodies, fragments, or regions, will preferably have an affinity for polynucleotides or polypeptides, including fragments thereof. Preferred binding affinities include those with a dissociation constant or Kd less than 5×10⁻⁶M, 10⁻⁶M, 5×10⁻⁷M, 10⁻⁷M, 5×10⁻⁸M, 10⁻⁸M, 5×10⁻⁹M, 10⁻⁹M, 5×10⁻¹⁰M, 10⁻¹⁰M, 5×10⁻¹¹M, 10⁻¹¹M, 5×10⁻¹²M, 10⁻¹²M, 5×10⁻¹³M, 10⁻¹³M, 5×10⁻¹⁴M, 10⁻¹⁴M, 5×10⁻¹⁵M, and 10⁻¹⁵M.

[0641] Moreover, polypeptides of the present invention or fragments thereof, are useful in inhibiting the angiogenesis of proliferative cells or tissues, either alone, as a protein fusion, or in combination with other polypeptides directly or indirectly, as described elsewhere herein. In a most preferred embodiment, said anti-angiogenesis effect may be achieved indirectly, for example, through the inhibition of hematopoietic, tumor-specific cells, such as tumor-associated macrophages (see, e.g., Joseph I B, et al. J Natl Cancer Inst, 90(21):1648-53 (1998), which is hereby incorporated by reference). Antibodies directed to polypeptides or polynucleotides of the present invention may also result in inhibition of angiogenesis directly, or indirectly (see, e.g., Witte L, et al., Cancer Metastasis Rev. 17(2):155-61 (1998), which is hereby incorporated by reference)).

[0642] Polypeptides, including protein fusions, of the present invention, or fragments thereof may be useful in inhibiting proliferative cells or tissues through the induction of apoptosis. Said polypeptides may act either directly, or indirectly to induce apoptosis of proliferative cells and tissues, for example in the activation of a death-domain receptor, such as tumor necrosis factor (TNF) receptor-1, CD95 (Fas/APO-1), TNF-receptor-related apoptosis-mediated protein (TRAMP) and TNF-related apoptosis-inducing ligand (TRAIL) receptor-1 and -2 (see, e.g., Schulze-Osthoff K, et.al., Eur J Biochem 254(3):439-59 (1998), which is hereby incorporated by reference). Moreover, in another preferred embodiment of the present invention, said polypeptides may induce apoptosis through other mechanisms, such as in the activation of other proteins which will activate apoptosis, or through stimulating the expression of said proteins, either alone or in combination with small molecule drugs or adjuvants, such as apoptonin, galectins, thioredoxins, antiinflammatory proteins (See for example, Mutat. Res. 400(1-2):447-55 (1998), Med Hypotheses.50(5):423-33 (1998), Chem. Biol. Interact. April 24;111-112:23-34 (1998), J. Mo. Med. 76(6):402-12 (1998), Int. J. Tissue React. 20(1):3-15 (1998), which are all hereby incorporated by reference).

[0643] Polypeptides, including protein fusions to, or fragments thereof, of the present invention are useful in inhibiting the metastasis of proliferative cells or tissues. Inhibition may occur as a direct result of administering polypeptides, or antibodies directed to said polypeptides as described elsewhere herein, or indirectly, such as activating the expression of proteins known to inhibit metastasis, for example alpha 4 integrins, (See, e.g., Curr Top Microbiol Immunol 1998;231:125-41, which is hereby incorporated by reference). Such therapeutic affects of the present invention may be achieved either alone, or in combination with small molecule drugs or adjuvants.

[0644] In another embodiment, the invention provides a method of delivering compositions containing the polypeptides of the invention (e.g., compositions containing polypeptides or anti-plasma membrane associated antigen polypeptide antibodies associated with heterologous polypeptides, heterologous nucleic acids, toxins, or prodrugs) to targeted cells expressing the polypeptide of the present invention. Polypeptides or antibodies raised against the polypeptides of the invention may be associated with heterologous polypeptides, heterologous nucleic acids, toxins, or prodrugs via hydrophobic, hydrophilic, ionic and/or covalent interactions.

[0645] Polypeptides, protein fusions to, or fragments thereof, of the present invention are useful in enhancing the immunogenicity and/or antigenicity of proliferating cells or tissues, either directly, such as would occur if the polypeptides of the present invention ‘vaccinated’ the immune response to respond to proliferative antigens and immunogens, or indirectly, such as in activating the expression of proteins known to enhance the immune response (e.g. chemokines), to said antigens and immunogens.

[0646] Urinary System Disorders

[0647] Polynucleotides, polypeptides, antibodies, and/or agonists or antagonists of the present invention, may be used to treat, prevent, diagnose, and/or prognose disorders of the urinary system, including but not limited to disorders of the renal system, bladder, ureters, and urethra. Renal disorders include, but are not limited to, kidney failure, nephritis, blood vessel disorders of kidney, metabolic and congenital kidney disorders, urinary disorders of the kidney, autoimmune disorders, sclerosis and necrosis, electrolyte imbalance, and kidney cancers.

[0648] Kidney failure diseases include, but are not limited to, acute kidney failure, chronic kidney failure, atheroembolic renal failure, and end-stage renal disease. Inflammatory diseases of the kidney include acute glomerulonephritis, postinfectious glomerulonephritis, rapidly progressive glomerulonephritis, nephrotic syndrome, membranous glomerulonephritis, familial nephrotic syndrome, membranoproliferative glomerulonephritis I and II, mesangial proliferative glomerulonephritis, chronic glomerulonephritis, acute tubulointerstitial nephritis, chronic tubulointerstitial nephritis, acute post-streptococcal glomerulonephritis (PSGN), pyelonephritis, lupus nephritis, chronic nephritis, interstitial nephritis, and post-streptococcal glomerulonephritis.

[0649] Blood vessel disorders of the kidneys include, but are not limited to, kidney infarction, atheroembolic kidney disease, cortical necrosis, malignant nephrosclerosis, renal vein thrombosis, renal underperfusion, renal ischemia-reperfusion, renal artery embolism, and renal artery stenosis. Kidney disorders resulting form urinary tract problems include, but are not limited to, pyelonephritis, hydronephrosis, urolithiasis (renal lithiasis, nephrolithiasis), reflux nephropathy, urinary tract infections, urinary retention, and acute or chronic unilateral obstructive uropathy.

[0650] Metabolic and congenital disorders of the kidneys include, but are not limited to, renal tubular acidosis, renal glycosuria, nephrogenic diabetes insipidus, cystinuria, Fanconi's syndrome, vitamin D-resistant rickets, Hartnup disease, Bartter's syndrome, Liddle's syndrome, polycystic kidney disease, medullary cystic disease, medullary sponge kidney, Alport's syndrome, nail-patella syndrome, congenital nephrotic syndrome, CRUSH syndrome, horseshoe kidney, diabetic nephropathy, nephrogenic diabetes insipidus, analgesic nephropathy, kidney stones, and membranous nephropathy, Kidney disorders resulting from an autoimmune response include, but are not limited to, systemic lupus erythematosus (SLE), Goodpasture syndrome, IgA nephropathy, and IgM mesangial proliferative glomerulonephritis.

[0651] Sclerotic or necrotic disorders of the kidney include, but are not limited to, glomerulosclerosis, diabetic nephropathy, focal segmental glomerulosclerosis (FSGS), necrotizing glomerulonephritis, and renal papillary necrosis. Kidneys may also develop carcinomas, including, but not limited to, hypernephroma, nephroblastoma, renal cell cancer, transitional cell cancer, squamous cell cancer, and Wilm's tumor.

[0652] Kidney disorders may also result in electrolyte imbalances, including, but not limited to, nephrocalcinosis, pyuria, edema, hydroneplritis, proteinuria, hyponatremia, hypematremia, hypokalemia, hyperkalemia, hypocalcemia, hypercalcemia, hypophosphatemia, and hyperphosphatemia.

[0653] Bladder disorders include, but are not limited to, benign prostatic hyperplasia (BPH), interstitial cystitis (IC), prostatitis, proteinuria, urinary tract infections, urinary incontinence, urinary retention. Disorders of the ureters and urethra include, but are not limited to, acute or chronic unilateral obstructive uropathy. The bladder, ureters, and urethra may also develop carcinomas, including, but not limited to, superficial bladder cancer, invasive bladder cancer, carcinoma of the ureter, and urethra cancers.

[0654] Polypeptides may be administered using any method known in the art, including, but not limited to, direct needle injection at the delivery site, intravenous injection, topical administration, catheter infusion, biolistic injectors, particle accelerators, gelfoam sponge depots, other commercially available depot materials, osmotic pumps, oral or suppositorial solid pharmaceutical formulations, decanting or topical applications during surgery, aerosol delivery. Such methods are known in the art. Polypeptides may be administered as part of a Therapeutic, described in more detail below. Methods of delivering polynucleotides are described in more detail herein.

[0655] Cardiovascular Disorders

[0656] Polynucleotides or polypeptides, or agonists or antagonists of the present invention, may be used to treat, prevent, diagnose, and/or prognose cardiovascular disorders, including, but not limited to, peripheral artery disease, such as limb ischemia.

[0657] Cardiovascular disorders include cardiovascular abnormalities, such as arterio-arterial fistula, arteriovenous fistula, cerebral arteriovenous malformations, congenital heart defects, pulmonary atresia, and Scimitar Syndrome. Congenital heart defects include aortic coarctation, cor triatriatum, coronary vessel anomalies, crisscross heart, dextrocardia, patent ductus arteriosus, Ebstein's anomaly, Eisenmenger complex, hypoplastic left heart syndrome,: levocardia, tetralogy of fallot, transposition of great vessels, double outlet right ventricle, tricuspid atresia, persistent truncus arteriosus, total anomalous pulmonary venous connection, hypoplastic left heart syndrome, and heart septal defects, such as aortopulmonary septal defect, endocardial cushion defects, Lutembacher's Syndrome, atrioventricular canal defect, trilogy of Fallot, ventricular heart septal defects.

[0658] Cardiovascular disorders also include heart disease, such as arrhythmias, carcinoid heart disease, high cardiac output, low cardiac output, cardiac tamponade, endocarditis (including bacterial), heart aneurysm, cardiac arrest, sudden cardiac death, congestive heart failure, congestive cardiomyopathy, paroxysmal dyspnea, cardiac edema, heart hypertrophy, congestive cardiomyopathy, left ventricular hypertrophy, right ventricular hypertrophy, post-infarction heart rupture, ventricular septal rupture, heart valve diseases, myocardial diseases, myocardial ischemia, pericardial effusion, pericarditis (including constrictive and tuberculous), pneumopericardium, postpericardiotomy syndrome, pulmonary heart disease, rheumatic heart disease, ventricular dysfunction, hyperemia, cardiovascular pregnancy complications, Scimitar Syndrome, diastolic dysfunction, enlarged heart, heart block, J-curve phenomenon, rheumatic heart disease, Marfan syndrome, cardiovascular syphilis, and cardiovascular tuberculosis.

[0659] Arrhythmias include sinus arrhythmia, atrial fibrillation, atrial flutter, bradycardia, extrasystole, Adams-Stokes Syndrome, bundle-branch block, sinoatrial block, long QT syndrome, parasystole, Lown-Ganong-Levine Syndrome, Mahaim-type pre-excitation syndrome, Wolff-Parkinson-White syndrome, sick sinus syndrome, tachycardias, and ventricular fibrillation. Tachycardias include paroxysmal tachycardia, supraventricular tachycardia, accelerated idioventricular rhythm, atrioventricular nodal reentry tachycardia, ectopic atrial tachycardia, ectopic junctional tachycardia, sinoatrial nodal reentry tachycardia, sinus tachycardia, Torsades de Pointes, and ventricular tachycardia.

[0660] Heart valve disease include aortic valve insufficiency, aortic valve stenosis, heart murmurs, aortic valve prolapse, mitral valve prolapse, tricuspid valve prolapse, mitral valve insufficiency, mitral valve stenosis, pulmonary atresia, pulmonary valve insufficiency, pulmonary valve stenosis, tricuspid atresia, tricuspid valve insufficiency, tricuspid valve stenosis, and bicuspid aortic valve.

[0661] Myocardial diseases include alcoholic cardiomyopathy, congestive cardiomyopathy, hypertrophic cardiomyopathy, aortic subvalvular stenosis, pulmonary subvalvular stenosis, restrictive cardiomyopathy, Chagas cardiomyopathy, endocardial fibroelastosis, endomyocardial fibrosis, Kearns Syndrome, Barth syndrome, myocardial reperfusion injury, and myocarditis.

[0662] Myocardial ischemias include coronary disease, such as angina pectoris, Prinzmetal's angina, unstable angina, coronary aneurysm, coronary arteriosclerosis, coronary thrombosis, coronary vasospasm, myocardial infarction and myocardial stunning.

[0663] Cardiovascular diseases also include vascular diseases such as aneurysms, angiodysplasia, angiomatosis, bacillary angiomatosis, Hippel-Lindau Disease, Klippel-Trenaunay-Weber Syndrome, Sturge-Weber Syndrome, angioneurotic edema, aortic diseases, Takayasu's Arteritis, aortitis, Leriche's Syndrome, arterial occlusive diseases, arteritis, enarteritis, polyarteritis nodosa, cerebrovascular disorders, diabetic angiopathies, diabetic retinopathy, embolisms, thrombosis, erythromelalgia, hemorrhoids, hepatic veno-occlusive disease, hypertension, hypotension (shock), ischemia, peripheral vascular diseases, phlebitis, superficial phlebitis, pulmonary veno-occlusive disease, chronic obstructive pulmonary disease, Buerger's disease, Raynaud's disease, CREST syndrome, retinal vein occlusion, Scimitar syndrome, superior vena cava syndrome, telangiectasia, atacia telangiectasia, hereditary hemorrhagic telangiectasia, deep vein thrombosis, varicocele, varicose veins, varicose ulcer, vasculitis, and venous insufficiency.

[0664] Aneurysms include dissecting aneurysms, false aneurysms, infected aneurysms, ruptured aneurysms, aortic aneurysms, cerebral aneurysms, coronary aneurysms, heart aneurysms, and iliac aneurysms.

[0665] Arterial occlusive diseases include arteriosclerosis, arteriolosclerosis, atherosclerosis, intermittent claudication, carotid stenosis, fibromuscular dysplasias, mesenteric vascular occlusion, Moyamoya disease, renal artery obstruction, retinal artery occlusion, and thromboangiitis obliterans.

[0666] Cerebrovascular disorders include carotid artery diseases, cerebral amyloid angiopathy, cerebral aneurysm, cerebral anoxia, cerebral arteriosclerosis, cerebral arteriovenous malformation, cerebral artery diseases, cerebral embolism and thrombosis, carotid artery thrombosis, sinus thrombosis, Wallenberg's syndrome, cerebral hemorrhage, epidural hematoma, subdural hematoma, subaraxhnoid hemorrhage, cerebral infarction, cerebral ischemia (including transient), subclavian steal syndrome, periventricular leukomalacia, vascular headache, cluster headache, migraine, and vertebrobasilar insufficiency.

[0667] Embolisms include air embolisms, amniotic fluid embolisms, cholesterol embolisms, blue toe syndrome, fat embolisms, pulmonary embolisms, and thromoboembolisms. Thrombosis include coronary thrombosis, hepatic vein thrombosis, deep vein thrombosis, retinal vein occlusion, carotid artery thrombosis, sinus thrombosis, Wallenberg's syndrome, and thrombophlebitis.

[0668] Ischemia includes cerebral ischemia, ischemic colitis, silent ischemia, compartment syndromes, anterior compartment syndrome, myocardial ischemia, reperfusion injuries, and peripheral limb ischemia. Vasculitis includes aortitis, arteritis, Behcet's Syndrome, Churg-Strauss Syndrome, mucocutaneous lymph node syndrome, thromboangiitis obliterans, hypersensitivity vasculitis, Schoenlein-Henoch purpura, allergic cutaneous vasculitis, and Wegener's granulomatosis.

[0669] Cardiovascular diseases can also occur due to electrolyte imbalances that include, but are not limited to hyponatremia, hyperuatremia, hypokalemia, hyperkalemia, hypocalcemia, hypercalcemia, hypophosphatemia, and hyperphophatemia. Neoplasm and/or cancers of the cardiovascular system include, but are not limited to, myxomas, fibromas, and rhabdomyomas.

[0670] Polypeptides may be administered using any method known in the art, including, but not limited to, direct needle injection at the delivery site, intravenous injection, topical administration, catheter infusion, biolistic injectors, particle accelerators, gelfoam sponge depots, other commercially available depot materials, osmotic pumps, oral or suppositorial solid pharmaceutical formulations, decanting or topical applications during surgery, aerosol delivery. Such methods are known in the art. Polypeptides may be administered as part of a Therapeutic, described in more detail below. Methods of delivering polynucleotides are described in more detail herein.

[0671] Respiratory Disorders

[0672] Polynucleotides or polypeptides, or agonists or antagonists of the present invention may be used to treat, prevent, diagnose, and/or prognose diseases and/or disorders of the respiratory system.

[0673] Diseases and disorders of the respiratory system include, but are not limited to, nasal vestibulitis, nonallergic rhinitis (e.g., acute rhinitis, chronic rhinitis, atrophic rhinitis, vasomotor rhinitis), nasal polyps, and sinusitis, juvenile angiofibromas, cancer of the nose and juvenile papillomas, vocal cord polyps, nodules (singer's nodules), contact ulcers, vocal cord paralysis, laryngoceles, pharyngitis (e.g., viral and bacterial), tonsillitis, tonsillar cellulitis, parapharyngeal abscess, laryngitis, laryngoceles, and throat cancers (e.g., cancer of the nasopharynx, tonsil cancer, larynx cancer), lung cancer (e.g., squamous cell carcinoma, small cell (oat cell) carcinoma, large cell carcinoma, and adenocarcinoma), allergic disorders (eosinophilic pneumonia, hypersensitivity pneumonitis (e.g., extrinsic allergic alveolitis, allergic interstitial pneumonitis, organic dust pneumoconiosis, allergic bronchopulmonary aspergillosis, asthma, Wegener's granulomatosis (granulomatous vasculitis), Goodpasture's syndrome)), pneumonia (e.g., bacterial pneumonia (e.g., Streptococcus pneumoniae (pneumoncoccal pneumonia), Staphylococcus aureus (staphylococcal pneumonia), Gram-negative bacterial pneumonia (caused by, e.g., Klebsiella and Pseudomas spp.), Mycoplasma pneumoniae pneumonia, Hemophilus influenzae pneumonia, Legionella pneumophila (Legionnaires' disease), and Chlamydia psittaci (Psittacosis)), and viral pneumonia (e.g., influenza, chickenpox (varicella).

[0674] Additional diseases and disorders of the respiratory system include, but are not limited to bronchiolitis, polio (poliomyelitis), croup, respiratory syncytial viral infection, mumps, erythema infectiosum (fifth disease), roseola infantum, progressive rubella panencephalitis, german measles, and subacute sclerosing panencephalitis), fungal pneumonia (e.g., Histoplasmosis, Coccidioidomycosis, Blastomycosis, fungal infections in people with severely suppressed immune systems (e.g., cryptococcosis, caused by Cryptococcus neoformans; aspergillosis, caused by Aspergillus spp.; candidiasis, caused by Candida; and mucormycosis)), Pneumocystis carinii (pneumocystis pneumonia), atypical pneumonias (e.g., Mycoplasma and Chlamydia spp.), opportunistic infection pneumonia, nosocomial pneumonia, chemical pneumonitis, and aspiration pneumonia, pleural disorders (e.g., pleurisy, pleural effusion, and pneumothorax (e.g., simple spontaneous pneumothorax, complicated spontaneous pneumothorax, tension pneumothorax)), obstructive airway diseases (e.g., asthma, chronic obstructive pulmonary disease (COPD), emphysema, chronic or acute bronchitis), occupational lung diseases (e.g., silicosis, black lung (coal workers' pneumoconiosis), asbestosis, berylliosis, occupational asthsma, byssinosis, and benign pneumoconioses), Infiltrative Lung Disease (e.g., pulmonary fibrosis (e.g., fibrosing alveolitis, usual interstitial pneumonia), idiopathic pulmonary fibrosis, desquamative interstitial pneumonia, lymphoid interstitial pneumonia, histiocytosis X (e.g., Letterer-Siwe disease, Hand-Schüller-Christian disease, eosinophilic granuloma), idiopathic pulmonary hemosiderosis, sarcoidosis and pulmonary alveolar proteinosis), Acute respiratory distress syndrome (also called, e.g., adult respiratory distress syndrome), edema, pulmonary embolism, bronchitis (e.g., viral, bacterial), bronchiectasis, atelectasis, lung abscess (caused by, e.g., Staphylococcus aureus or Legionella pneumophila), and cystic fibrosis.

[0675] Anti-Angiogenesis Activity

[0676] The naturally occurring balance between endogenous stimulators and inhibitors of angiogenesis is one in which inhibitory influences predominate. Rastinejad et al., Cell 56:345-355 (1989). In those rare instances in which neovascularization occurs under normal physiological conditions, such as wound healing, organ regeneration, embryonic development, and female reproductive processes, angiogenesis is stringently regulated and spatially and temporally delimited. Under conditions of pathological angiogenesis such as that characterizing solid tumor growth, these regulatory controls fail. Unregulated angiogenesis becomes pathologic and sustains progression of many neoplastic and non-neoplastic diseases. A number of serious diseases are dominated by abnormal neovascularization including solid tumor growth and metastases, arthritis, some types of eye disorders, and psoriasis. See, e.g., reviews by Moses et al., Biotech. 9:630-634 (1991); Folkman et al., N. Engl. J. Med., 333:1757-1763 (1995); Auerbach et al., J. Microvasc. Res. 29:401-411 (1985); Folkman, Advances in Cancer Research, eds. Klein and Weinhouse, Academic Press, New York, pp. 175-203 (1985); Patz, Am. J. Opthalmol. 94:715-743 (1982); and Folkman et al., Science 221:719-725 (1983). In a number of pathological conditions, the process of angiogenesis contributes to the disease state. For example, significant data have accumulated which suggest that the growth of solid tumors is dependent on angiogenesis. Folkman and Klagsbrun, Science 235:442-447 (1987).

[0677] The present invention provides for treatment of diseases or disorders associated with neovascularization by administration of the polynucleotides and/or polypeptides of the invention, as well as agonists or antagonists of the present invention. Malignant and metastatic conditions which can be treated with the polynucleotides and polypeptides, or agonists or antagonists of the invention include, but are not limited to, malignancies, solid tumors, and cancers described herein and otherwise known in the art (for a review of such disorders, see Fishman et al., Medicine, 2d Ed., J. B. Lippincott Co., Philadelphia (1985)). Thus, the present invention provides a method of treating an angiogenesis-related disease and/or disorder, comprising administration to an individual in need thereof a therapeutically effective amount of a polynucleotide, polypeptide, antagonist and/or agonist of the invention. For example, polynucleotides, polypeptides, antagonists and/or agonists may be utilized in a variety of additional methods in order to therapeutically treat a cancer or tumor. Cancers which may be treated with polynucleotides, polypeptides, antagonists and/or agonists include, but are not limited to solid tumors, including prostate, lung, breast, ovarian, stomach, pancreas, larynx, esophagus, testes, liver, parotid, biliary tract, colon, rectum, cervix, uterus, endometrium, kidney, bladder, thyroid cancer; primary tumors and metastases; melanomas; glioblastoma; Kaposi's sarcoma; leiomyosarcoma; non-small cell lung cancer; colon cancer; advanced malignancies; and blood born tumors such as leukemias. For example, polynucleotides, polypeptides, antagonists and/or agonists may be delivered topically, in order to treat cancers such as skin cancer, head and neck tumors, breast tumors, and Kaposi's sarcoma.

[0678] Within yet other aspects, polynucleotides, polypeptides, antagonists and/or agonists may be utilized to treat superficial forms of bladder cancer by, for example, intravesical administration. Polynucleotides, polypeptides, antagonists and/or agonists may be delivered directly into the tumor, or near the tumor site, via injection or a catheter. Of course, as the artisan of ordinary skill will appreciate, the appropriate mode of administration will vary according to the cancer to be treated. Other modes of delivery are discussed herein.

[0679] Polynucleotides, polypeptides, antagonists and/or agonists may be useful in treating other disorders, besides cancers, which involve angiogenesis. These disorders include, but are not limited to: benign tumors, for example hemangiomas, acoustic neuromas, neurofibromas, trachomas, and pyogenic granulomas; artheroscleric plaques; ocular angiogenic diseases, for example, diabetic retinopathy, retinopathy of prematurity, macular degeneration, corneal graft rejection, neovascular glaucoma, retrolental fibroplasia, rubeosis, retinoblastoma, uvietis and Pterygia (abnormal blood vessel growth) of the eye; rheumatoid arthritis; psoriasis; delayed wound healing; endometriosis; vasculogenesis; granulations; hypertrophic scars (keloids); nonunion fractures; scleroderma; trachoma; vascular adhesions; myocardial angiogenesis; coronary collaterals; cerebral collaterals; arteriovenous malformations; ischemic limb angiogenesis; Osler-Webber Syndrome; plaque neovascularization; telangiectasia; hemophiliac joints; angiofibroma; fibromuscular dysplasia; wound granulation; Crohn's disease; and atherosclerosis.

[0680] For example, within one aspect of the present invention methods are provided for treating hypertrophic scars and keloids, comprising the step of administering a polynucleotide, polypeptide, antagonist and/or agonist of the invention to a hypertrophic scar or keloid.

[0681] Within one embodiment of the present invention polynucleotides, polypeptides, antagonists and/or agonists of the invention are directly injected into a hypertrophic scar or keloid, in order to prevent the progression of these lesions. This therapy is of particular value in the prophylactic treatment of conditions which are known to result in the development of hypertrophic scars and keloids (e.g., burns), and is preferably initiated after the proliferative phase has had time to progress (approximately 14 days after the initial injury), but before hypertrophic scar or keloid development. As noted above, the present invention also provides methods for treating neovascular diseases of the eye, including for example, corneal neovascularization, neovascular glaucoma, proliferative diabetic retinopathy, retrolental fibroplasia and macular degeneration.

[0682] Moreover, ocular disorders associated with neovascularization which can be treated with the polynucleotides and polypeptides of the present invention (including agonists and/or antagonists) include, but are not limited to: neovascular glaucoma, diabetic retinopathy, retinoblastoma, retrolental fibroplasia, uveitis, retinopathy of prematurity macular degeneration, corneal graft neovascularization, as well as other eye inflammatory diseases, ocular tumors and diseases associated with choroidal or iris neovascularization. See, e.g., reviews by Waltman et al., Am. J. Ophthal. 85:704-710 (1978) and Gartner et al., Surv. Ophthal. 22:291-312 (1978).

[0683] Thus, within one aspect of the present invention methods are provided for treating neovascular diseases of the eye such as corneal neovascularization (including corneal graft neovascularization), comprising the step of administering to a patient a therapeutically effective amount of a compound (as described above) to the cornea, such that the formation of blood vessels is inhibited. Briefly, the cornea is a tissue, which normally lacks blood vessels. In certain pathological conditions however, capillaries may extend into the cornea from the pericorneal vascular plexus of the limbus. When the cornea becomes vascularized, it also becomes clouded, resulting in a decline in the patient's visual acuity. Visual loss may become complete if the cornea completely opacitates. A wide variety of disorders can result in corneal neovascularization, including for example, corneal infections (e.g., trachoma, herpes simplex keratitis, leishmaniasis and onchocerciasis), immunological processes (e.g., graft rejection and Stevens-Johnson's syndrome), alkali burns, trauma, inflammation (of any cause), toxic and nutritional deficiency states, and as a complication of wearing contact lenses.

[0684] Within particularly preferred embodiments of the invention, may be prepared for topical administration in saline (combined with any of the preservatives and antimicrobial agents commonly used in ocular preparations), and administered in eyedrop form. The solution or suspension may be prepared in its pure form and administered several times daily. Alternatively, anti-angiogenic compositions, prepared as described above, may also be administered directly to the cornea. Within preferred embodiments, the anti-angiogenic composition is prepared with a muco-adhesive polymer, which binds to cornea. Within further embodiments, the anti-angiogenic factors or anti-angiogenic compositions may be utilized as an adjunct to conventional steroid therapy. Topical therapy may also be useful prophylactically in corneal lesions which are known to have a high probability of inducing an angiogenic response (such as chemical burns). In these instances the treatment, likely in combination with steroids, may be instituted immediately to help prevent subsequent complications.

[0685] Within other embodiments, the compounds described above may be injected directly into the corneal stroma by an ophthalmologist under microscopic guidance. The preferred site of injection may vary with the morphology of the individual lesion, but the goal of the administration would be to place the composition at the advancing front of the vasculature (i.e., interspersed between the blood vessels and the normal cornea). In most cases this would involve perilimbic corneal injection to “protect” the cornea from the advancing blood vessels. This method may also be utilized shortly after a corneal insult in order to prophylactically prevent corneal neovascularization. In this situation, the material could be injected in the perilimbic cornea interspersed between the corneal lesion and its undesired potential limbic blood supply. Such methods may also be utilized in a similar fashion to prevent capillary invasion of transplanted corneas. In a sustained-release form, injections might only be required 2-3 times per year. A steroid could also be added to the injection solution to reduce inflammation resulting from the injection itself.

[0686] Within another aspect of the present invention, methods are provided for treating neovascular glaucoma, comprising the step of administering to a patient a therapeutically effective amount of a polynucleotide, polypeptide, antagonist and/or agonist to the eye, such that the formation of blood vessels is inhibited. In one embodiment, the compound may be administered topically to the eye in order to treat early forms of neovascular glaucoma. Within other embodiments, the compound may be implanted by injection into the region of the anterior chamber angle. Within other embodiments, the compound may also be placed in any location such that the compound is continuously released into the aqueous humor. Within another aspect of the present invention, methods are provided for treating proliferative diabetic retinopathy, comprising the step of administering to a patient a therapeutically effective amount of a polynucleotide, polypeptide, antagonist and/or agonist to the eyes, such that the formation of blood vessels is inhibited.

[0687] Within particularly preferred embodiments of the invention, proliferative diabetic retinopathy may be treated by injection into the aqueous humor or the vitreous, in order to increase the local concentration of the polynucleotide, polypeptide, antagonist and/or agonist in the retina. Preferably, this treatment should be initiated prior to the acquisition of severe disease requiring photocoagulation.

[0688] Within another aspect of the present invention, methods are provided for treating retrolental fibroplasia, comprising the step of administering to a patient a therapeutically effective amount of a polynucleotide, polypeptide, antagonist and/or agonist to the eye, such that the formation of blood vessels is inhibited. The compound may be administered topically, via intravitreous injection and/or via intraocular implants.

[0689] Additionally, disorders which can be treated with the polynucleotides, polypeptides, agonists and/or agonists include, but are not limited to, hemangioma, arthritis, psoriasis, angiofibroma, atherosclerotic plaques, delayed wound healing, granulations, hemophilic joints, hypertrophic scars, nonunion fractures, Osler-Weber syndrome, pyogenic granuloma, scleroderma, trachoma, and vascular adhesions.

[0690] Moreover, disorders and/or states, which can be treated, prevented, diagnosed and/or prognosed with the polynucleotides, polypeptides, agonists and/or agonists of the invention include, but are not limited to, solid tumors, blood born tumors such as leukemias, tumor metastasis, Kaposi's sarcoma, benign tumors, for example hemangiomas, acoustic neuromas, neurofibromas, trachomas, and pyogenic granulomas, rheumatoid arthritis, psoriasis, ocular angiogenic diseases, for example, diabetic retinopathy, retinopathy of prematurity, macular degeneration, corneal graft rejection, neovascular glaucoma, retrolental fibroplasia, rubeosis, retinoblastoma, and uvietis, delayed wound healing, endometriosis, vascluogenesis, granulations, hypertrophic scars (keloids), nonunion fractures, scleroderma, trachoma, vascular adhesions, myocardial angiogenesis, coronary collaterals, cerebral collaterals, arteriovenous malformations, ischemic limb angiogenesis, Osler-Webber Syndrome, plaque neovascularization, telangiectasia, hemophiliac joints, angiofibroma fibromuscular dysplasia, wound granulation, Crohn's disease, atherosclerosis, birth control agent by preventing vascularization required for embryo implantation controlling menstruation, diseases that have angiogenesis as a pathologic consequence such as cat scratch disease (Rochele minalia quintosa), ulcers (Helicobacter pylori), Bartonellosis and bacillary angiomatosis.

[0691] In one aspect of the birth control method, an amount of the compound sufficient to block embryo implantation is administered before or after intercourse and fertilization have occurred, thus providing an effective method of birth control, possibly a “morning after” method. Polynucleotides, polypeptides, agonists and/or agonists may also be used in controlling menstruation or administered as either a peritoneal lavage fluid or for peritoneal implantation in the treatment of endometriosis.

[0692] Polynucleotides, polypeptides, agonists and/or agonists of the present invention may be incorporated into surgical sutures in order to prevent stitch granulomas.

[0693] Polynucleotides, polypeptides, agonists and/or agonists may be utilized in a wide variety of surgical procedures. For example, within one aspect of the present invention a compositions (in the form of, for example, a spray or film) may be utilized to coat or spray an area prior to removal of a tumor, in order to isolate normal surrounding tissues from malignant tissue, and/or to prevent the spread of disease to surrounding tissues. Within other aspects of the present invention, compositions (e.g., in the form of a spray) may be delivered via endoscopic procedures in order to coat tumors, or inhibit angiogenesis in a desired locale. Within yet other aspects of the present invention, surgical meshes, which have been coated with anti-angiogenic compositions of the present invention may be utilized in any procedure wherein a surgical mesh might be utilized. For example, within one embodiment of the invention a surgical mesh laden with an anti-angiogenic composition may be utilized during abdominal cancer resection surgery (e.g., subsequent to colon resection) in order to provide support to the structure, and to release an amount of the anti-angiogenic factor.

[0694] Within further aspects of the present invention, methods are provided for treating tumor excision sites, comprising administering a polynucleotide, polypeptide, agonist and/or agonist to the resection margins of a tumor subsequent to excision, such that the local recurrence of cancer and the formation of new blood vessels at the site is inhibited. Within one embodiment of the invention, the anti-angiogenic compound is administered directly to the tumor excision site (e.g., applied by swabbing, brushing or otherwise coating the resection margins of the tumor with the anti-angiogenic compound). Alternatively, the anti-angiogenic compounds may be incorporated into known surgical pastes prior to administration. Within particularly preferred embodiments of the invention, the anti-angiogenic compounds are applied after hepatic resections for malignancy, and after neurosurgical operations.

[0695] Within one aspect of the present invention, polynucleotides, polypeptides, agonists and/or agonists may be administered to the resection margin of a wide variety of tumors, including for example, breast, colon, brain and hepatic tumors. For example, within one embodiment of the invention, anti-angiogenic compounds may be administered to the site of a neurological tumor subsequent to excision, such that the formation of new blood vessels at the site are inhibited.

[0696] The polynucleotides, polypeptides, agonists and/or agonists of the present invention may also be administered along with other anti-angiogenic factors. Representative examples of other anti-angiogenic factors include: Anti-Invasive Factor, retinoic acid and derivatives thereof, paclitaxel, Suramin, Tissue Inhibitor of Metalloproteinase-1, Tissue Inhibitor of Metalloproteinase-2, Plasminogen Activator Inhibitor-1, Plasminogen Activator Inhibitor-2, and various forms of the lighter “d group” transition metals.

[0697] Lighter “d group” transition metals include, for example, vanadium, molybdenum, tungsten, titanium, niobium, and tantalum species. Such transition metal species may form transition metal complexes. Suitable complexes of the above-mentioned transition metal species include oxo transition metal complexes.

[0698] Representative examples of vanadium complexes include oxo vanadium complexes such as vanadate and vanadyl complexes. Suitable vanadate complexes include metavanadate and orthovanadate complexes such as, for example, ammonium metavanadate, sodium metavanadate, and sodium orthovanadate. Suitable vanadyl complexes include, for example, vanadyl acetylacetonate and vanadyl sulfate including vanadyl sulfate hydrates such as vanadyl sulfate mono- and trihydrates.

[0699] Representative examples of tungsten and molybdenum complexes also include oxo complexes. Suitable oxo tungsten complexes include tungstate and tungsten oxide complexes. Suitable tungstate complexes include ammonium tungstate, calcium tungstate, sodium tungstate dihydrate, and tungstic acid. Suitable tungsten oxides include tungsten (IV) oxide and tungsten (VI) oxide. Suitable oxo molybdenum complexes include molybdate, molybdenum oxide, and molybdenyl complexes. Suitable molybdate complexes include ammonium molybdate and its hydrates, sodium molybdate and its hydrates, and potassium molybdate and its hydrates. Suitable molybdenum oxides include molybdenum (VI) oxide, molybdenum (VI) oxide, and molybdic acid. Suitable molybdenyl complexes include, for example, molybdenyl acetylacetonate. Other suitable tungsten and molybdenum complexes include hydroxo derivatives derived from, for example, glycerol, tartaric acid, and sugars.

[0700] A wide variety of other anti-angiogenic factors may also be utilized within the context of the present invention. Representative examples include platelet factor 4; protamine sulphate; sulphated chitin derivatives (prepared from queen crab shells), (Murata et al., Cancer Res. 51:22-26 (1991)); Sulphated Polysaccharide Peptidoglycan Complex (SP-PG) (the function of this compound may be enhanced by the presence of steroids such as estrogen, and tamoxifen citrate); Staurosporine; modulators of matrix metabolism, including for example, proline analogs, cishydroxyproline, d,L-3,4-dehydroproline, Thiaproline, alpha,alpha-dipyridyl, aminopropionitrile fumarate; 4-propyl-5-(4-pyridinyl)-2(3H)-oxazolone; Methotrexate; Mitoxantrone; Heparin; Interferons; 2 Macroglobulin-serum; ChIMP-3 (Pavloff et al., J. Bio. Chem. 267:17321-17326 (1992)); Chymostatin (Tomikinson et al., Biochem J. 286:475-480 (1992)); Cyclodextrin Tetradecasulfate; Eponemycin; Camptothecin; Fumagillin (Ingber et al., Nature 348:555-557 (1990)); Gold Sodium Thiomalate (“GST”; Matsubara and Ziff, J. Clin. Invest. 79:1440-1446 (1987)); anticollagenase-serum; alpha2-antiplasmin (Holmes et al., J. Biol. Chem. 262(4):1659-1664 (1987)); Bisantrene (National Cancer Institute); Lobenzarit disodium (N-(2)-carboxyphenyl-4-chloroanthronilic acid disodium or “CCA”; Takeuchi et al., Agents Actions 36:312-316, 1992); Thalidomide; Angostatic steroid; AGM-1470; carboxynaminolmidazole; and metalloproteinase inhibitors such as BB94.

[0701] Musculoskeletal System Disorders

[0702] Polynucleotides, polypeptides, antibodies, and/or agonists or antagonists of the present invention, may be used to treat, prevent, diagnose, and/or prognose disorders of the musculoskeletal system, including but not limited to, disorders of the bone, joints, ligaments, tendons, bursa, muscle, and/or neoplasms and cancers associated with musculoskeletal tissue.

[0703] Diseases or disorders of the bone include, but are not limited to, Albers-Schönberg disease, bowlegs, heel spurs, Köhler's bone disease, knock-knees, Legg-Calvé-Perthes disease, Marfan's syndrome, mucopolysaccharidoses, Osgood-Schlatter disease, osteochondroses, osteochondrodysplasia, osteomyelitis, osteopetroses, osteoporosis (postmenopausal, senile, and juvenile), Paget's disease, Scheuermann's disease, scoliosis, Sever's disease, and patellofemoral stress syndrome.

[0704] Joint diseases or disorders include, but are not limited to, ankylosing spondylitis, Behcet's syndrome, CREST syndrome, Ehlers-Danlos syndrome, infectious arthritis, discoid lupus erythematosus, systemic lupus erythematosus, Lyme disease, osteoarthritis, psoriatic arthritis, relapsing polychondrites, Reiter's syndrome, rheumatoid arthritis (adult and juvenile), scleroderma, and Still's disease.

[0705] Diseases or disorders affecting ligaments, tendons, or bursa include, but are not limited to, ankle sprain, bursitis, posterior Achilles tendon bursitis (Haglund's deformity), anterior Achilles tendon bursitis (Albert's disease), tendinitis, tenosynovitis, poplieus tendinitis, Achilles tendinitis, medial or lateral epicondylitis, rotator cuff tendinitis, spasmodic torticollis, and fibromyalgia syndrome.

[0706] Muscle diseases or disorders include, but are not limited to, Becker's muscular dystrophy, Duchenne's muscular dystrophy, Landouzy-Dejerine muscular dystrophy, Leyden-Möbius muscular dystrophy, Erb's muscular dystrophy, Charcot's joints, dermatomyositis, gout, pseudogout, glycogen storage diseases, Pompe's disease, mitochondrial myopathy, periodic paralysis, polymyalgia rheumatica, polymyositis, Steinert's disease, Thomsen's disease, anterolateral and posteromedial shin splints, posterior femoral muscle strain, and fibromyositis.

[0707] Musculoskeletal tissue may also develop cancers and/or neoplasms that include, but are not limited to, osteochondroma, benign chondroma, chondroblastoma, chondromyxoid fibroma, osteoid osteoma, giant cell tumor, multiple myeloma, osteosarcoma, fibrosarcoma, malignant fibrous histiocytoma, chondrosarcoma, Ewing's tumor, and malignant lymphoma of bone.

[0708] Neural Activity and Neurological Diseases

[0709] The polynucleotides, polypeptides and agonists or antagonists of the invention may be used for the diagnosis and/or treatment of diseases, disorders, damage or injury of the brain and/or nervous system. Nervous system disorders that can be treated with the compositions of the invention (e.g., polypeptides, polynucleotides, and/or agonists or antagonists), include, but are not limited to, nervous system injuries, and diseases or disorders which result in either a disconnection of axons, a diminution or degeneration of neurons, or demyelination. Nervous system lesions which may be treated in a patient (including human and non-human mammalian patients) according to the methods of the invention, include but are not limited to, the following lesions of either the central (including spinal cord, brain) or peripheral nervous systems: (1) ischemic lesions, in which a lack of oxygen in a portion of the nervous system results in neuronal injury or death, including cerebral infarction or ischemia, or spinal cord infarction or ischemia; (2) traumatic lesions, including lesions caused by physical injury or associated with surgery, for example, lesions which sever a portion of the nervous system, or compression injuries; (3) malignant lesions, in which a portion of the nervous system is destroyed or injured by malignant tissue which is either a nervous system associated malignancy or a malignancy derived from non-nervous system tissue; (4) infectious lesions, in which a portion of the nervous system is destroyed or injured as a result of infection, for example, by an abscess or associated with infection by human immunodeficiency virus, herpes zoster, or herpes simplex virus or with Lyme disease, tuberculosis, or syphilis; (5) degenerative lesions, in which a portion of the nervous system is destroyed or injured as a result of a degenerative process including but not limited to, degeneration associated with Parkinson's disease, Alzheimer's disease, Huntington's chorea, or amyotrophic lateral sclerosis (ALS); (6) lesions associated with nutritional diseases or disorders, in which a portion of the nervous system is destroyed or injured by a nutritional disorder or disorder of metabolism including, but not limited to, vitamin B12 deficiency, folic acid deficiency, Wernicke disease, tobacco-alcohol amblyopia, Marchiafava-Bignami disease (primary degeneration of the corpus callosum), and alcoholic cerebellar degeneration; (7) neurological lesions associated with systemic diseases including, but not limited to, diabetes (diabetic neuropathy, Bell's palsy), systemic lupus erythematosus, carcinoma, or sarcoidosis; (8) lesions caused by toxic substances including alcohol, lead, or particular neurotoxins; and (9) demyelinated lesions in which a portion of the nervous system is destroyed or injured by a demyelinating disease including, but not limited to, multiple sclerosis, human immunodeficiency virus-associated myelopathy, transverse myelopathy or various etiologies, progressive multifocal leukoencephalopathy, and central pontine myelinolysis.

[0710] In one embodiment, the polypeptides, polynucleotides, or agonists or antagonists of the invention are used to protect neural cells from the damaging effects of hypoxia. In a further preferred embodiment, the polypeptides, polynucleotides, or agonists or antagonists of the invention are used to protect neural cells from the damaging effects of cerebral hypoxia. According to this embodiment, the compositions of the invention are used to treat or prevent neural cell injury associated with cerebral hypoxia. In one non-exclusive aspect of this embodiment, the polypeptides, polynucleotides, or agonists or antagonists of the invention, are used to treat or prevent neural cell injury associated with cerebral ischemia. In another non-exclusive aspect of this embodiment, the polypeptides, polynucleotides, or agonists or antagonists of the invention are used to treat or prevent neural cell injury associated with cerebral infarction.

[0711] In another preferred embodiment, the polypeptides, polynucleotides, or agonists or antagonists of the invention are used to treat or prevent neural cell injury associated with a stroke. In a specific embodiment, the polypeptides, polynucleotides, or agonists or antagonists of the invention are used to treat or prevent cerebral neural cell injury associated with a stroke.

[0712] In another preferred embodiment, the polypeptides, polynucleotides, or agonists or antagonists of the invention are used to treat or prevent neural cell injury associated with a heart attack. In a specific embodiment, the polypeptides, polynucleotides, or agonists or antagonists of the invention are used to treat or prevent cerebral neural cell injury associated with a heart attack.

[0713] The compositions of the invention which are useful for treating or preventing a nervous system disorder may be selected by testing for biological activity in promoting the survival or differentiation of neurons. For example, and not by way of limitation, compositions of the invention which elicit any of the following effects may be useful according to the invention: (1) increased survival time of neurons in culture either in the presence or absence of hypoxia or hypoxic conditions; (2) increased sprouting of neurons in culture or in vivo; (3) increased production of a neuron-associated molecule in culture or in vivo, e.g., choline acetyltransferase or acetylcholinesterase with respect to motor neurons; or (4) decreased symptoms of neuron dysfunction in vivo. Such effects may be measured by any method known in the art. In preferred, non-limiting embodiments, increased survival of neurons may routinely be measured using a method set forth herein or otherwise known in the art, such as, for example, in Zhang et al., Proc Natl Acad Sci USA 97:3637-42 (2000) or in Arakawa et al., J. Neurosci., 10:3507-15 (1990); increased sprouting of neurons may be detected by methods known in the art, such as, for example, the methods set forth in Pestronk et al., Exp. Neurol., 70:65-82 (1980), or Brown et al., Ann. Rev. Neurosci., 4:17-42 (1981); increased production of neuron-associated molecules may be measured by bioassay, enzymatic assay, antibody binding, Northern blot assay, etc., using techniques known in the art and depending on the molecule to be measured; and motor neuron dysfunction may be measured by assessing the physical manifestation of motor neuron disorder, e.g., weakness, motor neuron conduction velocity, or functional disability.

[0714] In specific embodiments, motor neuron disorders that may be treated according to the invention include, but are not limited to, disorders such as infarction, infection, exposure to toxin, trauma, surgical damage, degenerative disease or malignancy that may affect motor neurons as well as other components of the nervous system, as well as disorders that selectively affect neurons such as amyotrophic lateral sclerosis, and including, but not limited to, progressive spinal muscular atrophy, progressive bulbar palsy, primary lateral sclerosis, infantile and juvenile muscular atrophy, progressive bulbar paralysis of childhood (Fazio-Londe syndrome), poliomyelitis and the post polio syndrome, and Hereditary Motorsensory Neuropathy (Charcot-Marie-Tooth Disease).

[0715] Further, polypeptides or polynucleotides of the invention may play a role in neuronal survival; synapse formation; conductance; neural differentiation, etc. Thus, compositions of the invention (including polynucleotides, polypeptides, and agonists or antagonists) may be used to diagnose and/or treat or prevent diseases or disorders associated with these roles, including, but not limited to, learning and/or cognition disorders. The compositions of the invention may also be useful in the treatment or prevention of neurodegenerative disease states and/or behavioural disorders. Such neurodegenerative disease states and/or behavioral disorders include, but are not limited to, Alzheimer's Disease, Parkinson's Disease, Huntington's Disease, Tourette Syndrome, schizophrenia, mania, dementia, paranoia, obsessive compulsive disorder, panic disorder, learning disabilities, ALS, psychoses, autism, and altered behaviors, including disorders in feeding, sleep patterns, balance, and perception. In addition, compositions of the invention may also play a role in the treatment, prevention and/or detection of developmental disorders associated with the developing embryo, or sexually-linked disorders.

[0716] Additionally, polypeptides, polynucleotides and/or agonists or antagonists of the invention, may be useful in protecting neural cells from diseases, damage, disorders, or injury, associated with cerebrovascular disorders including, but not limited to, carotid artery diseases (e.g., carotid artery thrombosis, carotid stenosis, or Moyamoya Disease), cerebral amyloid angiopathy, cerebral aneurysm, cerebral anoxia, cerebral arteriosclerosis, cerebral arteriovenous malformations, cerebral artery diseases, cerebral embolism and thrombosis (e.g., carotid artery thrombosis, sinus thrombosis, or Wallenberg's Syndrome), cerebral hemorrhage (e.g., epidural or subdural hematoma, or subarachnoid hemorrhage), cerebral infarction, cerebral ischemia (e.g., transient cerebral ischemia, Subclavian Steal Syndrome, or vertebrobasilar insufficiency), vascular dementia (e.g., multi-infarct), leukomalacia, periventricular, and vascular headache (e.g., cluster headache or migraines).

[0717] In accordance with yet a further aspect of the present invention, there is provided a process for utilizing polynucleotides or polypeptides, as well as agonists or antagonists of the present invention, for therapeutic purposes, for example, to stimulate neurological cell proliferation and/or differentiation. Therefore, polynucleotides, polypeptides, agonists and/or antagonists of the invention may be used to treat and/or detect neurologic diseases. Moreover, polynucleotides or polypeptides, or agonists or antagonists of the invention, can be used as a marker or detector of a particular nervous system disease or disorder.

[0718] Examples of neurologic diseases which can be treated or detected with polynucleotides, polypeptides, agonists, and/or antagonists of the present invention include brain diseases, such as metabolic brain diseases which includes phenylketonuria such as maternal phenylketonuria, pyruvate carboxylase deficiency, pyruvate dehydrogenase complex deficiency, Wernicke's Encephalopathy, brain edema, brain neoplasms such as cerebellar neoplasms which include infratentorial neoplasms, cerebral ventricle neoplasms such as choroid plexus neoplasms, hypothalamic neoplasms, supratentorial neoplasms, canavan disease, cerebellar diseases such as cerebellar ataxia which include spinocerebellar degeneration such as ataxia telangiectasia, cerebellar dyssynergia, Friederich's Ataxia, Machado-Joseph Disease, olivopontocerebellar atrophy, cerebellar neoplasms such as infratentorial neoplasms, diffuse cerebral sclerosis such as encephalitis periaxialis, globoid cell leukodystrophy, metachromatic leukodystrophy and subacute sclerosing panencephalitis.

[0719] Additional neurologic diseases which can be treated or detected with polynucleotides, polypeptides, agonists, and/or antagonists of the present invention include cerebrovascular disorders (such as carotid artery diseases which include carotid artery thrombosis, carotid stenosis and Moyamoya Disease), cerebral amyloid angiopathy, cerebral aneurysm, cerebral anoxia, cerebral arteriosclerosis, cerebral arteriovenous malformations, cerebral artery diseases, cerebral embolism and thrombosis such as carotid artery thrombosis, sinus thrombosis and Wallenberg's Syndrome, cerebral hemorrhage such as epidural hematoma, subdural hematoma and subarachnoid hemorrhage, cerebral infarction, cerebral ischemia such as transient cerebral ischemia, Subdlavian Steal Syndrome and vertebrobasilar insufficiency, vascular dementia such as multi-infarct dementia, periventricular leukomalacia, vascular headache such as cluster headache and migraine.

[0720] Additional neurologic diseases which can be treated or detected with polynucleotides, polypeptides, agonists, and/or antagonists of the present invention include dementia such as AIDS Dementia Complex, presenile dementia such as Alzheimer's Disease and Creutzfeldt-Jakob Syndrome, senile dementia such as Alzheimer's Disease and progressive supranuclear palsy, vascular dementia such as multi-infarct dementia, encephalitis which include encephalitis periaxialis, viral encephalitis such as epidemic encephalitis, Japanese Encephalitis, St. Louis Encephalitis, tick-borne encephalitis and West Nile Fever, acute disseminated encephalomyelitis, meningoencephalitis such as uveomeningoencephalitic syndrome, Postencephalitic Parkinson Disease and subacute sclerosing panencephalitis, encephalomalacia such as periventricular leukomalacia, epilepsy such as generalized epilepsy which includes infantile spasms, absence epilepsy, myoclonic epilepsy which includes MERRF Syndrome, tonic-clonic epilepsy, partial epilepsy such as complex partial epilepsy, frontal lobe epilepsy and temporal lobe epilepsy, post-traumatic epilepsy, status epilepticus such as Epilepsia Partialis Continua, and Hallervorden-Spatz Syndrome.

[0721] Additional neurologic diseases which can be treated or detected with polynucleotides, polypeptides, agonists, and/or antagonists of the present invention include hydrocephalus such as Dandy-Walker Syndrome and normal pressure hydrocephalus, hypothalamic diseases such as hypothalamic neoplasms, cerebral malaria, narcolepsy which includes cataplexy, bulbar poliomyelitis, cerebri pseudotumor, Rett Syndrome, Reye's Syndrome, thalamic diseases, cerebral toxoplasmosis, intracranial tuberculoma and Zellweger Syndrome, central nervous system infections such as AIDS Dementia Complex, Brain Abscess, subdural empyema, encephalomyelitis such as Equine Encephalomyelitis, Venezuelan Equine Encephalomyelitis, Necrotizing Hemorrhagic Encephalomyelitis, Visna, and cerebral malaria.

[0722] Additional neurologic diseases which can be treated or detected with polynucleotides, polypeptides, agonists, and/or antagonists of the present invention include meningitis such as arachnoiditis, aseptic meningtitis such as viral meningtitis which includes lymphocytic choriomeningitis, Bacterial meningtitis which includes Haemophilus Meningtitis, Listeria Meningtitis, Meningococcal Meningtitis such as Waterhouse-Friderichsen Syndrome, Pneumococcal Meningtitis and meningeal tuberculosis, fungal meningitis such as Cryptococcal Meningtitis, subdural effusion, meningoencephalitis such as uvemeningoencephalitic syndrome, myelitis such as transverse myelitis, neurosyphilis such as tabes dorsalis, poliomyelitis which includes bulbar poliomyelitis and postpoliomyelitis syndrome, prion diseases (such as Creutzfeldt-Jakob Syndrome, Bovine Spongiform Encephalopathy, Gerstmann-Straussler Syndrome, Kuru, Scrapie), and cerebral toxoplasmosis.

[0723] Additional neurologic diseases which can be treated or detected with polynucleotides, polypeptides, agonists, and/or antagonists of the present invention include central nervous system neoplasms such as brain neoplasms that include cerebellar neoplasms such as infratentorial neoplasms, cerebral ventricle neoplasms such as choroid plexus neoplasms, hypothalamic neoplasms and supratentorial neoplasms, meningeal neoplasms, spinal cord neoplasms which include epidural neoplasms, demyelinating diseases such as Canavan Diseases, diffuse cerebral sceloris which includes adrenoleukodystrophy, encephalitis periaxialis, globoid cell leukodystrophy, diffuse cerebral sclerosis such as metachromatic leukodystrophy, allergic encephalomyelitis, necrotizing hemorrhagic encephalomyelitis, progressive multifocal leukoencephalopathy, multiple sclerosis, central pontine myelinolysis, transverse myelitis, neuromyelitis optica, Scrapie, Swayback, Chronic Fatigue Syndrome, Visna, High Pressure Nervous Syndrome, Meningism, spinal cord diseases such as amyotonia congenita, amyotrophic lateral sclerosis, spinal muscular atrophy such as Werdnig-Hoffmann Disease, spinal cord compression, spinal cord neoplasms such as epidural neoplasms, syringomyelia, Tabes Dorsalis, Stiff-Man Syndrome, mental retardation such as Angelman Syndrome, Cri-du-Chat Syndrome, De Lange's Syndrome, Down Syndrome, Gangliosidoses such as gangliosidoses G(M1), Sandhoff Disease, Tay-Sachs Disease, Hartnup Disease, homocystinuria, Laurence-Moon-Biedl Syndrome, Lesch-Nyhan Syndrome, Maple Syrup Urine Disease, mucolipidosis such as fucosidosis, neuronal ceroid-lipofuscinosis, oculocerebrorenal syndrome, phenylketonuria such as maternal phenylketonuria, Prader-Willi Syndrome, Rett Syndrome, Rubinstein-Taybi Syndrome, Tuberous Sclerosis, WAGR Syndrome, nervous system abnormalities such as holoprosencephaly, neural tube defects such as anencephaly which includes hydrangencephaly, Arnold-Chairi Deformity, encephalocele, meningocele, meningomyelocele, spinal dysraphism such as spina bifida cystica and spina bifida occulta.

[0724] Additional neurologic diseases which can be treated or detected with polynucleotides, polypeptides, agonists, and/or antagonists of the present invention include hereditary motor and sensory neuropathies which include Charcot-Marie Disease, Hereditary optic atrophy, Refsum's Disease, hereditary spastic paraplegia, Werdnig-Hoffmann Disease, Hereditary Sensory and Autonomic Neuropathies such as Congenital Analgesia and Familial Dysautonomia, Neurologic manifestations (such as agnosia that include Gerstmann's Syndrome, Amnesia such as retrograde amnesia, apraxia, neurogenic bladder, cataplexy, communicative disorders such as hearing disorders that includes deafness, partial hearing loss, loudness recruitment and tinnitus, language disorders such as aphasia which include agraphia, anomia, broca aphasia, and Wernicke Aphasia, Dyslexia such as Acquired Dyslexia, language development disorders, speech disorders such as aphasia which includes anomia, broca aphasia and Wernicke Aphasia, articulation disorders, communicative disorders such as speech disorders which include dysarthria, echolalia, mutism and stuttering, voice disorders such as aphonia and hoarseness, decerebrate state, delirium, fasciculation, hallucinations, meningism, movement disorders such as angelman syndrome, ataxia, athetosis, chorea, dystonia, hypokinesia, muscle hypotonia, myoclonus, tic, torticollis and tremor, muscle hypertonia such as muscle rigidity such as stiff-man syndrome, muscle spasticity, paralysis such as facial paralysis which includes Herpes Zoster Oticus, Gastroparesis, Hemiplegia, ophthalmoplegia such as diplopia, Duane's Syndrome, Horner's Syndrome, Chronic progressive external ophthalmoplegia such as Kearns Syndrome, Bulbar Paralysis, Tropical Spastic Paraparesis, Paraplegia such as Brown-Sequard Syndrome, quadriplegia, respiratory paralysis and vocal cord paralysis, paresis, phantom limb, taste disorders such as ageusia and dysgeusia, vision disorders such as amblyopia, blindness, color vision defects, diplopia, hemianopsia, scotoma and subnormal vision, sleep disorders such as hypersomnia which includes Kleine-Levin Syndrome, insomnia, and somnambulism, spasm such as trismus, unconsciousness such as coma, persistent vegetative state and syncope and vertigo, neuromuscular diseases such as amyotonia congenita, amyotrophic lateral sclerosis, Lambert-Eaton Myasthenic Syndrome, motor neuron disease, muscular atrophy such as spinal muscular atrophy, Charcot-Marie Disease and Werdnig-Hoffmann Disease, Postpoliomyelitis Syndrome, Muscular Dystrophy, Myasthenia Gravis, Myotonia Atrophica, Myotonia Confenita, Nemaline Myopathy, Familial Periodic Paralysis, Multiplex Paramyloclonus, Tropical Spastic Paraparesis and Stiff-Man Syndrome, peripheral nervous system diseases such as acrodynia, amyloid neuropathies, autonomic nervous system diseases such as Adie's Syndrome, Barre-Lieou Syndrome, Familial Dysautonomia, Horner's Syndrome, Reflex Sympathetic Dystrophy and Shy-Drager Syndrome, Cranial Nerve Diseases such as Acoustic Nerve Diseases such as Acoustic Neuroma which includes Neurofibromatosis 2, Facial Nerve Diseases such as Facial Neuralgia,Melkersson-Rosenthal Syndrome, ocular motility disorders which includes amblyopia, nystagmus, oculomotor nerve paralysis, ophthalmoplegia such as Duane's Syndrome, Horner's Syndrome, Chronic Progressive External Ophthalmoplegia which includes Kearns Syndrome, Strabismus such as Esotropia and Exotropia, Oculomotor Nerve Paralysis, Optic Nerve Diseases such as Optic Atrophy which includes Hereditary Optic Atrophy, Optic Disk Drusen, Optic Neuritis such as Neuromyelitis Optica, Papilledema, Trigeminal Neuralgia, Vocal Cord Paralysis, Demyelinating Diseases such as Neuromyelitis Optica and Swayback, and Diabetic neuropathies such as diabetic foot.

[0725] Additional neurologic diseases which can be treated or detected with polynucleotides, polypeptides, agonists, and/or antagonists of the present invention include nerve compression syndromes such as carpal tunnel syndrome, tarsal tunnel syndrome, thoracic outlet syndrome such as cervical rib syndrome, ulnar nerve compression syndrome, neuralgia such as causalgia, cervico-brachial neuralgia, facial neuralgia and trigeminal neuralgia, neuritis such as experimental allergic neuritis, optic neuritis, polyneuritis, polyradiculoneuritis and radiculities such as polyradiculitis, hereditary motor and sensory neuropathies such as Charcot-Marie Disease, Hereditary Optic Atrophy, Refsum's Disease, Hereditary Spastic Paraplegia and Werdnig-Hoffmann Disease, Hereditary Sensory and Autonomic Neuropathies which include Congenital Analgesia and Familial Dysautonomia, POEMS Syndrome, Sciatica, Gustatory Sweating and Tetany).

[0726] Endocrine Disorders

[0727] Polynucleotides or polypeptides, or agonists or antagonists of the present invention, may be used to treat, prevent, diagnose, and/or prognose disorders and/or diseases related to hormone imbalance, and/or disorders or diseases of the endocrine system.

[0728] Hormones secreted by the glands of the endocrine system control physical growth, sexual function, metabolism, and other functions. Disorders may be classified in two ways: disturbances in the production of hormones, and the inability of tissues to respond to hormones. The etiology of these hormone imbalance or endocrine system diseases, disorders or conditions may be genetic, somatic, such as cancer and some autoimmune diseases, acquired (e.g., by chemotherapy, injury or toxins), or infectious. Moreover, polynucleotides, polypeptides, antibodies, and/or agonists or antagonists of the present invention can be used as a marker or detector of a particular disease or disorder related to the endocrine system and/or hormone imbalance.

[0729] Endocrine system and/or hormone imbalance and/or diseases encompass disorders of uterine motility including, but not limited to: complications with pregnancy and labor (e.g., pre-term labor, post-term pregnancy, spontaneous abortion, and slow or stopped labor); and disorders and/or diseases of the menstrual cycle (e.g., dysmenorrhea and endometriosis).

[0730] Endocrine system and/or hormone imbalance disorders and/or diseases include disorders and/or diseases of the pancreas, such as, for example, diabetes mellitus, diabetes insipidus, congenital pancreatic agenesis, pheochromocytoma—islet cell tumor syndrome; disorders and/or diseases of the adrenal glands such as, for example, Addison's Disease, corticosteroid deficiency, virilizing disease, hirsutism, Cushing's Syndrome, hyperaldosteronism, pheochromocytoma; disorders and/or diseases of the pituitary gland, such as, for example, hyperpituitarism, hypopituitarism, pituitary dwarfism, pituitary adenoma, panhypopituitarism, acromegaly, gigantism; disorders and/or diseases of the thyroid, including but not limited to, hyperthyroidism, hypothyroidism, Plummer's disease, Graves' disease (toxic diffuse goiter), toxic nodular goiter, thyroiditis (Hashimoto's thyroiditis, subacute granulomatous thyroiditis, and silent lymphocytic thyroiditis), Pendred's syndrome, myxedema, cretinism, thyrotoxicosis, thyroid hormone coupling defect, thymic aplasia, Hurthle cell tumours of the thyroid, thyroid cancer, thyroid carcinoma, Medullary thyroid carcinoma; disorders and/or diseases of the parathyroid, such as, for example, hyperparathyroidism, hypoparathyroidism; disorders and/or diseases of the hypothalamus.

[0731] In addition, endocrine system and/or hormone imbalance disorders and/or diseases may also include disorders and/or diseases of the testes or ovaries, including cancer. Other disorders and/or diseases of the testes or ovaries further include, for example, ovarian cancer, polycystic ovary syndrome, Klinefelter's syndrome, vanishing testes syndrome (bilateral anorchia), congenital absence of Leydig's cells, cryptorchidism, Noonan's syndrome, myotonic dystrophy, capillary haemangioma of the testis (benign), neoplasias of the testis and neo-testis.

[0732] Moreover, endocrine system and/or hormone imbalance disorders and/or diseases may also include disorders and/or diseases such as, for example, polyglandular deficiency syndromes, pheochromocytoma, neuroblastoma, multiple Endocrine neoplasia, and disorders and/or cancers of endocrine tissues.

[0733] In another embodiment, a polypeptide of the invention, or polynucleotides, antibodies, agonists, or antagonists corresponding to that polypeptide, may be used to diagnose, prognose, prevent, and/or treat endocrine diseases and/or disorders associated with the tissue(s) in which the polypeptide of the invention is expressed, including one, two, three, four, five, or more tissues disclosed in Table 1, column 8 (Tissue Distribution Library Code).

[0734] Reproductive System Disorders

[0735] The polynucleotides or polypeptides, or agonists or antagonists of the invention may be used for the diagnosis, treatment, or prevention of diseases and/or disorders of the reproductive system. Reproductive system disorders that can be treated by the compositions of the invention, include, but are not limited to, reproductive system injuries, infections, neoplastic disorders, congenital defects, and diseases or disorders which result in infertility, complications with pregnancy, labor, or parturition, and postpartum difficulties.

[0736] Reproductive system disorders and/or diseases include diseases and/or disorders of the testes, including, but not limited to, testicular atrophy, testicular feminization, cryptorchism (unilateral and bilateral), anorchia, ectopic testis, epididymitis and orchitis (typically resulting from infections such as, for example, gonorrhea, mumps, tuberculosis, and syphilis), testicular torsion, vasitis nodosa, germ cell tumors (e.g., seminomas, embryonal cell carcinomas, teratocarcinomas, choriocarcinomas, yolk sac tumors, and teratomas), stromal tumors (e.g., Leydig cell tumors), hydrocele, hematocele, varicocele, spermatocele, inguinal hernia, and disorders of sperm production (e.g., immotile cilia syndrome, aspermia, asthenozoospermia, azoospermia, oligospermia, and teratozoospermia).

[0737] Reproductive system disorders also include, but are not limited to, disorders of the prostate gland, such as acute non-bacterial prostatitis, chronic non-bacterial prostatitis, acute bacterial prostatitis, chronic bacterial prostatitis, prostatodystonia, prostatosis, granulomatous prostatitis, malacoplakia, benign prostatic hypertrophy or hyperplasia, and prostate neoplastic disorders, including adenocarcinomas, transitional cell carcinomas, ductal carcinomas, and squamous cell carcinomas.

[0738] Additionally, the compositions of the invention may be useful in the diagnosis, treatment, and/or prevention of disorders or diseases of the penis and urethra, including, but not limited to, inflammatory disorders, such as balanoposthitis, balanitis xerotica obliterans, phimosis, paraphimosis, syphilis, herpes simplex virus, gonorrhea, non-gonococcal urethritis, chlamydia, mycoplasma, trichomonas, HIV, AIDS, Reiter's syndrome, condyloma acuminatum, condyloma latum, and pearly penile papules; urethral abnormalities, such as hypospadias, epispadias, and phimosis; premalignant lesions, including Erythroplasia of Queyrat, Bowen's disease, Bowenoid paplosis, giant condyloma of Buscke-Lowenstein, and varrucous carcinoma; penile cancers, including squamous cell carcinomas, carcinoma in situ, verrucous carcinoma, and disseminated penile carcinoma; urethral neoplastic disorders, including penile urethral carcinoma, bulbomembranous urethral carcinoma, and prostatic urethral carcinoma; and erectile disorders, such as priapism, Peyronie's disease, erectile dysfunction, and impotence.

[0739] Moreover, diseases and/or disorders of the vas deferens include, but are not limited to, vasculititis and CBAVD (congenital bilateral absence of the vas deferens); additionally, the polynucleotides, polypeptides, and agonists or antagonists of the present invention may be used in the diagnosis, treatment, and/or prevention of diseases and/or disorders of the seminal vesicles, including but not limited to, hydatid disease, congenital chloride diarrhea, and polycystic kidney disease.

[0740] Other disorders and/or diseases of the male reproductive system that may be diagnosed, treated, and/or prevented with the compositions of the invention include, but are not limited to, Klinefelter's syndrome, Young's syndrome, premature ejaculation, diabetes mellitus, cystic fibrosis, Kartagener's syndrome, high fever, multiple sclerosis, and gynecomastia.

[0741] Further, the polynucleotides, polypeptides, and agonists or antagonists of the present invention may be used in the diagnosis, treatment, and/or prevention of diseases and/or disorders of the vagina and vulva, including, but not limited to, bacterial vaginosis, candida vaginitis, herpes simplex virus, chancroid, granuloma inguinale, lymphogranuloma venereum, scabies, human papillomavirus, vaginal trauma, vulvar trauma, adenosis, chlamydia vaginitis, gonorrhea, trichomonas vaginitis, condyloma acuminatum, syphilis, molluscum contagiosum, atrophic vaginitis, Paget's disease, lichen sclerosus, lichen planus, vulvodynia, toxic shock syndrome, vaginismus, vulvovaginitis, vulvar vestibulitis, and neoplastic disorders, such as squamous cell hyperplasia, clear cell carcinoma, basal cell carcinoma, melanomas, cancer of Bartholin's gland, and vulvar intraepithelial neoplasia.

[0742] Disorders and/or diseases of the uterus that may be diagnosed, treated, and/or prevented with the compositions of the invention include, but are not limited to, dysmenorrhea, retroverted uterus, endometriosis, fibroids, adenomyosis, anovulatory bleeding, amenorrhea, Cushing's syndrome, hydatidiform moles, Asherman's syndrome, premature menopause, precocious puberty, uterine polyps, dysfunctional uterine bleeding (e.g., due to aberrant hormonal signals), and neoplastic disorders, such as adenocarcinomas, keiomyosarcomas, and sarcomas. Additionally, the polypeptides, polynucleotides, or agonists or antagonists of the invention may be useful as a marker or detector of, as well as in the diagnosis, treatment, and/or prevention of congenital uterine abnormalities, such as bicornuate uterus, septate uterus, simple unicornuate uterus, unicornuate uterus with a noncavitary rudimentary horn, unicornuate uterus with a non-communicating cavitary rudimentary horn, unicornuate uterus with a communicating cavitary horn, arcuate uterus, uterine didelfus, and T-shaped uterus.

[0743] Ovarian diseases and/or disorders that may be diagnosed, treated, and/or prevented with the compositions of the invention include, but are not limited to, anovulation, polycystic ovary syndrome (Stein-Leventhal syndrome), ovarian cysts, ovarian hypofunction, ovarian insensitivity to gonadotropins, ovarian overproduction of androgens, right ovarian vein syndrome, amenorrhea, hirutism, and ovarian cancer (including, but not limited to, primary and secondary cancerous growth, Sertoli-Leydig tumors, endometriod carcinoma of the ovary, ovarian papillary serous adenocarcinoma, ovarian mucinous adenocarcinoma, and Ovarian Krukenberg tumors).

[0744] Cervical diseases and/or disorders that may be diagnosed, treated, and/or prevented with the compositions of the invention include, but are not limited to, cervicitis, chronic cervicitis, mucopurulent cervicitis, cervical dysplasia, cervical polyps, Nabothian cysts, cervical erosion, cervical incompetence, and cervical neoplasms (including, for example, cervical carcinoma, squamous metaplasia, squamous cell carcinoma, adenosquamous cell neoplasia, and columnar cell neoplasia).

[0745] Additionally, diseases and/or disorders of the reproductive system that may be diagnosed, treated, and/or prevented with the compositions of the invention include, but are not limited to, disorders and/or diseases of pregnancy, including miscarriage and stillbirth, such as early abortion, late abortion, spontaneous abortion, induced abortion, therapeutic abortion, threatened abortion, missed abortion, incomplete abortion, complete abortion, habitual abortion, missed abortion, and septic abortion; ectopic pregnancy, anemia, Rh incompatibility, vaginal bleeding during pregnancy, gestational diabetes, intrauterine growth retardation, polyhydramnios, HELLP syndrome, abruptio placentae, placenta previa, hyperemesis, preeclampsia, eclampsia, herpes gestationis, and urticaria of pregnancy. Additionally, the polynucleotides, polypeptides, and agonists or antagonists of the present invention may be used in the diagnosis, treatment, and/or prevention of diseases that can complicate pregnancy, including heart disease, heart failure, rheumatic heart disease, congenital heart disease, mitral valve prolapse, high blood pressure, anemia, kidney disease, infectious disease (e.g., rubella, cytomegalovirus, toxoplasmosis, infectious hepatitis, chlamydia, HIV, AIDS, and genital herpes), diabetes mellitus, Graves' disease, thyroiditis, hypothyroidism, Hashimoto's thyroiditis, chronic active hepatitis, cirrhosis of the liver, primary biliary cirrhosis, asthma, systemic lupus eryematosis, rheumatoid arthritis, myasthenia gravis, idiopathic thrombocytopenic purpura, appendicitis, ovarian cysts, gallbladder disorders,and obstruction of the intestine.

[0746] Complications associated with labor and parturition that may be diagnosed, treated, and/or prevented with the compositions of the invention include, but are not limited to, premature rupture of the membranes, pre-term labor, post-term pregnancy, postmaturity, labor that progresses too slowly, fetal distress (e.g., abnormal heart rate (fetal or maternal), breathing problems, and abnormal fetal position), shoulder dystocia, prolapsed umbilical cord, amniotic fluid embolism, and aberrant uterine bleeding.

[0747] Further, diseases and/or disorders of the postdelivery period, that may be diagnosed, treated, and/or prevented with the compositions of the invention, include, but are not limited to, endometritis, myometritis, parametritis, peritonitis, pelvic thrombophlebitis, pulmonary embolism, endotoxemia, pyelonephritis, saphenous thrombophlebitis, mastitis, cystitis, postpartum hemorrhage, and inverted uterus.

[0748] Other disorders and/or diseases of the female reproductive system that may be diagnosed, treated, and/or prevented by the polynucleotides, polypeptides, and agonists or antagonists of the present invention include, but are not limited to, Turner's syndrome, pseudohermaphroditism, premenstrual syndrome, pelvic inflammatory disease, pelvic congestion (vascular engorgement), frigidity, anorgasmia, dyspareunia, ruptured fallopian tube, and Mittelschmerz.

[0749] Developmental and Inherited Disorders

[0750] Polynuceotides or polypeptides, or agonists or antagonists of the present invention may be used to treat, prevent, diagnose, and/or prognose diseases associated with mixed fetal tissues, including, but not limited to, developmental and inherited disorders or defects of the nervous system, musculoskelelal system, execretory system, cardiovascular system, hematopoietic system, gastrointestinal system, reproductive system, and respiratory system. Compositions of the present invention may also be used to treat, prevent, diagnose, and/or prognose developmental and inherited disorders or defects associated with, but not limited to, skin, hair, visual, and auditory tissues, metabolism. Additionally, the compositions of the invention may be useful in the diagnosis, treatment, and/or prevention of disorders or diseases associated with, but not limited to, chromosomal or genetic abnormalities and hyperproliferation or neoplasia.

[0751] Disorders or defects of the nervous system associated with developmental or inherited abnormalities that may be diagnosed, treated, and/or prevented with the compostions of the invention include, but are not limited to, adrenoleukodystrophy, agenesis of corpus callosum, Alexander disease, anencephaly, Angelman syndrome, Arnold-Chiari deformity, Batten disease, Canavan disease, cephalic disorders, Charcot-Marie-Tooth disease, encephalocele, Friedreich's ataxia, Gaucher's disease, Gorlin syndrome, Hallervorden-Spatz disease, hereditary spastic paraplegia, Huntington disease, hydranencephaly, hydrocephalus, Joubert syndrome, Lesch-Nyhan syndrome, leukodystrophy, Menkes disease, microcephaly, Niemann-Pick Type C1, neurofibromatosis, porencephaly, progeria, proteus syndrome, Refsum disease, spina bifida, Sturge-Weber syndrome, Tay-Sachs disease, tuberous sclerosis, and von Hippel-Lindau disease.

[0752] Developmental and inherited disorders resulting in disorders or defects of the musculoskeletal system that may be diagnosed, treated, and/or prevented with the compositions of the invention include, but are not limited to, achondroplasia, atlanto-occipital fusion, arthrogryposis mulitplex congenita, autosomal recessive muscular dystrophy, Becker's muscular dystrophy, cerebral palsy, choanal atresia, cleft lip, cleft palate, clubfoot, congenital amputation, congenital dislocation of the hip, congenital torticollis, congenital scoliosis, dopa-repsonsive dystonia, Duchenne muscular dystrophy, early-onset generalized dystonia, femoral torsion, Gorlin syndrome, hypophosphatasia, Klippel-Feil syndrome, knee dislocation, myoclonic dystonia, myotonic dystrophy, nail-patella syndrome, osteogenesis imperfecta, paroxysmal dystonia, progeria, prune-belly syndrome, rapid-onset dystonia parkinsonism, scolosis, syndactyly, Treacher Collins' syndrome, velocardiofacial syndrome, and X-linked dystonia-parkinsonism.

[0753] Developmental or hereditary disorders or defects of the excretory system that may be diagnosed, treated, and/or prevented with the compositions of the invention include, but are not limited to, Alport's syndrome, Bartter's syndrome, bladder diverticula, bladder exstrophy, cystinuria, epispadias, Fanconi's syndrome, Hartnup disease, horseshoe kidney, hypospadias, kidney agenesis, kidney ectopia, kidney malrotation, Liddle's syndrome, medullary cystic disease, medullary sponge, multicystic kidney, kidney polycystic kidney disease, nail-patella syndrome, Potter's syndrome, urinary tract flow obstruction, vitamin D-resistant rickets, and Wilm's tumor.

[0754] Cardiovascular disorders or defects of developmental or hereditary origin that may be diagnosed, treated, and/or prevented with the compositions of the inventtion include, but are not limited to, aortic valve stenosis, atrial septal defects, artioventricular (A-V) canal defect, bicuspid aortic valve, coarctation or the aorta, dextrocardia, Ebstein's anomaly, Eisenmenger's complex, hypoplastic left heart syndrome, Marfan syndrome, patent ductus arteriosus, progeria, pulmonary atresia, pulmonary valve stenosis, subaortic stenosis, tetralogy of fallot, total anomalous pulmonary venous (P-V) connection, transposition of the great arteries, tricuspid atresia, truncus arteriosus, ventricular septal defects. Developmental or inherited disorders resulting in disorders involving the hematopoietic system that may be diagnosed, treated, and/or prevented with the compositions of the invention include, but not limited to, Bernard-Soulier syndrome, Chédiak-Higashi syndrome, hemophilia, Hermansky-Pudlak syndrome, sickle cell anemia, storage pool disease, thromboxane A2 dysfunction, thrombasthenia, and von Willebrand's disease.

[0755] The compositions of the invention may also be used to diagnose, treat, and/or prevent developmental and inherited disorders resulting in disorders or defects of the gastrointestinal system, including, but not limited to, anal atresia, biliary atresia, esophageal atresia, diaphragmatic hernia, Hirschsprung's disease, Meckel's diverticulum, oligohydranmios, omphalocele, polyhydramnios, porphyria, situs inversus viscera. Developmental or inherited disorders resulting in metabolic disorders that may be diagnosed, treated, and/or prevented with the compositions of the invention include, but are not limited to, alpha-1 antitrypsin deficiency, cystic fibrosis, hemochromatosis, lysosomal storage disease, phenylketonuria, Wilson's disease, and Zellweger syndrome.

[0756] Disorders of the reproductive system that are developmentally or hereditary related that may also be diagnosed, treated, and/or prevented with the compositions of the invention include, but are not limited to, androgen insensitivity syndrome, ambiguous genitalia, autosomal sex reversal, congenital adreneal hyperplasia, gonadoblastoma, ovarian germ cell cancer, pseudohermphroditism, true hermaphroditism, undescended testis, XX male syndrome, and XY female type gonadal dysgenesis. The compositions of the invention may also be used to diagnose, treat, and/or prevent developmental or inherited respiratory defects including, but not limited to, askin tumor, azygos lobe, congenital diaphragmatic hernia, congenital lobar emphysema, cystic adenomatoid malformation, lobar emphysema, hyaline membrane disease, and pectus excavatum.

[0757] Developmental or inherited disorders may also result from chromosomal or genetic aberration that may be diagnosed, treated, and/or prevented with the compositions of the invention including, but not limited to, 4p-syndrome, cri du chat syndrome, Digeorge syndrome, Down's syndrome, Edward's syndrome, fragile X syndrome, Klinefelter's syndrome, Patau's syndrome, Prader-Willi syndrome, progeria, Turner's syndrome, triple X syndrome, and XYY syndrome. Other developmental disorders that can be diagnosed, treated, and/or prevented with the compositions of the invention, include, but are not limited to, fetal alcohol syndrome, and can be caused by environmental factors surrounding the developing fetus.

[0758] The compositions of the invention may further be able to be used to diagnose, treat, and/or prevent errors in development or a genetic disposition that may result in hyperproliferative disorders or neoplasms, including, but not limited to, acute childhood lymphoblastic leukemia, askin tumor, Beckwith-Wiedemann syndrome, childhood acute myeloid leukemia, childhood brain stem glioma, childhood cerebellar astrocytoma, childhood extracranial germ cell tumors childhood (primary), gonadoblastoma, hepatocellular cancer, childhood Hodgkin's disease, childhood Hodgkin's lymphoma, childhood hypothalamic and visual pathway glioma, childhood (primary) liver cancer, childhood lymphoblastic leukemia, childhood medulloblastoma, childhood non-Hodgkin's lymphoma, childhood pineal and supratentorial primitive neuroectodermal tumors, childhood primary liver cancer, childhood rhabdomyosarcoma, childhood soft tissue sarcoma, Gorlin syndrome, familial multiple endrocrine neoplasia type I, neuroblastoma, ovarian germ cell cancer, pheochromocytoma, retinoblastoma, and Wilm's tumor.

[0759] Polypeptides may be administered using any method known in the art, including, but not limited to, direct needle injection at the delivery site, intravenous injection, topical administration, catheter infusion, biolistic injectors, particle accelerators, gelfoam sponge depots, other commercially available depot materials, osmotic pumps, oral or suppositorial solid pharmaceutical formulations, decanting or topical applications during surgery, aerosol delivery. Such methods are known in the art. Polypeptides may be administered as part of a Therapeutic, described in more detail below. Methods of delivering polynucleotides are described in more detail herein.

[0760] Diseases at the Cellular Level

[0761] Diseases associated with increased cell survival or the inhibition of apoptosis that could be treated, prevented, diagnosed and/or prognosed using polynucleotides or polypeptides, as well as antagonists or agonists of the present invention, include cancers (such as follicular lymphomas, carcinomas with p53 mutations, and hormone-dependent tumors, including, but not limited to colon cancer, cardiac tumors, pancreatic cancer, melanoma, retinoblastoma, glioblastoma, lung cancer, intestinal cancer, testicular cancer, stomach cancer, neuroblastoma, myxoma, myoma, lymphoma, endothelioma, osteoblastoma, osteoclastoma, osteosarcoma, chondrosarcoma, adenoma, breast cancer, prostate cancer, Kaposi's sarcoma and ovarian cancer); autoimmune disorders (such as, multiple sclerosis, Sjogren's syndrome, Hashimoto's thyroiditis, biliary cirrhosis, Behcet's disease, Crohn's disease, polymyositis, systemic lupus erythematosus and immune-related glomerulonephritis and rheumatoid arthritis) and viral infections (such as herpes viruses, pox viruses and adenoviruses), inflammation, graft v. host disease, acute graft rejection, and chronic graft rejection.

[0762] In preferred embodiments, polynucleotides, polypeptides, and/or antagonists of the invention are used to inhibit growth, progression, and/or metastasis of cancers, in particular those cancers associated with the tissue(s) in which the polypeptide of the invention is expressed, including one, two, three, four, five, or more tissues disclosed in Table 1, column 8 (Tissue Distribution Library Code).

[0763] Additional diseases or conditions associated with increased cell survival that could be treated or detected by polynucleotides or polypeptides, or agonists or antagonists of the present invention include, but are not limited to, progression, and/or metastases of malignancies and related disorders such as leukemia (including acute leukemias (e.g., acute lymphocytic leukemia, acute myelocytic leukemia (including myeloblastic, promyelocytic, myelomonocytic, monocytic, and erythroleukemia)) and chronic leukemias (e.g., chronic myelocytic (granulocytic) leukemia and chronic lymphocytic leukemia)), polycythemia vera, lymphomas (e.g., Hodgkin's disease and non-Hodgkin's disease), multiple myeloma, Waldenstrom's macroglobulinemia, heavy chain disease, and solid tumors including, but not limited to, sarcomas and carcinomas such as fibrosarcoma, myxosarcoma, liposarcoma, chondrosarcoma, osteogenic sarcoma, chordoma, angiosarcoma, endotheliosarcoma, lymphangiosarcoma, lymphangioendotheliosarcoma, synovioma, mesothelioma, Ewing's tumor, leiomyosarcoma, rhabdomyosarcoma, colon carcinoma, pancreatic cancer, breast cancer, ovarian cancer, prostate cancer, squamous cell carcinoma, basal cell carcinoma, adenocarcinoma, sweat gland carcinoma, sebaceous gland carcinoma, papillary carcinoma, papillary adenocarcinomas, cystadenocarcinoma, medullary carcinoma, bronchogenic carcinoma, renal cell carcinoma, hepatoma, bile duct carcinoma, choriocarcinoma, seminoma, embryonal carcinoma, Wilm's tumor, cervical cancer, testicular tumor, lung carcinoma, small cell lung carcinoma, bladder carcinoma, epithelial carcinoma, glioma, astrocytoma, medulloblastoma, craniopharyngioma, ependymoma, pinealoma, hemangioblastoma, acoustic neuroma, oligodendroglioma, menangioma, melanoma, neuroblastoma, and retinoblastoma.

[0764] Diseases associated with increased apoptosis that could be treated, prevented, diagnosted, and/or prognosed using polynucleotides or polypeptides, as well as agonists or antagonists of the present invention, include, but are not limited to, AIDS; neurodegenerative disorders (such as Alzheimer's disease, Parkinson's disease, Amyotrophic lateral sclerosis, Retinitis pigmentosa, Cerebellar degeneration and brain tumor or prior associated disease); autoimmune disorders (such as, multiple sclerosis, Sjogren's syndrome, Hashimoto's thyroiditis, biliary cirrhosis, Behcet's disease, Crohn's disease, polymyositis, systemic lupus erythematosus and immune-related glomerulonephritis and rheumatoid arthritis) myelodysplastic syndromes (such as aplastic anemia), graft v. host disease, ischemic injury (such as that caused by myocardial infarction, stroke and reperfusion injury), liver injury (e.g., hepatitis related liver injury, ischemia/reperfusion injury, cholestosis (bile duct injury) and liver cancer); toxin-induced liver disease (such as that caused by alcohol), septic shock, cachexia and anorexia.

[0765] Wound Healing and Epithelial Cell Proliferation

[0766] In accordance with yet a further aspect of the present invention, there is provided a process for utilizing polynucleotides or polypeptides, as well as agonists or antagonists of the present invention, for therapeutic purposes, for example, to stimulate epithelial cell proliferation and basal keratinocytes for the purpose of wound healing, and to stimulate hair follicle production and healing of dermal wounds. Polynucleotides or polypeptides, as well as agonists or antagonists of the present invention, may be clinically useful in stimulating wound healing including surgical wounds, excisional wounds, deep wounds involving damage of the dermis and epidermis, eye tissue wounds, dental tissue wounds, oral cavity wounds, diabetic ulcers, dermal ulcers, cubitus ulcers, arterial ulcers, venous stasis ulcers, burns resulting from heat exposure or chemicals, and other abnormal wound healing conditions such as uremia, malnutrition, vitamin deficiencies and complications associated with systemic treatment with steroids, radiation therapy and antineoplastic drugs and antimetabolites. Polynucleotides or polypeptides, as well as agonists or antagonists of the present invention, could be used to promote dermal reestablishment subsequent to dermal loss.

[0767] Polynucleotides or polypeptides, as well as agonists or antagonists of the present invention, could be used to increase the adherence of skin grafts to a wound bed and to stimulate re-epithelialization from the wound bed. The following are types of grafts that polynucleotides or polypeptides, agonists or antagonists of the present invention, could be used to increase adherence to a wound bed: autografts, artificial skin, allografts, autodermic graft, autoepdermic grafts, avacular grafts, Blair-Brown grafts, bone graft, brephoplastic grafts, cutis graft, delayed graft, dermic graft, epidermic graft, fascia graft, full thickness graft, heterologous graft, xenograft, homologous graft, hyperplastic graft, lamellar graft, mesh graft, mucosal graft, Ollier-Thiersch graft, omenpal graft, patch graft, pedicle graft, penetrating graft, split skin graft, thick split graft. Polynucleotides or polypeptides, as well as agonists or antagonists of the present invention, can be used to promote skin strength and to improve the appearance of aged skin.

[0768] It is believed that polynucleotides or polypeptides, as well as agonists or antagonists of the present invention, will also produce changes in hepatocyte proliferation, and epithelial cell proliferation in the lung, breast, pancreas, stomach, small intestine, and large intestine. Polynucleotides or polypeptides, as well as agonists or antagonists of the present invention, could promote proliferation of epithelial cells such as sebocytes, hair follicles, hepatocytes, type II pneumocytes, mucin-producing goblet cells, and other epithelial cells and their progenitors contained within the skin, lung, liver, and gastrointestinal tract. Polynucleotides or polypeptides, agonists or antagonists of the present invention, may promote proliferation of endothelial cells, keratinocytes, and basal keratinocytes.

[0769] Polynucleotides or polypeptides, as well as agonists or antagonists of the present invention, could also be used to reduce the side effects of gut toxicity that result from radiation, chemotherapy treatments or viral infections. Polynucleotides or polypeptides, as well as agonists or antagonists of the present invention, may have a cytoprotective effect on the small intestine mucosa. Polynucleotides or polypeptides, as well as agonists or antagonists of the present invention, may also stimulate healing of mucositis (mouth ulcers) that result from chemotherapy and viral infections.

[0770] Polynucleotides or polypeptides, as well as agonists or antagonists of the present invention, could further be used in full regeneration of skin in full and partial thickness skin defects, including burns, (i.e., repopulation of hair follicles, sweat glands, and sebaceous glands), treatment of other skin defects such as psoriasis. Polynucleotides or polypeptides, as well as agonists or antagonists of the present invention, could be used to treat epidermolysis bullosa, a defect in adherence of the epidermis, to the underlying dermis which results in frequent, open and painful blisters by accelerating reepithelialization of these lesions. Polynucleotides or polypeptides, as well as agonists or antagonists of the present invention, could also be used to treat gastric and doudenal ulcers and help heal by scar formation of the mucosal lining and regeneration of glandular mucosa and duodenal mucosal lining more rapidly. Inflammatory bowel diseases, such as Crohn's disease and ulcerative colitis, are diseases, which result in destruction of the mucosal surface of the small or large intestine, respectively. Thus, polynucleotides or polypeptides, as well as agonists or antagonists of the present invention, could be used to promote the resurfacing of the mucosal surface to aid more rapid healing and to prevent progression of inflammatory bowel disease. Treatment with polynucleotides or polypeptides, agonists or antagonists of the present invention, is expected to have a significant effect on the production of mucus throughout the gastrointestinal tract and could be used to protect the intestinal mucosa from injurious substances that are ingested or following surgery. Polynucleotides or polypeptides, as well as agonists or antagonists of the present invention, could be used to treat diseases associate with the under expression.

[0771] Moreover, polynucleotides or polypeptides, as well as agonists or antagonists of the present invention, could be used to prevent and heal damage to the lungs due to various pathological states. Polynucleotides or polypeptides, as well as agonists or antagonists of the present invention, could stimulate proliferation and differentiation and promote the repair of alveoli and brochiolar epithelium to prevent or treat acute or chronic lung damage. For example, emphysema, which results in the progressive loss of aveoli, and inhalation injuries, i.e., resulting from smoke inhalation and burns, that cause necrosis of the bronchiolar epithelium and alveoli could be effectively treated using polynucleotides or polypeptides, agonists or antagonists of the present invention. Also, polynucleotides or polypeptides, as well as agonists or antagonists of the present invention, could be used to stimulate the proliferation of and differentiation of type II pneumocytes, which may help treat or prevent disease such as hyaline membrane diseases, such as infant respiratory distress syndrome and bronchopulmonary displasia, in premature infants.

[0772] Polynucleotides or polypeptides, as well as agonists or antagonists of the present invention, could stimulate the proliferation and differentiation of hepatocytes and, thus, could be used to alleviate or treat liver diseases and pathologies such as fulminant liver failure caused by cirrhosis, liver damage caused by viral hepatitis and toxic substances (i.e., acetaminophen, carbon tetraholoride and other hepatotoxins known in the art).

[0773] In addition, polynucleotides or polypeptides, as well as agonists or antagonists of the present invention, could be used treat or prevent the onset of diabetes mellitus. In patients with newly diagnosed Types I and II diabetes, where some islet cell function remains, polynucleotides or polypeptides, as well as agonists or antagonists of the present invention, could be used to maintain the islet function so as to alleviate, delay or prevent permanent manifestation of the disease. Also, polynucleotides or polypeptides, as well as agonists or antagonists of the present invention, could be used as an auxiliary in islet cell transplantation to improve or promote islet cell function.

[0774] Infectious Disease

[0775] Polynucleotides or polypeptides, as well as agonists or antagonists of the present invention can be used to treat or detect infectious agents. For example, by increasing the immune response, particularly increasing the proliferation and differentiation of B and/or T cells, infectious diseases may be treated. The immune response may be increased by either enhancing an existing immune response, or by initiating a new immune response. Alternatively, polynucleotides or polypeptides, as well as agonists or antagonists of the present invention may also directly inhibit the infectious agent, without necessarily eliciting an immune response.

[0776] Viruses are one example of an infectious agent that can cause disease or symptoms that can be treated or detected by a polynucleotide or polypeptide and/or agonist or antagonist of the present invention. Examples of viruses, include, but are not limited to Examples of viruses, include, but are not limited to the following DNA and RNA viruses and viral families: Arbovirus, Adenoviridae, Arenaviridae, Arterivirus, Birnaviridae, Bunyaviridae, Caliciviridae, Circoviridae, Coronaviridae, Dengue, EBV, HIV, Flaviviridae, Hepadnaviridae (Hepatitis), Herpesviridae (such as, Cytomegalovirus, Herpes Simplex, Herpes Zoster), Mononegavirus (e.g., Paramyxoviridae, Morbillivirus, Rhabdoviridae), Orthomyxoviridae (e.g., Influenza A, Influenza B, and parainfluenza), Papiloma virus, Papovaviridae, Parvoviridae, Picornaviridae, Poxviridae (such as Smallpox or Vaccinia), Reoviridae (e.g., Rotavirus), Retroviridae (HTLV-I, HTLV-II, Lentivirus), and Togaviridae (e.g., Rubivirus). Viruses falling within these families can cause a variety of diseases or symptoms, including, but not limited to: arthritis, bronchiollitis, respiratory syncytial virus, encephalitis, eye infections (e.g., conjunctivitis, keratitis), chronic fatigue syndrome, hepatitis (A, B, C, E, Chronic Active, Delta), Japanese B encephalitis, Junin, Chikungunya, Rift Valley fever, yellow fever, meningitis, opportunistic infections (e.g., AIDS), pneumonia, Burkitt's Lymphoma, chickenpox, hemorrhagic fever, Measles, Mumps, Parainfluenza, Rabies, the common cold, Polio, leukemia, Rubella, sexually transmitted diseases, skin diseases (e.g., Kaposi's, warts), and viremia. polynucleotides or polypeptides, or agonists or antagonists of the invention, can be used to treat or detect any of these symptoms or diseases. In specific embodiments, polynucleotides, polypeptides, or agonists or antagonists of the invention are used to treat: meningitis, Dengue, EBV, and/or hepatitis (e.g., hepatitis B). In an additional specific embodiment polynucleotides, polypeptides, or agonists or antagonists of the invention are used to treat patients nonresponsive to one or more other commercially available hepatitis vaccines. In a further specific embodiment polynucleotides, polypeptides, or agonists or antagonists of the invention are used to treat AIDS.

[0777] Similarly, bacterial or fungal agents that can cause disease or symptoms and that can be treated or detected by a polynucleotide or polypeptide and/or agonist or antagonist of the present invention include, but not limited to, include, but not limited to, the following Gram-Negative and Gram-positive bacteria and bacterial families and fungi: Actinomycetales (e.g., Corynebacterium, Mycobacterium, Norcardia), Cryptococcus neoformans, Aspergillosis, Bacillaceae (e.g., Anthrax, Clostridium), Bacteroidaceae, Blastomycosis, Bordetella, Borrelia (e.g., Borrelia burgdorferi, Brucellosis, Candidiasis, Campylobacter, Coccidioidomycosis, Cryptococcosis, Dermatocycoses, E. coli (e.g., Enterotoxigenic E. coli and Enterohemorrhagic E. coli), Enterobacteriaceae (Klebsiella, Salmonella (e.g., Salmonella typhi, and Salmonella paratyphi), Serratia, Yersinia), Erysipelothrix, Helicobacter, Legionellosis, Leptospirosis, Listeria, Mycoplasmatales, Mycobacterium leprae, Vibrio cholerae, Neisseriaceae (e.g., Acinetobacter, Gonorrhea, Menigococcal), Meisseria meningitidis, Pasteurellacea Infections (e.g., Actinobacillus, Heamophilus (e.g., Heamophilus influenza type B), Pasteurella), Pseudomonas, Rickettsiaceae, Chlamydiaceae, Treponema spp., Leptospira spp., Shigella spp., Staphylococcal, Meningiococcal, Pneumococcal and Streptococcal (e.g., Streptococcus pneumoniae and Group B Streptococcus). These bacterial or fungal families can cause the following diseases or symptoms, including, but not limited to: bacteremia, endocarditis, eye infections (conjunctivitis, tuberculosis, uveitis), gingivitis, opportunistic infections (e.g., AIDS related infections), paronychia, prosthesis-related infections, Reiter's Disease, respiratory tract infections, such as Whooping Cough or Empyema, sepsis, Lyme Disease, Cat-Scratch Disease, Dysentery, Paratyphoid Fever, food poisoning, Typhoid, pneumonia, Gonorrhea, meningitis (e.g., mengitis types A and B), Chlamydia, Syphilis, Diphtheria, Leprosy, Paratuberculosis, Tuberculosis, Lupus, Botulism, gangrene, tetanus, impetigo, Rheumatic Fever, Scarlet Fever, sexually transmitted diseases, skin diseases (e.g., cellulitis, dermatocycoses), toxemia, urinary tract infections, wound infections. Polynucleotides or polypeptides, agonists or antagonists of the invention, can be used to treat or detect any of these symptoms or diseases. In specific embodiments, Ppolynucleotides, polypeptides, agonists or antagonists of the invention are used to treat: tetanus, Diptheria, botulism, and/or meningitis type B.

[0778] Moreover, parasitic agents causing disease or symptoms that can be treated or detected by a polynucleotide or polypeptide and/or agonist or antagonist of the present invention include, but not limited to, the following families or class: Amebiasis, Babesiosis, Coccidiosis, Cryptosporidiosis, Dientamoebiasis, Dourine, Ectoparasitic, Giardiasis, Helminthiasis, Leishmaniasis, Theileriasis, Toxoplasmosis, Trypanosomiasis, and Trichomonas and Sporozoans (e.g., Plasmodium virax, Plasmodium falciparium, Plasmodium malariae and Plasmodium ovale). These parasites can cause a variety of diseases or symptoms, including, but not limited to: Scabies, Trombiculiasis, eye infections, intestinal disease (e.g., dysentery, giardiasis), liver disease, lung disease, opportunistic infections (e.g., AIDS related), malaria, pregnancy complications, and toxoplasmosis. polynucleotides or polypeptides, or agonists or antagonists of the invention, can be used to treat or detect any of these symptoms or diseases.

[0779] Polynucleotides or polypeptides, as well as agonists or antagonists of the present invention of the present invention could either be by administering an effective amount of a polypeptide to the patient, or by removing cells from the patient, supplying the cells with a polynucleotide of the present invention, and returning the engineered cells to the patient (ex vivo therapy). Moreover, the polypeptide or polynucleotide of the present invention can be used as an antigen in a vaccine to raise an immune response against infectious disease.

[0780] Regeneration

[0781] Polynucleotides or polypeptides, as well as agonists or antagonists of the present invention can be used to differentiate, proliferate, and attract cells, leading to the regeneration of tissues. (See, Science 276:59-87 (1997).) The regeneration of tissues could be used to repair, replace, or protect tissue damaged by congenital defects, trauma (wounds, burns, incisions, or ulcers), age, disease (e.g. osteoporosis, osteocarthritis, periodontal disease, liver failure), surgery, including cosmetic plastic surgery, fibrosis, reperfusion injury, or systemic cytokine damage.

[0782] Tissues that could be regenerated using the present invention include organs (e.g., pancreas, liver, intestine, kidney, skin, endothelium), muscle (smooth, skeletal or cardiac), vasculature (including vascular and lymphatics), nervous, hematopoietic, and skeletal (bone, cartilage, tendon, and ligament) tissue. Preferably, regeneration occurs without or decreased scarring. Regeneration also may include angiogenesis.

[0783] Moreover, polynucleotides or polypeptides, as well as agonists or antagonists of the present invention, may increase regeneration of tissues difficult to heal. For example, increased tendon/ligament regeneration would quicken recovery time after damage. Polynucleotides or polypeptides, as well as agonists or antagonists of the present invention could also be used prophylactically in an effort to avoid damage. Specific diseases that could be treated include of tendinitis, carpal tunnel syndrome, and other tendon or ligament defects. A further example of tissue regeneration of non-healing wounds includes pressure ulcers, ulcers associated with vascular insufficiency, surgical, and traumatic wounds.

[0784] Similarly, nerve and brain tissue could also be regenerated by using polynucleotides or polypeptides, as well as agonists or antagonists of the present invention, to proliferate and differentiate nerve cells. Diseases that could be treated using this method include central and peripheral nervous system diseases, neuropathies, or mechanical and traumatic disorders (e.g., spinal cord disorders, head trauma, cerebrovascular disease, and stoke). Specifically, diseases associated with peripheral nerve injuries, peripheral neuropathy (e.g., resulting from chemotherapy or other medical therapies), localized neuropathies, and central nervous system diseases (e.g., Alzheimer's disease, Parkinson's disease, Huntington's disease, amyotrophic lateral sclerosis, and Shy-Drager syndrome), could all be treated using the polynucleotides or polypeptides, as well as agonists or antagonists of the present invention.

[0785] Chemotaxis

[0786] Polynucleotides or polypeptides, as well as agonists or antagonists of the present invention may have chemotaxis activity. A chemotaxic molecule attracts or mobilizes cells (e.g., monocytes, fibroblasts, neutrophils, T-cells, mast cells, eosinophils, epithelial and/or endothelial cells) to a particular site in the body, such as inflammation, infection, or site of hyperproliferation. The mobilized cells can then fight off and/or heal the particular trauma or abnormality.

[0787] Polynucleotides or polypeptides, as well as agonists or antagonists of the present invention may increase chemotaxic activity of particular cells. These chemotactic molecules can then be used to treat inflammation, infection, hyperproliferative disorders, or any immune system disorder by increasing the number of cells targeted to a particular location in the body. For example, chemotaxic molecules can be used to treat wounds and other trauma to tissues by attracting immune cells to the injured location. Chemotactic molecules of the present invention can also attract fibroblasts, which can be used to treat wounds.

[0788] It is also contemplated that polynucleotides or polypeptides, as well as agonists or antagonists of the present invention may inhibit chemotactic activity. These molecules could also be used to treat disorders. Thus, polynucleotides or polypeptides, as well as agonists or antagonists of the present invention could be used as an inhibitor of chemotaxis.

[0789] Binding Activity

[0790] A polypeptide of the present invention may be used to screen for molecules that bind to the polypeptide or for molecules to which the polypeptide binds. The binding of the polypeptide and the molecule may activate (agonist), increase, inhibit (antagonist), or decrease activity of the polypeptide or the molecule bound. Examples of such molecules include antibodies, oligonucleotides, proteins (e.g., receptors),or small molecules.

[0791] Preferably, the molecule is closely related to the natural ligand of the polypeptide, e.g., a fragment of the ligand, or a natural substrate, a ligand, a structural or functional mimetic. (See, Coligan et al., Current Protocols in Immunology 1(2):Chapter 5 (1991).) Similarly, the molecule can be closely related to the natural receptor to which the polypeptide binds, or at least, a fragment of the receptor capable of being bound by the polypeptide (e.g., active site). In either case, the molecule can be rationally designed using known techniques.

[0792] Preferably, the screening for these molecules involves producing appropriate cells, which express the polypeptide. Preferred cells include cells from mammals, yeast, Drosophila, or E. coli. Cells expressing the polypeptide (or cell membrane containing the expressed polypeptide) are then preferably contacted with a test compound potentially containing the molecule to observe binding, stimulation, or inhibition of activity of either the polypeptide or the molecule.

[0793] The assay may simply test binding of a candidate compound to the polypeptide, wherein binding is detected by a label, or in an assay involving competition with a labeled competitor. Further, the assay may test whether the candidate compound results in a signal generated by binding to the polypeptide.

[0794] Alternatively, the assay can be carried out using cell-free preparations, polypeptide/molecule affixed to a solid support, chemical libraries, or natural product mixtures. The assay may also simply comprise the steps of mixing a candidate compound with a solution containing a polypeptide, measuring polypeptide/molecule activity or binding, and comparing the polypeptide/molecule activity or binding to a standard.

[0795] Preferably, an ELISA assay can measure polypeptide level or activity in a sample (e.g., biological sample) using a monoclonal or polyclonal antibody. The antibody can measure polypeptide level or activity by either binding, directly or indirectly, to the polypeptide or by competing with the polypeptide for a substrate.

[0796] Additionally, the receptor to which the polypeptide of the present invention binds can be identified by numerous methods known to those of skill in the art, for example, ligand panning and FACS sorting (Coligan, et al., Current Protocols in Immun., 1(2), Chapter 5, (1991)). For example, expression cloning is employed wherein polyadenylated RNA is prepared from a cell responsive to the polypeptides, for example, NIH3T3 cells which are known to contain multiple receptors for the FGF family proteins, and SC-3 cells, and a cDNA library created from this RNA is divided into pools and used to transfect COS cells or other cells that are not responsive to the polypeptides. Transfected cells which are grown on glass slides are exposed to the polypeptide of the present invention, after they have been labeled. The polypeptides can be labeled by a variety of means including iodination or inclusion of a recognition site for a site-specific protein kinase.

[0797] Following fixation and incubation, the slides are subjected to auto-radiographic analysis. Positive pools are identified and sub-pools are prepared and re-transfected using an iterative sub-pooling and re-screening process, eventually yielding a single clones that encodes the putative receptor.

[0798] As an alternative approach for receptor identification, the labeled polypeptides can be photoaffinity linked with cell membrane or extract preparations that express the receptor molecule. Cross-linked material is resolved by PAGE analysis and exposed to X-ray film. The labeled complex containing the receptors of the polypeptides can be excised, resolved into peptide fragments, and subjected to protein microsequencing. The amino acid sequence obtained from microsequencing would be used to design a set of degenerate oligonucleotide probes to screen a cDNA library to identify the genes encoding the putative receptors.

[0799] Moreover, the techniques of gene-shuffling, motif-shuffling, exon-shuffling, and/or codon-shuffling (collectively referred to as “DNA shuffling”) may be employed to modulate the activities of the polypeptide of the present invention thereby effectively generating agonists and antagonists of the polypeptide of the present invention. See generally, U.S. Pat. Nos. 5,605,793, 5,811,238, 5,830,721, 5,834,252, and 5,837,458, and Patten, P. A., et al., Curr. Opinion Biotechnol. 8:724-33 (1997); Harayama, S. Trends Biotechnol. 16(2):76-82 (1998); Hansson L. O., et al., J. Mol. Biol. 287:265-76 (1999); and Lorenzo, M. M. and Blasco, R. Biotechniques 24(2):308-13 (1998); each of these patents and publications are hereby incorporated by reference). In one embodiment, alteration of polynucleotides and corresponding polypeptides may be achieved by DNA shuffling. DNA shuffling involves the assembly of two or more DNA segments into a desired molecule by homologous, or site-specific, recombination. In another embodiment, polynucleotides and corresponding polypeptides may be altered by being subjected to random mutagenesis by error-prone PCR, random nucleotide insertion or other methods prior to recombination. In another embodiment, one or more components, motifs, sections, parts, domains, fragments, etc., of the polypeptide of the present invention may be recombined with one or more components, motifs, sections, parts, domains, fragments, etc. of one or more heterologous molecules. In preferred embodiments, the heterologous molecules are family members. In further preferred embodiments, the heterologous molecule is a growth factor such as, for example, platelet-derived growth factor (PDGF), insulin-like growth factor (IGF-I), transforming growth factor (TGF)-alpha, epidermal growth factor (EGF), fibroblast growth factor (FGF), TGF-beta, bone morphogenetic protein (BMP)-2, BMP-4, BMP-5, BMP-6, BMP-7, activins A and B, decapentaplegic(dpp), 60A, OP-2, dorsalin, growth differentiation factors (GDFs), nodal, MIS, inhibin-alpha, TGF-beta1, TGF-beta2, TGF-beta3, TGF-beta5, and glial-derived neurotrophic factor (GDNF).

[0800] Other preferred fragments are biologically active fragments of the polypeptide of the present invention. Biologically active fragments are those exhibiting activity similar, but not necessarily identical, to an activity of the polypeptide of the present invention. The biological activity of the fragments may include an improved desired activity, or a decreased undesirable activity.

[0801] Additionally, this invention provides a method of screening compounds to identify those, which modulate the action of the polypeptide of the present invention. An example of such an assay comprises combining a mammalian fibroblast cell, the polypeptide of the present invention, the compound to be screened and ³[H] thymidine under cell culture conditions where the fibroblast cell would normally proliferate. A control assay may be performed in the absence of the compound to be screened and compared to the amount of fibroblast proliferation in the presence of the compound to determine if the compound stimulates proliferation by determining the uptake of ³[H] thymidine in each case. The amount of fibroblast cell proliferation is measured by liquid scintillation chromatography, which measures the incorporation of ³[H] thymidine. Both agonist and antagonist compounds may be identified by this procedure.

[0802] In another method, a mammalian cell or membrane preparation expressing a receptor for a polypeptide of the present invention is incubated with a labeled polypeptide of the present invention in the presence of the compound. The ability of the compound to enhance or block this interaction could then be measured. Alternatively, the response of a known second messenger system following interaction of a compound to be screened and the receptor is measured and the ability of the compound to bind to the receptor and elicit a second messenger response is measured to determine if the compound is a potential agonist or antagonist. Such second messenger systems include but are not limited to, cAMP guanylate cyclase, ion channels or phosphoinositide hydrolysis.

[0803] All of these above assays can be used as diagnostic or prognostic markers. The molecules discovered using these assays can be used to treat disease or to bring about a particular result in a patient (e.g., blood vessel growth) by activating or inhibiting the polypeptide/molecule. Moreover, the assays can discover agents which may inhibit or enhance the production of the polypeptides of the invention from suitably manipulated cells or tissues.

[0804] Therefore, the invention includes a method of identifying compounds which bind to a polypeptide of the invention comprising the steps of: (a) incubating a candidate binding compound with a polypeptide of the present invention; and (b) determining if binding has occurred. Moreover, the invention includes a method of identifying agonists/antagonists comprising the steps of: (a) incubating a candidate compound with a polypeptide of the present invention, (b) assaying a biological activity, and (b) determining if a biological activity of the polypeptide has been altered.

[0805] Targeted Delivery

[0806] In another embodiment, the invention provides a method of delivering compositions to targeted cells expressing a receptor for a polypeptide of the invention, or cells expressing a cell bound form of a polypeptide of the invention.

[0807] As discussed herein, polypeptides or antibodies of the invention may be associated with heterologous polypeptides, heterologous nucleic acids, toxins, or prodrugs via hydrophobic, hydrophilic, ionic and/or covalent interactions. In one embodiment, the invention provides a method for the specific delivery of compositions of the invention to cells by administering polypeptides of the invention (including antibodies) that are associated with heterologous polypeptides or nucleic acids. In one example, the invention provides a method for delivering a therapeutic protein into the targeted cell. In another example, the invention provides a method for delivering a single stranded nucleic acid (e.g., antisense or ribozymes) or double stranded nucleic acid (e.g., DNA that can integrate into the cell's genome or replicate episomally and that can be transcribed) into the targeted cell.

[0808] In another embodiment, the invention provides a method for the specific destruction of cells (e.g., the destruction of tumor cells) by administering polypeptides of the invention (e.g., polypeptides of the invention or antibodies of the invention) in association with toxins or cytotoxic prodrugs.

[0809] By “toxin” is meant compounds that bind and activate endogenous cytotoxic effector systems, radioisotopes, holotoxins, modified toxins, catalytic subunits of toxins, or any molecules or enzymes not normally present in or on the surface of a cell that under defined conditions cause the cell's death. Toxins that may be used according to the methods of the invention include, but are not limited to, radioisotopes known in the art, compounds such as, for example, antibodies (or complement fixing containing portions thereof) that bind an inherent or induced endogenous cytotoxic effector system, thymidine kinase, endonuclease, RNAse, alpha toxin, ricin, abrin, Pseudomonas exotoxin A, diphtheria toxin, saporin, momordin, gelonin, pokeweed antiviral protein, alpha-sarcin and cholera toxin. By “cytotoxic prodrug” is meant a non-toxic compound that is converted by an enzyme, normally present in the cell, into a cytotoxic compound. Cytotoxic prodrugs that may be used according to the methods of the invention include, but are not limited to, glutamyl derivatives of benzoic acid mustard alkylating agent, phosphate derivatives of etoposide or mitomycin C, cytosine arabinoside, daunorubisin, and phenoxyacetamide derivatives of doxorubicin.

[0810] Drug Screening

[0811] Further contemplated is the use of the polypeptides of the present invention, or the polynucleotides encoding these polypeptides, to screen for molecules, which modify the activities of the polypeptides of the present invention. Such a method would include contacting the polypeptide of the present invention with a selected compound(s) suspected of having antagonist or agonist activity, and assaying the activity of these polypeptides following binding.

[0812] This invention is particularly useful for screening therapeutic compounds by using the polypeptides of the present invention, or binding fragments thereof, in any of a variety of drug screening techniques. The polypeptide or fragment employed in such a test may be affixed to a solid support, expressed on a cell surface, free in solution, or located intracellularly. One method of drug screening utilizes eukaryotic or prokaryotic host cells which are stably transformed with recombinant nucleic acids expressing the polypeptide or fragment. Drugs are screened against such transformed cells in competitive binding assays. One may measure, for example, the formulation of complexes between the agent being tested and a polypeptide of the present invention.

[0813] Thus, the present invention provides methods of screening for drugs or any other agents, which affect activities mediated by the polypeptides of the present invention. These methods comprise contacting such an agent with a polypeptide of the present invention or a fragment thereof and assaying for the presence of a complex between the agent and the polypeptide or a fragment thereof, by methods well known in the art. In such a competitive binding assay, the agents to screen are typically labeled. Following incubation, free agent is separated from that present in bound form, and the amount of free or uncomplexed label is a measure of the ability of a particular agent to bind to the polypeptides of the present invention.

[0814] Another technique for drug screening provides high throughput screening for compounds having suitable binding affinity to the polypeptides of the present invention, and is described in great detail in European Patent Application 84/03564, published on Sep. 13, 1984, which is incorporated herein by reference herein. Briefly stated, large numbers of different small peptide test compounds are synthesized on a solid substrate, such as plastic pins or some other surface. The peptide test compounds are reacted with polypeptides of the present invention and washed. Bound polypeptides are then detected by methods well known in the art. Purified polypeptides are coated directly onto plates for use in the aforementioned drug screening techniques. In addition, non-neutralizing antibodies may be used to capture the peptide and immobilize it on the solid support.

[0815] This invention also contemplates the use of competitive drug screening assays in which neutralizing antibodies capable of binding polypeptides of the present invention specifically compete with a test compound for binding to the polypeptides or fragments thereof. In this manner, the antibodies are used to detect the presence of any peptide which shares one or more antigenic epitopes with a polypeptide of the invention.

[0816] Antisense And Ribozyme (Antagonists)

[0817] In specific embodiments, antagonists according to the present invention are nucleic acids corresponding to the sequences contained in SEQ ID NO:X, or the complementary strand thereof, and/or to cDNA sequences contained in cDNA Clone ID NO:Z identified for example, in Table 1. In one embodiment, antisense sequence is generated internally, by the organism, in another embodiment, the antisense sequence is separately administered (see, for example, O'Connor, J., Neurochem. 56:560 (1991). Oligodeoxynucleotides as Antisense Inhibitors of Gene Expression, CRC Press, Boca Raton, Fla. (1988). Antisense technology can be used to control gene expression through antisense DNA or RNA, or through triple-helix formation. Antisense techniques are discussed for example, in Okano, J., Neurochem. 56:560 (1991); Oligodeoxynucleotides as Antisense Inhibitors of Gene Expression, CRC Press, Boca Raton, Fla. (1988). Triple helix formation is discussed in, for instance, Lee et al., Nucleic Acids Research 6:3073 (1979); Cooney et al., Science 241:456 (1988); and Dervan et al., Science 251:1300 (1991). The methods are based on binding of a polynucleotide to a complementary DNA or RNA.

[0818] For example, the use of c-myc and c-myb antisense RNA constructs to inhibit the growth of the non-lymphocytic leukemia cell line HL-60 and other cell lines was previously described. (Wickstrom et al. (1988); Anfossi et al. (1989)). These experiments were performed in vitro by incubating cells with the oligoribonucleotide. A similar procedure for in vivo use is described in WO 91/15580. Briefly, a pair of oligonucleotides for a given antisense RNA is produced as follows: A sequence complimentary to the first 15 bases of the open reading frame is flanked by an EcoR1 site on the 5′ end and a HindIII site on the 3′ end. Next, the pair of oligonucleotides is heated at 90° C. for one minute and then annealed in 2× ligation buffer (20 mM TRIS HCl pH 7.5, 10 mM MgCl2, 10 MM dithiothreitol (DTT) and 0.2 mM ATP) and then ligated to the EcoR1/Hind III site of the retroviral vector PMV7 (WO 91/15580).

[0819] For example, the 5′ coding portion of a polynucleotide that encodes the polypeptide of the present invention may be used to design an antisense RNA oligonucleotide of from about 10 to 40 base pairs in length. A DNA oligonucleotide is designed to be complementary to a region of the gene involved in transcription thereby preventing transcription and the production of the receptor. The antisense RNA oligonucleotide hybridizes to the mRNA in vivo and blocks translation of the mRNA molecule into receptor polypeptide.

[0820] In one embodiment, the antisense nucleic acid of the invention is produced intracellularly by transcription from an exogenous sequence. For example, a vector or a portion thereof, is transcribed, producing an antisense nucleic acid (RNA) of the invention. Such a vector would contain a sequence encoding the antisense nucleic acid. Such a vector can remain episomal or become chromosomally integrated, as long as it can be transcribed to produce the desired antisense RNA. Such vectors can be constructed by recombinant DNA technology methods standard in the art. Vectors can be plasmid, viral, or others known in the art, used for replication and expression in vertebrate cells. Expression of the sequence encoding the polypeptide of the present invention or fragments thereof, can be by any promoter known in the art to act in vertebrate, preferably human cells. Such promoters can be inducible or constitutive. Such promoters include, but are not limited to, the SV40 early promoter region (Bernoist and Chambon, Nature 29:304-310 (1981), the promoter contained in the 3′ long terminal repeat of Rous sarcoma virus (Yamamoto et al., Cell 22:787-797 (1980), the herpes thymidine promoter (Wagner et al., Proc. Natl. Acad. Sci. U.S.A. 78:1441-1445 (1981), the regulatory sequences of the metallothionein gene (Brinster, et al., Nature 296:39-42 (1982)), etc.

[0821] The antisense nucleic acids of the invention comprise a sequence complementary to at least a portion of an RNA transcript of a gene of the present invention. However, absolute complementarity, although preferred, is not required. A sequence “complementary to at least a portion of an RNA,” referred to herein, means a sequence having sufficient complementarity to be able to hybridize with the RNA, forming a stable duplex; in the case of double stranded antisense nucleic acids, a single strand of the duplex DNA may thus be tested, or triplex formation may be assayed. The ability to hybridize will depend on both the degree of complementarity and the length of the antisense nucleic acid. Generally, the larger the hybridizing nucleic acid, the more base mismatches with a RNA it may contain and still form a stable duplex (or triplex as the case may be). One skilled in the art can ascertain a tolerable degree of mismatch by use of standard procedures to determine the melting point of the hybridized complex.

[0822] Oligonucleotides that are complementary to the 5′ end of the message, e.g., the 5′ untranslated sequence up to and including the AUG initiation codon, should work most efficiently at inhibiting translation. However, sequences complementary to the 3′ untranslated sequences of mRNAs have been shown to be effective at inhibiting translation of mRNAs as well. See generally, Wagner, R., 1994, Nature 372:333-335. Thus, oligonucleotides complementary to either the 5′- or 3′-non-translated, non-coding regions of polynucleotide sequences described herein could be used in an antisense approach to inhibit translation of endogenous mRNA. Oligonucleotides complementary to the 5′ untranslated region of the mRNA should include the complement of the AUG start codon. Antisense oligonucleotides complementary to mRNA coding regions are less efficient inhibitors of translation but could be used in accordance with the invention. Whether designed to hybridize to the 5′-, 3′- or coding region of mRNA of the present invention, antisense nucleic acids should be at least six nucleotides in length, and are preferably oligonucleotides ranging from 6 to about 50 nucleotides in length. In specific aspects the oligonucleotide is at least 10 nucleotides, at least 17 nucleotides, at least 25 nucleotides or at least 50 nucleotides.

[0823] The polynucleotides of the invention can be DNA or RNA or chimeric mixtures or derivatives or modified versions thereof, single-stranded or double-stranded. The oligonucleotide can be modified at the base moiety, sugar moiety, or phosphate backbone, for example, to improve stability of the molecule, hybridization, etc. The oligonucleotide may include other appended groups such as peptides (e.g., for targeting host cell receptors in vivo), or agents facilitating transport across the cell membrane (see, e.g., Letsinger et al., 1989, Proc. Natl. Acad. Sci. U.S.A. 86:6553-6556; Lemaitre et al., 1987, Proc. Natl. Acad. Sci. 84:648-652; PCT Publication No. WO88/09810, published Dec. 15, 1988) or the blood-brain barrier (see, e.g., PCT Publication No. WO89/10134, published Apr. 25, 1988), hybridization-triggered cleavage agents. (See, e.g., Krol et al., 1988, BioTechniques 6:958-976) or intercalating agents. (See, e.g., Zon, 1988, Pharm. Res. 5:539-549). To this end, the oligonucleotide may be conjugated to another molecule, e.g., a peptide, hybridization triggered cross-linking agent, transport agent, hybridization-triggered cleavage agent, etc.

[0824] The antisense oligonucleotide may comprise at least one modified base moiety which is selected from the group including, but not limited to, 5-fluorouracil, 5-bromouracil, 5-chlorouracil, 5-iodouracil, hypoxanthine, xantine, 4-acetylcytosine, 5-(carboxyhydroxylmethyl) uracil, 5-carboxymethylaminomethyl-2-thiouridine, 5-carboxymethylaminomethyluracil, dihydrouracil, beta-D-galactosylqueosine, inosine, N6-isopentenyladenine, 1-methylguanine, 1-methylinosine, 2,2-dimethylguanine, 2-methyladenine, 2-methylguanine, 3-methylcytosine, 5-methylcytosine, N6-adenine, 7-methylguanine, 5-methylaminomethyluracil, 5-methoxyaminomethyl-2-thiouracil, beta-D-mannosylqueosine, 5′-methoxycarboxymethyluracil, 5-methoxyuracil, 2-methylthio-N6-isopentenyladenine, uracil-5-oxyacetic acid (v), wybutoxosine, pseudouracil, queosine, 2-thiocytosine, 5-methyl-2-thiouracil, 2-thiouracil, 4-thiouracil, 5-methyluracil, uracil-5-oxyacetic acid methylester, uracil-5-oxyacetic acid (v), 5-methyl-2-thiouracil, 3-(3-amino-3-N-2-carboxypropyl) uracil, (acp3)w, and 2,6-diaminopurine.

[0825] The antisense oligonucleotide may also comprise at least one modified sugar moiety selected from the group including, but not limited to, arabinose, 2-fluoroarabinose, xylulose, and hexose.

[0826] In yet another embodiment, the antisense oligonucleotide comprises at least one modified phosphate backbone selected from the group including, but not limited to, a phosphorothioate, a phosphorodithioate, a phosphoramidothioate, a phosphoramidate, a phosphordiamidate, a methylphosphonate, an alkyl phosphotriester, and a formacetal or analog thereof.

[0827] In yet another embodiment, the antisense oligonucleotide is an a-anomeric oligonucleotide. An a-anomeric oligonucleotide forms specific double-stranded hybrids with complementary RNA in which, contrary to the usual b-units, the strands run parallel to each other (Gautier et al., 1987, Nucl. Acids Res. 15:6625-6641). The oligonucleotide is a 2′-0-methylribonucleotide (Inoue et al., 1987, Nucl. Acids Res. 15:6131-6148), or a chimeric RNA-DNA analogue (Inoue et al., 1987, FEBS Lett. 215:327-330).

[0828] Polynucleotides of the invention may be synthesized by standard methods known in the art, e.g. by use of an automated DNA synthesizer (such as are commercially available from Biosearch, Applied Biosystems, etc.). As examples, phosphorothioate oligonucleotides may be synthesized by the method of Stein et al. (1988, Nucl. Acids Res. 16:3209), methylphosphonate oligonucleotides can be prepared by use of controlled pore glass polymer supports (Sarin et al., 1988, Proc. Natl. Acad. Sci. U.S.A. 85:7448-7451), etc.

[0829] While antisense nucleotides complementary to the coding region sequence could be used, those complementary to the transcribed untranslated region are most preferred.

[0830] Potential antagonists according to the invention also include catalytic RNA, or a ribozyme (See, e.g., PCT International Publication WO 90/11364, published Oct. 4, 1990; Sarver et al, Science 247:1222-1225 (1990). While ribozymes that cleave mRNA at site specific recognition sequences can be used to destroy mRNAs, the use of hammerhead ribozymes is preferred. Hammerhead ribozymes cleave mRNAs at locations dictated by flanking regions that form complementary base pairs with the target mRNA. The sole requirement is that the target mRNA have the following sequence of two bases: 5′-UG-3′. The construction and production of hammerhead ribozymes is well known in the art and is described more fully in Haseloff and Gerlach, Nature 334:585-591 (1988). There are numerous potential hammerhead ribozyme cleavage sites within the nucleotide sequence of SEQ ID NO:X. Preferably, the ribozyme is engineered so that the cleavage recognition site is located near the 5′ end of the mRNA; i.e., to increase efficiency and minimize the intracellular accumulation of non-functional mRNA transcripts.

[0831] As in the antisense approach, the ribozymes of the invention can be composed of modified oligonucleotides (e.g. for improved stability, targeting, etc.) and should be delivered to cells which express in vivo. DNA constructs encoding the ribozyme may be introduced into the cell in the same manner as described above for the introduction of antisense encoding DNA. A preferred method of delivery involves using a DNA construct “encoding” the ribozyme under the control of a strong constitutive promoter, such as, for example, pol III or pol II promoter, so that transfected cells will produce sufficient quantities of the ribozyme to destroy endogenous messages and inhibit translation. Since ribozymes unlike antisense molecules, are catalytic, a lower intracellular concentration is required for efficiency.

[0832] Antagonist/agonist compounds may be employed to inhibit the cell growth and proliferation effects of the polypeptides of the present invention on neoplastic cells and tissues, i.e. stimulation of angiogenesis of tumors, and, therefore, retard or prevent abnormal cellular growth and proliferation, for example, in tumor formation or growth.

[0833] The antagonist/agonist may also be employed to prevent hyper-vascular diseases, and prevent the proliferation of epithelial lens cells after extracapsular cataract surgery. Prevention of the mitogenic activity of the polypeptides of the present invention may also be desirous in cases such as restenosis after balloon angioplasty.

[0834] The antagonist/agonist may also be employed to prevent the growth of scar tissue during wound healing.

[0835] The antagonist/agonist may also be employed to treat the diseases described herein.

[0836] Thus, the invention provides a method of treating disorders or diseases, including but not limited, to the disorders or diseases listed throughout this application, associated with overexpression of a polynucleotide of the present invention by administering to a patient (a) an antisense molecule directed to the polynucleotide of the present invention, and/or (b) a ribozyme directed to the polynucleotide of the present invention.

[0837] Binding Peptides and Other Molecules

[0838] The invention also encompasses screening methods for identifying polypeptides and nonpolypeptides that bind the polypeptides of the invention, and the binding molecules identified thereby. These binding molecules are useful, for example, as agonists and antagonists of the polypeptides of the invention. Such agonists and antagonists can be used, in accordance with the invention, in the therapeutic embodiments described in detail, below.

[0839] This method comprises the steps of: (1) contacting plasma membrane associated antigen polypeptides or plasma membrane associated antigen-like polypeptides with a plurality of molecules; and (2) identifying a molecule that binds the plasma membrane associated antigen polypeptides or plasma membrane associated antigen-like polypeptides.

[0840] The step of contacting the plasma membrane associated antigen polypeptides or plasma membrane associated antigen-like polypeptides with the plurality of molecules may be effected in a number of ways. For example, one may contemplate immobilizing the plasma membrane associated antigen polypeptides or the plasma membrane associated antigen-like polypeptides on a solid support and bringing a solution of the plurality of molecules in contact with the immobilized plasma membrane associated antigen polypeptides or plasma membrane associated antigen-like polypeptides. Such a procedure would be akin to an affinity chromatographic process, with the affinity matrix being comprised of the immobilized plasma membrane associated antigen polypeptides or plasma membrane associated antigen-like polypeptides. The molecules having a selective affinity for the plasma membrane associated antigen polypeptides or plasma membrane associated antigen-like polypeptides can then be purified by affinity selection. The nature of the solid support, process for attachment of the plasma membrane associated antigen polypeptides or plasma membrane associated antigen-like polypeptides to the solid support, solvent, and conditions of the affinity isolation or selection are largely conventional and well known to those of ordinary skill in the art.

[0841] Alternatively, one may also separate a plurality of polypeptides into substantially separate fractions comprising a subset of or individual polypeptides. For instance, one can separate the plurality of polypeptides by gel electrophoresis, column chromatography, or like method known to those of ordinary skill for the separation of polypeptides. The individual polypeptides can also be produced by a transformed host cell in such a way as to be expressed on or about its outer surface (e.g., a recombinant phage). Individual isolates can then be “probed” by the plasma membrane associated antigen polypeptides or plasma membrane associated antigen-like polypeptides, optionally in the presence of an inducer should one be required for expression, to determine if any selective affinity interaction takes place between the plasma membrane associated antigen polypeptides or plasma membrane associated antigen-like polypeptides and the individual clone. Prior to contacting the plasma membrane associated antigen polypeptides or plasma membrane associated antigen-like polypeptides with each fraction comprising individual polypeptides, the polypeptides could first be transferred to a solid support for additional convenience. Such a solid support may simply be a piece of filter membrane, such as one made of nitrocellulose or nylon. In this manner, positive clones could be identified from a collection of transformed host cells of an expression library, which harbor a DNA construct encoding a polypeptide having a selective affinity for plasma membrane associated polypeptides or plasma membrane associated antigen-like polypeptides. Furthermore, the amino acid sequence of the polypeptide having a selective affinity for the plasma membrane associated antigen polypeptides or plasma membrane associated antigen-like polypeptides can be determined directly by conventional means or the coding sequence of the DNA encoding the polypeptide can frequently be determined more conveniently. The primary sequence can then be deduced from the corresponding DNA sequence. If the amino acid sequence is to be determined from the polypeptide itself, one may use microsequencing techniques. The sequencing technique may include mass spectroscopy.

[0842] In certain situations, it may be desirable to wash away any unbound plasma membrane associated antigen polypeptides or plasma membrane associated antigen-like polypeptides, or alternatively, unbound polypeptides, from a mixture of the plasma membrane associated antigen polypeptides or plasma membrane associated antigen-like polypeptides and the plurality of polypeptides prior to attempting to determine or to detect the presence of a selective affinity interaction. Such a wash step may be particularly desirable when the plasma membrane associated antigen polypeptides or plasma membrane associated antigen-like polypeptides or the plurality of polypeptides is bound to a solid support.

[0843] The plurality of molecules provided according to this method may be provided by way of diversity libraries, such as random or combinatorial peptide or nonpeptide libraries which can be screened for molecules that specifically bind the polypeptides of the invention. Many libraries are known in the art that can be used, e.g., chemically synthesized libraries, recombinant (e.g., phage display libraries), and in vitro translation-based libraries. Examples of chemically synthesized libraries are described in Fodor et al., 1991, Science 251:767-773; Houghten et al., 1991, Nature 354:84-86; Lam et al., 1991, Nature 354:82-84; Medynski, 1994, Bio/Technology 12:709-710;Gallop et al., 1994, J. Medicinal Chemistry 37(9):1233-1251; Ohlmeyer et al., 1993, Proc. Natl. Acad. Sci. USA 90:10922-10926; Erb et al., 1994, Proc. Natl. Acad. Sci. USA 91:11422-11426; Houghten et al., 1992, Biotechniques 13:412; Jayawickreme et al., 1994, Proc. Natl. Acad. Sci. USA 91:1614-1618; Salmon et al., 1993, Proc. Natl. Acad. Sci. USA 90:11708-11712; PCT Publication No. WO 93/20242; and Brenner and Lerner, 1992, Proc. Natl. Acad. Sci. USA 89:5381-5383.

[0844] Examples of phage display libraries are described in Scott and Smith, 1990, Science 249:386-390; Devlin et al., 1990, Science, 249:404-406; Christian, R. B., et al., 1992, J. Mol. Biol. 227:711-718); Lenstra, 1992, J. Immunol. Meth. 152:149-157; Kay et al., 1993, Gene 128:59-65; and PCT Publication No. WO 94/18318 dated Aug. 18, 1994.

[0845] In vitro translation-based libraries include but are not limited to those described in PCT Publication No. WO 91/05058 dated Apr. 18, 1991; and Mattheakis et al., 1994, Proc. Natl. Acad. Sci. USA 91:9022-9026.

[0846] By way of examples of nonpeptide libraries, a benzodiazepine library (see e.g., Bunin et al., 1994, Proc. Natl. Acad. Sci. USA 91:4708-4712) can be adapted for use. Peptoid libraries (Simon et al., 1992, Proc. Natl. Acad. Sci. USA 89:9367-9371) can also be used. Another example of a library that can be used, in which the amide functionalities in peptides have been permethylated to generate a chemically transformed combinatorial library, is described by Ostresh et al. (1994, Proc. Natl. Acad. Sci. USA 91:11138-11142).

[0847] The variety of non-peptide libraries that are useful in the present invention is great. For example, Ecker and Crooke, 1995, Bio/Technology 13:351-360 list benzodiazepines, hydantoins, piperazinediones, biphenyls, sugar analogs, beta-mercaptoketones, arylacetic acids, acylpiperidines, benzopyrans, cubanes, xanthines, aminimides, and oxazolones as among the chemical species that form the basis of various libraries.

[0848] Non-peptide libraries can be classified broadly into two types: decorated monomers and oligomers. Decorated monomer libraries employ a relatively simple scaffold structure upon which a variety functional groups is added. Often the scaffold will be a molecule with a known useful pharmacological activity. For example, the scaffold might be the benzodiazepine structure.

[0849] Non-peptide oligomer libraries utilize a large number of monomers that are assembled together in ways that create new shapes that depend on the order of the monomers. Among the monomer units that have been used are carbamates, pyrrolinones, and morpholinos. Peptoids, peptide-like oligomers in which the side chain is attached to the alpha amino group rather than the alpha carbon, form the basis of another version of non-peptide oligomer libraries. The first non-peptide oligomer libraries utilized a single type of monomer and thus contained a repeating backbone. Recent libraries have utilized more than one monomer, giving the libraries added flexibility.

[0850] Screening the libraries can be accomplished by any of a variety of commonly known methods. See, e.g., the following references, which disclose screening of peptide libraries: Parmley and Smith, 1989, Adv. Exp. Med. Biol. 251:215-218; Scott and Smith, 1990, Science 249:386-390; Fowlkes et al., 1992; BioTechniques 13:422-427; Oldenburg et al., 1992, Proc. Natl. Acad. Sci. USA 89:5393-5397; Yu et al., 1994, Cell 76:933-945; Staudt et al., 1988, Science 241:577-580; Bock et al., 1992, Nature 355:564-566; Tuerk et al., 1992, Proc. Natl. Acad. Sci. USA 89:6988-6992; Ellington et al., 1992, Nature 355:850-852; U.S. Pat. No. 5,096,815, U.S. Pat. No. 5,223,409, and U.S. Pat. No. 5,198,346, all to Ladner et al.; Rebar and Pabo, 1993, Science 263:671-673; and CT Publication No. WO 94/18318.

[0851] In a specific embodiment, screening to identify a molecule that binds the polypeptides of the invention can be carried out by contacting the library members with a plasma membrane associated antigen polypeptides or plasma membrane associated antigen-like polypeptides immobilized on a solid phase and harvesting those library members that bind to the plasma membrane associated antigen polypeptides or plasma membrane associated antigen-like polypeptides. Examples of such screening methods, termed “panning” techniques are described by way of example in Parmley and Smith, 1988, Gene 73:305-318; Fowlkes et al., 1992, BioTechniques 13:422-427; International Publication No. WO 94/18318; and in references cited herein.

[0852] In another embodiment, the two-hybrid system for selecting interacting proteins in yeast (Fields and Song, 1989, Nature 340:245-246; Chien et al., 1991, Proc. Natl. Acad. Sci. USA 88:9578-9582) can be used to identify molecules that specifically bind to plasma membrane associated antigen polypeptides or plasma membrane associated antigen-like polypeptides.

[0853] Where the binding molecule is a polypeptide, the polypeptide can be conveniently selected from any peptide library, including random peptide libraries, combinatorial peptide libraries, or biased peptide libraries. The term “biased” is used herein to mean that the method of generating the library is manipulated so as to restrict one or more parameters that govern the diversity of the resulting collection of molecules, in this case peptides.

[0854] Thus, a truly random peptide library would generate a collection of peptides in which the probability of finding a particular amino acid at a given position of the peptide is the same for all 20 amino acids. A bias can be introduced into the library, however, by specifying, for example, that a lysine occurs every fifth amino acid or that positions 4, 8, and 9 of a decapeptide library be fixed to include only arginine. Clearly, many types of biases can be contemplated, and the present invention is not restricted to any particular bias. Furthermore, the present invention contemplates specific types of peptide libraries, such as phage displayed peptide libraries and those that utilize a DNA construct comprising a lambda phage vector with a DNA insert.

[0855] As mentioned above, in the case of a binding molecule that is a polypeptide, the polypeptide may have about 6 to less than about 60 amino acid residues, preferably about 6 to about 10 amino acid residues, and most preferably, about 6 to about 22 amino acids. In another embodiment, a binding polypeptide has in the range of 15-100 amino acids, or 20-50 amino acids.

[0856] The selected binding polypeptide can be obtained by chemical synthesis or recombinant expression.

[0857] Other Activities

[0858] A polypeptide, polynucleotide, agonist, or antagonist of the present invention, as a result of the ability to stimulate vascular endothelial cell growth, may be employed in treatment for stimulating re-vascularization of ischemic tissues due to various disease conditions such as thrombosis, arteriosclerosis, and other cardiovascular conditions. The polypeptide, polynucleotide, agonist, or antagonist of the present invention may also be employed to stimulate angiogenesis and limb regeneration, as discussed above.

[0859] A polypeptide, polynucleotide, agonist, or antagonist of the present invention may also be employed for treating wounds due to injuries, burns, post-operative tissue repair, and ulcers since they are mitogenic to various cells of different origins, such as fibroblast cells and skeletal muscle cells, and therefore, facilitate the repair or replacement of damaged or diseased tissue.

[0860] A polypeptide, polynucleotide, agonist, or antagonist of the present invention may also be employed to stimulate neuronal growth and to treat and prevent neuronal damage which occurs in certain neuronal disorders or neuro-degenerative conditions such as Alzheimer's disease, Parkinson's disease, and AIDS-related complex. A polypeptide, polynucleotide, agonist, or antagonist of the present invention may have the ability to stimulate chondrocyte growth; therefore, they may be employed to enhance bone and periodontal regeneration and aid in tissue transplants or bone grafts.

[0861] A polypeptide, polynucleotide, agonist, or antagonist of the present invention may be also employed to prevent skin aging due to sunburn by stimulating keratinocyte growth.

[0862] A polypeptide, polynucleotide, agonist, or antagonist of the present invention may also be employed for preventing hair loss, since FGF family members activate hair-forming cells and promotes melanocyte growth. Along the same lines, a polypeptide, polynucleotide, agonist, or antagonist of the present invention may be employed to stimulate growth and differentiation of hematopoietic cells and bone marrow cells when used in combination with other cytokines.

[0863] A polypeptide, polynucleotide, agonist, or antagonist of the present invention may also be employed to maintain organs before transplantation or for supporting cell culture of primary tissues. A polypeptide, polynucleotide, agonist, or antagonist of the present invention may also be employed for inducing tissue of mesodermal origin to differentiate in early embryos.

[0864] A polypeptide, polynucleotide, agonist, or antagonist of the present invention may also increase or decrease the differentiation or proliferation of embryonic stem cells, besides, as discussed above, hematopoietic lineage.

[0865] A polypeptide, polynucleotide, agonist, or antagonist of the present invention may also be used to modulate mammalian characteristics, such as body height, weight, hair color, eye color, skin, percentage of adipose tissue, pigmentation, size, and shape (e.g., cosmetic surgery). Similarly, a polypeptide, polynucleotide, agonist, or antagonist of the present invention may be fused to modulate mammalian metabolism affecting catabolism, anabolism, processing, utilization, and storage of energy.

[0866] A polypeptide, polynucleotide, agonist, or antagonist of the present invention may be used to change a mammal's mental state or physical state by influencing biorhythms, caricadic rhythms, depression (including depressive disorders), tendency for violence, tolerance for pain, reproductive capabilities (preferably by Activin or Inhibin-like activity), hormonal or endocrine levels, appetite, libido, memory, stress, or other cognitive qualities.

[0867] A polypeptide, polynucleotide, agonist, or antagonist of the present invention may also be used as a food additive or preservative, such as to increase or decrease storage capabilities, fat content, lipid, protein, carbohydrate, vitamins, minerals, cofactors or other nutritional components.

[0868] The above-recited applications have uses in a wide variety of hosts. Such hosts include, but are not limited to, human, murine, rabbit, goat, guinea pig, camel, horse, mouse, rat, hamster, pig, micro-pig, chicken, goat, cow, sheep, dog, cat, non-human primate, and human. In specific embodiments, the host is a mouse, rabbit, goat, guinea pig, chicken, rat, hamster, pig, sheep, dog or cat. In preferred embodiments, the host is a mammal. In most preferred embodiments, the host is a human.

[0869] Other Preferred Embodiments

[0870] Other preferred embodiments of the claimed invention include an isolated nucleic acid molecule comprising a nucleotide sequence which is at least 95% identical to a sequence of at least about 50 contiguous nucleotides in the nucleotide sequence of SEQ ID NO:X or the complementary strand thereto, the nucleotide sequence as defined in column 5 of Table 1 or columns 8 and 9 of Table 2 or the complementary strand thereto, and/or cDNA contained in Clone ID NO:Z.

[0871] Also preferred is a nucleic acid molecule wherein said sequence of contiguous nucleotides is included in the nucleotide sequence of the portion of SEQ ID NO:X as defined in column 5, “ORF (From-To)”, in Table 1.

[0872] Also preferred is a nucleic acid molecule wherein said sequence of contiguous nucleotides is included in the nucleotide sequence of the portion of SEQ ID NO:X as defined in columns 8 and 9, “NT From” and “NT To” respectively, in Table 2.

[0873] Also preferred is an isolated nucleic acid molecule comprising a nucleotide sequence which is at least 95% identical to a sequence of at least about 150 contiguous nucleotides in the nucleotide sequence of SEQ ID NO:X or the complementary strand thereto, the nucleotide sequence as defined in column 5 of Table 1 or columns 8 and 9 of Table 2 or the complementary strand thereto, and/or cDNA contained in Clone ID NO:Z.

[0874] Further preferred is an isolated nucleic acid molecule comprising a nucleotide sequence which is at least 95% identical to a sequence of at least about 500 contiguous nucleotides in the nucleotide sequence of SEQ ID NO:X or the complementary strand thereto, the nucleotide sequence as defined in column 5 of Table 1 or columns 8 and 9 of Table 2 or the complementary strand thereto, and/or cDNA contained in Clone ID NO:Z.

[0875] A further preferred embodiment is a nucleic acid molecule comprising a nucleotide sequence which is at least 95% identical to the nucleotide sequence of the portion of SEQ ID NO:X defined in column 5, “ORF (From-To)”, in Table 1.

[0876] A further preferred embodiment is a nucleic acid molecule comprising a nucleotide sequence which is at least 95% identical to the nucleotide sequence of the portion of SEQ ID NO:X defined in columns 8 and 9, “NT From” and “NT To”, respectively, in Table 2.

[0877] A further preferred embodiment is an isolated nucleic acid molecule comprising a nucleotide sequence which is at least 95% identical to the complete nucleotide sequence of SEQ ID NO:X or the complementary strand thereto, the nucleotide sequence as defined in column 5 of Table 1 or columns 8 and 9 of Table 2 or the complementary strand thereto, and/or cDNA contained in Clone ID NO:Z.

[0878] Also preferred is an isolated nucleic acid molecule which hybridizes under stringent hybridization conditions to a nucleic acid molecule comprising a nucleotide sequence of SEQ ID NO:X or the complementary strand thereto, the nucleotide sequence as defined in column 5 of Table 1 or columns 8 and 9 of Table 2 or the complementary strand thereto, and/or cDNA contained in Clone ID NO:Z, wherein said nucleic acid molecule which hybridizes does not hybridize under stringent hybridization conditions to a nucleic acid molecule having a nucleotide sequence consisting of only A residues or of only T residues.

[0879] Also preferred is a composition of matter comprising a DNA molecule which comprises the cDNA contained in Clone ID NO:Z.

[0880] Also preferred is an isolated nucleic acid molecule comprising a nucleotide sequence which is at least 95% identical to a sequence of at least 50 contiguous nucleotides of the cDNA sequence contained in Clone ID NO:Z.

[0881] Also preferred is an isolated nucleic acid molecule, wherein said sequence of at least 50 contiguous nucleotides is included in the nucleotide sequence of an open reading frame sequence encoded by cDNA contained in Clone ID NO:Z.

[0882] Also preferred is an isolated nucleic acid molecule comprising a nucleotide sequence which is at least 95% identical to sequence of at least 150 contiguous nucleotides in the nucleotide sequence encoded by cDNA contained in Clone ID NO:Z.

[0883] A further preferred embodiment is an isolated nucleic acid molecule comprising a nucleotide sequence which is at least 95% identical to sequence of at least 500 contiguous nucleotides in the nucleotide sequence encoded by cDNA contained in Clone ID NO:Z.

[0884] A further preferred embodiment is an isolated nucleic acid molecule comprising a nucleotide sequence which is at least 95% identical to the complete nucleotide sequence encoded by cDNA contained in Clone ID NO:Z.

[0885] A further preferred embodiment is a method for detecting in a biological sample a nucleic acid molecule comprising a nucleotide sequence which is at least 95% identical to a sequence of at least 50 contiguous nucleotides in a sequence selected from the group consisting of: a nucleotide sequence of SEQ ID NO:X or the complementary strand thereto; the nucleotide sequence as defined in column 5 of Table 1 or columns 8 and 9 of Table 2 or the complementary strand thereto; and a nucleotide sequence encoded by cDNA contained in Clone ID NO:Z; which method comprises a step of comparing a nucleotide sequence of at least one nucleic acid molecule in said sample with a sequence selected from said group and determining whether the sequence of said nucleic acid molecule in said sample is at least 95% identical to said selected sequence.

[0886] Also preferred is the above method wherein said step of comparing sequences comprises determining the extent of nucleic acid hybridization between nucleic acid molecules in said sample and a nucleic acid molecule comprising said sequence selected from said group. Similarly, also preferred is the above method wherein said step of comparing sequences is performed by comparing the nucleotide sequence determined from a nucleic acid molecule in said sample with said sequence selected from said group. The nucleic acid molecules can comprise DNA molecules or RNA molecules.

[0887] A further preferred embodiment is a method for identifying the species, tissue or cell type of a biological sample which method comprises a step of detecting nucleic acid molecules in said sample, if any, comprising a nucleotide sequence that is at least 95% identical to a sequence of at least 50 contiguous nucleotides in a sequence selected from the group consisting of: a nucleotide sequence of SEQ ID NO:X or the complementary strand thereto; the nucleotide sequence as defined in column 5 of Table 1 or columns 8 and 9 of Table 2 or the complementary strand thereto; and a nucleotide sequence of the cDNA contained in Clone ID NO:Z.

[0888] The method for identifying the species, tissue or cell type of a biological sample can comprise a step of detecting nucleic acid molecules comprising a nucleotide sequence in a panel of at least two nucleotide sequences, wherein at least one sequence in said panel is at least 95% identical to a sequence of at least 50 contiguous nucleotides in a sequence selected from said group.

[0889] Also preferred is a method for diagnosing in a subject a pathological condition associated with abnormal structure or expression of a nucleotide sequence of SEQ ID NO:X or the complementary strand thereto; the nucleotide sequence as defined in column 5 of Table 1 or columns 8 and 9 of Table 2 or the complementary strand thereto; or the cDNA contained in Clone ID NO:Z which encodes a protein, wherein the method comprises a step of detecting in a biological sample obtained from said subject nucleic acid molecules, if any, comprising a nucleotide sequence that is at least 95% identical to a sequence of at least 50 contiguous nucleotides in a sequence selected from the group consisting of: a nucleotide sequence of SEQ ID NO:X or the complementary strand thereto; the nucleotide sequence as defined in column 5 of Table 1 or columns 8 and 9 of Table 2 or the complementary strand thereto; and a nucleotide sequence of cDNA contained in Clone ID NO:Z.

[0890] The method for diagnosing a pathological condition can comprise a step of detecting nucleic acid molecules comprising a nucleotide sequence in a panel of at least two nucleotide sequences, wherein at least one sequence in said panel is at least 95% identical to a sequence of at least 50 contiguous nucleotides in a sequence selected from said group.

[0891] Also preferred is a composition of matter comprising isolated nucleic acid molecules wherein the nucleotide sequences of said nucleic acid molecules comprise a panel of at least two nucleotide sequences, wherein at least one sequence in said panel is at least 95% identical to a sequence of at least 50 contiguous nucleotides in a sequence selected from the group consisting of: a nucleotide sequence of SEQ ID NO:X or the complementary strand thereto; the nucleotide sequence as defined in column 5 of Table 1 or columns 8 and 9 of Table 2 or the complementary strand thereto; and a nucleotide sequence encoded by cDNA contained in Clone ID NO:Z. The nucleic acid molecules can comprise DNA molecules or RNA molecules.

[0892] Also preferred is a composition of matter comprising isolated nucleic acid molecules wherein the nucleotide sequences of said nucleic acid molecules comprise a DNA microarray or “chip” of at least 1, 2, 3, 4, 5, 6, 7, 8, 9, 10, 15, 20, 25, 30, 40, 50, 100, 150, 200, 250, 300, 500, 1000, 2000, 3000, or 4000 nucleotide sequences, wherein at least one sequence in said DNA microarray or “chip” is at least 95% identical to a sequence of at least 50 contiguous nucleotides in a sequence selected from the group consisting of: a nucleotide sequence of SEQ ID NO:X wherein X is any integer as defined in Table 1; and a nucleotide sequence encoded by a human cDNA clone identified by a cDNA “Clone ID” in Table 1.

[0893] Also preferred is an isolated polypeptide comprising an amino acid sequence at least 90% identical to a sequence of at least about 10 contiguous amino acids in the polypeptide sequence of SEQ ID NO:Y; a polypeptide encoded by SEQ ID NO:X or the complementary strand thereto; the polypeptide encoded by the nucleotide sequence as defined in columns 8 and 9 of Table 2; and/or a polypeptide encoded by cDNA contained in Clone ID NO:Z.

[0894] Also preferred is an isolated polypeptide comprising an amino acid sequence at least 95% identical to a sequence of at least about 30 contiguous amino acids in the amino acid sequence of SEQ ID NO:Y; a polypeptide encoded by SEQ ID NO:X or the complementary strand thereto; the polypeptide encoded by the nucleotide sequence as defined in columns 8 and 9 of Table 2; and/or a polypeptide encoded by cDNA contained in Clone ID NO:Z.

[0895] Further preferred is an isolated polypeptide comprising an amino acid sequence at least 95% identical to a sequence of at least about 100 contiguous amino acids in the amino acid sequence of SEQ ID NO:Y; a polypeptide encoded by SEQ ID NO:X or the complementary strand thereto; the polypeptide encoded by the nucleotide sequence as defined in columns 8 and 9 of Table 2; and/or a polypeptide encoded by cDNA contained in Clone ID NO:Z.

[0896] Further preferred is an isolated polypeptide comprising an amino acid sequence at least 95% identical to the complete amino acid sequence of SEQ ID NO:Y; a polypeptide encoded by SEQ ID NO:X or the complementary strand thereto; the polypeptide encoded by the nucleotide sequence as defined in columns 8 and 9 of Table 2; and/or a polypeptide encoded by cDNA contained in Clone ID NO:Z.

[0897] Further preferred is an isolated polypeptide comprising an amino acid sequence at least 90% identical to a sequence of at least about 10 contiguous amino acids in the complete amino acid sequence of a polypeptide encoded by contained in Clone ID NO:Z

[0898] Also preferred is a polypeptide wherein said sequence of contiguous amino acids is included in the amino acid sequence of a portion of said polypeptide encoded by cDNA contained in Clone ID NO:Z; a polypeptide encoded by SEQ ID NO:X or the complementary strand thereto; the polypeptide encoded by the nucleotide sequence as defined in columns 8 and 9 of Table 2; and/or the polypeptide sequence of SEQ ID NO:Y.

[0899] Also preferred is an isolated polypeptide comprising an amino acid sequence at least 95% identical to a sequence of at least about 30 contiguous amino acids in the amino acid sequence of a polypeptide encoded by the cDNA contained in Clone ID NO:Z.

[0900] Also preferred is an isolated polypeptide comprising an amino acid sequence at least 95% identical to a sequence of at least about 100 contiguous amino acids in the amino acid sequence of a polypeptide encoded by cDNA contained in Clone ID NO:Z.

[0901] Also preferred is an isolated polypeptide comprising an amino acid sequence at least 95% identical to the amino acid sequence of a polypeptide encoded by the cDNA contained in Clone ID NO:Z.

[0902] Further preferred is an isolated antibody which binds specifically to a polypeptide comprising an amino acid sequence that is at least 90% identical to a sequence of at least 10 contiguous amino acids in a sequence selected from the group consisting of: a polypeptide sequence of SEQ ID NO:Y; a polypeptide encoded by SEQ ID NO:X or the complementary strand thereto; the polypeptide encoded by the nucleotide sequence as defined in columns 8 and 9 of Table 2; and a polypeptide encoded by the cDNA contained in Clone ID NO:Z.

[0903] Further preferred is a method for detecting in a biological sample a polypeptide comprising an amino acid sequence which is at least 90% identical to a sequence of at least 10 contiguous amino acids in a sequence selected from the group consisting of: a polypeptide sequence of SEQ ID NO:Y; a polypeptide encoded by SEQ ID NO:X or the complementary strand thereto; the polypeptide encoded by the nucleotide sequence as defined in columns 8 and 9 of Table 2; and a polypeptide encoded by the cDNA contained in Clone ID NO:Z; which method comprises a step of comparing an amino acid sequence of at least one polypeptide molecule in said sample with a sequence selected from said group and determining whether the sequence of said polypeptide molecule in said sample is at least 90% identical to said sequence of at least 10 contiguous amino acids.

[0904] Also preferred is the above method wherein said step of comparing an amino acid sequence of at least one polypeptide molecule in said sample with a sequence selected from said group comprises determining the extent of specific binding of polypeptides in said sample to an antibody which binds specifically to a polypeptide comprising an amino acid sequence that is at least 90% identical to a sequence of at least 10 contiguous amino acids in a sequence selected from the group consisting of: a polypeptide sequence of SEQ ID NO:Y; a polypeptide encoded by SEQ ID NO:X or the complementary strand thereto; the polypeptide encoded by the nucleotide sequence as defined in columns 8 and 9 of Table 2; and a polypeptide encoded by the cDNA contained in Clone ID NO:Z.

[0905] Also preferred is the above method wherein said step of comparing sequences is performed by comparing the amino acid sequence determined from a polypeptide molecule in said sample with said sequence selected from said group.

[0906] Also preferred is a method for identifying the species, tissue or cell type of a biological sample which method comprises a step of detecting polypeptide molecules in said sample, if any, comprising an amino acid sequence that is at least 90% identical to a sequence of at least 10 contiguous amino acids in a sequence selected from the group consisting of: polypeptide sequence of SEQ ID NO:Y; a polypeptide encoded by SEQ ID NO:X or the complementary strand thereto; the polypeptide encoded by the nucleotide sequence as defined in columns 8 and 9 of Table 2; and a polypeptide encoded by the cDNA contained in Clone ID NO:Z.

[0907] Also preferred is the above method for identifying the species, tissue or cell type of a biological sample, which method comprises a step of detecting polypeptide molecules comprising an amino acid sequence in a panel of at least two amino acid sequences, wherein at least one sequence in said panel is at least 90% identical to a sequence of at least 10 contiguous amino acids in a sequence selected from the above group.

[0908] Also preferred is a method for diagnosing in a subject a pathological condition associated with abnormal structure or expression of a nucleic acid sequence identified in Table 1 or Table 2 encoding a polypeptide, which method comprises a step of detecting in a biological sample obtained from said subject polypeptide molecules comprising an amino acid sequence in a panel of at least two amino acid sequences, wherein at least one sequence in said panel is at least 90% identical to a sequence of at least 10 contiguous amino acids in a sequence selected from the group consisting of: polypeptide sequence of SEQ ID NO:Y; a polypeptide encoded by SEQ ID NO:X or the complementary strand thereto; the polypeptide encoded by the nucleotide sequence as defined in columns 8 and 9 of Table 2; and a polypeptide encoded by the cDNA contained in Clone ID NO:Z.

[0909] In any of these methods, the step of detecting said polypeptide molecules includes using an antibody.

[0910] Also preferred is an isolated nucleic acid molecule comprising a nucleotide sequence which is at least 95% identical to a nucleotide sequence encoding a polypeptide wherein said polypeptide comprises an amino acid sequence that is at least 90% identical to a sequence of at least 10 contiguous amino acids in a sequence selected from the group consisting of: polypeptide sequence of SEQ ID NO:Y; a polypeptide encoded by SEQ ID NO:X or the complementary strand thereto; the polypeptide encoded by the nucleotide sequence as defined in columns 8 and 9 of Table 2; and a polypeptide encoded by the cDNA contained in Clone ID NO:Z.

[0911] Also preferred is an isolated nucleic acid molecule, wherein said nucleotide sequence encoding a polypeptide has been optimized for expression of said polypeptide in a prokaryotic host.

[0912] Also preferred is a polypeptide molecule, wherein said polypeptide comprises an amino acid sequence selected from the group consisting of: polypeptide sequence of SEQ ID NO:Y; a polypeptide encoded by SEQ ID NO:X or the complementary strand thereto; the polypeptide encoded by the nucleotide sequence as defined in columns 8 and 9 of Table 2; and a polypeptide encoded by the cDNA contained in Clone ID NO:Z.

[0913] Further preferred is a method of making a recombinant vector comprising inserting any of the above isolated nucleic acid molecule into a vector. Also preferred is the recombinant vector produced by this method. Also preferred is a method of making a recombinant host cell comprising introducing the vector into a host cell, as well as the recombinant host cell produced by this method.

[0914] Also preferred is a method of making an isolated polypeptide comprising culturing this recombinant host cell under conditions such that said polypeptide is expressed and recovering said polypeptide. Also preferred is this method of making an isolated polypeptide, wherein said recombinant host cell is a eukaryotic cell and said polypeptide is a human protein comprising an amino acid sequence selected from the group consisting of: polypeptide sequence of SEQ ID NO:Y; a polypeptide encoded by SEQ ID NO:X or the complementary strand thereto; the polypeptide encoded by the nucleotide sequence as defined in columns 8 and 9 of Table 2; and a polypeptide encoded by the cDNA contained in Clone ID NO:Z. The isolated polypeptide produced by this method is also preferred.

[0915] Also preferred is a method of treatment of an individual in need of an increased level of a protein activity, which method comprises administering to such an individual a Therapeutic comprising an amount of an isolated polypeptide, polynucleotide, immunogenic fragment or analogue thereof, binding agent, antibody, or antigen binding fragment of the claimed invention effective to increase the level of said protein activity in said individual.

[0916] Also preferred is a method of treatment of an individual in need of a decreased level of a protein activity, which method comprised administering to such an individual a Therapeutic comprising an amount of an isolated polypeptide, polynucleotide, immunogenic fragment or analogue thereof, binding agent, antibody, or antigen binding fragment of the claimed invention effective to decrease the level of said protein activity in said individual.

[0917] Also preferred is a method of treatment of an individual in need of a specific delivery of toxic compositions to diseased cells (e.g., tumors, leukemias or lymphomas), which method comprises administering to such an individual a Therapeutic comprising an amount of an isolated polypeptide of the invention, including, but not limited to a binding agent, or antibody of the claimed invention that are associated with toxin or cytotoxic prodrugs.

[0918] Having generally described the invention, the same will be more readily understood by reference to the following examples, which are provided by way of illustration and are not intended as limiting.

TABLE 6

| ATCC Deposits | Deposit Date | ATCC Designation Number |
|---|---|---|
| LP01, LP02, LP03, LP04, | May 20, 1997 | 209059, 209060, 209061, |
| LP05, LP06, LP07, LP08, | | 209062, 209063, 209064, |
| LP09, LP10, LP11, | | 209065, 209066, 209067, |
| | | 209068, 209069 |
| LP12 | Jan. 12, 1998 | 209579 |
| LP13 | Jan. 12, 1998 | 209578 |
| LP14 | Jul. 16, 1998 | 203067 |
| LP15 | Jul. 16, 1998 | 203068 |
| LP16 | Feb. 1, 1999 | 203609 |
| LP17 | Feb. 1, 1999 | 203610 |
| LP20 | Nov. 17, 1998 | 203485 |
| LP21 | Jun. 18, 1999 | PTA-252 |
| LP22 | Jun. 18, 1999 | PTA-253 |
| LP23 | Dec. 22, 1999 | PTA-1081 |
| PA107 | Mar. 24, 2000 | PTA-1554 |

### EXAMPLES

### Example 1

[0919] Isolation of a Selected cDNA Clone from the Deposited Sample

[0920] Each Clone ID NO:Z is contained in a plasmid. Table 7 identifies the vectors used to construct the cDNA library from which each clone was isolated. In many cases, the vector used to construct the library is a phage vector from which a plasmid has been excised. The following correlates the related plasmid for each phage vector used in constructing the cDNA library. For example, where a particular clone is identified in Table 7 as being isolated in the vector “Lambda Zap,” the corresponding deposited clone is in “pBluescript.”

### Vector Used to Construct Library Corresponding Deposited Plasmid

[0921]

| | |
|---|---|
| Lambda Zap | pBluescript (pBS) |
| Uni-Zap XR | pBluescript (pBS) |
| Zap Express | pBK |
| lafmid BA | plafmid BA |
| pSport1 | pSport1 |
| pCMVSport 2.0 | pCMVSport 2.0 |
| pCMVSport 3.0 | pCMVSport 3.0 |
| pCR ® 2.1 | pCR ® 2.1 |

[0922] Vectors Lambda Zap (U.S. Pat. Nos. 5,128,256 and 5,286,636), Uni-Zap XR (U.S. Pat. Nos. 5,128, 256 and 5,286,636), Zap Express (U.S. Pat. Nos. 5,128,256 and 5,286,636), pBluescript (pBS) (Short, J. M. et al., Nucleic Acids Res. 16:7583-7600 (1988); Alting-Mees, M. A. and Short, J. M., Nucleic Acids Res. 17:9494 (1989)) and pBK (Alting-Mees, M. A. et al., Strategies 5:58-61 (1992)) are commercially available from Stratagene Cloning Systems, Inc., 11011 N. Torrey Pines Road, La Jolla, Calif., 92037. pBS contains an ampicillin resistance gene and pBK contains a neomycin resistance gene. Both can be transformed into E. coli strain XL-1 Blue, also available from Stratagene. pBS comes in 4 forms SK+, SK−, KS+ and KS. The S and K refers to the orientation of the polylinker to the T7 and T3 primer sequences which flank the polylinker region (“S” is for SacI and “K” is for KpnI which are the first sites on each respective end of the linker). “+” or “−” refer to the orientation of the f1 origin of replication (“ori”), such that in one orientation, single stranded rescue initiated from the f1 ori generates sense strand DNA and in the other, antisense.

[0923] Vectors pSport1, pCMVSport 2.0 and pCMVSport 3.0, were obtained from Life Technologies, Inc., P. O. Box 6009, Gaithersburg, Md. 20897. All Sport vectors contain an ampicillin resistance gene and may be transformed into E. coli strain DH10B, also available from Life Technologies. (See, for instance, Gruber, C. E., et al., Focus 15:59 (1993).) Vector lafmid BA (Bento Soares, Columbia University, N.Y.) contains an ampicillin resistance gene and can be transformed into E. coli strain XL-1 Blue. Vector pCR®2.1, which is available from Invitrogen, 1600 Faraday Avenue, Carlsbad, Calif. 92008, contains an ampicillin resistance gene and may be transformed into E. coli strain DH10B, available from Life Technologies. (See, for instance, Clark, J. M., Nuc. Acids Res. 16:9677-9686 (1988) and Mead, D. et al., Bio/Technology 9: (1991).) Preferably, a polynucleotide of the present invention does not comprise the vector sequences identified for the particular clone in Table 7, as well as the corresponding plasmid vector sequences designated above.

[0924] The deposited material in the sample assigned the ATCC Deposit Number cited by reference to Tables 1, 2, 6 and 7 for any given cDNA clone also may contain one or more additional plasmids, each comprising a cDNA clone different from that given clone. Thus, deposits sharing the same ATCC Deposit Number contain at least a plasmid for each Clone ID NO:Z.

TABLE 7

| | | | ATCC |
|---|---|---|---|
| Libraries owned by Catalog | Catalog Description | Vector | Deposit |
| HUKA HUKB HUKC HUKD | Human Uterine Cancer | Lambda ZAP II | LP01 |
| HUKE HUKF HUKG | | | |
| HCNA HCNB | Human Colon | Lambda Zap II | LP01 |
| HFFA | Human Fetal Brain, random primed | Lambda Zap II | LP01 |
| HTWA | Resting T-Cell | Lambda ZAP II | LP01 |
| HBQA | Early Stage Human Brain, random | Lambda ZAP II | LP01 |
| | primed | | |
| HLMB HLMF HLMG HLMH | breast lymph node CDNA library | Lambda ZAP II | LP01 |
| HLMI HLMJ HLMM HLMN | | | |
| HCQA HCQB | human colon cancer | Lamda ZAP II | LP01 |
| HMEA HMEC HMED HMEE | Human Microvascular Endothelial | Lambda ZAP II | LP01 |
| HMEF HMEG HMEI HMEJ | Cells, fract. A | | |
| HMEK HMEL | | | |
| HUSA HUSC | Human Umbilical Vein Endothelial | Lambda ZAP II | LP01 |
| | Cells, fract. A | | |
| HLQA HLQB | Hepatocellular Tumor | Lambda ZAP II | LP01 |
| HHGA HHGB HHGC HHGD | Hemangiopericytoma | Lambda ZAP II | LP01 |
| HSDM | Human Striatum Depression, re-rescue | Lambda ZAP II | LP01 |
| HUSH | H Umbilical Vein Endothelial Cells, | Lambda ZAP II | LP01 |
| | frac A, re-excision | | |
| HSGS | Salivary gland, subtracted | Lambda ZAP II | LP01 |
| HFXA HFXB HFXC HFXD | Brain frontal cortex | Lambda ZAP II | LP01 |
| HFXE HFXF HFXG HFXH | | | |
| HPQA HPQB HPQC | PERM TF274 | Lambda ZAP II | LP01 |
| HFXJ HFXK | Brain Frontal Cortex, re-excision | Lambda ZAP II | LP01 |
| HCWA HCWB HCWC HCWD | CD34 positive cells (Cord Blood) | ZAP Express | LP02 |
| HCWE HCWF HCWG HCWH | | | |
| HCWI HCWJ HCWK | | | |
| HCUA HCUB HCUC | CD34 depleted Buffy Coat (Cord | ZAP Express | LP02 |
| | Blood) | | |
| HRSM | A-14 cell line | ZAP Express | LP02 |
| HRSA | A1-CELL LINE | ZAP Express | LP02 |
| HCUD HCUE HCUF HCUG | CD34 depleted Buffy Coat (Cord | ZAP Express | LP02 |
| HCUH HCUI | Blood), re-excision | | |
| HBXE HBXF HBXG | H. Whole Brain #2, re-excision | ZAP Express | LP02 |
| HRLM | L8 cell line | ZAP Express | LP02 |
| HBXA HBXB HBXC HBXD | Human Whole Brain #2-Oligo dT > | ZAP Express | LP02 |
| | 1.5 Kb | | |
| HUDA HUDB HUDC | Testes | ZAP Express | LP02 |
| HHTM HHTN HHTO | H. hypothalamus, frac A; re-excision | ZAP Express | LP02 |
| HHTL | H. hypothalamus, frac A | ZAP Express | LP02 |
| HASA HASD | Human Adult Spleen | Uni-ZAP XR | LP03 |
| HFKC HFKD HFKE HFKF | Human Fetal Kidney | Uni-ZAP XR | LP03 |
| HFKG | | | |
| HE8A HE8B HE8C HE8D HE8E | Human 8 Week Whole Embryo | Uni-ZAP XR | LP03 |
| HE8F HE8M HE8N | | | |
| HGBA HGBD HGBE HGBF | Human Gall Bladder | Uni-ZAP XR | LP03 |
| HGBG HGBH HGBI | | | |
| HLHA HLHB HLHC HLHD | Human Fetal Lung III | Uni-ZAP XR | LP03 |
| HLHE HLHF HLHG HLHH | | | |
| HLHQ | | | |
| HPMA HPMB HPMC HPMD | Human Placenta | Uni-ZAP XR | LP03 |
| HPME HPMF HPMG HPMH | | | |
| HPRA HPRB HPRC HPRD | Human Prostate | Uni-ZAP XR | LP03 |
| HSIA HSIC HSID HSIE | Human Adult Small Intestine | Uni-ZAP XR | LP03 |
| HTEA HTEB HTEC HTED | Human Testes | Uni-ZAP XR | LP03 |
| HTEE HTEF HTEG HTEH HTEI | | | |
| HTEJ HTEK | | | |
| HTPA HTPB HTPC HTPD | Human Pancreas Tumor | Uni-ZAP XR | LP03 |
| HTPE | | | |
| HTTA HTTB HTTC HTTD | Human Testes Tumor | Uni-ZAP XR | LP03 |
| HTTE HTTF | | | |
| HAPA HAPB HAPC HAPM | Human Adult Pulmonary | Uni-ZAP XR | LP03 |
| HETA HETB HETC HETD | Human Endometrial Tumor | Uni-ZAP XR | LP03 |
| HETE HETF HETG HETH HETI | | | |
| HHFB HHFC HHFD HHFE | Human Fetal Heart | Uni-ZAP XR | LP03 |
| HHFF HHFG HHFH HHFI | | | |
| HHPB HHPC HHPD HHPE | Human Hippocampus | Uni-ZAP XR | LP03 |
| HHPF HHPG HHPH | | | |
| HCE1 HCE2 HCE3 HCE4 HCE5 | Human Cerebellum | Uni-ZAP XR | LP03 |
| HCEB HCEC HCED HCEE | | | |
| HCEF HCEG | | | |
| HUVB HUVC HUVD HUVE | Human Umbilical Vein, Endo. remake | Uni-ZAP XR | LP03 |
| HSTA HSTB HSTC HSTD | Human Skin Tumor | Uni-ZAP XR | LP03 |
| HTAA HTAB HTAC HTAD | Human Activated T-Cells | Uni-ZAP XR | LP03 |
| HTAE | | | |
| HFEA HFEB HFEC | Human Fetal Epithelium (Skin) | Uni-ZAP XR | LP03 |
| HJPA HJPB HJPC HJPD | HUMAN JURKAT MEMBRANE | Uni-ZAP XR | LP03 |
| | BOUND POLYSOMES | | |
| HESA | Human epithelioid sarcoma | Uni-Zap XR | LP03 |
| HLTA HLTB HLTC HLTD | Human T-Cell Lymphoma | Uni-ZAP XR | LP03 |
| HLTE HLTF | | | |
| HFTA HFTB HFTC HFTD | Human Fetal Dura Mater | Uni-ZAP XR | LP03 |
| HRDA HRDB HRDC HRDD | Human Rhabdomyosarcoma | Uni-ZAP XR | LP03 |
| HRDE HRDF | | | |
| HCAA HCAB HCAC | Cem cells cyclohexamide treated | Uni-ZAP XR | LP03 |
| HRGA HRGB HRGC HRGD | Raji Cells, cyclohexamide treated | Uni-ZAP XR | LP03 |
| HSUA HSUB HSUC HSUM | Supt Cells, cyclohexamide treated | Uni-ZAP XR | LP03 |
| HT4A HT4C HT4D | Activated T-Cells, 12 hrs. | Uni-ZAP XR | LP03 |
| HE9A HE9B HE9C HE9D HE9E | Nine Week Old Early Stage Human | Uni-ZAP XR | LP03 |
| HE9F HE9G HE9H HE9M | | | |
| HE9N | | | |
| HATA HATB HATC HATD | Human Adrenal Gland Tumor | Uni-ZAP XR | LP03 |
| HATE | | | |
| HT5A | Activated T-Cells, 24 hrs. | Uni-ZAP XR | LP03 |
| HFGA HFGM | Human Fetal Brain | Uni-ZAP XR | LP03 |
| HNEA HNEB HNEC HNED | Human Neutrophil | Uni-ZAP XR | LP03 |
| HNEE | | | |
| HBGB HBGD | Human Primary Breast Cancer | Uni-ZAP XR | LP03 |
| HBNA HBNB | Human Normal Breast | Uni-ZAP XR | LP03 |
| HCAS | Cem Cells, cyclohexamide treated, | Uni-ZAP XR | LP03 |
| | subtra | | |
| HHPS | Human Hippocampus, subtracted | pBS | LP03 |
| HKCS HKCU | Human Colon Cancer, subtracted | pBS | LP03 |
| HRGS | Raji cells, cyclohexamide treated, | pBS | LP03 |
| | subtracted | | |
| HSUT | Supt cells, cyclohexamide treated, | pBS | LP03 |
| | differentially expressed | | |
| HT4S | Activated T-Cells, 12 hrs, subtracted | Uni-ZAP XR | LP03 |
| HCDA HCDB HCDC HCDD | Human Chondrosarcoma | Uni-ZAP XR | LP03 |
| HCDE | | | |
| HOAA HOAB HOAC | Human Osteosarcoma | Uni-ZAP XR | LP03 |
| HTLA HTLB HTLC HTLD | Human adult testis, large inserts | Uni-ZAP XR | LP03 |
| HTLE HTLF | | | |
| HLMA HLMC HLMD | Breast Lymph node cDNA library | Uni-ZAP XR | LP03 |
| H6EA H6EB H6EC | HL-60, PMA 4H | Uni-ZAP XR | LP03 |
| HTXA HTXB HTXC HTXD | Activated T-Cell (12 hs)/Thiouridine | Uni-ZAP XR | LP03 |
| HTXE HTXF HTXG HTXH | labelledEco | | |
| HNFA HNFB HNFC HNFD | Human Neutrophil, Activated | Uni-ZAP XR | LP03 |
| HNFE HNFF HNFG HNFH | | | |
| HNFJ | | | |
| HTOB HTOC | HUMAN TONSILS, FRACTION 2 | Uni-ZAP XR | LP03 |
| HMGB | Human OB MG63 control fraction I | Uni-ZAP XR | LP03 |
| HOPB | Human OB HOS control fraction I | Uni-ZAP XR | LP03 |
| HORB | Human OB HOS treated (10 nM E2) | Uni-ZAP XR | LP03 |
| | fraction I | | |
| HSVA HSVB HSVC | Human Chronic Synovitis | Uni-ZAP XR | LP03 |
| HROA | HUMAN STOMACH | Uni-ZAP XR | LP03 |
| HBJA HBJB HBJC HBJD HBJE | HUMAN B CELL LYMPHOMA | Uni-ZAP XR | LP03 |
| HBJF HBJG HBJH HBJI HBJJ | | | |
| HBJK | | | |
| HCRA HCRB HCRC | human corpus colosum | Uni-ZAP XR | LP03 |
| HODA HODB HODC HODD | human ovarian cancer | Uni-ZAP XR | LP03 |
| HDSA | Dermatofibrosarcoma Protuberance | Uni-ZAP XR | LP03 |
| HMWA HMWB HMWC HMWD | Bone Marrow Cell Line (RS4; 11) | Uni-ZAP XR | LP03 |
| HMWE HMWF HMWG HMWH | | | |
| HMWI HMWJ | | | |
| HSOA | stomach cancer (human) | Uni-ZAP XR | LP03 |
| HERA | SKIN | Uni-ZAP XR | LP03 |
| HMDA | Brain-medulloblastoma | Uni-ZAP XR | LP03 |
| HGLA HGLB HGLD | Glioblastoma | Uni-ZAP XR | LP03 |
| HEAA | H. Atrophic Endometrium | Uni-ZAP XR | LP03 |
| HBCA HBCB | H. Lymph node breast Cancer | Uni-ZAP XR | LP03 |
| HPWT | Human Prostate BPH, re-excision | Uni-ZAP XR | LP03 |
| HFVG HFVH HFVI | Fetal Liver, subtraction II | pBS | LP03 |
| HNFI | Human Neutrophils, Activated, re- | pBS | LP03 |
| | excision | | |
| HBMB HBMC HBMD | Human Bone Marrow, re-excision | pBS | LP03 |
| HKML HKMM HKMN | H. Kidney Medulla, re-excision | pBS | LP03 |
| HKIX HKIY | H. Kidney Cortex, subtracted | pBS | LP03 |
| HADT | H. Amygdala Depression, subtracted | pBS | LP03 |
| H6AS | Hl-60, untreated, subtracted | Uni-ZAP XR | LP03 |
| H6ES | HL-60, PMA 4H, subtracted | Uni-ZAP XR | LP03 |
| H6BS | HL-60, RA 4h, Subtracted | Uni-ZAP XR | LP03 |
| H6CS | HL-60, PMA 1d, subtracted | Uni-ZAP XR | LP03 |
| HTXJ HTXK | Activated T-cell (12 h)/Thiouridine-re- | Uni-ZAP XR | LP03 |
| | excision | | |
| HMSA HMSB HMSC HMSD | Monocyte activated | Uni-ZAP XR | LP03 |
| HMSE HMSF HMSG HMSH | | | |
| HMSI HMSJ HMSK | | | |
| HAGA HAGB HAGC HAGD | Human Amygdala | Uni-ZAP XR | LP03 |
| HAGE HAGF | | | |
| HSRA HSRB HSRE | STROMAL-OSTEOCLASTOMA | Uni-ZAP XR | LP03 |
| HSRD HSRF HSRG HSRH | Human Osteoclastoma Stromal Cells- | Uni-ZAP XR | LP03 |
| | unamplified | | |
| HSQA HSQB HSQC HSQD | Stromal cell TF274 | Uni-ZAP XR | LP03 |
| HSQE HSQF HSQG | | | |
| HSKA HSKB HSKC HSKD | Smooth muscle, serum treated | Uni-ZAP XR | LP03 |
| HSKE HSKF HSKZ | | | |
| HSLA HSLB HSLC HSLD | Smooth muscle, control | Uni-ZAP XR | LP03 |
| HSLE HSLF HSLG | | | |
| HSDA HSDD HSDE HSDF | Spinal cord | Uni-ZAP XR | LP03 |
| HSDG HSDH | | | |
| HPWS | Prostate-BPH subtracted II | pBS | LP03 |
| HSKW HSKX HSKY | Smooth Muscle-HASTE normalized | pBS | LP03 |
| HFPB HFPC HFPD | H. Frontal cortex, epileptic; re-excision | Uni-ZAP XR | LP03 |
| HSDI HSDJ HSDK | Spinal Cord, re-excision | Uni-ZAP XR | LP03 |
| HSKN HSKO | Smooth Muscle Serum Treated, Norm | pBS | LP03 |
| HSKG HSKH HSKI | Smooth muscle, serum induced, re-exc | pBS | LP03 |
| HFCA HFCB HFCC HFCD | Human Fetal Brain | Uni-ZAP XR | LP04 |
| HFCE HFCF | | | |
| HPTA HPTB HPTD | Human Pituitary | Uni-ZAP XR | LP04 |
| HTHB HTHC HTHD | Human Thymus | Uni-ZAP XR | LP04 |
| HE6B HE6C HE6D HE6E HE6F | Human Whole Six Week Old Embryo | Uni-ZAP XR | LP04 |
| HE6G HE6S | | | |
| HSSA HSSB HSSC HSSD HSSE | Human Synovial Sarcoma | Uni-ZAP XR | LP04 |
| HSSF HSSG HSSH HSSI HSSJ | | | |
| HSSK | | | |
| HE7T | 7 Week Old Early Stage Human, | Uni-ZAP XR | LP04 |
| | subtracted | | |
| HEPA HEPB HEPC | Human Epididymus | Uni-ZAP XR | LP04 |
| HSNA HSNB HSNC HSNM | Human Synovium | Uni-ZAP XR | LP04 |
| HSNN | | | |
| HPFB HPFC HPFD HPFE | Human Prostate Cancer, Stage C | Uni-ZAP XR | LP04 |
| | fraction | | |
| HE2A HE2D HE2E HE2H HE2I | 12 Week Old Early Stage Human | Uni-ZAP XR | LP04 |
| HE2M HE2N HE2O | | | |
| HE2B HE2C HE2F HE2G HE2P | 12 Week Old Early Stage Human, II | Uni-ZAP XR | LP04 |
| HE2Q | | | |
| HPTS HPTT HPTU | Human Pituitary, subtracted | Uni-ZAP XR | LP04 |
| HAUA HAUB HAUC | Amniotic Cells-TNF induced | Uni-ZAP XR | LP04 |
| HAQA HAQB HAQC HAQD | Amniotic Cells-Primary Culture | Uni-ZAP XR | LP04 |
| HWTA HWTB HWTC | wilm's tumor | Uni-ZAP XR | LP04 |
| HBSD | Bone Cancer, re-excision | Uni-ZAP XR | LP04 |
| HSGB | Salivary gland, re-excision | Uni-ZAP XR | LP04 |
| HSJA HSJB HSJC | Smooth muscle-ILb induced | Uni-ZAP XR | LP04 |
| HSXA HSXB HSXC HSXD | Human Substantia Nigra | Uni-ZAP XR | LP04 |
| HSHA HSHB HSHC | Smooth muscle, IL1b induced | Uni-ZAP XR | LP04 |
| HOUA HOUB HOUC HOUD | Adipocytes | Uni-ZAP XR | LP04 |
| HOUE | | | |
| HPWA HPWB HPWC HPWD | Prostate BPH | Uni-ZAP XR | LP04 |
| HPWE | | | |
| HELA HELB HELC HELD | Endothelial cells-control | Uni-ZAP XR | LP04 |
| HELE HELF HELG HELH | | | |
| HEMA HEMB HEMC HEMD | Endothelial-induced | Uni-ZAP XR | LP04 |
| HEME HEMF HEMG HEMH | | | |
| HBIA HBIB HBIC | Human Brain, Striatum | Uni-ZAP XR | LP04 |
| HHSA HHSB HHSC HHSD | Human Hypothalmus, Schizophrenia | Uni-ZAP XR | LP04 |
| HHSE | | | |
| HNGA HNGB HNGC HNGD | neutrophils control | Uni-ZAP XR | LP04 |
| HNGE HNGF HNGG HNGH | | | |
| HNGI HNGJ | | | |
| HNHA HNHB HNHC HNHD | Neutrophils IL-1 and LPS induced | Uni-ZAP XR | LP04 |
| HNHE HNHF HNHG HNHH | | | |
| HNHI HNHJ | | | |
| HSDB HSDC | STRIATUM DEPRESSION | Uni-ZAP XR | LP04 |
| HHPT | Hypothalamus | Uni-ZAP XR | LP04 |
| HSAT HSAU HSAV HSAW | Anergic T-cell | Uni-ZAP XR | LP04 |
| HSAX HSAY HSAZ | | | |
| HBMS HBMT HBMU HBMV | Bone marrow | Uni-ZAP XR | LP04 |
| HBMW HBMX | | | |
| HOEA HOEB HOEC HOED | Osteoblasts | Uni-ZAP XR | LP04 |
| HOEE HOEF HOEJ | | | |
| HAIA HAIB HAIC HAID HAIE | Epithelial-TNFa and INF induced | Uni-ZAP XR | LP04 |
| HAIF | | | |
| HTGA HTGB HTGC HTGD | Apoptotic T-cell | Uni-ZAP XR | LP04 |
| HMCA HMCB HMCC HMCD | Macrophage-oxLDL | Uni-ZAP XR | LP04 |
| HMCE | | | |
| HMAA HMAB HMAC HMAD | Macrophage (GM-CSF treated) | Uni-ZAP XR | LP04 |
| HMAE HMAF HMAG | | | |
| HPHA | Normal Prostate | Uni-ZAP XR | LP04 |
| HPIA HPIB HPIC | LNCAP prostate cell line | Uni-ZAP XR | LP04 |
| HPJA HPJB HPJC | PC3 Prostate cell line | Uni-ZAP XR | LP04 |
| HOSE HOSF HOSG | Human Osteoclastoma, re-excision | Uni-ZAP XR | LP04 |
| HTGE HTGF | Apoptotic T-cell, re-excision | Uni-ZAP XR | LP04 |
| HMAJ HMAK | H Macrophage (GM-CSF treated), re- | Uni-ZAP XR | LP04 |
| | excision | | |
| HACB HACC HACD | Human Adipose Tissue, re-excision | Uni-ZAP XR | LP04 |
| HFPA | H. Frontal Cortex, Epileptic | Uni-ZAP XR | LP04 |
| HFAA HFAB HFAC HFAD | Alzheimer's, spongy change | Uni-ZAP XR | LP04 |
| HFAE | | | |
| HFAM | Frontal Lobe, Dementia | Uni-ZAP XR | LP04 |
| HMIA HMIB HMIC | Human Manic Depression Tissue | Uni-ZAP XR | LP04 |
| HTSA HTSE HTSF HTSG | Human Thymus | pBS | LP05 |
| HTSH | | | |
| HPBA HPBB HPBC HPBD | Human Pineal Gland | pBS | LP05 |
| HPBE | | | |
| HSAA HSAB HSAC | HSA 172 Cells | pBS | LP05 |
| HSBA HSBB HSBC HSBM | HSC172 cells | pBS | LP05 |
| HJAA HJAB HJAC HJAD | Jurkat T-cell G1 phase | pBS | LP05 |
| HJBA HJBB HJBC HJBD | Jurkat T-Cell, S phase | pBS | LP05 |
| HAFA HAFB | Aorta endothelial cells + TNF-a | pBS | LP05 |
| HAWA HAWB HAWC | Human White Adipose | pBS | LP05 |
| HTNA HTNB | Human Thyroid | pBS | LP05 |
| HONA | Normal Ovary, Premenopausal | pBS | LP05 |
| HARA HARB | Human Adult Retina | pBS | LP05 |
| HLJA HLJB | Human Lung | pCMVSport 1 | LP06 |
| HOFM HOFN HOFO | H. Ovarian Tumor, II, OV5232 | pCMVSport 2.0 | LP07 |
| HOGA HOGB HOGC | OV Oct. 3, 1995 | pCMVSport 2.0 | LP07 |
| HCGL | CD34+ cells, II | pCMVSport 2.0 | LP07 |
| HDLA | Hodgkin's Lymphoma I | pCMVSport 2.0 | LP07 |
| HDTA HDTB HDTC HDTD | Hodgkin's Lymphoma II | pCMVSport 2.0 | LP07 |
| HDTE | | | |
| HKAA HKAB HKAC HKAD | Keratinocyte | pCMVSport 2.0 | LP07 |
| HKAE HKAF HKAG HKAH | | | |
| HCIM | CAPFINDER, Crohn's Disease, lib 2 | pCMVSport 2.0 | LP07 |
| HKAL | Keratinocyte, lib 2 | pCMVSport 2.0 | LP07 |
| HKAT | Keratinocyte, lib 3 | pCMVSport 2.0 | LP07 |
| HNDA | Nasal polyps | pCMVSport 2.0 | LP07 |
| HDRA | H. Primary Dendritic Cells, lib 3 | pCMVSport 2.0 | LP07 |
| HOHA HOHB HOHC | Human Osteoblasts II | pCMVSport 2.0 | LP07 |
| HLDA HLDB HLDC | Liver, Hepatoma | pCMVSport 3.0 | LP08 |
| HLDN HLDO HLDP | Human Liver, normal | pCMVSport 3.0 | LP08 |
| HMTA | pBMC stimulated w/poly I/C | pCMVSport 3.0 | LP08 |
| HNTA | NTERA2, control | pCMVSport 3.0 | LP08 |
| HDPA HDPB HDPC HDPD | Primary Dendritic Cells, lib 1 | pCMVSport 3.0 | LP08 |
| HDPF HDPG HDPH HDPI HDPJ | | | |
| HDPK | | | |
| HDPM HDPN HDPO HDPP | Primary Dendritic cells, frac 2 | pCMVSport 3.0 | LP08 |
| HMUA HMUB HMUC | Myoloid Progenitor Cell Line | pCMVSport 3.0 | LP08 |
| HHEA HHEB HHEC HHED | T Cell helper I | pCMVSport 3.0 | LP08 |
| HHEM HHEN HHEO HHEP | T cell helper II | pCMVSport 3.0 | LP08 |
| HEQA HEQB HEQC | Human endometrial stromal cells | pCMVSport 3.0 | LP08 |
| HJMA HJMB | Human endometrial stromal cells- | pCMVSport 3.0 | LP08 |
| | treated with progesterone | | |
| HSWA HSWB HSWC | Human endometrial stromal cells- | pCMVSport 3.0 | LP08 |
| | treated with estradiol | | |
| HSYA HSYB HSYC | Human Thymus Stromal Cells | pCMVSport 3.0 | LP08 |
| HLWA HLWB HLWC | Human Placenta | pCMVSport 3.0 | LP08 |
| HRAA HRAB HRAC | Rejected Kidney, lib 4 | pCMVSport 3.0 | LP08 |
| HMTM | PCR, pBMC I/C treated | PCRII | LP09 |
| HMJA | H. Meniingima, M6 | pSport 1 | LP10 |
| HMKA HMKB HMKC HMKD | H. Meningima, M1 | pSport 1 | LP10 |
| HMKE | | | |
| HUSG HUSI | Human umbilical vein endothelial cells, | pSport 1 | LP10 |
| | IL-4 induced | | |
| HUSX HUSY | Human Umbilical Vein Endothelial | pSport 1 | LP10 |
| | Cells, uninduced | | |
| HOFA | Ovarian Tumor I, OV5232 | pSport 1 | LP10 |
| HCFA HCFB HCFC HCFD | T-Cell PHA 16 hrs | pSport 1 | LP10 |
| HCFL HCFM HCFN HCFO | T-Cell PHA 24 hrs | pSport 1 | LP10 |
| HADA HADC HADD HADE | Human Adipose | pSport 1 | LP10 |
| HADF HADG | | | |
| HOVA HOVB HOVC | Human Ovary | pSport 1 | LP10 |
| HTWB HTWC HTWD HTWE | Resting T-Cell Library, II | pSport 1 | LP10 |
| HTWF | | | |
| HMMA | Spleen metastic melanoma | pSport 1 | LP10 |
| HLYA HLYB HLYC HLYD | Spleen, Chronic lymphocytic leukemia | pSport 1 | LP10 |
| HLYE | | | |
| HCGA | CD34+ cell, I | pSport 1 | LP10 |
| HEOM HEON | Human Eosinophils | pSport 1 | LP10 |
| HTDA | Human Tonsil, Lib 3 | pSport 1 | LP10 |
| HSPA | Salivary Gland, Lib 2 | pSport 1 | LP10 |
| HCHA HCHB HCHC | Breast Cancer cell line, MDA 36 | pSport 1 | LP10 |
| HCHM HCHN | Breast Cancer Cell line, angiogenic | pSport 1 | LP10 |
| HCIA | Crohn's Disease | pSport 1 | LP10 |
| HDAA HDAB HDAC | HEL cell line | pSport 1 | LP10 |
| HABA | Human Astrocyte | pSport 1 | LP10 |
| HUFA HUFB HUFC | Ulcerative Colitis | pSport 1 | LP10 |
| HNTM | NTERA2 + retinoic acid, 14 days | pSport 1 | LP10 |
| HDQA | Primary Dendritic cells, CapFinder2, | pSport 1 | LP10 |
| | frac 1 | | |
| HDQM | Primary Dendritic Cells, CapFinder, | pSport 1 | LP10 |
| | frac 2 | | |
| HLDX | Human Liver, normal, CapFinder | pSport 1 | LP10 |
| HULA HULB HULC | Human Dermal Endothelial | pSport 1 | LP10 |
| | Cells, untreated | | |
| HUMA | Human Dermal Endothelial cells, treated | pSport 1 | LP10 |
| HCJA | Human Stromal Endometrial | pSport 1 | LP10 |
| | fibroblasts, untreated | | |
| HCJM | Human Stromal endometrial fibroblasts, | pSport 1 | LP10 |
| | treated w/estradiol | | |
| HEDA | Human Stromal endometrial fibroblasts, | pSport 1 | LP10 |
| | treated with progesterone | | |
| HFNA | Human ovary tumor cell OV350721 | pSport 1 | LP10 |
| HKGA HKGB HKGC HKGD | Merkel Cells | pSport 1 | LP10 |
| HISA HISB HISC | Pancreas Islet Cell Tumor | pSport 1 | LP10 |
| HLSA | Skin, burned | pSport 1 | LP10 |
| HBZA | Prostate, BPH, Lib 2 | pSport 1 | LP10 |
| HBZS | Prostate BPH, Lib 2, subtracted | pSport 1 | LP10 |
| HFIA HFIB HFIC | Synovial Fibroblasts (control) | pSport 1 | LP10 |
| HFIH HFII HFIJ | Synovial hypoxia | pSport 1 | LP10 |
| HFIT HFIU HFIV | Synovial IL-1/TNF stimulated | pSport 1 | LP10 |
| HGCA | Messangial cell, frac 1 | pSport 1 | LP10 |
| HMVA HMVB HMVC | Bone Marrow Stromal Cell, untreated | pSport 1 | LP10 |
| HFIX HFIY HFIZ | Synovial Fibroblasts (I11/TNF), subt | pSport 1 | LP10 |
| HFOX HFOY HFOZ | Synovial hypoxia-RSF subtracted | pSport 1 | LP10 |
| HMQA HMQB HMQC HMQD | Human Activated Monocytes | Uni-ZAP XR | LP11 |
| HLIA HLIB HLIC | Human Liver | pCMVSport 1 | LP012 |
| HHBA HHBB HHBC HHBD | Human Heart | pCMVSport 1 | LP012 |
| HHBE | | | |
| HBBA HBBB | Human Brain | pCMVSport 1 | LP012 |
| HLJA HLJB HLJC HLJD HLJE | Human Lung | pCMVSport 1 | LP012 |
| HOGA HOGB HOGC | Ovarian Tumor | pCMVSport 2.0 | LP012 |
| HTJM | Human Tonsils, Lib 2 | pCMVSport 2.0 | LP012 |
| HAMF HAMG | KMH2 | pCMVSport 3.0 | LP012 |
| HAJA HAJB HAJC | L428 | pCMVSport 3.0 | LP012 |
| HWBA HWBB HWBC HWBD | Dendritic cells, pooled | pCMVSport 3.0 | LP012 |
| HWBE | | | |
| HWAA HWAB HWAC HWAD | Human Bone Marrow, treated | pCMVSport 3.0 | LP012 |
| HWAE | | | |
| HYAA HYAB HYAC | B Cell lymphoma | pCMVSport 3.0 | LP012 |
| HWHG HWHH HWHI | Healing groin wound, 6.5 hours post | pCMVSport 3.0 | LP012 |
| | incision | | |
| HWHP HWHQ HWHR | Healing groin wound; 7.5 hours post | pCMVSport 3.0 | LP012 |
| | incision | | |
| HARM | Healing groin wound-zero hr post- | pCMVSport 3.0 | LP012 |
| | incision (control) | | |
| HBIM | Olfactory epithelium; nasalcavity | pCMVSport 3.0 | LP012 |
| HWDA | Healing Abdomen wound; 70 & 90 min | pCMVSport 3.0 | LP012 |
| | post incision | | |
| HWEA | Healing Abdomen Wound; 15 days post | pCMVSport 3.0 | LP012 |
| | incision | | |
| HWJA | Healing Abdomen Wound; 21 & 29 days | pCMVSport 3.0 | LP012 |
| HNAL | Human Tongue, frac 2 | pSport 1 | LP012 |
| HMJA | H. Meniingima, M6 | pSport 1 | LP012 |
| HMKA HMKB HMKC HMKD | H. Meningima, M1 | pSport 1 | LP012 |
| HMKE | | | |
| HOFA | Ovarian Tumor 1, OV5232 | pSport 1 | LP012 |
| HCFA HCFB HCFC HCFD | T-Cell PHA 16 hrs | pSport 1 | LP012 |
| HCFL HCFM HCFN HCFO | T-Cell PHA 24 hrs | pSport 1 | LP012 |
| HMMA HMMB HMMC | Spleen metastic melanoma | pSport 1 | LP012 |
| HTDA | Human Tonsil, Lib 3 | pSport 1 | LP012 |
| HDBA | Human Fetal Thymus | pSport 1 | LP012 |
| HDUA | Pericardium | pSport 1 | LP012 |
| HBZA | Prostate, BPH, Lib 2 | pSport 1 | LP012 |
| HWCA | Larynx tumor | pSport 1 | LP012 |
| HWKA | Normal lung | pSport 1 | LP012 |
| HSMB | Bone marrow stroma, treated | pSport 1 | LP012 |
| HBHM | Normal trachea | pSport 1 | LP012 |
| HLFC | Human Larynx | pSport 1 | LP012 |
| HLRB | Siebben Polyposis | pSport 1 | LP012 |
| HNIA | Mammary Gland | pSport 1 | LP012 |
| HNJB | Palate carcinoma | pSport 1 | LP012 |
| HNKA | Palate normal | pSport 1 | LP012 |
| HMZA | Pharynx carcinoma | pSport 1 | LP012 |
| HABG | Cheek Carcinoma | pSport 1 | LP012 |
| HMZM | Pharynx Carcinoma | pSport 1 | LP012 |
| HDRM | Larynx Carcinoma | pSport 1 | LP012 |
| HVAA | Pancreas normal PCA4 No | pSport 1 | LP012 |
| HICA | Tongue carcinoma | pSport 1 | LP012 |
| HUKA HUKB HUKC HUKD | Human Uterine Cancer | Lambda ZAP II | LP013 |
| HUKE | | | |
| HFFA | Human Fetal Brain, random primed | Lambda ZAP II | LP013 |
| HTUA | Activated T-cell labeled with 4-thioluri | Lambda ZAP II | LP013 |
| HBQA | Early Stage Human Brain, random | Lambda ZAP II | LP013 |
| | primed | | |
| HMEB | Human microvascular Endothelial cells, | Lambda ZAP II | LP013 |
| | fract. B | | |
| HUSH | Human Umbilical Vein Endothelial | Lambda ZAP II | LP013 |
| | cells, fract. A, re-excision | | |
| HLQC HLQD | Hepatocellular tumor, re-excision | Lambda ZAP II | LP013 |
| HTWJ HTWK HTWL | Resting T-cell, re-excision | Lambda ZAP II | LP013 |
| HF6S | Human Whole 6 week Old Embryo (II), | pBluescript | LP013 |
| | subt | | |
| HHPS | Human Hippocampus, subtracted | pBluescript | LP013 |
| HL1S | LNCAP, differential expression | pBluescript | LP013 |
| HLHS HLHT | Early Stage Human Lung, Subtracted | pBluescript | LP013 |
| HSUS | Supt cells, cyclohexamide treated, | pBluescript | LP013 |
| | subtracted | | |
| HSUT | Supt cells, cyclohexamide treated, | pBluescript | LP013 |
| | differentially expressed | | |
| HSDS | H. Striatum Depression, subtracted | pBluescript | LP013 |
| HPTZ | Human Pituitary, Subtracted VII | pBluescript | LP013 |
| HSDX | H. Striatum Depression, subt II | pBluescript | LP013 |
| HSDZ | H. Striatum Depression, subt | pBluescript | LP013 |
| HPBA HPBB HPBC HPBD | Human Pineal Gland | pBluescript SK− | LP013 |
| HPBE | | | |
| HRTA | Colorectal Tumor | pBluescript SK− | LP013 |
| HSBA HSBB HSBC HSBM | HSC172 cells | pBluescript SK− | LP013 |
| HJAA HJAB HJAC HJAD | Jurkat T-cell G1 phase | pBluescript SK− | LP013 |
| HJBA HJBB HJBC HJBD | Jurkat T-cell, S1 phase | pBluescript SK− | LP013 |
| HTNA HTNB | Human Thyroid | pBluescript SK− | LP013 |
| HAHA HAHB | Human Adult Heart | Uni-ZAP XR | LP013 |
| HE6A | Whole 6 week Old Embryo | Uni-ZAP XR | LP013 |
| HFCA HFCB HFCC HFCD | Human Fetal Brain | Uni-ZAP XR | LP013 |
| HFCE | | | |
| HFKC HFKD HFKE HFKF | Human Fetal Kidney | Uni-ZAP XR | LP013 |
| HFKG | | | |
| HGBA HGBD HGBE HGBF | Human Gall Bladder | Uni-ZAP XR | LP013 |
| HGBG | | | |
| HPRA HPRB HPRC HPRD | Human Prostate | Uni-ZAP XR | LP013 |
| HTEA HTEB HTEC HTED | Human Testes | Uni-ZAP XR | LP013 |
| HTEE | | | |
| HTTA HTTB HTTC HTTD | Human Testes Tumor | Uni-ZAP XR | LP013 |
| HTTE | | | |
| HYBA HYBB | Human Fetal Bone | Uni-ZAP XR | LP013 |
| HFLA | Human Fetal Liver | Uni-ZAP XR | LP013 |
| HHFB HHFC HHFD HHFE | Human Fetal Heart | Uni-ZAP XR | LP013 |
| HHFF | | | |
| HUVB HUVC HUVD HUVE | Human Umbilical Vein, End. remake | Uni-ZAP XR | LP013 |
| HTHB HTHC HTHD | Human Thymus | Uni-ZAP XR | LP013 |
| HSTA HSTB HSTC HSTD | Human Skin Tumor | Uni-ZAP XR | LP013 |
| HTAA HTAB HTAC HTAD | Human Activated T-cells | Uni-ZAP XR | LP013 |
| HTAE | | | |
| HFEA HFEB HFEC | Human Fetal Epithelium (skin) | Uni-ZAP XR | LP013 |
| HJPA HJPB HJPC HJPD | Human Jurkat Membrane Bound | Uni-ZAP XR | LP013 |
| | Polysomes | | |
| HESA | Human Epithelioid Sarcoma | Uni-ZAP XR | LP013 |
| HALS | Human Adult Liver, Subtracted | Uni-ZAP XR | LP013 |
| HFTA HFTB HFTC HFTD | Human Fetal Dura Mater | Uni-ZAP XR | LP013 |
| HCAA HCAB HCAC | Cem cells, cyclohexamide treated | Uni-ZAP XR | LP013 |
| HRGA HRGB HRGC HRGD | Raji Cells, cyclohexamide treated | Uni-ZAP XR | LP013 |
| HE9A HE9B HE9C HE9D HE9E | Nine Week Old Early Stage Human | Uni-ZAP XR | LP013 |
| HSFA | Human Fibrosarcoma | Uni-ZAP XR | LP013 |
| HATA HATB HATC HATD | Human Adrenal Gland Tumor | Uni-ZAP XR | LP013 |
| HATE | | | |
| HTRA | Human Trachea Tumor | Uni-ZAP XR | LP013 |
| HE2A HE2D HE2E HE2H HE2I | 12 Week Old Early Stage Human | Uni-ZAP XR | LP013 |
| HE2B HE2C HE2F HE2G HE2P | 12 Week Old Early Stage Human, II | Uni-ZAP XR | LP013 |
| HNEA HNEB HNEC HNED | Human Neutrophil | Uni-ZAP XR | LP013 |
| HNEE | | | |
| HBGA | Human Primary Breast Cancer | Uni-ZAP XR | LP013 |
| HPTS HPTT HPTU | Human Pituitary, subtracted | Uni-ZAP XR | LP013 |
| HMQA HMQB HMQC HMQD | Human Activated Monocytes | Uni-ZAP XR | LP013 |
| HOAA HOAB HOAC | Human Osteosarcoma | Uni-ZAP XR | LP013 |
| HTOA HTOD HTOE HTOF | human tonsils | Uni-ZAP XR | LP013 |
| HTOG | | | |
| HMGB | Human OB MG63 control fraction I | Uni-ZAP XR | LP013 |
| HOPB | Human OB HOS control fraction I | Uni-ZAP XR | LP013 |
| HOQB | Human OB HOS treated (1 nM E2) | Uni-ZAP XR | LP013 |
| | fraction I | | |
| HAUA HAUB HAUC | Amniotic Cells-TNF induced | Uni-ZAP XR | LP013 |
| HAQA HAQB HAQC HAQD | Amniotic Cells-Primary Culture | Uni-ZAP XR | LP013 |
| HROA HROC | HUMAN STOMACH | Uni-ZAP XR | LP013 |
| HBJA HBJB HBJC HBJD HBJE | HUMAN B CELL LYMPHOMA | Uni-ZAP XR | LP013 |
| HODA HODB HODC HODD | human ovarian cancer | Uni-ZAP XR | LP013 |
| HCPA | Corpus Callosum | Uni-ZAP XR | LP013 |
| HSOA | stomach cancer (human) | Uni-ZAP XR | LP013 |
| HERA | SKIN | Uni-ZAP XR | LP013 |
| HMDA | Brain-medulloblastoma | Uni-ZAP XR | LP013 |
| HGLA HGLB HGLD | Glioblastoma | Uni-ZAP XR | LP013 |
| HWTA HWTB HWTC | wilm's tumor | Uni-ZAP XR | LP013 |
| HEAA | H. Atrophic Endometrium | Uni-ZAP XR | LP013 |
| HAPN HAPO HAPP HAPQ | Human Adult Pulmonary; re-excision | Uni-ZAP XR | LP013 |
| HAPR | | | |
| HLTG HLTH | Human T-cell lymphoma; re-excision | Uni-ZAP XR | LP013 |
| HAHC HAHD HAHE | Human Adult Heart; re-excision | Uni-ZAP XR | LP013 |
| HAGA HAGB HAGC HAGD | Human Amygdala | Uni-ZAP XR | LP013 |
| HAGE | | | |
| HSJA HSJB HSJC | Smooth muscle-ILb induced | Uni-ZAP XR | LP013 |
| HSHA HSHB HSHC | Smooth muscle, IL1b induced | Uni-ZAP XR | LP013 |
| HPWA HPWB HPWC HPWD | Prostate BPH | Uni-ZAP XR | LP013 |
| HPWE | | | |
| HPIA HPIB HPIC | LNCAP prostate cell line | Uni-ZAP XR | LP013 |
| HPJA HPJB HPJC | PC3 Prostate cell line | Uni-ZAP XR | LP013 |
| HBTA | Bone Marrow Stroma, TNF & LPS ind | Uni-ZAP XR | LP013 |
| HMCF HMCG HMCH HMCI | Macrophage-oxLDL; re-excision | Uni-ZAP XR | LP013 |
| HMCJ | | | |
| HAGG HAGH HAGI | Human Amygdala; re-excision | Uni-ZAP XR | LP013 |
| HACA | H. Adipose Tissue | Uni-ZAP XR | LP013 |
| HKFB | K562 + PMA (36 hrs), re-excision | ZAP Express | LP013 |
| HCWT HCWU HCWV | CD34 positive cells (cord blood), re-ex | ZAP Express | LP013 |
| HBWA | Whole brain | ZAP Express | LP013 |
| HBXA HBXB HBXC HBXD | Human Whole Brain #2-Oligo dT > | ZAP Express | LP013 |
| | 1.5 Kb | | |
| HAVM | Temporal cortex-Alzheizmer | pT-Adv | LP014 |
| HAVT | Hippocampus, Alzheimer Subtracted | pT-Adv | LP014 |
| HHAS | CHME Cell Line | Uni-ZAP XR | LP014 |
| HAJR | Larynx normal | pSport 1 | LP014 |
| HWLE HWLF HWLG HWLH | Colon Normal | pSport 1 | LP014 |
| HCRM HCRN HCRO | Colon Carcinoma | pSport 1 | LP014 |
| HWLI HWLJ HWLK | Colon Normal | pSport 1 | LP014 |
| HWLQ HWLR HWLS HWLT | Colon Tumor | pSport 1 | LP014 |
| HBFM | Gastrocnemius Muscle | pSport 1 | LP014 |
| HBOD HBOE | Quadriceps Muscle | pSport 1 | LP014 |
| HBKD HBKE | Soleus Muscle | pSport 1 | LP014 |
| HCCM | Pancreatic Langerhans | pSport 1 | LP014 |
| HWGA | Larynx carcinoma | pSport 1 | LP014 |
| HWGM HWGN | Larynx carcinoma | pSport 1 | LP014 |
| HWLA HWLB HWLC | Normal colon | pSport 1 | LP014 |
| HWLM HWLN | Colon Tumor | pSport 1 | LP014 |
| HVAM HVAN HVAO | Pancreas Tumor | pSport 1 | LP014 |
| HWGQ | Larynx carcinoma | pSport 1 | LP014 |
| HAQM HAQN | Salivary Gland | pSport 1 | LP014 |
| HASM | Stomach; normal | pSport 1 | LP014 |
| HBCM | Uterus; normal | pSport 1 | LP014 |
| HCDM | Testis; normal | pSport 1 | LP014 |
| HDJM | Brain; normal | pSport 1 | LP014 |
| HEFM | Adrenal Gland, normal | pSport 1 | LP014 |
| HBAA | Rectum normal | pSport 1 | LP014 |
| HFDM | Rectum tumour | pSport 1 | LP014 |
| HGAM | Colon, normal | pSport 1 | LP014 |
| HHMM | Colon, tumour | pSport 1 | LP014 |
| HCLB HCLC | Human Lung Cancer | Lambda Zap II | LP015 |
| HRLA | L1 Cell line | ZAP Express | LP015 |
| HHAM | Hypothalamus, Alzheimer's | pCMVSport 3.0 | LP015 |
| HKBA | Ku 812F Basophils Line | pSport 1 | LP015 |
| HS2S | Saos2, Dexamethosome Treated | pSport 1 | LP016 |
| HA5A | Lung Carcinoma A549 TNFalpha | pSport 1 | LP016 |
| | activated | | |
| HTFM | TF-1 Cell Line GM-CSF Treated | pSport 1 | LP016 |
| HYAS | Thyroid Tumour | pSport 1 | LP016 |
| HUTS | Larynx Normal | pSport 1 | LP016 |
| HXOA | Larynx Tumor | pSport 1 | LP016 |
| HEAH | Ea.hy.926 cell line | pSport 1 | LP016 |
| HINA | Adenocarcinoma Human | pSport 1 | LP016 |
| HRMA | Lung Mesothelium | pSport 1 | LP016 |
| HLCL | Human Pre-Differentiated Adipocytes | Uni-Zap XR | LP017 |
| HS2A | Saos2 Cells | pSport 1 | LP020 |
| HS2I | Saos2 Cells; Vitamin D3 Treated | pSport 1 | LP020 |
| HUCM | CHME Cell Line, untreated | pSport 1 | LP020 |
| HEPN | Aryepiglottis Normal | pSport 1 | LP020 |
| HPSN | Sinus Piniformis Tumour | pSport 1 | LP020 |
| HNSA | Stomach Normal | pSport 1 | LP020 |
| HNSM | Stomach Tumour | pSport 1 | LP020 |
| HNLA | Liver Normal Met5No | pSport 1 | LP020 |
| HUTA | Liver Tumour Met 5 Tu | pSport 1 | LP020 |
| HOCN | Colon Normal | pSport 1 | LP020 |
| HOCT | Colon Tumor | pSport 1 | LP020 |
| HTNT | Tongue Tumour | pSport 1 | LP020 |
| HLXN | Larynx Normal | pSport 1 | LP020 |
| HLXT | Larynx Tumour | pSport 1 | LP020 |
| HTYN | Thymus | pSport 1 | LP020 |
| HPLN | Placenta | pSport 1 | LP020 |
| HTNG | Tongue Normal | pSport 1 | LP020 |
| HZAA | Thyroid Normal (SDCA2 No) | pSport 1 | LP020 |
| HWES | Thyroid Thyroiditis | pSport 1 | LP020 |
| HFHD | Ficolled Human Stromal Cells, 5Fu | pTrip1Ex2 | LP021 |
| | treated | | |
| HFHM, HFHN | Ficolled Human Stromal Cells, | pTrip1Ex2 | LP021 |
| | Untreated | | |
| HPCI | Hep G2 Cells, lambda library | lambda Zap-CMV XR | LP021 |
| HBCA, HBCB, HBCC | H. Lymph node breast Cancer | Uni-ZAP XR | LP021 |
| HCOK | Chondrocytes | pSPORT 1 | LP022 |
| HDCA, HDCB, HDCC | Dendritic Cells From CD34 Cells | pSPORT 1 | LP022 |
| HDMA, HDMB | CD40 activated monocyte dendritic | pSPORT 1 | LP022 |
| | cells | | |
| HDDM, HDDN, HDDO | LPS activated derived dendritic cells | pSPORT 1 | LP022 |
| HPCR | Hep G2 Cells, PCR library | lambda Zap-CMV XR | LP022 |
| HAAA, HAAB, HAAC | Lung, Cancer (4005313A3): Invasive | pSPORT 1 | LP022 |
| | Poorly Differentiated Lung | | |
| | Adenocarcinoma | | |
| HIPA, HIPB, HIPC | Lung, Cancer (4005163 B7): Invasive, | pSPORT 1 | LP022 |
| | Poorly Diff. Adenocarcinoma, | | |
| | Metastatic | | |
| HOOH, HOOI | Ovary, Cancer: (4004562 B6) Papillary | pSPORT 1 | LP022 |
| | Serous Cystic Neoplasm, Low | | |
| | Malignant Pot | | |
| HIDA | Lung, Normal: (4005313 B1) | pSPORT 1 | LP022 |
| HUJA, HUJB, HUJC, HUJD, HUJE | B-Cells | pCMVSport 3.0 | LP022 |
| HNOA, HNOB, HNOC, HNOD | Ovary, Normal: (9805C040R) | pSPORT 1 | LP022 |
| HNLM | Lung, Normal: (4005313 B1) | pSPORT 1 | LP022 |
| HSCL | Stromal Cells | pSPORT 1 | LP022 |
| HAAX | Lung, Cancer: (4005313 A3) Invasive | pSPORT 1 | LP022 |
| | Poorly-differentiated Metastatic lung | | |
| | adenocarcinoma | | |
| HUUA, HUUB, HUUC, HUUD | B-cells (unstimulated) | pTrip1Ex2 | LP022 |
| HWWA, HWWB, HWWC, HWWD, | B-cells (stimulated) | pSPORT 1 | LP022 |
| HWWE, HWWF, HWWG | | | |
| HCCC | Colon, Cancer: (9808C064R) | pCMVSport 3.0 | LP023 |
| HPDO HPDP HPDQ HPDR HPD | Ovary, Cancer (9809C332): Poorly | pSport 1 | LP023 |
| | differentiated adenocarcinoma | | |
| HPCO HPCP HPCQ HPCT | Ovary, Cancer (15395A1F): Grade II | pSport 1 | LP023 |
| | Papillary Carcinoma | | |
| HOCM HOCO HOCP HOCQ | Ovary, Cancer: (15799A1F) Poorly | pSport 1 | LP023 |
| | differentiated carcinoma | | |
| HCBM HCBN HCBO | Breast, Cancer: (4004943 A5) | pSport 1 | LP023 |
| HNBT HNBU HNBV | Breast, Normal: (4005522B2) | pSport 1 | LP023 |
| HBCP HBCQ | Breast, Cancer: (4005522 A2) | pSport 1 | LP023 |
| HBCJ | Breast, Cancer: (9806C012R) | pSport 1 | LP023 |
| HSAM HSAN | Stromal cells 3.88 | pSport 1 | LP023 |
| HVCA HVCB HVCC HVCD | Ovary, Cancer: (4004332 A2) | pSport 1 | LP023 |
| HSCK HSEN HSEO | Stromal cells (HBM3.18) | pSport 1 | LP023 |
| HSCP HSCQ | stromal cell clone 2.5 | pSport 1 | LP023 |
| HUXA | Breast Cancer: (4005385 A2) | pSport 1 | LP023 |
| HCOM HCON HCOO HCOP | Ovary, Cancer (4004650 A3): Well- | pSport 1 | LP023 |
| HCOQ | Differentiated Micropapillary Serous | | |
| | Carcinoma | | |
| HBNM | Breast, Cancer: (9802C020E) | pSport 1 | LP023 |
| HVVA HVVB HVVC HVVD | Human Bone Marrow, treated | pSport 1 | LP023 |
| HVVE | | | |

[0925] Two nonlimiting examples are provided below for isolating a particular clone from the deposited sample of plasmid cDNAs cited for that clone in Table 7. First, a plasmid is directly isolated by screening the clones using a polynucleotide probe corresponding to the nucleotide sequence of SEQ ID NO:X.

[0926] Particularly, a specific polynucleotide with 30-40 nucleotides is synthesized using an Applied Biosystems DNA synthesizer according to the sequence reported. The oligonucleotide is labeled, for instance, with ³²P-γ-ATP using T4 polynucleotide kinase and purified according to routine methods. (E.g., Maniatis et al., Molecular Cloning: A Laboratory Manual, Cold Spring Harbor Press, Cold Spring, N.Y. (1982).) The plasmid mixture is transformed into a suitable host, as indicated above (such as XL-1 Blue (Stratagene)) using techniques known to those of skill in the art, such as those provided by the vector supplier or in related publications or patents cited above. The transformants are plated on 1.5% agar plates (containing the appropriate selection agent, e.g., ampicillin) to a density of about 150 transformants (colonies) per plate. These plates are screened using Nylon membranes according to routine methods for bacterial colony screening (e.g., Sambrook et al., Molecular Cloning: A Laboratory Manual, 2nd Edit., (1989), Cold Spring Harbor Laboratory Press, pages 1.93 to 1.104), or other techniques known to those of skill in the art.

[0927] Alternatively, two primers of 17-20 nucleotides derived from both ends of the nucleotide sequence of SEQ ID NO:X are synthesized and used to amplify the desired cDNA using the deposited cDNA plasmid as a template. The polymerase chain reaction is carried out under routine conditions, for instance, in 25 μl of reaction mixture with 0.5 ug of the above cDNA template. A convenient reaction mixture is 1.5-5 mM MgCl₂, 0.01% (w/v) gelatin, 20 μM each of dATP, dCTP, dGTP, dTTP, 25 p mol of each primer and 0.25 Unit of Taq polymerase. Thirty five cycles of PCR (denaturation at 94° C. for 1 min; annealing at 55° C. for 1 min; elongation at 72° C. for 1 min) are performed with a Perkin-Elmer Cetus automated thermal cycler. The amplified product is analyzed by agarose gel electrophoresis and the DNA band with expected molecular weight is excised and purified. The PCR product is verified to be the selected sequence by subcloning and sequencing the DNA product.

[0928] Several methods are available for the identification of the 5′ or 3′ non-coding portions of a gene which may not be present in the deposited clone. These methods include but are not limited to, filter probing, clone enrichment using specific probes, and protocols similar or identical to 5′ and 3′ “RACE” protocols which are well known in the art. For instance, a method similar to 5′ RACE is available for generating the missing 5′ end of a desired full-length transcript. (Fromont-Racine et al., Nucleic Acids Res. 21(7):1683-1684 (1993).)

[0929] Briefly, a specific RNA oligonucleotide is ligated to the 5′ ends of a population of RNA presumably containing full-length gene RNA transcripts. A primer set containing a primer specific to the ligated RNA oligonucleotide and a primer specific to a known sequence of the gene of interest is used to PCR amplify the 5′ portion of the desired full-length gene. This amplified product may then be sequenced and used to generate the full length gene.

[0930] This above method starts with total RNA isolated from the desired source, although poly-A+ RNA can be used. The RNA preparation can then be treated with phosphatase if necessary to eliminate 5′ phosphate groups on degraded or damaged RNA which may interfere with the later RNA ligase step. The phosphatase should then be inactivated and the RNA treated with tobacco acid pyrophosphatase in order to remove the cap structure present at the 5′ ends of messenger RNAs. This reaction leaves a 5′ phosphate group at the 5′ end of the cap cleaved RNA which can then be ligated to an RNA oligonucleotide using T4 RNA ligase.

[0931] This modified RNA preparation is used as a template for first strand cDNA synthesis using a gene specific oligonucleotide. The first strand synthesis reaction is used as a template for PCR amplification of the desired 5′ end using a primer specific to the ligated RNA oligonucleotide and a primer specific to the known sequence of the gene of interest. The resultant product is then sequenced and analyzed to confirm that the 5′ end sequence belongs to the desired gene.

### Example 2

[0932] Isolation of Genomic Clones Corresponding to a Polynucleotide

[0933] A human genomic P1 library (Genomic Systems, Inc.) is screened by PCR using primers selected for the sequence corresponding to SEQ ID NO:X according to the method described in Example 1. (See also, Sambrook et al., Molecular Cloning: A Laboratory Manual, 2nd Edn., (1989), Cold Spring Harbor Laboratory Press).

### Example 3

[0934] Tissue Specific Expression Analysis

[0935] The Human Genome Sciences, Inc. (HGS) database is derived from sequencing tissue and/or disease specific cDNA libraries. Libraries generated from a particular tissue are selected and the specific tissue expression pattern of EST groups or assembled contigs within these libraries is determined by comparison of the expression patterns of those groups or contigs within the entire database. ESTs and assembled contigs which show tissue specific expression are selected.

[0936] The original clone from which the specific EST sequence was generated, or in the case of an assembled contig, the clone from which the 5′ most EST sequence was generated, is obtained from the catalogued library of clones and the insert amplified by PCR using methods known in the art. The PCR product is denatured and then transferred in 96 or 384 well format to a nylon membrane (Schleicher and Scheull) generating an array filter of tissue specific clones. Housekeeping genes, maize genes, and known tissue specific genes are included on the filters. These targets can be used in signal normalization and to validate assay sensitivity. Additional targets are included to monitor probe length and specificity of hybridization.

[0937] Radioactively labeled hybridization probes are generated by first strand cDNA synthesis per the manufacturer's instructions (Life Technologies) from mRNA/RNA samples prepared from the specific tissue being analyzed (e.g., colon tissue, colon cancer, etc.). The hybridization probes are purified by gel exclusion chromatography, quantitated, and hybridized with the array filters in hybridization bottles at 65° C. overnight. The filters are washed under stringent conditions and signals are captured using a Fuji phosphorimager.

[0938] Data is extracted using AIS software and following background subtraction, signal normalization is performed. This includes a normalization of filter-wide expression levels between different experimental runs. Genes that are differentially expressed in the tissue of interest are identified.

### Example 4

[0939] Chromosomal Mapping of the Polynucleotides

[0940] An oligonucleotide primer set is designed according to the sequence at the 5′ end of SEQ ID NO:X. This primer preferably spans about 100 nucleotides. This primer set is then used in a polymerase chain reaction under the following set of conditions: 30 seconds, 95° C.; 1 minute, 56° C.; 1 minute, 70° C. This cycle is repeated 32 times followed by one 5 minute cycle at 70° C. Human, mouse, and hamster DNA is used as template in addition to a somatic cell hybrid panel containing individual chromosomes or chromosome fragments (Bios, Inc). The reactions are analyzed on either 8% polyacrylamide gels or 3.5% agarose gels. Chromosome mapping is determined by the presence of an approximately 100 bp PCR fragment in the particular somatic cell hybrid.

### Example 5

[0941] Bacterial Expression of a Polypeptide

[0942] A polynucleotide encoding a polypeptide of the present invention is amplified using PCR oligonucleotide primers corresponding to the 5′ and 3′ ends of the DNA sequence, as outlined in Example 1, to synthesize insertion fragments. The primers used to amplify the cDNA insert should preferably contain restriction sites, such as BamHI and XbaI, at the 5′ end of the primers in order to clone the amplified product into the expression vector. For example, BamHI and XbaI correspond to the restriction enzyme sites on the bacterial expression vector pQE-9. (Qiagen, Inc., Chatsworth, Calif.). This plasmid vector encodes antibiotic resistance (Amp^{r}), a bacterial origin of replication (ori), an IPTG-regulatable promoter/operator (P/O), a ribosome binding site (RBS), a 6-histidine tag (6-His), and restriction enzyme cloning sites.

[0943] The pQE-9 vector is digested with BamHI and XbaI and the amplified fragment is ligated into the pQE-9 vector maintaining the reading frame initiated at the bacterial RBS. The ligation mixture is then used to transform the E. coli strain M15/rep4 (Qiagen, Inc.) which contains multiple copies of the plasmid pREP4, which expresses the lacI repressor and also confers kanamycin resistance (Kan^{r}). Transformants are identified by their ability to grow on LB plates and ampicillin/kanamycin resistant colonies are selected. Plasmid DNA is isolated and confirmed by restriction analysis.

[0944] Clones containing the desired constructs are grown overnight (O/N) in liquid culture in LB media supplemented with both Amp (100 ug/ml) and Kan (25 ug/ml). The O/N culture is used to inoculate a large culture at a ratio of 1:100 to 1:250. The cells are grown to an optical density 600 (O.D.⁶⁰⁰) of between 0.4 and 0.6. IPTG (Isopropyl-B-D-thiogalacto pyranoside) is then added to a final concentration of 1 mM. IPTG induces by inactivating the lacI repressor, clearing the P/O leading to increased gene expression.

[0945] Cells are grown for an extra 3 to 4 hours. Cells are then harvested by centrifugation (20 mins at 6000×g). The cell pellet is solubilized in the chaotropic agent 6 Molar Guanidine HCl by stirring for 3-4 hours at 4° C. The cell debris is removed by centrifugation, and the supernatant containing the polypeptide is loaded onto a nickel-nitrilo-tri-acetic acid (“Ni-NTA”) affinity resin column (available from QIAGEN, Inc., supra). Proteins with a 6× His tag bind to the Ni-NTA resin with high affinity and can be purified in a simple one-step procedure (for details see: The QIAexpressionist (1995) QIAGEN, Inc., supra).

[0946] Briefly, the supernatant is loaded onto the column in 6 M guanidine-HCl, pH 8. The column is first washed with 10 volumes of 6 M guanidine-HCl, pH 8, then washed with 10 volumes of 6 M guanidine-HCl pH 6, and finally the polypeptide is eluted with 6 M guanidine-HCl, pH 5.

[0947] The purified protein is then renatured by dialyzing it against phosphate-buffered saline (PBS) or 50 mM Na-acetate, pH 6 buffer plus 200 mM NaCl. Alternatively, the protein can be successfully refolded while immobilized on the Ni-NTA column. The recommended conditions are as follows: renature using a linear 6M-1M urea gradient in 500 mM NaCl, 20% glycerol, 20 mM Tris/HCl pH 7.4, containing protease inhibitors. The renaturation should be performed over a period of 1.5 hours or more. After renaturation the proteins are eluted by the addition of 250 mM immidazole. Immidazole is removed by a final dialyzing step against PBS or 50 mM sodium acetate pH 6 buffer plus 200 mM NaCl. The purified protein is stored at 4° C. or frozen at −80° C.

[0948] In addition to the above expression vector, the present invention further includes an expression vector, called pHE4a (ATCC Accession Number 209645, deposited on Feb. 25, 1998) which contains phage operator and promoter elements operatively linked to a polynucleotide of the present invention. This vector contains: 1) a neomycinphosphotransferase gene as a selection marker, 2) an E. coli origin of replication, 3) a T5 phage promoter sequence, 4) two lac operator sequences, 5) a Shine-Delgarno sequence, and 6) the lactose operon repressor gene (lacIq). The origin of replication (oriC) is derived from pUC19 (LTI, Gaithersburg, Md.). The promoter and operator sequences are made synthetically.

[0949] DNA can be inserted into the pHE4a by restricting the vector with NdeI and XbaI, BamHI, XhoI, or Asp718, running the restricted product on a gel, and isolating the larger fragment (the stuffer fragment should be about 310 base pairs). The DNA insert is generated according to the PCR protocol described in Example 1, using PCR primers having restriction sites for NdeI (5′ primer) and XbaI, BamHI, XhoI, or Asp718 (3′ primer). The PCR insert is gel purified and restricted with compatible enzymes. The insert and vector are ligated according to standard protocols.

[0950] The engineered vector could easily be substituted in the above protocol to express protein in a bacterial system.

### Example 6

[0951] Purification of a Polypeptide from an Inclusion Body

[0952] The following alternative method can be used to purify a polypeptide expressed in E coli when it is present in the form of inclusion bodies. Unless otherwise specified, all of the following steps are conducted at 4-10° C.

[0953] Upon completion of the production phase of the E. coli fermentation, the cell culture is cooled to 4-10° C. and the cells harvested by continuous centrifugation at 15,000 rpm (Heraeus Sepatech). On the basis of the expected yield of protein per unit weight of cell paste and the amount of purified protein required, an appropriate amount of cell paste, by weight, is suspended in a buffer solution containing 100 mM Tris, 50 mM EDTA, pH 7.4. The cells are dispersed to a homogeneous suspension using a high shear mixer.

[0954] The cells are then lysed by passing the solution through a microfluidizer (Microfuidics, Corp. or APV Gaulin, Inc.) twice at 4000-6000 psi. The homogenate is then mixed with NaCl solution to a final concentration of 0.5 M NaCl, followed by centrifugation at 7000×g for 15 min. The resultant pellet is washed again using 0.5M NaCl, 100 mM Tris, 50 mM EDTA, pH 7.4.

[0955] The resulting washed inclusion bodies are solubilized with 1.5 M guanidine hydrochloride (GuHCl) for 2-4 hours. After 7000×g centrifugation for 15 min., the pellet is discarded and the polypeptide containing supernatant is incubated at 4° C. overnight to allow further GuHCl extraction.

[0956] Following high speed centrifugation (30,000×g) to remove insoluble particles, the GuHCl solubilized protein is refolded by quickly mixing the GuHCl extract with 20 volumes of buffer containing 50 mM sodium, pH 4.5, 150 mM NaCl, 2 mM EDTA by vigorous stirring. The refolded diluted protein solution is kept at 4° C. without mixing for 12 hours prior to further purification steps.

[0957] To clarify the refolded polypeptide solution, a previously prepared tangential filtration unit equipped with 0.16 μm membrane filter with appropriate surface area (e.g., Filtron), equilibrated with 40 mM sodium acetate, pH 6.0 is employed. The filtered sample is loaded onto a cation exchange resin (e.g., Poros HS-50, Perseptive Biosystems). The column is washed with 40 mM sodium acetate, pH 6.0 and eluted with 250 mM, 500 mM, 1000 mM, and 1500 mM NaCl in the same buffer, in a stepwise manner. The absorbance at 280 nm of the effluent is continuously monitored. Fractions are collected and further analyzed by SDS-PAGE.

[0958] Fractions containing the polypeptide are then pooled and mixed with 4 volumes of water. The diluted sample is then loaded onto a previously prepared set of tandem columns of strong anion (Poros HQ-50, Perseptive Biosystems) and weak anion (Poros CM-20, Perseptive Biosystems) exchange resins. The columns are equilibrated with 40 mM sodium acetate, pH 6.0. Both columns are washed with 40 mM sodium acetate, pH 6.0, 200 mM NaCl. The CM-20 column is then eluted using a 10 column volume linear gradient ranging from 0.2 M NaCl, 50 mM sodium acetate, pH 6.0 to 1.0 M NaCl, 50 mM sodium acetate, pH 6.5. Fractions are collected under constant A₂₈₀ monitoring of the effluent. Fractions containing the polypeptide (determined, for instance, by 16% SDS-PAGE) are then pooled.

[0959] The resultant polypeptide should exhibit greater than 95% purity after the above refolding and purification steps. No major contaminant bands should be observed from Commassie blue stained 16% SDS-PAGE gel when 5 μg of purified protein is loaded. The purified protein can also be tested for endotoxin/LPS contamination, and typically the LPS content is less than 0.1 ng/ml according to LAL assays.

### Example 7

[0960] Cloning and Expression of a Polypeptide in a Baculovirus Expression System

[0961] In this example, the plasmid shuttle vector pA2 is used to insert a polynucleotide into a baculovirus to express a polypeptide. This expression vector contains the strong polyhedrin promoter of the Autographa californica nuclear polyhedrosis virus (AcMNPV) followed by convenient restriction sites such as BamHI, Xba I and Asp718. The polyadenylation site of the simian virus 40 (“SV40”) is used for efficient polyadenylation. For easy selection of recombinant virus, the plasmid contains the beta-galactosidase gene from E. coli under control of a weak Drosophila promoter in the same orientation, followed by the polyadenylation signal of the polyhedrin gene. The inserted genes are flanked on both sides by viral sequences for cell-mediated homologous recombination with wild-type viral DNA to generate a viable virus that express the cloned polynucleotide.

[0962] Many other baculovirus vectors can be used in place of the vector above, such as pAc373, pVL941, and pAcIM1, as one skilled in the art would readily appreciate, as long as the construct provides appropriately located signals for transcription, translation, secretion and the like, including a signal peptide and an in-frame AUG as required. Such vectors are described, for instance, in Luckow et al., Virology 170:31-39 (1989).

[0963] Specifically, the cDNA sequence contained in the deposited clone, including the AUG initiation codon, is amplified using the PCR protocol described in Example 1. If a naturally occurring signal sequence is used to produce the polypeptide of the present invention, the pA2 vector does not need a second signal peptide. Alternatively, the vector can be modified (pA2 GP) to include a baculovirus leader sequence, using the standard methods described in Summers et al., “A Manual of Methods for Baculovirus Vectors and Insect Cell Culture Procedures,” Texas Agricultural Experimental Station Bulletin No. 1555 (1987).

[0964] The amplified fragment is isolated from a 1% agarose gel using a commercially available kit (“Geneclean,” BIO 101 Inc., La Jolla, Calif.). The fragment then is digested with appropriate restriction enzymes and again purified on a 1% agarose gel.

[0965] The plasmid is digested with the corresponding restriction enzymes and optionally, can be dephosphorylated using calf intestinal phosphatase, using routine procedures known in the art. The DNA is then isolated from a 1% agarose gel using a commercially available kit (“Geneclean” BIO 101 Inc., La Jolla, Calif.).

[0966] The fragment and the dephosphorylated plasmid are ligated together with T4 DNA ligase. E. coli HB101 or other suitable E. coli hosts such as XL-1 Blue (Stratagene Cloning Systems, La Jolla, Calif.) cells are transformed with the ligation mixture and spread on culture plates. Bacteria containing the plasmid are identified by digesting DNA from individual colonies and analyzing the digestion product by gel electrophoresis. The sequence of the cloned fragment is confirmed by DNA sequencing.

[0967] Five μg of a plasmid containing the polynucleotide is co-transfected with 1.0 μg of a commercially available linearized baculovirus DNA (“BaculoGold™ baculovirus DNA”, Pharmingen, San Diego, Calif.), using the lipofection method described by Felgner et al., Proc. Natl. Acad. Sci. USA 84:7413-7417 (1987). One μg of BaculoGold™ virus DNA and 5 μg of the plasmid are mixed in a sterile well of a microtiter plate containing 50 μl of serum-free Grace's medium (Life Technologies Inc., Gaithersburg, Md.). Afterwards, 10 μl Lipofectin plus 90 μl Grace's medium are added, mixed and incubated for 15 minutes at room temperature. Then the transfection mixture is added drop-wise to Sf9 insect cells (ATCC CRL 1711) seeded in a 35 mm tissue culture plate with 1 ml Grace's medium without serum. The plate is then incubated for 5 hours at 27° C. The transfection solution is then removed from the plate and 1 ml of Grace's insect medium supplemented with 10% fetal calf serum is added. Cultivation is then continued at 27° C. for four days.

[0968] After four days the supernatant is collected and a plaque assay is performed, as described by Summers and Smith, supra. An agarose gel with “Blue Gal” (Life Technologies Inc., Gaithersburg) is used to allow easy identification and isolation of gal-expressing clones, which produce blue-stained plaques. (A detailed description of a “plaque assay” of this type can also be found in the user's guide for insect cell culture and baculovirology distributed by Life Technologies Inc., Gaithersburg, page 9-10.) After appropriate incubation, blue stained plaques are picked with the tip of a micropipettor (e.g., Eppendorf). The agar containing the recombinant viruses is then resuspended in a microcentrifuge tube containing 200 μl of Grace's medium and the suspension containing the recombinant baculovirus is used to infect Sf9 cells seeded in 35 mm dishes. Four days later the supernatants of these culture dishes are harvested and then they are stored at 4° C.

[0969] To verify the expression of the polypeptide, Sf9 cells are grown in Grace's medium supplemented with 10% heat-inactivated FBS. The cells are infected with the recombinant baculovirus containing the polynucleotide at a multiplicity of infection (“MOI”) of about 2. If radiolabeled proteins are desired, 6 hours later the medium is removed and is replaced with SF900 II medium minus methionine and cysteine (available from Life Technologies Inc., Rockville, Md.). After 42 hours, 5 μCi of ³⁵S-methionine and 5 μCi ³⁵S-cysteine (available from Amersham) are added. The cells are further incubated for 16 hours and then are harvested by centrifugation. The proteins in the supernatant as well as the intracellular proteins are analyzed by SDS-PAGE followed by autoradiography (if radiolabeled).

[0970] Microsequencing of the amino acid sequence of the amino terminus of purified protein may be used to determine the amino terminal sequence of the produced protein.

### Example 8

[0971] Expression of a Polypeptide in Mammalian Cells

[0972] The polypeptide of the present invention can be expressed in a mammalian cell. A typical mammalian expression vector contains a promoter element, which mediates the initiation of transcription of mRNA, a protein coding sequence, and signals required for the termination of transcription and polyadenylation of the transcript. Additional elements include enhancers, Kozak sequences and intervening sequences flanked by donor and acceptor sites for RNA splicing. Highly efficient transcription is achieved with the early and late promoters from SV40, the long terminal repeats (LTRs) from Retroviruses, e.g., RSV, HTLVI, HIVI and the early promoter of the cytomegalovirus (CMV). However, cellular elements can also be used (e.g., the human actin promoter).

[0973] Suitable expression vectors for use in practicing the present invention include, for example, vectors such as pSVL and pMSG (Pharmacia, Uppsala, Sweden), pRSVcat (ATCC 37152), pSV2dhfr (ATCC 37146), pBC12MI (ATCC 67109), pCMVSport 2.0, and pCMVSport 3.0. Mammalian host cells that could be used include, human Hela, 293, H9 and Jurkat cells, mouse NIH3T3 and C127 cells, Cos 1, Cos 7 and CV1, quail QC1-3 cells, mouse L cells and Chinese hamster ovary (CHO) cells.

[0974] Alternatively, the polypeptide can be expressed in stable cell lines containing the polynucleotide integrated into a chromosome. The co-transfection with a selectable marker such as DHFR, gpt, neomycin, or hygromycin allows the identification and isolation of the transfected cells.

[0975] The transfected gene can also be amplified to express large amounts of the encoded protein. The DHFR (dihydrofolate reductase) marker is useful in developing cell lines that carry several hundred or even several thousand copies of the gene of interest. (See, e.g., Alt, F. W., et al., J. Biol. Chem. 253:1357-1370 (1978); Hamlin, J. L. and Ma, C., Biochem. et Biophys. Acta, 1097:107-143 (1990); Page, M. J. and Sydenham, M. A., Biotechnology 9:64-68 (1991).) Another useful selection marker is the enzyme glutamine synthase (GS) (Murphy et al., Biochem J. 227:277-279 (1991); Bebbington et al., Bio/Technology 10:169-175 (1992). Using these markers, the mammalian cells are grown in selective medium and the cells with the highest resistance are selected. These cell lines contain the amplified gene(s) integrated into a chromosome. Chinese hamster ovary (CHO) and NSO cells are often used for the production of proteins.

[0976] Derivatives of the plasmid pSV2-dhfr (ATCC Accession No. 37146), the expression vectors pC4 (ATCC Accession No. 209646) and pC6 (ATCC Accession No.209647) contain the strong promoter (LTR) of the Rous Sarcoma Virus (Cullen et al., Molecular and Cellular Biology, 438-447 (March, 1985)) plus a fragment of the CMV-enhancer (Boshart et al., Cell 41:521-530 (1985).) Multiple cloning sites, e.g., with the restriction enzyme cleavage sites BamHI, XbaI and Asp718, facilitate the cloning of the gene of interest. The vectors also contain the 3′ intron, the polyadenylation and termination signal of the rat preproinsulin gene, and the mouse DHFR gene under control of the SV40 early promoter.

[0977] Specifically, the plasmid pC6, for example, is digested with appropriate restriction enzymes and then dephosphorylated using calf intestinal phosphates by procedures known in the art. The vector is then isolated from a 1% agarose gel.

[0978] A polynucleotide of the present invention is amplified according to the protocol outlined in Example 1. If a naturally occurring signal sequence is used to produce the polypeptide of the present invention, the vector does not need a second signal peptide. Alternatively, if a naturally occurring signal sequence is not used, the vector can be modified to include a heterologous signal sequence. (See, e.g., International Publication No. WO 96/34891.)

[0979] The amplified fragment is isolated from a 1% agarose gel using a commercially available kit (“Geneclean,” BIO 101 Inc., La Jolla, Calif.). The fragment then is digested with appropriate restriction enzymes and again purified on a 1% agarose gel.

[0980] The amplified fragment is then digested with the same restriction enzyme and purified on a 1% agarose gel. The isolated fragment and the dephosphorylated vector are then ligated with T4 DNA ligase. E. coli HB101 or XL-1 Blue cells are then transformed and bacteria are identified that contain the fragment inserted into plasmid pC6 using, for instance, restriction enzyme analysis.

[0981] Chinese hamster ovary cells lacking an active DHFR gene is used for transfection. Five μg of the expression plasmid pC6 or pC4 is cotransfected with 0.5 μg of the plasmid pSVneo using lipofectin (Felgner et al., supra). The plasmid pSV2-neo contains a dominant selectable marker, the neo gene from Tn5 encoding an enzyme that confers resistance to a group of antibiotics including G418. The cells are seeded in alpha minus MEM supplemented with 1 mg/ml G418. After 2 days, the cells are trypsinized and seeded in hybridoma cloning plates (Greiner, Germany) in alpha minus MEM supplemented with 10, 25, or 50 ng/ml of methotrexate plus 1 mg/ml G418. After about 10-14 days single clones are trypsinized and then seeded in 6-well petri dishes or 10 ml flasks using different concentrations of methotrexate (50 nM, 100 nM, 200 nM, 400 nM, 800 nM). Clones growing at the highest concentrations of methotrexate are then transferred to new 6-well plates containing even higher concentrations of methotrexate (1 μM, 2 μM, 5 μM, 10 mM, 20 mM). The same procedure is repeated until clones are obtained which grow at a concentration of 100-200 μM. Expression of the desired gene product is analyzed, for instance, by SDS-PAGE and Western blot or by reversed phase HPLC analysis.

### Example 9

[0982] Protein Fusions

[0983] The polypeptides of the present invention are preferably fused to other proteins. These fusion proteins can be used for a variety of applications. For example, fusion of the present polypeptides to His-tag, HA-tag, protein A, IgG domains, and maltose binding protein facilitates purification. (See Example 5; see also EP A 394,827; Traunecker, et al., Nature 331:84-86 (1988).) Similarly, fusion to IgG-1, IgG-3, and albumin increases the halflife time in vivo. Nuclear localization signals fused to the polypeptides of the present invention can target the protein to a specific subcellular localization, while covalent heterodimer or homodimers can increase or decrease the activity of a fusion protein. Fusion proteins can also create chimeric molecules having more than one function. Finally, fusion proteins can increase solubility and/or stability of the fused protein compared to the non-fused protein. All of the types of fusion proteins described above can be made by modifying the following protocol, which outlines the fusion of a polypeptide to an IgG molecule, or the protocol described in Example 5.

[0984] Briefly, the human Fc portion of the IgG molecule can be PCR amplified, using primers that span the 5′ and 3′ ends of the sequence described below. These primers also should have convenient restriction enzyme sites that will facilitate cloning into an expression vector, preferably a mammalian expression vector.

[0985] For example, if pC4 (ATCC Accession No. 209646) is used, the human Fc portion can be ligated into the BamHI cloning site. Note that the 3′ BamHI site should be destroyed. Next, the vector containing the human Fc portion is re-restricted with BamHI, linearizing the vector, and a polynucleotide of the present invention, isolated by the PCR protocol described in Example 1, is ligated into this BamHI site. Note that the polynucleotide is cloned without a stop codon, otherwise a fusion protein will not be produced.

[0986] If the naturally occurring signal sequence is used to produce the polypeptide of the present invention, pC4 does not need a second signal peptide. Alternatively, if the naturally occurring signal sequence is not used, the vector can be modified to include a heterologous signal sequence. (See, e.g., International Publication No. WO 96/34891.)

Human IgG Fc region:

(SEQ ID NO: 1)

GGGATCCGGAGCCCAAATCTTCTGACAAAACTCACACATGCCCACCGTGC
CCAGCACCTGAATTCGAGGGTGCACCGTCAGTCTTCCTCTTCCCCCCAAA
ACCCAAGGACACCCTCATGATCTCCCGGACTCCTGAGGTCACATGCGTGG
TGGTGGACGTAAGCCACGAAGACCCTGAGGTCAAGTTCAACTGGTACGTG
GACGGCGTGGAGGTGCATAATGCCAAGACAAAGCCGCGGGAGGAGCAGTA
CAACAGCACGTACCGTGTGGTCAGCGTCCTCACCGTCCTGCACCAGGACT
GGCTGAATGGCAAGGAGTACAAGTGCAAGGTCTCCAACAAAGCCCTCCCA
ACCCCCATCGAGAAAACCATCTCCAAAGCCAAAGGGCAGCCCCGAGAACC
ACAGGTGTACACCCTGCCCCCATCCCGGGATGAGCTGACCAAGAACCAGG
TCAGCCTGACCTGCCTGGTCAAAGGCTTCTATCCAAGCGACATCGCCGTG
GAGTGGGAGAGCAATGGGCAGCCGGAGAACAACTACAAGACCACGCCTCC
CGTGCTGGACTCCGACGGCTCCTTCTTCCTCTACAGCAAGCTCACCGTGG
ACAAGAGCAGGTGGCAGCAGGGGAACGTCTTCTCATGCTCCGTGATGCAT
GAGGCTCTGCACAACCACTACACGCAGAAGAGCCTCTCCCTGTCTCCGGG
TAAATGAGTGCGACGGCCGCGACTCTAGAGGAT

### Example 10

[0987] Production of an Antibody from a Polypeptide

[0988] Hybridoma Technology

[0989] The antibodies of the present invention can be prepared by a variety of methods. (See, Current Protocols, Chapter 2.) As one example of such methods, cells expressing the cDNA encoding the polypeptide of the invention are administered to an animal to induce the production of sera containing polyclonal antibodies. In a preferred method, a preparation of the polypeptide of the invention is prepared and purified to render it substantially free of natural contaminants. Such a preparation is then introduced into an animal in order to produce polyclonal antisera of greater specific activity.

[0990] Monoclonal antibodies specific for the polypeptide of the invention are prepared using hybridoma technology (Kohler et al., Nature 256:495 (1975); Kohler et al., Eur. J. Immunol. 6:511 (1976); Kohler et al., Eur. J. Immunol. 6:292 (1976); Hammerling et al., in: Monoclonal Antibodies and T-Cell Hybridomas, Elsevier, N.Y., pp. 563-681 (1981)). In general, an animal (preferably a mouse) is immunized with the polypeptide of the invention or, more preferably, with a cell expressing the secreted polypeptide of the invention. Such polypeptide-expressing cells are cultured in any suitable tissue culture medium, preferably in Earle's modified Eagle's medium supplemented with 10% fetal bovine serum (inactivated at about 56° C.), and supplemented with about 10 g/l of nonessential amino acids, about 1,000 U/ml of penicillin, and about 100 μg/ml of streptomycin.

[0991] The splenocytes of such mice are extracted and fused with a suitable myeloma cell line. Any suitable myeloma cell line may be employed in accordance with the present invention; however, it is preferable to employ the parent myeloma cell line (SP2O), available from the ATCC. After fusion, the resulting hybridoma cells are selectively maintained in HAT medium, and then cloned by limiting dilution as described by Wands et al. (Gastroenterology 80:225-232 (1981)). The hybridoma cells obtained through such a selection are then assayed to identify clones which secrete antibodies capable of binding the polypeptide of the invention

[0992] Alternatively, additional antibodies capable of binding to the polypeptide of the invention can be produced in a two-step procedure using anti-idiotypic antibodies. Such a method makes use of the fact that antibodies are themselves antigens, and therefore, it is possible to obtain an antibody which binds to a second antibody. In accordance with this method, protein specific antibodies are used to immunize an animal, preferably a mouse. The splenocytes of such an animal are then used to produce hybridoma cells, and the hybridoma cells are screened to identify clones which produce an antibody whose ability to bind to the polypeptide of the invention-specific antibody can be blocked by the polypeptide of the invention. Such antibodies comprise anti-idiotypic antibodies to the polypeptide of the invention-specific antibody and are used to immunize an animal to induce formation of further polypeptide of the invention-specific antibodies.

[0993] For in vivo use of antibodies in humans, an antibody is “humanized”. Such antibodies can be produced using genetic constructs derived from hybridoma cells producing the monoclonal antibodies described above. Methods for producing chimeric and humanized antibodies are known in the art and are discussed herein. (See, for review, Morrison, Science 229:1202 (1985); Oi et al., BioTechniques 4:214 (1986); Cabilly et al., U.S. Pat. No. 4,816,567; Taniguchi et al., EP 171496; Morrison et al., EP 173494; Neuberger et al., WO 8601533; Robinson et al., International Publication No. WO 8702671; Boulianne et al., Nature 312:643 (1984); Neuberger et al., Nature 314:268 (1985).)

[0994] Isolation of Antibody Fragments Directed against the Polypeptide of the Invention from a Library of scFvs

[0995] Naturally occurring V-genes isolated from human PBLs are constructed into a library of antibody fragments which contain reactivities against the polypeptide of the invention to which the donor may or may not have been exposed (see e.g., U.S. Pat. No. 5,885,793 incorporated herein by reference in its entirety).

[0996] Rescue of the Library. A library of scFvs is constructed from the RNA of human PBLs as described in International Publication No. WO 92/01047. To rescue phage displaying antibody fragments, approximately 10⁹ E. coli harboring the phagemid are used to inoculate 50 ml of 2×TY containing 1% glucose and 100 μg/ml of ampicillin (2×TY-AMP-GLU) and grown to an O.D. of 0.8 with shaking. Five ml of this culture is used to inoculate 50 ml of 2×TY-AMP-GLU, 2×108 TU of delta gene 3 helper (M13 delta gene III, see International Publication No. WO 92/01047) are added and the culture incubated at 37° C. for 45 minutes without shaking and then at 37° C. for 45 minutes with shaking. The culture is centrifuged at 4000 r.p.m. for 10 min. and the pellet resuspended in 2 liters of 2×TY containing 100 μg/ml ampicillin and 50 μg/ml kanamycin and grown overnight. Phage are prepared as described in International Application No. WO 92/01047.

[0997] M13 delta gene III is prepared as follows: M13 delta gene III helper phage does not encode gene III protein, hence the phage(mid) displaying antibody fragments have a greater avidity of binding to antigen. Infectious M13 delta gene III particles are made by growing the helper phage in cells harboring a pUC19 derivative supplying the wild type gene III protein during phage morphogenesis. The culture is incubated for 1 hour at 37° C. without shaking and then for a further hour at 37° C. with shaking. Cells are spun down (IEC-Centra 8,400 r.p.m. for 10 min), resuspended in 300 ml 2×TY broth containing 100 μg ampicillin/ml and 25 μg kanamycin/ml (2×TY-AMP-KAN) and grown overnight, shaking at 37° C. Phage particles are purified and concentrated from the culture medium by two PEG-precipitations (Sambrook et al., 1990), resuspended in 2 ml PBS and passed through a 0.45 μm filter (Minisart NML; Sartorius) to give a final concentration of approximately 10¹³ transducing units/ml (ampicillin-resistant clones).

[0998] Panning of the Library. Immunotubes (Nunc) are coated overnight in PBS with 4 ml of either 100 μg/ml or 10 μg/ml of a polypeptide of the present invention. Tubes are blocked with 2% Marvel-PBS for 2 hours at 37° C. and then washed 3 times in PBS. Approximately 10¹³ TU of phage is applied to the tube and incubated for 30 minutes at room temperature tumbling on an over and under turntable and then left to stand for another 1.5 hours. Tubes are washed 10 times with PBS 0.1% Tween-20 and 10 times with PBS. Phage are eluted by adding 1 ml of 100 mM triethylamine and rotating 15 minutes on an under and over turntable after which the solution is immediately neutralized with 0.5 ml of 1.0M Tris-HCl, pH 7.4. Phage are then used to infect 10 ml of mid-log E. coli TG1 by incubating eluted phage with bacteria for 30 minutes at 37° C. The E. coli are then plated on TYE plates containing 1% glucose and 100 μg/ml ampicillin. The resulting bacterial library is then rescued with delta gene 3 helper phage as described above to prepare phage for a subsequent round of selection. This process is then repeated for a total of 4 rounds of affinity purification with tube-washing increased to 20 times with PBS, 0.1% Tween-20 and 20 times with PBS for rounds 3 and 4.

[0999] Characterization of Binders. Eluted phage from the 3rd and 4th rounds of selection are used to infect E. coli HB 2151 and soluble scFv is produced (Marks, et al., 1991) from single colonies for assay. ELISAs are performed with microtitre plates coated with 10 pg/ml of the polypeptide of the present invention in 50 mM bicarbonate pH 9.6. Clones positive in ELISA are further characterized by PCR fingerprinting (see, e.g., International Application No. WO 92/01047) and then by sequencing. These ELISA positive clones may also be further characterized by techniques known in the art, such as, for example, epitope mapping, binding affinity, receptor signal transduction, ability to block or competitively inhibit antibody/antigen binding, and competitive agonistic or antagonistic activity.

### Example 11

[1000] Method of Determining Alterations in a Gene Corresponding to a Polynucleotide

[1001] RNA isolated from entire families or individual patients presenting with a phenotype of interest (such as a disease) is isolated. cDNA is then generated from these RNA samples using protocols known in the art. (See, Sambrook.) The cDNA is then used as a template for PCR, employing primers surrounding regions of interest in SEQ ID NO:X; and/or the nucleotide sequence of the cDNA contained in Clone ID NO:Z. Suggested PCR conditions consist of 35 cycles at 95 degrees C. for 30 seconds; 60-120 seconds at 52-58 degrees C.; and 60-120 seconds at 70 degrees C., using buffer solutions described in Sidransky et al., Science 252:706 (1991).

[1002] PCR products are then sequenced using primers labeled at their 5′ end with T4 polynucleotide kinase, employing SequiTherm Polymerase (Epicentre Technologies). The intron-exon boundaries of selected exons is also determined and genomic PCR products analyzed to confirm the results. PCR products harboring suspected mutations are then cloned and sequenced to validate the results of the direct sequencing.

[1003] PCR products are cloned into T-tailed vectors as described in Holton et al., Nucleic Acids Research, 19:1156 (1991) and sequenced with T7 polymerase (United States Biochemical). Affected individuals are identified by mutations not present in unaffected individuals.

[1004] Genomic rearrangements are also observed as a method of determining alterations in a gene corresponding to a polynucleotide. Genomic clones isolated according to Example 2 are nick-translated with digoxigenindeoxy-uridine 5′-triphosphate (Boehringer Manheim), and FISH performed as described in Johnson et al., Methods Cell Biol. 35:73-99 (1991). Hybridization with the labeled probe is carried out using a vast excess of human cot-1 DNA for specific hybridization to the corresponding genomic locus.

[1005] Chromosomes are counterstained with 4,6-diamino-2-phenylidole and propidium iodide, producing a combination of C- and R-bands. Aligned images for precise mapping are obtained using a triple-band filter set (Chroma Technology, Brattleboro, Vt.) in combination with a cooled charge-coupled device camera (Photometrics, Tucson, Ariz.) and variable excitation wavelength filters. (Johnson et al., Genet. Anal. Tech. Appl., 8:75 (1991).) Image collection, analysis and chromosomal fractional length measurements are performed using the ISee Graphical Program System. (Inovision Corporation, Durham, N.C.) Chromosome alterations of the genomic region hybridized by the probe are identified as insertions, deletions, and translocations. These alterations are used as a diagnostic marker for an associated disease.

### Example 12

[1006] Method of Detecting Abnormal Levels of a Polypeptide in a Biological Sample

[1007] A polypeptide of the present invention can be detected in a biological sample, and if an increased or decreased level of the polypeptide is detected, this polypeptide is a marker for a particular phenotype. Methods of detection are numerous, and thus, it is understood that one skilled in the art can modify the following assay to fit their particular needs.

[1008] For example, antibody-sandwich ELISAs are used to detect polypeptides in a sample, preferably a biological sample. Wells of a microtiter plate are coated with specific antibodies, at a final concentration of 0.2 to 10 ug/ml. The antibodies are either monoclonal or polyclonal and are produced by the method described in Example 10. The wells are blocked so that non-specific binding of the polypeptide to the well is reduced.

[1009] The coated wells are then incubated for >2 hours at RT with a sample containing the polypeptide. Preferably, serial dilutions of the sample should be used to validate results. The plates are then washed three times with deionized or distilled water to remove unbound polypeptide.

[1010] Next, 50 ul of specific antibody-alkaline phosphatase conjugate, at a concentration of 25-400 ng, is added and incubated for 2 hours at room temperature. The plates are again washed three times with deionized or distilled water to remove unbound conjugate.

[1011] Add 75 ul of 4-methylumbelliferyl phosphate (MUP) or p-nitrophenyl phosphate (NPP) substrate solution to each well and incubate 1 hour at room temperature. Measure the reaction by a microtiter plate reader. Prepare a standard curve, using serial dilutions of a control sample, and plot polypeptide concentration on the X-axis (log scale) and fluorescence or absorbance of the Y-axis (linear scale). Interpolate the concentration of the polypeptide in the sample using the standard curve.

### Example 13

[1012] Formulation

[1013] The invention also provides methods of treatment and/or prevention of diseases or disorders (such as, for example, any one or more of the diseases or disorders disclosed herein) by administration to a subject of an effective amount of a Therapeutic. By therapeutic is meant polynucleotides or polypeptides of the invention (including fragments and variants), agonists or antagonists thereof, and/or antibodies thereto, in combination with a pharmaceutically acceptable carrier type (e.g., a sterile carrier).

[1014] The Therapeutic will be formulated and dosed in a fashion consistent with good medical practice, taking into account the clinical condition of the individual patient (especially the side effects of treatment with the Therapeutic alone), the site of delivery, the method of administration, the scheduling of administration, and other factors known to practitioners. The “effective amount” for purposes herein is thus determined by such considerations.

[1015] As a general proposition, the total pharmaceutically effective amount of the Therapeutic administered parenterally per dose will be in the range of about 1 ug/kg/day to 10 mg/kg/day of patient body weight, although, as noted above, this will be subject to therapeutic discretion. More preferably, this dose is at least 0.01 mg/kg/day, and most preferably for humans between about 0.01 and 1 mg/kg/day for the hormone. If given continuously, the Therapeutic is typically administered at a dose rate of about 1 ug/kg/hour to about 50 ug/kg/hour, either by 1-4 injections per day or by continuous subcutaneous infusions, for example, using a mini-pump. An intravenous bag solution may also be employed. The length of treatment needed to observe changes and the interval following treatment for responses to occur appears to vary depending on the desired effect.

[1016] Therapeutics can be are administered orally, rectally, parenterally, intracistemally, intravaginally, intraperitoneally, topically (as by powders, ointments, gels, drops or transdermal patch), bucally, or as an oral or nasal spray. “Pharmaceutically acceptable carrier” refers to a non-toxic solid, semisolid or liquid filler, diluent, encapsulating material or formulation auxiliary of any. The term “parenteral” as used herein refers to modes of administration which include intravenous, intramuscular, intraperitoneal, intrastemal, subcutaneous and intraarticular injection and infusion.

[1017] Therapeutics of the invention are also suitably administered by sustained-release systems. Suitable examples of sustained-release Therapeutics are administered orally, rectally, parenterally, intracistemally, intravaginally, intraperitoneally, topically (as by powders, ointments, gels, drops or transdermal patch), bucally, or as an oral or nasal spray. “Pharmaceutically acceptable carrier” refers to a non-toxic solid, semisolid or liquid filler, diluent, encapsulating material or formulation auxiliary of any type. The term “parenteral” as used herein refers to modes of administration which include intravenous, intramuscular, intraperitoneal, intrastemal, subcutaneous and intraarticular injection and infusion.

[1018] Therapeutics of the invention are also suitably administered by sustained-release systems. Suitable examples of sustained-release Therapeutics include suitable polymeric materials (such as, for example, semi-permeable polymer matrices in the form of shaped articles, e.g., films, or mirocapsules), suitable hydrophobic materials (for example as an emulsion in an acceptable oil) or ion exchange resins, and sparingly soluble derivatives (such as, for example, a sparingly soluble salt).

[1019] Sustained-release matrices include polylactides (U.S. Pat. No. 3,773,919, EP 58,481), copolymers of L-glutamic acid and gamma-ethyl-L-glutamate (Sidman et al., Biopolymers 22:547-556 (1983)), poly(2-hydroxyethyl methacrylate) (Langer et al., J. Biomed. Mater. Res. 15:167-277 (1981), and Langer, Chem. Tech. 12:98-105 (1982)), ethylene vinyl acetate (Langer et al., Id.) or poly-D-(−)-3-hydroxybutyric acid (EP 133,988).

[1020] Sustained-release Therapeutics also include liposomally entrapped Therapeutics of the invention (see generally, Langer, Science 249:1527-1533 (1990); Treat et al., in Liposomes in the Therapy of Infectious Disease and Cancer, Lopez-Berestein and Fidler (eds.), Liss, New York, pp. 317-327 and 353-365 (1989)). Liposomes containing the Therapeutic are prepared by methods known per se: DE 3,218,121; Epstein et al., Proc. Natl. Acad. Sci. (USA) 82:3688-3692 (1985); Hwang et al., Proc. Natl. Acad. Sci.(USA) 77:4030-4034 (1980); EP 52,322; EP 36,676; EP 88,046; EP 143,949; EP 142,641; Japanese Pat. Appl. 83-118008; U.S. Pat. Nos. 4,485,045 and 4,544,545; and EP 102,324. Ordinarily, the liposomes are of the small (about 200-800 Angstroms) unilamellar type in which the lipid content is greater than about 30 mol. percent cholesterol, the selected proportion being adjusted for the optimal Therapeutic.

[1021] In yet an additional embodiment, the Therapeutics of the invention are delivered by way of a pump (see Langer, supra; Sefton, CRC Crit. Ref. Biomed. Eng. 14:201 (1987); Buchwald et al., Surgery 88:507 (1980); Saudek et al., N. Engl. J. Med. 321:574 (1989)).

[1022] Other controlled release systems are discussed in the review by Langer (Science 249:1527-1533 (1990)).

[1023] For parenteral administration, in one embodiment, the Therapeutic is formulated generally by mixing it at the desired degree of purity, in a unit dosage injectable form (solution, suspension, or emulsion), with a pharmaceutically acceptable carrier, i.e., one that is non-toxic to recipients at the dosages and concentrations employed and is compatible with other ingredients of the formulation. For example, the formulation preferably does not include oxidizing agents and other compounds that are known to be deleterious to the Therapeutic.

[1024] Generally, the formulations are prepared by contacting the Therapeutic uniformly and intimately with liquid carriers or finely divided solid carriers or both. Then, if necessary, the product is shaped into the desired formulation. Preferably the carrier is a parenteral carrier, more preferably a solution that is isotonic with the blood of the recipient. Examples of such carrier vehicles include water, saline, Ringer's solution, and dextrose solution. Non-aqueous vehicles such as fixed oils and ethyl oleate are also useful herein, as well as liposomes.

[1025] The carrier suitably contains minor amounts of additives such as substances that enhance isotonicity and chemical stability. Such materials are non-toxic to recipients at the dosages and concentrations employed, and include buffers such as phosphate, citrate, succinate, acetic acid, and other organic acids or their salts; antioxidants such as ascorbic acid: low molecular weight (less than about ten residues) polypeptides, e.g., polyarginine or tripeptides; proteins, such as serum albumin, gelatin, or immunoglobulins; hydrophilic polymers such as polyvinylpyrrolidone; amino acids, such as glycine, glutamic acid, aspartic acid, or arginine; monosaccharides, disaccharides, and other carbohydrates including cellulose or its derivatives, glucose, manose, or dextrins; chelating agents such as EDTA; sugar alcohols such as mannitol or sorbitol; counterions such as sodium; and/or nonionic surfactants such as polysorbates, poloxamers, or PEG.

[1026] The Therapeutic is typically formulated in such vehicles at a concentration of about 0.1 mg/ml to 100 mg/ml, preferably 1-10 mg/ml, at a pH of about 3 to 8. It will be understood that the use of certain of the foregoing excipients, carriers, or stabilizers will result in the formation of polypeptide salts.

[1027] Any pharmaceutical used for therapeutic administration can be sterile. Sterility is readily accomplished by filtration through sterile filtration membranes (e.g., 0.2 micron membranes). Therapeutics generally are placed into a container having a sterile access port, for example, an intravenous solution bag or vial having a stopper pierceable by a hypodermic injection needle.

[1028] Therapeutics ordinarily will be stored in unit or multi-dose containers, for example, sealed ampoules or vials, as an aqueous solution or as a lyophilized formulation for reconstitution. As an example of a lyophilized formulation, 10-ml vials are filled with 5 ml of sterile-filtered 1% (w/v) aqueous Therapeutic solution, and the resulting mixture is lyophilized. The infusion solution is prepared by reconstituting the lyophilized Therapeutic using bacteriostatic Water-for-Injection.

[1029] The invention also provides a pharmaceutical pack or kit comprising one or more containers filled with one or more of the ingredients of the Therapeutics of the invention. Associated with such container(s) can be a notice in the form prescribed by a governmental agency regulating the manufacture, use or sale of pharmaceuticals or biological products, which notice reflects approval by the agency of manufacture, use or sale for human administration. In addition, the Therapeutics may be employed in conjunction with other therapeutic compounds.

[1030] The Therapeutics of the invention may be administered alone or in combination with adjuvants. Adjuvants that may be administered with the Therapeutics of the invention include, but are not limited to, alum, alum plus deoxycholate (ImmunoAg), MTP-PE (Biocine Corp.), QS21 (Genentech, Inc.), BCG (e.g., THERACYS®), MPL and nonviable prepartions of Corynebacterium parvum. In a specific embodiment, Therapeutics of the invention are administered in combination with alum. In another specific embodiment, Therapeutics of the invention are administered in combination with QS-21. Further adjuvants that may be administered with the Therapeutics of the invention include, but are not limited to, Monophosphoryl lipid immunomodulator, AdjuVax 100a, QS-21, QS-18, CRL1005, Aluminum salts, MF-59, and Virosomal adjuvant technology. Vaccines that may be administered with the Therapeutics of the invention include, but are not limited to, vaccines directed toward protection against MMR (measles, mumps, rubella), polio, varicella, tetanus/diptheria, hepatitis A, hepatitis B, haemophilus influenzae B, whooping cough, pneumonia, influenza, Lyme's Disease, rotavirus, cholera, yellow fever, Japanese encephalitis, poliomyelitis, rabies, typhoid fever, and pertussis. Combinations may be administered either concomitantly, e.g., as an admixture, separately but simultaneously or concurrently; or sequentially. This includes presentations in which the combined agents are administered together as a therapeutic mixture, and also procedures in which the combined agents are administered separately but simultaneously, e.g., as through separate intravenous lines into the same individual. Administration “in combination” further includes the separate administration of one of the compounds or agents given first, followed by the second.

[1031] The Therapeutics of the invention may be administered alone or in combination with other therapeutic agents. Therapeutic agents that may be administered in combination with the Therapeutics of the invention, include but not limited to, chemotherapeutic agents, antibiotics, steroidal and non-steroidal anti-inflammatories, conventional immunotherapeutic agents, and/or therapeutic treatments described below. Combinations may be administered either concomitantly, e.g., as an admixture, separately but simultaneously or concurrently; or sequentially. This includes presentations in which the combined agents are administered together as a therapeutic mixture, and also procedures in which the combined agents are administered separately but simultaneously, e.g., as through separate intravenous lines into the same individual. Administration “in combination” further includes the separate administration of one of the compounds or agents given first, followed by the second.

[1032] In certain embodiments, Therapeutics of the invention are administered in combination with antiretroviral agents, nucleoside/nucleotide reverse transcriptase inhibitors (NRTIs), non-nucleoside reverse transcriptase inhibitors (NNRTIs), and/or protease inhibitors (PIs). NRTIs that may be administered in combination with the Therapeutics of the invention, include, but are not limited to, RETROVIR™ (zidovudine/AZT), VIDEX™ (didanosine/ddI), HIVID™ (zalcitabine/ddC), ZERIT™ (stavudine/d4T), EPIVIR™ (lamivudine/3TC), and COMBIVIR™ (zidovudine/lamivudine). NNRTIs that may be administered in combination with the Therapeutics of the invention, include, but are not limited to, VIRAMUNE™ (nevirapine), RESCRIPTOR™ (delavirdine), and SUSTIVA™ (efavirenz). Protease inhibitors that may be administered in combination with the Therapeutics of the invention, include, but are not limited to, CRIXIVAN™ (indinavir), NORVIR™ (ritonavir), INVIRASE™ (saquinavir), and VIRACEPT™ (nelfinavir). In a specific embodiment, antiretroviral agents, nucleoside reverse transcriptase inhibitors, non-nucleoside reverse transcriptase inhibitors, and/or protease inhibitors may be used in any combination with Therapeutics of the invention to treat AIDS and/or to prevent or treat HIV infection.

[1033] Additional NRTIs include LODENOSINE™ (F-ddA; an acid-stable adenosine NRTI; Triangle/Abbott; COVIRACIL™ (emtricitabine/FTC; structurally related to lamivudine (3TC) but with 3- to 10-fold greater activity in vitro; Triangle/Abbott); dOTC (BCH-10652, also structurally related to lamivudine but retains activity against a substantial proportion of lamivudine-resistant isolates; Biochem Pharma); Adefovir (refused approval for anti-HIV therapy by FDA; Gilead Sciences); PREVEON® (Adefovir Dipivoxil, the active prodrug of adefovir; its active form is PMEA-pp); TENOFOVIR™ (bis-POC PMPA, a PMPA prodrug; Gilead); DAPD/DXG (active metabolite of DAPD; Triangle/Abbott); D-D4FC (related to 3TC, with activity against AZT/3TC-resistant virus); GW420867X (Glaxo Wellcome); ZIAGEN™ (abacavir/159U89; Glaxo Wellcome Inc.); CS-87 (3′azido-2′,3′-dideoxyuridine; WO 99/66936); and S-acyl-2-thioethyl (SATE)-bearing prodrug forms of β-L-FD4C and β-L-FddC (WO 98/17281).

[1034] Additional NNRTIs include COACTINON™ (Emivirine/MKC-442, potent NNRTI of the HEPT class; Triangle/Abbott); CAPRAVRINE™ (AG-1549/S-1153, a next generation NNRTI with activity against viruses containing the K103N mutation; Agouron); PNU-142721 (has 20- to 50-fold greater activity than its predecessor delavirdine and is active against K103N mutants; Pharmacia & Upjohn); DPC-961 and DPC-963 (second-generation derivatives of efavirenz, designed to be active against viruses with the K103N mutation; DuPont); GW-420867X (has 25-fold greater activity than HBY097 and is active against K103N mutants; Glaxo Wellcome); CALANOLIDE A (naturally occurring agent from the latex tree; active against viruses containing either or both the Y181C and K103N mutations); and Propolis (WO 99/49830).

[1035] Additional protease inhibitors include LOPINAVIR™ (ABT378/r; Abbott Laboratories); BMS-232632 (an azapeptide; Bristol-Myres Squibb); TIPRANAVIR™ (PNU-140690, a non-peptic dihydropyrone; Pharmacia & Upjohn); PD-178390 (a nonpeptidic dihydropyrone; Parke-Davis); BMS 232632 (an azapeptide; Bristol-Myers Squibb); L-756,423 (an indinavir analog; Merck); DMP-450 (a cyclic urea compound; Avid & DuPont); AG-1776 (a peptidomimetic with in vitro activity against protease inhibitor-resistant viruses; Agouron); VX-175/GW-433908 (phosphate prodrug of amprenavir; Vertex & Glaxo Welcome); CGP61755 (Ciba); and AGENERASE™ (amprenavir; Glaxo Wellcome Inc.).

[1036] Additional antiretroviral agents include fusion inhibitors/gp41 binders. Fusion inhibitors/gp41 binders include T-20 (a peptide from residues 643-678 of the HIV gp41 transmembrane protein ectodomain which binds to gp41 in its resting state and prevents transformation to the fusogenic state; Trimeris) and T-1249 (a second-generation fusion inhibitor; Trimeris).

[1037] Additional antiretroviral agents include fusion inhibitors/chemokine receptor antagonists. Fusion inhibitors/chemokine receptor antagonists include CXCR4 antagonists such as AMD 3100 (a bicyclam), SDF-1 and its analogs, and ALX40-4C (a cationic peptide), T22 (an 18 amino acid peptide; Trimeris) and the T22 analogs T134 and T140; CCR5 antagonists such as RANTES (9-68), AOP-RANTES, NNY-RANTES, and TAK-779; and CCR5/CXCR4 antagonists such as NSC 651016 (a distamycin analog). Also included are CCR2B, CCR3, and CCR6 antagonists. Chemokine receptor agonists such as RANTES, SDF-1, MIP-1α, MIP-1β, etc., may also inhibit fusion.

[1038] Additional antiretroviral agents include integrase inhibitors. Integrase inhibitors include dicaffeoylquinic (DFQA) acids; L-chicoric acid (a dicaffeoyltartaric (DCTA) acid); quinalizarin (QLC) and related anthraquinones; ZINTEVIR™ (AR 177, an oligonucleotide that probably acts at cell surface rather than being a true integrase inhibitor; Arondex); and naphthols such as those disclosed in WO 98/50347.

[1039] Additional antiretroviral agents include hydroxyurea-like compunds such as BCX-34 (a purine nucleoside phosphorylase inhibitor; Biocryst); ribonucleotide reductase inhibitors such as DIDOX™ (Molecules for Health); inosine monophosphate dehydrogenase (IMPDH) inhibitors sucha as VX-497 (Vertex); and myvopholic acids such as CellCept (mycophenolate mofetil; Roche).

[1040] Additional antiretroviral agents include inhibitors of viral integrase, inhibitors of viral genome nuclear translocation such as arylene bis(methylketone) compounds; inhibitors of HIV entry such as AOP-RANTES, NNY-RANTES, RANTES-IgG fusion protein, soluble complexes of RANTES and glycosaminoglycans (GAG), and AMD-3100; nucleocapsid zinc finger inhibitors such as dithiane compounds; targets of HIV Tat and Rev; and pharmacoenhancers such as ABT-378.

[1041] Other antiretroviral therapies and adjunct therapies include cytokines and lymphokines such as MIP-1α, MIP-1β, SDF-1α, IL-2, PROLEUKIN™ (aldesleukin/L2-7001; Chiron), IL-4, IL-10, IL-12, and IL-13; interferons such as IFN-α2a; antagonists of TNFs, NFκB, GM-CSF, M-CSF, and IL-10; agents that modulate immune activation such as cyclosporin and prednisone; vaccines such as Remune™ (HIV Immunogen), APL 400-003 (Apollon), recombinant gp120 and fragments, bivalent (B/E) recombinant envelope glycoprotein, rgp120CM235, MN rgp120, SF-2 rgp120, gp120/soluble CD4 complex, Delta JR-FL protein, branched synthetic peptide derived from discontinuous gp120 C3/C4 domain, fusion-competent immunogens, and Gag, Pol, Nef, and Tat vaccines; gene-based therapies such as genetic suppressor elements (GSEs; WO 98/54366), and intrakines (genetically modified CC chemokines targetted to the ER to block surface expression of newly synthesized CCR5 (Yang et al., PNAS 94:11567-72 (1997); Chen et al., Nat. Med. 3:1110-16 (1997)); antibodies such as the anti-CXCR4 antibody 12G5, the anti-CCR5 antibodies 2D7, 5C7, PA8, PA9, PA10, PA11, PA12, and PA14, the anti-CD4 antibodies Q4120 and RPA-T4, the anti-CCR3 antibody 7B11, the anti-gp120 antibodies 17b, 48d, 447-52D, 257-D, 268-D and 50.1, anti-Tat antibodies, anti-TNF-α antibodies, and monoclonal antibody 33A; aryl hydrocarbon (AH) receptor agonists and antagonists such as TCDD, 3,3′,4,4′,5-pentachlorobiphenyl, 3,3′,4,4′-tetrachlorobiphenyl, and α-naphthoflavone (WO 98/30213); and antioxidants such as γ-L-glutamyl-L-cysteine ethyl ester (γ-GCE; WO 99/56764).

[1042] In a further embodiment, the Therapeutics of the invention are administered in combination with an antiviral agent. Antiviral agents that may be administered with the Therapeutics of the invention include, but are not limited to, acyclovir, ribavirin, amantadine, and remantidine.

[1043] In other embodiments, Therapeutics of the invention may be administered in combination with anti-opportunistic infection agents. Anti-opportunistic agents that may be administered in combination with the Therapeutics of the invention, include, but are not limited to, TRIMETHOPRIM-SULFAMETHOXAZOLE™, DAPSONE™, PENTAMIDINE™, ATOVAQUONE™, ISONIAZID™, RIFAMPIN™, PYRAZINAMIDE™, ETHAMBUTOL™, RIFABUTIN™, CLARITHROMYCIN™, AZITHROMYCIN™, GANCICLOVIR™, FOSCARNET™, CIDOFOVIR™, FLUCONAZOLE™, ITRACONAZOLE™, KETOCONAZOLE™, ACYCLOVIR™, FAMCICOLVIR™, PYRIMETHAMINE™, LEUCOVORIN™, NEUPOGEN™ (filgrastim/G-CSF), and LEUKINE™ (sargramostim/GM-CSF). In a specific embodiment, Therapeutics of the invention are used in any combination with TRIMETHOPRIM-SULFAMETHOXAZOLE™, DAPSONE™, PENTAMIDINE™, and/or ATOVAQUONE™ to prophylactically treat or prevent an opportunistic Pneumocystis carinii pneumonia infection. In another specific embodiment, Therapeutics of the invention are used in any combination with ISONIAZID™, RIFAMPIN™, PYRAZINAMIDE™, and/or ETHAMBUTOL™ to prophylactically treat or prevent an opportunistic Mycobacterium avium complex infection. In another specific embodiment, Therapeutics of the invention are used in any combination with RIFABUTIN™, CLARITHROMYCIN™, and/or AZITHROMYCIN™ to prophylactically treat or prevent an opportunistic Mycobacterium tuberculosis infection. In another specific embodiment, Therapeutics of the invention are used in any combination with GANCICLOVIR™, FOSCARNET™, and/or CIDOFOVIR™ to prophylactically treat or prevent an opportunistic cytomegalovirus infection. In another specific embodiment, Therapeutics of the invention are used in any combination with FLUCONAZOLE™, ITRACONAZOLE™, and/or KETOCONAZOLE™ to prophylactically treat or prevent an opportunistic fungal infection. In another specific embodiment, Therapeutics of the invention are used in any combination with ACYCLOVIR™ and/or FAMCICOLVIR™ to prophylactically treat or prevent an opportunistic herpes simplex virus type I and/or type II infection. In another specific embodiment, Therapeutics of the invention are used in any combination with PYRIMETHAMINE™ and/or LEUCOVORIN™ to prophylactically treat or prevent an opportunistic Toxoplasma gondii infection. In another specific embodiment, Therapeutics of the invention are used in any combination with LEUCOVORIN™ and/or NEUPOGEN™ to prophylactically treat or prevent an opportunistic bacterial infection.

[1044] In a further embodiment, the Therapeutics of the invention are administered in combination with an antibiotic agent. Antibiotic agents that may be administered with the Therapeutics of the invention include, but are not limited to, amoxicillin, beta-lactamases, aminoglycosides, beta-lactam (glycopeptide), beta-lactamases, Clindamycin, chloramphenicol, cephalosporins, ciprofloxacin, ciprofloxacin, erythromycin, fluoroquinolones, macrolides, metronidazole, penicillins, quinolones, rapamycin, rifampin, streptomycin, sulfonamide, tetracyclines, trimethoprim, trimethoprim-sulfamthoxazole, and vancomycin.

[1045] In other embodiments, Therapeutics of the invention are administered in combination with immunosuppressive agents. Immunosuppressive agents that may be administered in combination with the Therapeutics of the invention include, but are not limited to, steroids, cyclosporine, cyclosporine analogs, cyclophosphamide methylprednisone, prednisone, azathioprine, FK-506, 15-deoxyspergualin, and other immunosuppressive agents that act by suppressing the function of responding T cells. Other immunosuppressive agents that may be administered in combination with the Therapeutics of the invention include, but are not limited to, prednisolone, methotrexate, thalidomide, methoxsalen, rapamycin, leflunomide, mizoribine (BREDININ™), brequinar, deoxyspergualin, and azaspirane (SKF 105685), ORTHOCLONE OKT® 3 (muromonab-CD3), SANDIMMUNE™, NEORAL™, SANGDYA™ (cyclosporine), PROGRAF® (FK506, tacrolimus), CELLCEPT® (mycophenolate motefil, of which the active metabolite is mycophenolic acid), IMURAN™ (azathioprine), glucocorticosteroids, adrenocortical steroids such as DELTASONE™ (prednisone) and HYDELTRASOL™ (prednisolone), FOLEX™ and MEXATE™ (methotrxate), OXSORALEN-ULTRA™ (methoxsalen) and RAPAMUNE™ (sirolimus). In a specific embodiment, immunosuppressants may be used to prevent rejection of organ or bone marrow transplantation.

[1046] In an additional embodiment, Therapeutics of the invention are administered alone or in combination with one or more intravenous immune globulin preparations. Intravenous immune globulin preparations that may be administered with the Therapeutics of the invention include, but not limited to, GAMMAR™, IVEEGAM™, SANDOGLOBULIN™, GAMMAGARD S/D™, ATGAM™ (antithymocyte glubulin), and GAMIMUNE™. In a specific embodiment, Therapeutics of the invention are administered in combination with intravenous immune globulin preparations in transplantation therapy (e.g., bone marrow transplant).

[1047] In certain embodiments, the Therapeutics of the invention are administered alone or in combination with an anti-inflammatory agent. Anti-inflammatory agents that may be administered with the Therapeutics of the invention include, but are not limited to, corticosteroids (e.g. betamethasone, budesonide, cortisone, dexamethasone, hydrocortisone, methylprednisolone, prednisolone, prednisone, and triamcinolone), nonsteroidal anti-inflammatory drugs (e.g., diclofenac, diflunisal, etodolac, fenoprofen, floctafenine, flurbiprofen, ibuprofen, indomethacin, ketoprofen, meclofenamate, mefenamic acid, meloxicam, nabumetone, naproxen, oxaprozin, phenylbutazone, piroxicam, sulindac, tenoxicam, tiaprofenic acid, and tolmetin.), as well as antihistamines, aminoarylcarboxylic acid derivatives, arylacetic acid derivatives, arylbutyric acid derivatives, arylcarboxylic acids, arylpropionic acid derivatives, pyrazoles, pyrazolones, salicylic acid derivatives, thiazinecarboxamides, e-acetamidocaproic acid, S-adenosylmethionine, 3-amino-4-hydroxybutyric acid, amixetrine, bendazac, benzydamine, bucolome, difenpiramide, ditazol, emorfazone, guaiazulene, nabumetone, nimesulide, orgotein, oxaceprol, paranyline, perisoxal, pifoxime, proquazone, proxazole, and tenidap.

[1048] In an additional embodiment, the compositions of the invention are administered alone or in combination with an anti-angiogenic agent. Anti-angiogenic agents that may be administered with the compositions of the invention include, but are not limited to, Angiostatin (Entremed, Rockville, Md.), Troponin-1 (Boston Life Sciences, Boston, Mass.), anti-Invasive Factor, retinoic acid and derivatives thereof, paclitaxel (Taxol), Suramin, Tissue Inhibitor of Metalloproteinase-1, Tissue Inhibitor of Metalloproteinase-2, VEGI, Plasminogen Activator Inhibitor-1, Plasminogen Activator Inhibitor-2, and various forms of the lighter “d group” transition metals.

[1049] Lighter “d group” transition metals include, for example, vanadium, molybdenum, tungsten, titanium, niobium, and tantalum species. Such transition metal species may form transition metal complexes. Suitable complexes of the above-mentioned transition metal species include oxo transition metal complexes.

[1050] Representative examples of vanadium complexes include oxo vanadium complexes such as vanadate and vanadyl complexes. Suitable vanadate complexes include metavanadate and orthovanadate complexes such as, for example, ammonium metavanadate, sodium metavanadate, and sodium orthovanadate. Suitable vanadyl complexes include, for example, vanadyl acetylacetonate and vanadyl sulfate including vanadyl sulfate hydrates such as vanadyl sulfate mono- and trihydrates.

[1051] Representative examples of tungsten and molybdenum complexes also include oxo complexes. Suitable oxo tungsten complexes include tungstate and tungsten oxide complexes. Suitable tungstate complexes include ammonium tungstate, calcium tungstate, sodium tungstate dihydrate, and tungstic acid. Suitable tungsten oxides include tungsten (IV) oxide and tungsten (VI) oxide. Suitable oxo molybdenum complexes include molybdate, molybdenum oxide, and molybdenyl complexes. Suitable molybdate complexes include ammonium molybdate and its hydrates, sodium molybdate and its hydrates, and potassium molybdate and its hydrates. Suitable molybdenum oxides include molybdenum (VI) oxide, molybdenum (VI) oxide, and molybdic acid. Suitable molybdenyl complexes include, for example, molybdenyl acetylacetonate. Other suitable tungsten and molybdenum complexes include hydroxo derivatives derived from, for example, glycerol, tartaric acid, and sugars.

[1052] A wide variety of other anti-angiogenic factors may also be utilized within the context of the present invention. Representative examples include, but are not limited to, platelet factor 4; protamine sulphate; sulphated chitin derivatives (prepared from queen crab shells), (Murata et al., Cancer Res. 51:22-26, (1991)); Sulphated Polysaccharide Peptidoglycan Complex (SP-PG) (the function of this compound may be enhanced by the presence of steroids such as estrogen, and tamoxifen citrate); Staurosporine; modulators of matrix metabolism, including for example, proline analogs, cishydroxyproline, d,L-3,4-dehydroproline, Thiaproline, alpha,alpha-dipyridyl, aminopropionitrile fumarate; 4-propyl-5-(4-pyridinyl)-2(3H)-oxazolone; Methotrexate; Mitoxantrone; Heparin; Interferons; 2 Macroglobulin-serum; ChIMP-3 (Pavloff et al., J. Bio. Chem. 267:17321-17326, (1992)); Chymostatin (Tomkinson et al., Biochem J. 286:475-480, (1992)); Cyclodextrin Tetradecasulfate; Eponemycin; Camptothecin; Fumagillin (Ingber et al., Nature 348:555-557, (1990)); Gold Sodium Thiomalate (“GST”; Matsubara and Ziff, J. Clin. Invest. 79:1440-1446, (1987)); anticollagenase-serum; alpha2-antiplasmin (Holmes et al., J. Biol. Chem. 262(4):1659-1664, (1987)); Bisantrene (National Cancer Institute); Lobenzarit disodium (N-(2)-carboxyphenyl-4-chloroanthronilic acid disodium or “CCA”; (Takeuchi et al., Agents Actions 36:312-316, (1992)); and metalloproteinase inhibitors such as BB94.

[1053] Additional anti-angiogenic factors that may also be utilized within the context of the present invention include Thalidomide, (Celgene, Warren, N.J.); Angiostatic steroid; AGM-1470 (H. Brem and J. Folkman J Pediatr. Surg. 28:445-51 (1993)); an integrin alpha v beta 3 antagonist (C. Storgard et al., J Clin. Invest. 103:47-54 (1999)); carboxynaminolmidazole; Carboxyamidotriazole (CAI) (National Cancer Institute, Bethesda, Md.); Conbretastatin A-4 (CA4P) (OXiGENE, Boston, Mass.); Squalamine (Magainin Pharmaceuticals, Plymouth Meeting, Pa.); TNP-470, (Tap Pharmaceuticals, Deerfield, Ill.); ZD-0101 AstraZeneca (London, UK); APRA (CT2584); Benefin, Byrostatin-1 (SC339555); CGP-41251 (PKC 412); CM101; Dexrazoxane (ICRF187); DMXAA; Endostatin; Flavopridiol; Genestein; GTE; ImmTher; Iressa (ZD1839); Octreotide (Somatostatin); Panretin; Penacillamine; Photopoint; PI-88; Prinomastat (AG-3340) Purlytin; Suradista (FCE26644); Tamoxifen (Nolvadex); Tazarotene; Tetrathiomolybdate; Xeloda (Capecitabine); and 5-Fluorouracil.

[1054] Anti-angiogenic agents that may be administed in combination with the compounds of the invention may work through a variety of mechanisms including, but not limited to, inhibiting proteolysis of the extracellular matrix, blocking the function of endothelial cell-extracellular matrix adhesion molecules, by antagonizing the function of angiogenesis inducers such as growth factors, and inhibiting integrin receptors expressed on proliferating endothelial cells. Examples of anti-angiogenic inhibitors that interfere with extracellular matrix proteolysis and which may be administered in combination with the compositons of the invention include, but are not lmited to, AG-3340 (Agouron, La Jolla, Calif.), BAY-12-9566 (Bayer, West Haven, Conn.), BMS-275291 (Bristol Myers Squibb, Princeton, N.J.), CGS-27032A (Novartis, East Hanover, N.J.), Marimastat (British Biotech, Oxford, UK), and Metastat (Aeterna, St-Foy, Quebec). Examples of anti-angiogenic inhibitors that act by blocking the function of endothelial cell-extracellular matrix adhesion molecules and which may be administered in combination with the compositons of the invention include, but are not lmited to, EMD-121974 (Merck KcgaA Darmstadt, Germany) and Vitaxin (Ixsys, La Jolla, Calif./Medimmune, Gaithersburg, Md.). Examples of anti-angiogenic agents that act by directly antagonizing or inhibiting angiogenesis inducers and which may be administered in combination with the compositons of the invention include, but are not lmited to, Angiozyme (Ribozyme, Boulder, Colo.), Anti-VEGF antibody (Genentech, S. San Francisco, Calif.), PTK-787/ZK-225846 (Novartis, Basel, Switzerland), SU-101 (Sugen, S. San Francisco, Calif.), SU-5416 (Sugen/Pharmacia Upjohn, Bridgewater, N.J.), and SU-6668 (Sugen). Other anti-angiogenic agents act to indirectly inhibit angiogenesis. Examples of indirect inhibitors of angiogenesis which may be administered in combination with the compositons of the invention include, but are not limited to, IM-862 (Cytran, Kirkland, Wash.), Interferon-alpha, IL-12 (Roche, Nutley, N.J.), and Pentosan polysulfate (Georgetown University, Washington, D.C.).

[1055] In particular embodiments, the use of compositions of the invention in combination with anti-angiogenic agents is contemplated for the treatment, prevention, and/or amelioration of an autoimmune disease, such as for example, an autoimmune disease described herein.

[1056] In a particular embodiment, the use of compositions of the invention in combination with anti-angiogenic agents is contemplated for the treatment, prevention, and/or amelioration of arthritis. In a more particular embodiment, the use of compositions of the invention in combination with anti-angiogenic agents is contemplated for the treatment, prevention, and/or amelioration of rheumatoid arthritis.

[1057] In another embodiment, the polynucleotides encoding a polypeptide of the present invention are administered in combination with an angiogenic protein, or polynucleotides encoding an angiogenic protein. Examples of angiogenic proteins that may be administered with the compositions of the invention include, but are not limited to, acidic and basic fibroblast growth factors, VEGF-1, VEGF-2, VEGF-3, epidermal growth factor alpha and beta, platelet-derived endothelial cell growth factor, platelet-derived growth factor, tumor necrosis factor alpha, hepatocyte growth factor, insulin-like growth factor, colony stimulating factor, macrophage colony stimulating factor, granulocyte/macrophage colony stimulating factor, and nitric oxide synthase.

[1058] In additional embodiments, compostions of the invention are administered in combination with a chemotherapeutic agent. Chemotherapeutic agents that may be administered with the Therapeutics of the invention include, but are not limited to alkylating agents such as nitrogen mustards (for example, Mechlorethamine, cyclophosphamide, Cyclophosphamide Ifosfamide, Melphalan (L-sarcolysin), and Chlorambucil), ethylenimines and methylmelamines (for example, Hexamethylmelamine and Thiotepa), alkyl sulfonates (for example, Busulfan), nitrosoureas (for example, Carmustine (BCNU), Lomustine (CCNU), Semustine (methyl-CCNU), and Streptozocin (streptozotocin)), triazenes (for example, Dacarbazine (DTIC; dimethyltriazenoimidazolecarboxamide)), folic acid analogs (for example, Methotrexate (amethopterin)), pyrimidine analogs (for example, Fluorouacil (5-fluorouracil; 5-FU), Floxuridine (fluorodeoxyuridine; FudR), and Cytarabine (cytosine arabinoside)), purine analogs and related inhibitors (for example, Mercaptopurine (6-mercaptopurine; 6-MP), Thioguanine (6-thioguanine; TG), and Pentostatin (2′-deoxycoformycin)), vinca alkaloids (for example, Vinblastine (VLB, vinblastine sulfate) and Vincristine (vincristine sulfate)), epipodophyllotoxins (for example, Etoposide and Teniposide), antibiotics (for example, Dactinomycin (actinomycin D), Daunorubicin (daunomycin; rubidomycin), Doxorubicin, Bleomycin, Plicamycin (mithramycin), and Mitomycin (mitomycin C), enzymes (for example, L-Asparaginase), biological response modifiers (for example, Interferon-alpha and interferon-alpha-2b), platinum coordination compounds (for example, Cisplatin (cis-DDP) and Carboplatin), anthracenedione (Mitoxantrone), substituted ureas (for example, Hydroxyurea), methylhydrazine derivatives (for example, Procarbazine (N-methylhydrazine; MIH), adrenocorticosteroids (for example, Prednisone), progestins (for example, Hydroxyprogesterone caproate, Medroxyprogesterone, Medroxyprogesterone acetate, and Megestrol acetate), estrogens (for example, Diethylstilbestrol (DES), Diethylstilbestrol diphosphate, Estradiol, and Ethinyl estradiol), antiestrogens (for example, Tamoxifen), androgens (Testosterone proprionate, and Fluoxymesterone), antiandrogens (for example, Flutamide), gonadotropin-releasing horomone analogs (for example, Leuprolide), other hormones and hormone analogs (for example, methyltestosterone, estramustine, estramustine phosphate sodium, chlorotrianisene, and testolactone), and others (for example, dicarbazine, glutamic acid, and mitotane).

[1059] In one embodiment, the compositions of the invention are administered in combination with one or more of the following drugs: infliximab (also known as Remicade™ Centocor, Inc.), Trocade (Roche, RO-32-3555), Leflunomide (also known as Arava™ from Hoechst Marion Roussel), Kineret™ (an IL-1 Receptor antagonist also known as Anakinra from Amgen, Inc.).

[1060] In a specific embodiment, compositions of the invention are administered in combination with CHOP (cyclophosphamide, doxorubicin, vincristine, and prednisone) or combination of one or more of the components of CHOP. In one embodiment, the compositions of the invention are administered in combination with anti-CD20 antibodies, human monoclonal anti-CD20 antibodies. In another embodiment, the compositions of the invention are administered in combination with anti-CD20 antibodies and CHOP, or anti-CD20 antibodies and any combination of one or more of the components of CHOP, particularly cyclophosphamide and/or prednisone. In a specific embodiment, compositions of the invention are administered in combination with Rituximab. In a further embodiment, compositions of the invention are administered with Rituximab and CHOP, or Rituximab and any combination of one or more of the components of CHOP, particularly cyclophosphamide and/or prednisone. In a specific embodiment, compositions of the invention are administered in combination with tositumomab. In a further embodiment, compositions of the invention are administered with tositumomab and CHOP, or tositumomab and any combination of one or more of the components of CHOP, particularly cyclophosphamide and/or prednisone. The anti-CD20 antibodies may optionally be associated with radioisotopes, toxins or cytotoxic prodrugs.

[1061] In another specific embodiment, the compositions of the invention are administered in combination Zevalin™. In a further embodiment, compositions of the invention are administered with Zevalin™ and CHOP, or Zevalin™ and any combination of one or more of the components of CHOP, particularly cyclophosphamide and/or prednisone. Zevalin™ may be associated with one or more radisotopes. Particularly preferred isotopes are ⁹⁰Y and ¹¹¹In.

[1062] In an additional embodiment, the Therapeutics of the invention are administered in combination with cytokines. Cytokines that may be administered with the Therapeutics of the invention include, but are not limited to, IL2, IL3, IL4, IL5, IL6, IL7, IL10, IL12, IL13, IL15, anti-CD40, CD40L, IFN-gamma and TNF-alpha. In another embodiment, Therapeutics of the invention may be administered with any interleukin, including, but not limited to, IL-1alpha, IL-1beta, IL-2, IL-3, IL-4, IL-5, IL-6, IL-7, IL-8, IL-9, IL-10, IL-11, IL-12, IL-13, IL-14, IL-15, IL-16, IL-17, IL-18, IL-19, IL-20, and IL-21.

[1063] In one embodiment, the Therapeutics of the invention are administered in combination with members of the TNF family. TNF, TNF-related or TNF-like molecules that may be administered with the Therapeutics of the invention include, but are not limited to, soluble forms of TNF-alpha, lymphotoxin-alpha (LT-alpha, also known as TNF-beta), LT-beta (found in complex heterotrimer LT-alpha2-beta), OPGL, FasL, CD27L, CD30L, CD40L, 4-1BBL, DcR3, OX40L, TNF-gamma (International Publication No. WO 96/14328), AIM-I (International Publication No. WO 97/33899), endokine-alpha (International Publication No. WO 98/07880), OPG, and neutrokine-alpha (International Publication No. WO 98/18921, OX40, and nerve growth factor (NGF), and soluble forms of Fas, CD30, CD27, CD40 and 4-IBB, TR2 (International Publication No. WO 96/34095), DR3 (International Publication No. WO 97/33904), DR4 (International Publication No. WO 98/32856), TR5 (International Publication No. WO 98/30693), TRANK, TR9 (International Publication No. WO 98/56892),TR10 (International Publication No. WO 98/54202), 312C2 (International Publication No. WO 98/06842), and TR12, and soluble forms CD154, CD70, and CD153.

[1064] In an additional embodiment, the Therapeutics of the invention are administered in combination with angiogenic proteins. Angiogenic proteins that may be administered with the Therapeutics of the invention include, but are not limited to, Glioma Derived Growth Factor (GDGF), as disclosed in European Patent Number EP-399816; Platelet Derived Growth Factor-A (PDGF-A), as disclosed in European Patent Number EP-682110; Platelet Derived Growth Factor-B (PDGF-B), as disclosed in European Patent Number EP-282317; Placental Growth Factor (PlGF), as disclosed in International Publication Number WO 92/06194; Placental Growth Factor-2 (PlGF-2), as disclosed in Hauser et al., Growth Factors, 4:259-268 (1993); Vascular Endothelial Growth Factor (VEGF), as disclosed in International Publication Number WO 90/13649; Vascular Endothelial Growth Factor-A (VEGF-A), as disclosed in European Patent Number EP-506477; Vascular Endothelial Growth Factor-2 (VEGF-2), as disclosed in International Publication Number WO 96/39515; Vascular Endothelial Growth Factor B (VEGF-3); Vascular Endothelial Growth Factor B-186 (VEGF-B186), as disclosed in International Publication Number WO 96/26736; Vascular Endothelial Growth Factor-D (VEGF-D), as disclosed in International Publication Number WO 98/02543; Vascular Endothelial Growth Factor-D (VEGF-D), as disclosed in International Publication Number WO 98/07832; and Vascular Endothelial Growth Factor-E (VEGF-E), as disclosed in German Patent Number DE19639601. The above mentioned references are herein incorporated by reference in their entireties.

[1065] In an additional embodiment, the Therapeutics of the invention are administered in combination with Fibroblast Growth Factors. Fibroblast Growth Factors that may be administered with the Therapeutics of the invention include, but are not limited to, FGF-1, FGF-2, FGF-3, FGF-4, FGF-5, FGF-6, FGF-7, FGF-8, FGF-9, FGF-10, FGF-11, FGF-12, FGF-13, FGF-14, and FGF-15.

[1066] In an additional embodiment, the Therapeutics of the invention are administered in combination with hematopoietic growth factors. Hematopoietic growth factors that may be administered with the Therapeutics of the invention include, but are not limited to, granulocyte macrophage colony stimulating factor (GM-CSF) (sargramostim, LEUKINE™, PROKINE™), granulocyte colony stimulating factor (G-CSF) (filgrastim, NEUPOGEN™), macrophage colony stimulating factor (M-CSF, CSF-1) erythropoietin (epoetin alfa, EPOGEN™, PROCRIT™), stem cell factor (SCF, c-kit ligand, steel factor), megakaryocyte colony stimulating factor, PIXY321 (a GMCSF/IL-3 fusion protein), interleukins, especially any one or more of IL-1 through IL-12, interferon-gamma, or thrombopoietin.

[1067] In certain embodiments, Therapeutics of the present invention are administered in combination with adrenergic blockers, such as, for example, acebutolol, atenolol, betaxolol, bisoprolol, carteolol, labetalol, metoprolol, nadolol, oxprenolol, penbutolol, pindolol, propranolol, sotalol, and timolol.

[1068] In another embodiment, the Therapeutics of the invention are administered in combination with an antiarrhythmic drug (e.g., adenosine, amidoarone, bretylium, digitalis, digoxin, digitoxin, diliazem, disopyramide, esmolol, flecainide, lidocaine, mexiletine, moricizine, phenytoin, procainamide, N-acetyl procainamide, propafenone, propranolol, quinidine, sotalol, tocainide, and verapamil).

[1069] In another embodiment, the Therapeutics of the invention are administered in combination with diuretic agents, such as carbonic anhydrase-inhibiting agents (e.g., acetazolamide, dichlorphenamide, and methazolamide), osmotic diuretics (e.g., glycerin, isosorbide, mannitol, and urea), diuretics that inhibit Na⁺-K⁺-2Cl⁻ symport (e.g., furosemide, bumetanide, azosemide, piretanide, tripamide, ethacrynic acid, muzolimine, and torsemide), thiazide and thiazide-like diuretics (e.g., bendroflumethiazide, benzthiazide, chlorothiazide, hydrochlorothiazide, hydroflumethiazide, methyclothiazide, polythiazide, trichormethiazide, chlorthalidone, indapamide, metolazone, and quinethazone), potassium sparing diuretics (e.g., amiloride and triamterene), and mineralcorticoid receptor antagonists (e.g., spironolactone, canrenone, and potassium canrenoate).

[1070] In one embodiment, the Therapeutics of the invention are administered in combination with treatments for endocrine and/or hormone imbalance disorders. Treatments for endocrine and/or hormone imbalance disorders include, but are not limited to, ¹²⁷I, radioactive isotopes of iodine such as ¹³¹I and ¹²³I; recombinant growth hormone, such as HUMATROPE™ (recombinant somatropin); growth hormone analogs such as PROTROPIN™ (somatrem); dopamine agonists such as PARLODEL™ (bromocriptine); somatostatin analogs such as SANDOSTATIN™ (octreotide); gonadotropin preparations such as PREGNYL™, A.P.L.™ and PROFASI™ (chorionic gonadotropin (CG)), PERGONAL™ (menotropins), and METRODIN™ (urofollitropin (uFSH)); synthetic human gonadotropin releasing hormone preparations such as FACTREL™ and LUTREPULSE™ (gonadorelin hydrochloride); synthetic gonadotropin agonists such as LUPRON™ (leuprolide acetate), SUPPRELIN™ (histrelin acetate), SYNAREL™ (nafarelin acetate), and ZOLADEX™ (goserelin acetate); synthetic preparations of thyrotropin-releasing hormone such as RELEFACT TRH™ and THYPINONE™ (protirelin); recombinant human TSH such as THYROGEN™; synthetic preparations of the sodium salts of the natural isomers of thyroid hormones such as L-T₄™, SYNTHROID™ and LEVOTHROID™ (levothyroxine sodium), L-T₃™, CYTOMEL™ and TRIOSTA™ (liothyroine sodium), and THYROLAR™ (liotrix); antithyroid compounds such as 6-n-propylthiouracil (propylthiouracil), 1-methyl-2-mercaptoimidazole and TAPAZOLE™ (methimazole), NEO-MERCAZOLE™ (carbimazole); beta-adrenergic receptor antagonists such as propranolol and esmolol; Ca²⁺ channel blockers; dexamethasone and iodinated radiological contrast agents such as TELEPAQUE™ (iopanoic acid) and ORAGRAFIN™ (sodium ipodate); estrogens or congugated estrogens such as ESTRACE™ (estradiol), ESTINYL™ (ethinyl estradiol), PREMARIN™, ESTRATAB™, ORTHO-EST™, OGEN™ and estropipate (estrone), ESTROVIS™ (quinestrol), ESTRADERM™ (estradiol), DELESTROGEN™ and VALERGEN™ (estradiol valerate), DEPO-ESTRADIOL CYPIONATE™ and ESTROJECT LA™ (estradiol cypionate); antiestrogens such as NOLVADEX™ (tamoxifen), SEROPHENE™ and CLOMID™ (clomiphene); progestins such as DURALUTIN™ (hydroxyprogesterone caproate), MPA™ and DEPO-PROVERA™ (medroxyprogesterone acetate), PROVERA™ and CYCRIN™ (MPA), MEGACE™ (megestrol acetate), NORLUTIN™ (norethindrone), and NORLUTATE™ and AYGESTIN™ (norethindrone acetate); progesterone implants such as NORPLANT SYSTEM™ (subdermal implants of norgestrel); antiprogestins such as RU 486™ (mifepristone); hormonal contraceptives such as ENOVID™ (norethynodrel plus mestranol), PROGESTASERT™ (intrauterine device that releases progesterone), LOESTRWN™, BREVICON™, MODICON™, GENORA™, NELONA™, NORINYL™, OVACON-35™ and OVACON-50™ (ethinyl estradiol/norethindrone), LEVLEN™, NORDETTE™, TRI-LEVLEN™ and TRIPHASIL-21™ (ethinyl estradiol/levonorgestrel) LO/OVRAL™ and OVRAL™ (ethinyl estradiol/norgestrel), DEMULEN™ (ethinyl estradiol/ethynodiol diacetate), NORINYL™, ORTHO-NOVUM™, NORETHIN™, GENORA™, and NELOVA™ (norethindrone/mestranol), DESOGEN™ and ORTHO-CEPT™(ethinyl estradiol/desogestrel), ORTHO-CYCLEN™ and ORTHO-CEPT™ TRICYCLEN™ (ethinyl estradiol/norgestimate), MICRONOR™ and NOR-QD™ (norethindrone), and OVRETTE™ (norgestrel); testosterone esters such as methenolone acetate and testosterone undecanoate; parenteral and oral androgens such as TESTOJECT-50™ (testosterone), TESTEX™ (testosterone propionate), DELATESTRYL™ (testosterone enanthate), DEPO-TESTOSTERONE™ (testosterone cypionate), DANOCRINE™ (danazol), HALOTESTIN™ (fluoxymesterone), ORETON METHYL™, TESTRED™ and VIRILON™ (methyltestosterone), and OXANDRIN™ (oxandrolone); testosterone transdermal systems such as TESTODERM™; androgen receptor antagonist and 5-alpha-reductase inhibitors such as ANDROCUR™ (cyproterone acetate), EULEXIN™ (flutamide), and PROSCAR™ (finasteride); adrenocorticotropic hormone preparations such as CORTROSYN™ (cosyntropin); adrenocortical steroids and their synthetic analogs such as ACLOVATE™ (alclometasone dipropionate), CYCLOCORT™ (amcinonide), BECLOVENT™ and VANCERIL™ (beclomethasone dipropionate), CELESTONE™ (betamethasone), BENISONE™ and UTICORT™ (betamethasone benzoate), DIPROSONE™ (betamethasone dipropionate), CELESTONE PHOSPHATE™ (betamethasone sodium phosphate), CELESTONE SOLUSPAN™ (betamethasone sodium phosphate and acetate), BETA-VAL™ and VALISONE™ (betamethasone valerate), TEMOVATE™ (clobetasol propionate), CLODERM™ (clocortolone pivalate), CORTEF™ and HYDROCORTONE™ (cortisol (hydrocortisone)), HYDROCORTONE ACETATE™ (cortisol (hydrocortisone) acetate), LOCOID™ (cortisol (hydrocortisone) butyrate), HYDROCORTONE PHOSPHATE™ (cortisol (hydrocortisone) sodium phosphate), A-HYDROCORT™ and SOLU CORTEF™ (cortisol (hydrocortisone) sodium succinate), WESTCORT™ (cortisol (hydrocortisone) valerate), CORTISONE ACETATE™ (cortisone acetate), DESOWEN™ and TRIDESILON™ (desonide), TOPICORT™ (desoximetasone), DECADRON™ (dexamethasone), DECADRON LA™ (dexamethasone acetate), DECADRON PHOSPHATE™ and HEXADROL PHOSPHATE™ (dexamethasone sodium phosphate), FLORONE™ and MAXIFLOR™ (diflorasone diacetate), FLORINEF ACETATE™ (fludrocortisone acetate), AEROBID™ and NASALIDE™ (flunisolide), FLUONID™ and SYNALAR™ (fluocinolone acetonide), LIDEX™ (fluocinonide), FLUOR-OP™ and FML™ (fluorometholone), CORDRAN™ (flurandrenolide), HALOG™ (halcinonide), HMS LIZUIFILM™ (medrysone), MEDROL™ (methylprednisolone), DEPO-MEDROL™ and MEDROL ACETATE™ (methylprednisone acetate), A-METHAPRED™ and SOLUMEDROL™ (methylprednisolone sodium succinate), ELOCON™ (mometasone furoate), HALDRONE™ (paramethasone acetate), DELTA-CORTEF™ (prednisolone), ECONOPRED™ (prednisolone acetate), HYDELTRASOL™ (prednisolone sodium phosphate), HYDELTRA-T.B.A™ (prednisolone tebutate), DELTASONE™ (prednisone), ARISTOCORT™ and KENACORT™ (triamcinolone), KENALOG™ (triamcinolone acetonide), ARISTOCORT™ and KENACORT DIACETATE™ (triamcinolone diacetate), and ARISTOSPAN™ (triamcinolone hexacetonide); inhibitors of biosynthesis and action of adrenocortical steroids such as CYTADREN™ (aminoglutethimide), NIZORAL™ (ketoconazole), MODRASTANE™ (trilostane), and METOPIRONE™ (metyrapone); bovine, porcine or human insulin or mixtures thereof; insulin analogs; recombinant human insulin such as HUMULIN™ and NOVOLIN™; oral hypoglycemic agents such as ORAMIDE™ and ORINASE™ (tolbutamide), DIABINESE™ (chlorpropamide), TOLAMIDE™ and TOLINASE™ (tolazamide), DYMELOR™ (acetohexamide), glibenclamide, MICRONASE™, DIBETA™ and GLYNASE™ (glyburide), GLUCOTROL™ (glipizide), and DIAMICRON™ (gliclazide), GLUCOPHAGE™ (metformin), ciglitazone, pioglitazone, and alpha-glucosidase inhibitors; bovine or porcine glucagon; somatostatins such as SANDOSTATIN™ (octreotide); and diazoxides such as PROGLYCEM™ (diazoxide).

[1071] In one embodiment, the Therapeutics of the invention are administered in combination with treatments for uterine motility disorders. Treatments for uterine motility disorders include, but are not limited to, estrogen drugs such as conjugated estrogens (e.g., PREMARIN® and ESTRATAB®), estradiols (e.g., CLIMARA® and ALORA®), estropipate, and chlorotrianisene; progestin drugs (e.g., AMEN® (medroxyprogesterone), MICRONOR® (norethidrone acetate), PROMETRIUM® progesterone, and megestrol acetate); and estrogen/progesterone combination therapies such as, for example, conjugated estrogens/medroxyprogesterone (e.g., PREMPRO™ and PREMPHASE®) and norethindrone acetate/ethinyl estsradiol (e.g., FEMHRT™).

[1072] In an additional embodiment, the Therapeutics of the invention are administered in combination with drugs effective in treating iron deficiency and hypochromic anemias, including but not limited to, ferrous sulfate (iron sulfate, FEOSOL™), ferrous fumarate (e.g., FEOSTAT™), ferrous gluconate (e.g., FERGON™), polysaccharide-iron complex (e.g., NIFEREX™), iron dextran injection (e.g., INFED™), cupric sulfate, pyroxidine, riboflavin, Vitamin B₁₂, cyancobalamin injection (e.g., REDISOL™, RUBRAMIN PC™), hydroxocobalamin, folic acid (e.g., FOLVITE™), leucovorin (folinic acid, 5-CHOH4PteGlu, citrovorum factor) or WELLCOVORIN (Calcium salt of leucovorin), transferrin or ferritin.

[1073] In certain embodiments, the Therapeutics of the invention are administered in combination with agents used to treat psychiatric disorders. Psychiatric drugs that may be administered with the Therapeutics of the invention include, but are not limited to, antipsychotic agents (e.g., chlorpromazine, chlorprothixene, clozapine, fluphenazine, haloperidol, loxapine, mesoridazine, molindone, olanzapine, perphenazine, pimozide, quetiapine, risperidone, thioridazine, thiothixene, trifluoperazine, and triflupromazine), antimanic agents (e.g., carbamazepine, divalproex sodium, lithium carbonate, and lithium citrate), antidepressants (e.g., amitriptyline, amoxapine, bupropion, citalopram, clomipramine, desipramine, doxepin, fluvoxamine, fluoxetine, imipramine, isocarboxazid, maprotiline, mirtazapine, nefazodone, nortriptyline, paroxetine, phenelzine, protriptyline, sertraline, tranylcypromine, trazodone, trimipramine, and venlafaxine), antianxiety agents (e.g., alprazolam, buspirone, chlordiazepoxide, clorazepate, diazepam, halazepam, lorazepam, oxazepam, and prazepam), and stimulants (e.g., d-amphetamine, methylphenidate, and pemoline).

[1074] In other embodiments, the Therapeutics of the invention are administered in combination with agents used to treat neurological disorders. Neurological agents that may be administered with the Therapeutics of the invention include, but are not limited to, antiepileptic agents (e.g., carbamazepine, clonazepam, ethosuximide, phenobarbital, phenytoin, primidone, valproic acid, divalproex sodium, felbamate, gabapentin, lamotrigine, levetiracetam, oxcarbazepine, tiagabine, topiramate, zonisamide, diazepam, lorazepam, and clonazepam), antiparkinsonian agents (e.g., levodopa/carbidopa, selegiline, amantidine, bromocriptine, pergolide, ropinirole, pramipexole, benztropine; biperiden; ethopropazine; procyclidine; trihexyphenidyl, tolcapone), and ALS therapeutics (e.g. riluzole).

[1075] In another embodiment, Therapeutics of the invention are administered in combination with vasodilating agents and/or calcium channel blocking agents. Vasodilating agents that may be administered with the Therapeutics of the invention include, but are not limited to, Angiotensin Converting Enzyme (ACE) inhibitors (e.g., papaverine, isoxsuprine, benazepril, captopril, cilazapril, enalapril, enalaprilat, fosinopril, lisinopril, moexipril, perindopril, quinapril, ramipril, spirapril, trandolapril, and nylidrin), and nitrates (e.g., isosorbide dinitrate, isosorbide mononitrate, and nitroglycerin). Examples of calcium channel blocking agents that may be administered in combination with the Therapeutics of the invention include, but are not limited to amlodipine, bepridil, diltiazem, felodipine, flunarizine, isradipine, nicardipine, nifedipine, nimodipine, and verapamil.

[1076] In additional embodiments, the Therapeutics of the invention are administered in combination with other therapeutic or prophylactic regimens, such as, for example, radiation therapy.

### Example 14

[1077] Method of Treating Decreased Levels of the Polypeptide

[1078] The present invention relates to a method for treating an individual in need of an increased level of a polypeptide of the invention in the body comprising administering to such an individual a composition comprising a therapeutically effective amount of an agonist of the invention (including polypeptides of the invention). Moreover, it will be appreciated that conditions caused by a decrease in the standard or normal expression level of a polypeptide of the present invention in an individual can be treated by administering the agonist or antagonist of the present invention. Thus, the invention also provides a method of treatment of an individual in need of an increased level of the polypeptide comprising administering to such an individual a Therapeutic comprising an amount of the agonist or antagonist to increase the activity level of the polypeptide in such an individual.

[1079] For example, a patient with decreased levels of a polypeptide receives a daily dose 0.1-100 ug/kg of the agonist or antagonist for six consecutive days. The exact details of the dosing scheme, based on administration and formulation, are provided in Example 13.

### Example 15

[1080] Method of Treating Increased Levels of the Polypeptide

[1081] The present invention also relates to a method of treating an individual in need of a decreased level of a polypeptide of the invention in the body comprising administering to such an individual a composition comprising a therapeutically effective amount of an antagonist of the invention (including polypeptides and antibodies of the invention).

[1082] In one example, antisense technology is used to inhibit production of a polypeptide of the present invention. This technology is one example of a method of decreasing levels of a polypeptide, due to a variety of etiologies, such as cancer.

[1083] For example, a patient diagnosed with abnormally increased levels of a polypeptide is administered intravenously antisense polynucleotides at 0.5, 1.0, 1.5, 2.0 and 3.0 mg/kg day for 21 days. This treatment is repeated after a 7-day rest period if the treatment was well tolerated. The formulation of the antisense polynucleotide is provided in Example 13.

### Example 16

[1084] Method of Treatment Using Gene Therapy—Ex Vivo

[1085] One method of gene therapy transplants fibroblasts, which are capable of expressing a polypeptide, onto a patient. Generally, fibroblasts are obtained from a subject by skin biopsy. The resulting tissue is placed in tissue-culture medium and separated into small pieces. Small chunks of the tissue are placed on a wet surface of a tissue culture flask, approximately ten pieces are placed in each flask. The flask is turned upside down, closed tight and left at room temperature over night. After 24 hours at room temperature, the flask is inverted and the chunks of tissue remain fixed to the bottom of the flask and fresh media (e.g., Ham's F12 media, with 10% FBS, penicillin and streptomycin) is added. The flasks are then incubated at 37 degree C. for approximately one week.

[1086] At this time, fresh media is added and subsequently changed every several days. After an additional two weeks in culture, a monolayer of fibroblasts emerge. The monolayer is trypsinized and scaled into larger flasks.

[1087] pMV-7 (Kirschmeier, P. T. et al., DNA, 7:219-25 (1988)), flanked by the long terminal repeats of the Moloney murine sarcoma virus, is digested with EcoRI and HindIII and subsequently treated with calf intestinal phosphatase. The linear vector is fractionated on agarose gel and purified, using glass beads.

[1088] The cDNA encoding a polypeptide of the present invention can be amplified using PCR primers which correspond to the 5′ and 3′ end sequences respectively as set forth in Example 1 using primers and having appropriate restriction sites and initiation/stop codons, if necessary. Preferably, the 5′ primer contains an EcoRI site and the 3′ primer includes a HindIII site. Equal quantities of the Moloney murine sarcoma virus linear backbone and the amplified EcoRI and HindIII fragment are added together, in the presence of T4 DNA ligase. The resulting mixture is maintained under conditions appropriate for ligation of the two fragments. The ligation mixture is then used to transform bacteria HB101, which are then plated onto agar containing kanamycin for the purpose of confirming that the vector has the gene of interest properly inserted.

[1089] The amphotropic pA317 or GP+am12 packaging cells are grown in tissue culture to confluent density in Dulbecco's Modified Eagles Medium (DMEM) with 10% calf serum (CS), penicillin and streptomycin. The MSV vector containing the gene is then added to the media and the packaging cells transduced with the vector. The packaging cells now produce infectious viral particles containing the gene (the packaging cells are now referred to as producer cells).

[1090] Fresh media is added to the transduced producer cells, and subsequently, the media is harvested from a 10 cm plate of confluent producer cells. The spent media, containing the infectious viral particles, is filtered through a millipore filter to remove detached producer cells and this media is then used to infect fibroblast cells. Media is removed from a sub-confluent plate of fibroblasts and quickly replaced with the media from the producer cells. This media is removed and replaced with fresh media. If the titer of virus is high, then virtually all fibroblasts will be infected and no selection is required. If the titer is very low, then it is necessary to use a retroviral vector that has a selectable marker, such as neo or his. Once the fibroblasts have been efficiently infected, the fibroblasts are analyzed to determine whether protein is produced.

[1091] The engineered fibroblasts are then transplanted onto the host, either alone or after having been grown to confluence on cytodex 3 microcarrier beads.

### Example 17

[1092] Gene Therapy Using Endogenous Genes Corresponding to Polynucleotides of the Invention

[1093] Another method of gene therapy according to the present invention involves operably associating the endogenous polynucleotide sequence of the invention with a promoter via homologous recombination as described, for example, in U.S. Pat. No. 5,641,670, issued Jun. 24, 1997; International Publication NO: WO 96/29411, published Sep. 26, 1996; International Publication NO: WO 94/12650, published Aug. 4, 1994; Koller et al., Proc. Natl. Acad. Sci. USA, 86:8932-8935 (1989); and Zijlstra et al., Nature, 342:435-438 (1989). This method involves the activation of a gene which is present in the target cells, but which is not expressed in the cells, or is expressed at a lower level than desired.

[1094] Polynucleotide constructs are made which contain a promoter and targeting sequences, which are homologous to the 5′ non-coding sequence of endogenous polynucleotide sequence, flanking the promoter. The targeting sequence will be sufficiently near the 5′ end of the polynucleotide sequence so the promoter will be operably linked to the endogenous sequence upon homologous recombination. The promoter and the targeting sequences can be amplified using PCR. Preferably, the amplified promoter contains distinct restriction enzyme sites on the 5′ and 3′ ends. Preferably, the 3′ end of the first targeting sequence contains the same restriction enzyme site as the 5′ end of the amplified promoter and the 5′ end of the second targeting sequence contains the same restriction site as the 3′ end of the amplified promoter.

[1095] The amplified promoter and the amplified targeting sequences are digested with the appropriate restriction enzymes and subsequently treated with calf intestinal phosphatase. The digested promoter and digested targeting sequences are added together in the presence of T4 DNA ligase. The resulting mixture is maintained under conditions appropriate for ligation of the two fragments. The construct is size fractionated on an agarose gel, then purified by phenol extraction and ethanol precipitation.

[1096] In this Example, the polynucleotide constructs are administered as naked polynucleotides via electroporation. However, the polynucleotide constructs may also be administered with transfection-facilitating agents, such as liposomes, viral sequences, viral particles, precipitating agents, etc. Such methods of delivery are known in the art.

[1097] Once the cells are transfected, homologous recombination will take place which results in the promoter being operably linked to the endogenous polynucleotide sequence. This results in the expression of polynucleotide corresponding to the polynucleotide in the cell. Expression may be detected by immunological staining, or any other method known in the art.

[1098] Fibroblasts are obtained from a subject by skin biopsy. The resulting tissue is placed in DMEM+10% fetal calf serum. Exponentially growing or early stationary phase fibroblasts are trypsinized and rinsed from the plastic surface with nutrient medium. An aliquot of the cell suspension is removed for counting, and the remaining cells are subjected to centrifugation. The supernatant is aspirated and the pellet is resuspended in 5 ml of electroporation buffer (20 mM HEPES pH 7.3, 137 mM NaCl, 5 mM KCl, 0.7 mM Na₂ HPO₄, 6 mM dextrose). The cells are recentrifuged, the supernatant aspirated, and the cells resuspended in electroporation buffer containing 1 mg/ml acetylated bovine serum albumin. The final cell suspension contains approximately 3×10⁶ cells/ml. Electroporation should be performed immediately following resuspension.

[1099] Plasmid DNA is prepared according to standard techniques. For example, to construct a plasmid for targeting to the locus corresponding to the polynucleotide of the invention, plasmid pUC18 (MBI Fermentas, Amherst, N.Y.) is digested with HindIII. The CMV promoter is amplified by PCR with an XbaI site on the 5′ end and a BamHI site on the 3′ end. Two non-coding sequences are amplified via PCR: one non-coding sequence (fragment 1) is amplified with a HindIII site at the 5′ end and an Xba site at the 3′end; the other non-coding sequence (fragment 2) is amplified with a BamHI site at the 5′end and a HindIII site at the 3′end. The CMV promoter and the fragments (1 and 2) are digested with the appropriate enzymes (CMV promoter—XbaI and BamHI; fragment 1—XbaI; fragment 2—BamHI) and ligated together. The resulting ligation product is digested with HindIII, and ligated with the HindIII-digested pUC18 plasmid.

[1100] Plasmid DNA is added to a sterile cuvette with a 0.4 cm electrode gap (Bio-Rad). The final DNA concentration is generally at least 120 μg/ml. 0.5 ml of the cell suspension (containing approximately 1.5.×10⁶ cells) is then added to the cuvette, and the cell suspension and DNA solutions are gently mixed. Electroporation is performed with a Gene-Pulser apparatus (Bio-Rad). Capacitance and voltage are set at 960 μF and 250-300 V, respectively. As voltage increases, cell survival decreases, but the percentage of surviving cells that stably incorporate the introduced DNA into their genome increases dramatically. Given these parameters, a pulse time of approximately 14-20 mSec should be observed.

[1101] Electroporated cells are maintained at room temperature for approximately 5 min, and the contents of the cuvette are then gently removed with a sterile transfer pipette. The cells are added directly to 10 ml of prewarmed nutrient media (DMEM with 15% calf serum) in a 10 cm dish and incubated at 37 degree C. The following day, the media is aspirated and replaced with 10 ml of fresh media and incubated for a further 16-24 hours.

[1102] The engineered fibroblasts are then injected into the host, either alone or after having been grown to confluence on cytodex 3 microcarrier beads. The fibroblasts now produce the protein product. The fibroblasts can then be introduced into a patient as described above.

### Example 18

[1103] Method of Treatment Using Gene Therapy—In vivo

[1104] Another aspect of the present invention is using in vivo gene therapy methods to treat disorders, diseases and conditions. The gene therapy method relates to the introduction of naked nucleic acid (DNA, RNA, and antisense DNA or RNA) sequences into an animal to increase or decrease the expression of the polypeptide. The polynucleotide of the present invention may be operatively linked to (i.e., associated with) a promoter or any other genetic elements necessary for the expression of the polypeptide by the target tissue. Such gene therapy and delivery techniques and methods are known in the art, see, for example, WO90/11092, WO98/11779; U.S. Pat. Nos. 5,693,622, 5,705,151, 5,580,859; Tabata et al., Cardiovasc. Res. 35(3):470-479 (1997); Chao et al., Pharmacol. Res. 35(6):517-522 (1997); Wolff, Neuromuscul. Disord. 7(5):314-318 (1997); Schwartz et al., Gene Ther. 3(5):405-411 (1996); Tsurumi et al., Circulation 94(12):3281-3290 (1996) (incorporated herein by reference).

[1105] The polynucleotide constructs may be delivered by any method that delivers injectable materials to the cells of an animal, such as, injection into the interstitial space of tissues (heart, muscle, skin, lung, liver, intestine and the like). The polynucleotide constructs can be delivered in a pharmaceutically acceptable liquid or aqueous carrier.

[1106] The term “naked” polynucleotide, DNA or RNA, refers to sequences that are free from any delivery vehicle that acts to assist, promote, or facilitate entry into the cell, including viral sequences, viral particles, liposome formulations, lipofectin or precipitating agents and the like. However, the polynucleotides of the present invention may also be delivered in liposome formulations (such as those taught in Felgner P. L. et al. (1995) Ann. NY Acad. Sci. 772:126-139 and Abdallah B. et al. (1995) Biol. Cell 85(1):1-7) which can be prepared by methods well known to those skilled in the art.

[1107] The polynucleotide vector constructs used in the gene therapy method are preferably constructs that will not integrate into the host genome nor will they contain sequences that allow for replication. Any strong promoter known to those skilled in the art can be used for driving the expression of DNA. Unlike other gene therapy techniques, one major advantage of introducing naked nucleic acid sequences into target cells is the transitory nature of the polynucleotide synthesis in the cells. Studies have shown that non-replicating DNA sequences can be introduced into cells to provide production of the desired polypeptide for periods of up to six months.

[1108] The polynucleotide construct can be delivered to the interstitial space of tissues within an animal, including muscle, skin, brain, lung, liver, spleen, bone marrow, thymus, heart, lymph, blood, bone, cartilage, pancreas, kidney, gall bladder, stomach, intestine, testis, ovary, uterus, rectum, nervous system, eye, gland, and connective tissue. Interstitial space of the tissues comprises the intercellular fluid, mucopolysaccharide matrix among the reticular fibers of organ tissues, elastic fibers in the walls of vessels or chambers, collagen fibers of fibrous tissues, or that same matrix within connective tissue ensheathing muscle cells or in the lacunae of bone. It is similarly the space occupied by the plasma of the circulation and the lymph fluid of the lymphatic channels. Delivery to the interstitial space of muscle tissue is preferred for the reasons discussed below. They may be conveniently delivered by injection into the tissues comprising these cells. They are preferably delivered to and expressed in persistent, non-dividing cells which are differentiated, although delivery and expression may be achieved in non-differentiated or less completely differentiated cells, such as, for example, stem cells of blood or skin fibroblasts. In vivo muscle cells are particularly competent in their ability to take up and express polynucleotides.

[1109] For the naked polynucleotide injection, an effective dosage amount of DNA or RNA will be in the range of from about 0.05 g/kg body weight to about 50 mg/kg body weight. Preferably the dosage will be from about 0.005 mg/kg to about 20 mg/kg and more preferably from about 0.05 mg/kg to about 5 mg/kg. Of course, as the artisan of ordinary skill will appreciate, this dosage will vary according to the tissue site of injection. The appropriate and effective dosage of nucleic acid sequence can readily be determined by those of ordinary skill in the art and may depend on the condition being treated and the route of administration. The preferred route of administration is by the parenteral route of injection into the interstitial space of tissues. However, other parenteral routes may also be used, such as, inhalation of an aerosol formulation particularly for delivery to lungs or bronchial tissues, throat or mucous membranes of the nose. In addition, naked polynucleotide constructs can be delivered to arteries during angioplasty by the catheter used in the procedure.

[1110] The dose response effects of injected polynucleotide in muscle in vivo is determined as follows. Suitable template DNA for production of mRNA coding for polypeptide of the present invention is prepared in accordance with a standard recombinant DNA methodology. The template DNA, which may be either circular or linear, is either used as naked DNA or complexed with liposomes. The quadriceps muscles of mice are then injected with various amounts of the template DNA.

[1111] Five to six week old female and male Balb/C mice are anesthetized by intraperitoneal injection with 0.3 ml of 2.5% Avertin. A 1.5 cm incision is made on the anterior thigh, and the quadriceps muscle is directly visualized. The template DNA is injected in 0.1 ml of carrier in a 1 cc syringe through a 27 gauge needle over one minute, approximately 0.5 cm from the distal insertion site of the muscle into the knee and about 0.2 cm deep. A suture is placed over the injection site for future localization, and the skin is closed with stainless steel clips.

[1112] After an appropriate incubation time (e.g., 7 days) muscle extracts are prepared by excising the entire quadriceps. Every fifth 15 um cross-section of the individual quadriceps muscles is histochemically stained for protein expression. A time course for protein expression may be done in a similar fashion except that quadriceps from different mice are harvested at different times. Persistence of DNA in muscle following injection may be determined by Southern blot analysis after preparing total cellular DNA and HIRT supernatants from injected and control mice. The results of the above experimentation in mice can be used to extrapolate proper dosages and other treatment parameters in humans and other animals using naked DNA.

### Example 19

[1113] Transgenic Animals

[1114] The polypeptides of the invention can also be expressed in transgenic animals. Animals of any species, including, but not limited to, mice, rats, rabbits, hamsters, guinea pigs, pigs, micro-pigs, goats, sheep, cows and non-human primates, e.g., baboons, monkeys, and chimpanzees may be used to generate transgenic animals. In a specific embodiment, techniques described herein or otherwise known in the art, are used to express polypeptides of the invention in humans, as part of a gene therapy protocol.

[1115] Any technique known in the art may be used to introduce the transgene (i.e., polynucleotides of the invention) into animals to produce the founder lines of transgenic animals. Such techniques include, but are not limited to, pronuclear microinjection (Paterson et al., Appl. Microbiol. Biotechnol. 40:691-698 (1994); Carver et al., Biotechnology (NY) 11:1263-1270 (1993); Wright et al., Biotechnology (NY) 9:830-834 (1991); and Hoppe et al., U.S. Pat. No. 4,873,191 (1989)); retrovirus mediated gene transfer into germ lines (Van der Putten et al., Proc. Natl. Acad. Sci., USA 82:6148-6152 (1985)), blastocysts or embryos; gene targeting in embryonic stem cells (Thompson et al., Cell 56:313-321 (1989)); electroporation of cells or embryos (Lo, 1983, Mol Cell. Biol. 3:1803-1814 (1983)); introduction of the polynucleotides of the invention using a gene gun (see, e.g., Ulmer et al., Science 259:1745 (1993); introducing nucleic acid constructs into embryonic pleuripotent stem cells and transferring the stem cells back into the blastocyst; and sperm-mediated gene transfer (Lavitrano et al., Cell 57:717-723 (1989); etc. For a review of such techniques, see Gordon, “Transgenic Animals,” Intl. Rev. Cytol. 115:171-229 (1989), which is incorporated by reference herein in its entirety.

[1116] Any technique known in the art may be used to produce transgenic clones containing polynucleotides of the invention, for example, nuclear transfer into enucleated oocytes of nuclei from cultured embryonic, fetal, or adult cells induced to quiescence (Campell et al., Nature 380:64-66 (1996); Wilmut et al., Nature 385:810-813 (1997)).

[1117] The present invention provides for transgenic animals that carry the transgene in all their cells, as well as animals which carry the transgene in some, but not all their cells, i.e., mosaic animals or chimeric. The transgene may be integrated as a single transgene or as multiple copies such as in concatamers, e.g., head-to-head tandems or head-to-tail tandems. The transgene may also be selectively introduced into and activated in a particular cell type by following, for example, the teaching of Lasko et al. (Lasko et al., Proc. Natl. Acad. Sci. USA 89:6232-6236 (1992)). The regulatory sequences required for such a cell-type specific activation will depend upon the particular cell type of interest, and will be apparent to those of skill in the art. When it is desired that the polynucleotide transgene be integrated into the chromosomal site of the endogenous gene, gene targeting is preferred. Briefly, when such a technique is to be utilized, vectors containing some nucleotide sequences homologous to the endogenous gene are designed for the purpose of integrating, via homologous recombination with chromosomal sequences, into and disrupting the function of the nucleotide sequence of the endogenous gene. The transgene may also be selectively introduced into a particular cell type, thus inactivating the endogenous gene in only that cell type, by following, for example, the teaching of Gu et al. (Gu et al., Science 265:103-106 (1994)). The regulatory sequences required for such a cell-type specific inactivation will depend upon the particular cell type of interest, and will be apparent to those of skill in the art.

[1118] Once transgenic animals have been generated, the expression of the recombinant gene may be assayed utilizing standard techniques. Initial screening may be accomplished by Southern blot analysis or PCR techniques to analyze animal tissues to verify that integration of the transgene has taken place. The level of mRNA expression of the transgene in the tissues of the transgenic animals may also be assessed using techniques which include, but are not limited to, Northern blot analysis of tissue samples obtained from the animal, in situ hybridization analysis, and reverse transcriptase-PCR (rt-PCR). Samples of transgenic gene-expressing tissue may also be evaluated immunocytochemically or immunohistochemically using antibodies specific for the transgene product.

[1119] Once the founder animals are produced, they may be bred, inbred, outbred, or crossbred to produce colonies of the particular animal. Examples of such breeding strategies include, but are not limited to: outbreeding of founder animals with more than one integration site in order to establish separate lines; inbreeding of separate lines in order to produce compound transgenics that express the transgene at higher levels because of the effects of additive expression of each transgene; crossing of heterozygous transgenic animals to produce animals homozygous for a given integration site in order to both augment expression and eliminate the need for screening of animals by DNA analysis; crossing of separate homozygous lines to produce compound heterozygous or homozygous lines; and breeding to place the transgene on a distinct background that is appropriate for an experimental model of interest.

[1120] Transgenic animals of the invention have uses which include, but are not limited to, animal model systems useful in elaborating the biological function of polypeptides of the present invention, studying conditions and/or disorders associated with aberrant expression, and in screening for compounds effective in ameliorating such conditions and/or disorders.

### Example 20

[1121] Knock-Out Animals

[1122] Endogenous gene expression can also be reduced by inactivating or “knocking out” the gene and/or its promoter using targeted homologous recombination. (See e.g., Smithies et al., Nature 317:230-234 (1985); Thomas & Capecchi, Cell 51:503-512 (1987); Thompson et al., Cell 5:313-321 (1989); each of which is incorporated by reference herein in its entirety.) For example, a mutant, non-functional polynucleotide of the invention (or a completely unrelated DNA sequence) flanked by DNA homologous to the endogenous polynucleotide sequence (either the coding regions or regulatory regions of the gene) can be used, with or without a selectable marker and/or a negative selectable marker, to transfect cells that express polypeptides of the invention in vivo. In another embodiment, techniques known in the art are used to generate knockouts in cells that contain, but do not express the gene of interest. Insertion of the DNA construct, via targeted homologous recombination, results in inactivation of the targeted gene. Such approaches are particularly suited in research and agricultural fields where modifications to embryonic stem cells can be used to generate animal offspring with an inactive targeted gene (e.g., see Thomas & Capecchi 1987 and Thompson 1989, supra). However this approach can be routinely adapted for use in humans provided the recombinant DNA constructs are directly administered or targeted to the required site in vivo using appropriate viral vectors that will be apparent to those of skill in the art.

[1123] In further embodiments of the invention, cells that are genetically engineered to express the polypeptides of the invention, or alternatively, that are genetically engineered not to express the polypeptides of the invention (e.g., knockouts) are administered to a patient in vivo. Such cells may be obtained from the patient (i.e., animal, including human) or an MHC compatible donor and can include, but are not limited to fibroblasts, bone marrow cells, blood cells (e.g., lymphocytes), adipocytes, muscle cells, endothelial cells etc. The cells are genetically engineered in vitro using recombinant DNA techniques to introduce the coding sequence of polypeptides of the invention into the cells, or alternatively, to disrupt the coding sequence and/or endogenous regulatory sequence associated with the polypeptides of the invention, e.g., by transduction (using viral vectors, and preferably vectors that integrate the transgene into the cell genome) or transfection procedures, including, but not limited to, the use of plasmids, cosmids, YACs, naked DNA, electroporation, liposomes, etc. The coding sequence of the polypeptides of the invention can be placed under the control of a strong constitutive or inducible promoter or promoter/enhancer to achieve expression, and preferably secretion, of the polypeptides of the invention. The engineered cells which express and preferably secrete the polypeptides of the invention can be introduced into the patient systemically, e.g., in the circulation, or intraperitoneally.

[1124] Alternatively, the cells can be incorporated into a matrix and implanted in the body, e.g., genetically engineered fibroblasts can be implanted as part of a skin graft; genetically engineered endothelial cells can be implanted as part of a lymphatic or vascular graft. (See, for example, Anderson et al. U.S. Pat. No. 5,399,349; and Mulligan & Wilson, U.S. Pat. No. 5,460,959 each of which is incorporated by reference herein in its entirety).

[1125] When the cells to be administered are non-autologous or non-MHC compatible cells, they can be administered using well known techniques which prevent the development of a host immune response against the introduced cells. For example, the cells may be introduced in an encapsulated form which, while allowing for an exchange of components with the immediate extracellular environment, does not allow the introduced cells to be recognized by the host immune system.

[1126] Transgenic and “knock-out” animals of the invention have uses which include, but are not limited to, animal model systems useful in elaborating the biological function of polypeptides of the present invention, studying conditions and/or disorders associated with aberrant expression, and in screening for compounds effective in ameliorating such conditions and/or disorders.

### Example 21

[1127] Assays Detecting Stimulation or Inhibition of B Cell Proliferation and Differentiation

[1128] Generation of functional humoral immune responses requires both soluble and cognate signaling between B-lineage cells and their microenvironment. Signals may impart a positive stimulus that allows a B-lineage cell to continue its programmed development, or a negative stimulus that instructs the cell to arrest its current developmental pathway. To date, numerous stimulatory and inhibitory signals have been found to influence B cell responsiveness including IL-2, IL-4, IL-5, IL-6, IL-7, IL10, IL-13, IL-14 and IL-15. Interestingly, these signals are by themselves weak effectors but can, in combination with various co-stimulatory proteins, induce activation, proliferation, differentiation, homing, tolerance and death among B cell populations.

[1129] One of the best studied classes of B-cell co-stimulatory proteins is the TNF-superfamily. Within this family CD40, CD27, and CD30 along with their respective ligands CD154, CD70, and CD153 have been found to regulate a variety of immune responses. Assays which allow for the detection and/or observation of the proliferation and differentiation of these B-cell populations and their precursors are valuable tools in determining the effects various proteins may have on these B-cell populations in terms of proliferation and differentiation. Listed below are two assays designed to allow for the detection of the differentiation, proliferation, or inhibition of B-cell populations and their precursors.

[1130] In vitro Assay—Agonists or antagonists of the invention can be assessed for its ability to induce activation, proliferation, differentiation or inhibition and/or death in B-cell populations and their precursors. The activity of the agonists or antagonists of the invention on purified human tonsillar B cells, measured qualitatively over the dose range from 0.1 to 10,000 ng/mL, is assessed in a standard B-lymphocyte co-stimulation assay in which purified tonsillar B cells are cultured in the presence of either formalin-fixed Staphylococcus aureus Cowan I (SAC) or immobilized anti-human IgM antibody as the priming agent. Second signals such as IL-2 and IL-15 synergize with SAC and IgM crosslinking to elicit B cell proliferation as measured by tritiated-thymidine incorporation. Novel synergizing agents can be readily identified using this assay. The assay involves isolating human tonsillar B cells by magnetic bead (MACS) depletion of CD3-positive cells. The resulting cell population is greater than 95% B cells as assessed by expression of CD45R(B220).

[1131] Various dilutions of each sample are placed into individual wells of a 96-well plate to which are added 10⁵ B-cells suspended in culture medium (RPMI 1640 containing 10% FBS, 5×10⁻⁵M 2ME, 100 U/ml penicillin, 10 ug/ml streptomycin, and 10⁻⁵ dilution of SAC) in a total volume of 150 ul. Proliferation or inhibition is quantitated by a 20 h pulse (1 uCi/well) with 3H-thymidine (6.7 Ci/mM) beginning 72 h post factor addition. The positive and negative controls are IL2 and medium respectively.

[1132] In vivo Assay—BALB/c mice are injected (i.p.) twice per day with buffer only, or 2 mg/Kg of agonists or antagonists of the invention, or truncated forms thereof. Mice receive this treatment for 4 consecutive days, at which time they are sacrificed and various tissues and serum collected for analyses. Comparison of H&E sections from normal spleens and spleens treated with agonists or antagonists of the invention identify the results of the activity of the agonists or antagonists on spleen cells, such as the diffusion of peri-arterial lymphatic sheaths, and/or significant increases in the nucleated cellularity of the red pulp regions, which may indicate the activation of the differentiation and proliferation of B-cell populations. Immunohistochemical studies using a B cell marker, anti-CD45R(B220), are used to determine whether any physiological changes to splenic cells, such as splenic disorganization, are due to increased B-cell representation within loosely defined B-cell zones that infiltrate established T-cell regions.

[1133] Flow cytometric analyses of the spleens from mice treated with agonist or antagonist is used to indicate whether the agonists or antagonists specifically increases the proportion of ThB+, CD45R(B220)dull B cells over that which is observed in control mice.

[1134] Likewise, a predicted consequence of increased mature B-cell representation in vivo is a relative increase in serum Ig titers. Accordingly, serum IgM and IgA levels are compared between buffer and agonists or antagonists-treated mice.

[1135] The studies described in this example tested activity of agonists or antagonists of the invention. However, one skilled in the art could easily modify the exemplified studies to test the activity of polynucleotides or polypeptides of the invention (e.g., gene therapy).

### Example 22

[1136] T Cell Proliferation Assay

[1137] A CD3-induced proliferation assay is performed on PBMCs and is measured by the uptake of ³H-thymidine. The assay is performed as follows. Ninety-six well plates are coated with 100 μl/well of mAb to CD3 (HIT3a, Pharmingen) or isotype-matched control mAb (B33.1) overnight at 4 degrees C. (1 μg/ml in 0.05M bicarbonate buffer, pH 9.5), then three times with PBS. PBMC are isolated by F/H gradient centrifugation from peripheral blood and added to quadruplicate wells (5×10⁴/well) of mAb coated plates in RPMI containing 10% FCS and P/S in the presence of varying concentrations of agonists or antagonists of the invention (total volume 200 ul). Relevant protein buffer and medium alone are controls. After 48 hr. culture at 37 degrees C., plates are spun for 2 min. at 1000 rpm and 100 μl of supernatant is removed and stored −20 degrees C. for measurement of IL-2 (or other cytokines) if effect on proliferation is observed. Wells are supplemented with 100 ul of medium containing 0.5 uCi of ³H-thymidine and cultured at 37 degrees C. for 18-24 hr. Wells are harvested and incorporation of ³H-thymidine used as a measure of proliferation. Anti-CD3 alone is the positive control for proliferation. IL-2 (100 U/ml) is also used as a control which enhances proliferation. Control antibody which does not induce proliferation of T cells is used as the negative control for the effects of agonists or antagonists of the invention.

[1138] The studies described in this example tested activity of agonists or antagonists of the invention. However, one skilled in the art could easily modify the exemplified studies to test the activity of polynucleotides or polypeptides of the invention (e.g., gene therapy).

### Example 23

[1139] Effect of Agonists or Antagonists of the Invention on the Expression of MHC Class II, Costimulatory and Adhesion Molecules and Cell Differentiation of Monocytes and Monocyte-Derived Human Dendritic Cells

[1140] Dendritic cells are generated by the expansion of proliferating precursors found in the peripheral blood: adherent PBMC or elutriated monocytic fractions are cultured for 7-10 days with GM-CSF (50 ng/ml) and IL-4 (20 ng/ml). These dendritic cells have the characteristic phenotype of immature cells (expression of CD1, CD80, CD86, CD40 and MHC class II antigens). Treatment with activating factors, such as TNF-α, causes a rapid change in surface phenotype (increased expression of MHC class I and II, costimulatory and adhesion molecules, downregulation of FCγRII, upregulation of CD83). These changes correlate with increased antigen-presenting capacity and with functional maturation of the dendritic cells.

[1141] FACS analysis of surface antigens is performed as follows. Cells are treated 1-3 days with increasing concentrations of agonist or antagonist of the invention or LPS (positive control), washed with PBS containing 1% BSA and 0.02 mM sodium azide, and then incubated with 1:20 dilution of appropriate FITC- or PE-labeled monoclonal antibodies for 30 minutes at 4 degrees C. After an additional wash, the labeled cells are analyzed by flow cytometry on a FACScan (Becton Dickinson).

[1142] Effect on the production of cytokines. Cytokines generated by dendritic cells, in particular IL-12, are important in the initiation of T-cell dependent immune responses. IL-12 strongly influences the development of Th1 helper T-cell immune response, and induces cytotoxic T and NK cell function. An ELISA is used to measure the IL-12 release as follows. Dendritic cells (10⁶/ml) are treated with increasing concentrations of agonists or antagonists of the invention for 24 hours. LPS (100 ng/ml) is added to the cell culture as positive control. Supernatants from the cell cultures are then collected and analyzed for IL-12 content using commercial ELISA kit (e.g., R & D Systems (Minneapolis, Minn.)). The standard protocols provided with the kits are used.

[1143] Effect on the expression of MHC Class II, costimulatory and adhesion molecules. Three major families of cell surface antigens can be identified on monocytes: adhesion molecules, molecules involved in antigen presentation, and Fc receptor. Modulation of the expression of MHC class II antigens and other costimulatory molecules, such as B7 and ICAM-1, may result in changes in the antigen presenting capacity of monocytes and ability to induce T cell activation. Increased expression of Fc receptors may correlate with improved monocyte cytotoxic activity, cytokine release and phagocytosis.

[1144] FACS analysis is used to examine the surface antigens as follows. Monocytes are treated 1-5 days with increasing concentrations of agonists or antagonists of the invention or LPS (positive control), washed with PBS containing 1% BSA and 0.02 mM sodium azide, and then incubated with 1:20 dilution of appropriate FITC- or PE-labeled monoclonal antibodies for 30 minutes at 4 degrees C. After an additional wash, the labeled cells are analyzed by flow cytometry on a FACScan (Becton Dickinson).

[1145] Monocyte activation and/or increased survival. Assays for molecules that activate (or alternatively, inactivate) monocytes and/or increase monocyte survival (or alternatively, decrease monocyte survival) are known in the art and may routinely be applied to determine whether a molecule of the invention functions as an inhibitor or activator of monocytes. Agonists or antagonists of the invention can be screened using the three assays described below. For each of these assays, Peripheral blood mononuclear cells (PBMC) are purified from single donor leukopacks (American Red Cross, Baltimore, Md.) by centrifugation through a Histopaque gradient (Sigma). Monocytes are isolated from PBMC by counterflow centrifugal elutriation.

[1146] Monocyte Survival Assay. Human peripheral blood monocytes progressively lose viability when cultured in absence of serum or other stimuli. Their death results from internally regulated processes (apoptosis). Addition to the culture of activating factors, such as TNF-alpha dramatically improves cell survival and prevents DNA fragmentation. Propidium iodide (PI) staining is used to measure apoptosis as follows. Monocytes are cultured for 48 hours in polypropylene tubes in serum-free medium (positive control), in the presence of 100 ng/ml TNF-alpha (negative control), and in the presence of varying concentrations of the compound to be tested. Cells are suspended at a concentration of 2×10⁶/ml in PBS containing PI at a final concentration of 5 μg/ml, and then incubated at room temperature for 5 minutes before FACScan analysis. PI uptake has been demonstrated to correlate with DNA fragmentation in this experimental paradigm.

[1147] Effect on cytokine release. An important function of monocytes/macrophages is their regulatory activity on other cellular populations of the immune system through the release of cytokines after stimulation. An ELISA to measure cytokine release is performed as follows. Human monocytes are incubated at a density of 5×10⁵ cells/ml with increasing concentrations of agonists or antagonists of the invention and under the same conditions, but in the absence of agonists or antagonists. For IL-12 production, the cells are primed overnight with IFN (100 U/ml) in the presence of agonist or antagonist of the invention. LPS (10 ng/ml) is then added. Conditioned media are collected after 24 h and kept frozen until use. Measurement of TNF-alpha, IL-10, MCP-1 and IL-8 is then performed using a commercially available ELISA kit (e.g., R & D Systems (Minneapolis, Minn.)) and applying the standard protocols provided with the kit.

[1148] Oxidative burst. Purified monocytes are plated in 96-w plate at 2-1×10⁵ cell/well. Increasing concentrations of agonists or antagonists of the invention are added to the wells in a total volume of 0.2 ml culture medium (RPMI 1640+10% FCS, glutamine and antibiotics). After 3 days incubation, the plates are centrifuged and the medium is removed from the wells. To the macrophage monolayers, 0.2 ml per well of phenol red solution (140 mM NaCl, 10 mM potassium phosphate buffer pH 7.0, 5.5 mM dextrose, 0.56 mM phenol red and 19 U/ml of HRPO) is added, together with the stimulant (200 nM PMA). The plates are incubated at 37° C. for 2 hours and the reaction is stopped by adding 20 μl 1N NaOH per well. The absorbance is read at 610 nm. To calculate the amount of H₂O₂ produced by the macrophages, a standard curve of a H₂O₂ solution of known molarity is performed for each experiment.

[1149] The studies described in this example tested activity of agonists or antagonists of the invention. However, one skilled in the art could easily modify the exemplified studies to test the activity of polynucleotides or polypeptides of the invention (e.g., gene therapy).

### Example 24

[1150] Biological Effects of Agonists or Antagonists of the Invention Astrocyte and Neuronal Assays

[1151] Agonists or antagonists of the invention, expressed in Escherichia coli and purified as described above, can be tested for activity in promoting the survival, neurite outgrowth, or phenotypic differentiation of cortical neuronal cells and for inducing the proliferation of glial fibrillary acidic protein immunopositive cells, astrocytes. The selection of cortical cells for the bioassay is based on the prevalent expression of FGF-1 and FGF-2 in cortical structures and on the previously reported enhancement of cortical neuronal survival resulting from FGF-2 treatment. A thymidine incorporation assay, for example, can be used to elucidate an agonist or antagonist of the invention's activity on these cells.

[1152] Moreover, previous reports describing the biological effects of FGF-2 (basic FGF) on cortical or hippocampal neurons in vitro have demonstrated increases in both neuron survival and neurite outgrowth (Walicke et al., “Fibroblast growth factor promotes survival of dissociated hippocampal neurons and enhances neurite extension.” Proc. Natl. Acad. Sci. USA 83:3012-3016. (1986), assay herein incorporated by reference in its entirety). However, reports from experiments done on PC-12 cells suggest that these two responses are not necessarily synonymous and may depend on not only which FGF is being tested but also on which receptor(s) are expressed on the target cells. Using the primary cortical neuronal culture paradigm, the ability of an agonist or antagonist of the invention to induce neurite outgrowth can be compared to the response achieved with FGF-2 using, for example, a thymidine incorporation assay.

[1153] Fibroblast and Endothelial Cell Assays

[1154] Human lung fibroblasts are obtained from Clonetics (San Diego, Calif.) and maintained in growth media from Clonetics. Dermal microvascular endothelial cells are obtained from Cell Applications (San Diego, Calif.). For proliferation assays, the human lung fibroblasts and dermal microvascular endothelial cells can be cultured at 5,000 cells/well in a 96-well plate for one day in growth medium. The cells are then incubated for one day in 0.1% BSA basal medium. After replacing the medium with fresh 0.1% BSA medium, the cells are incubated with the test proteins for 3 days. Alamar Blue (Alamar Biosciences, Sacramento, Calif.) is added to each well to a final concentration of 10%. The cells are incubated for 4 hr. Cell viability is measured by reading in a CytoFluor fluorescence reader. For the PGE₂ assays, the human lung fibroblasts are cultured at 5,000 cells/well in a 96-well plate for one day. After a medium change to 0.1% BSA basal medium, the cells are incubated with FGF-2 or agonists or antagonists of the invention with or without IL-1α for 24 hours. The supernatants are collected and assayed for PGE₂ by EIA kit (Cayman, Ann Arbor, Mich.). For the IL-6 assays, the human lung fibroblasts are cultured at 5,000 cells/well in a 96-well plate for one day. After a medium change to 0.1% BSA basal medium, the cells are incubated with FGF-2 or with or without agonists or antagonists of the invention IL-1α for 24 hours. The supernatants are collected and assayed for IL-6 by ELISA kit (Endogen, Cambridge, Mass.).

[1155] Human lung fibroblasts are cultured with FGF-2 or agonists or antagonists of the invention for 3 days in basal medium before the addition of Alamar Blue to assess effects on growth of the fibroblasts. FGF-2 should show a stimulation at 10-2500 ng/ml which can be used to compare stimulation with agonists or antagonists of the invention.

[1156] Parkinson Models.

[1157] The loss of motor function in Parkinson's disease is attributed to a deficiency of striatal dopamine resulting from the degeneration of the nigrostriatal dopaminergic projection neurons. An animal model for Parkinson's that has been extensively characterized involves the systemic administration of 1-methyl-4 phenyl 1,2,3,6-tetrahydropyridine (MPTP). In the CNS, MPTP is taken-up by astrocytes and catabolized by monoamine oxidase B to 1-methyl-4-phenyl pyridine (MPP⁺) and released. Subsequently, MPP⁺ is actively accumulated in dopaminergic neurons by the high-affinity reuptake transporter for dopamine. MPP⁺ is then concentrated in mitochondria by the electrochemical gradient and selectively inhibits nicotidamide adenine disphosphate: ubiquinone oxidoreductionase (complex I), thereby interfering with electron transport and eventually generating oxygen radicals.

[1158] It has been demonstrated in tissue culture paradigms that FGF-2 (basic FGF) has trophic activity towards nigral dopaminergic neurons (Ferrari et al., Dev. Biol. 1989). Recently, Dr. Unsicker's group has demonstrated that administering FGF-2 in gel foam implants in the striatum results in the near complete protection of nigral dopaminergic neurons from the toxicity associated with MPTP exposure (Otto and Unsicker, J. Neuroscience, 1990).

[1159] Based on the data with FGF-2, agonists or antagonists of the invention can be evaluated to determine whether it has an action similar to that of FGF-2 in enhancing dopaminergic neuronal survival in vitro and it can also be tested in vivo for protection of dopaminergic neurons in the striatum from the damage associated with MPTP treatment. The potential effect of an agonist or antagonist of the invention is first examined in vitro in a dopaminergic neuronal cell culture paradigm. The cultures are prepared by dissecting the midbrain floor plate from gestation day 14 Wistar rat embryos. The tissue is dissociated with trypsin and seeded at a density of 200,000 cells/cm² on polyorthinine-laminin coated glass coverslips. The cells are maintained in Dulbecco's Modified Eagle's medium and F12 medium containing hormonal supplements (N1). The cultures are fixed with paraformaldehyde after 8 days in vitro and are processed for tyrosine hydroxylase, a specific marker for dopaminergic neurons, immunohistochemical staining. Dissociated cell cultures are prepared from embryonic rats. The culture medium is changed every third day and the factors are also added at that time.

[1160] Since the dopaminergic neurons are isolated from animals at gestation day 14, a developmental time which is past the stage when the dopaminergic precursor cells are proliferating, an increase in the number of tyrosine hydroxylase immiunopositive neurons would represent an increase in the number of dopaminergic neurons surviving in vitro. Therefore, if an agonist or antagonist of the invention acts to prolong the survival of dopaminergic neurons, it would suggest that the agonist or antagonist may be involved in Parkinson's Disease.

[1161] The studies described in this example tested activity of agonists or antagonists of the invention. However, one skilled in the art could easily modify the exemplified studies to test the activity of polynucleotides or polypeptides of the invention (e.g., gene therapy).

### Example 25

[1162] The Effect of Agonists or Antagonists of the Invention on the Growth of Vascular Endothelial Cells

[1163] On day 1, human umbilical vein endothelial cells (HUVEC) are seeded at 2-5×10⁴ cells/35 mm dish density in M199 medium containing 4% fetal bovine serum (FBS), 16 units/ml heparin, and 50 units/ml endothelial cell growth supplements (ECGS, Biotechnique, Inc.). On day 2, the medium is replaced with M199 containing 10% FBS, 8 units/ml heparin. An agonist or antagonist of the invention, and positive controls, such as VEGF and basic FGF (bFGF) are added, at varying concentrations. On days 4 and 6, the medium is replaced. On day 8, cell number is determined with a Coulter Counter.

[1164] An increase in the number of HUVEC cells indicates that the compound of the invention may proliferate vascular endothelial cells, while a decrease in the number of HUVEC cells indicates that the compound of the invention inhibits vascular endothelial cells.

[1165] The studies described in this example tested activity of a polypeptide of the invention. However, one skilled in the art could easily modify the exemplified studies to test the activity of polynucleotides (e.g., gene therapy), agonists, and/or antagonists of the invention.

### Example 26

[1166] Rat Corneal Wound Healing Model

[1167] This animal model shows the effect of an agonist or antagonist of the invention on neovascularization. The experimental protocol includes:

[1168] (a) Making a 1-1.5 mm long incision from the center of cornea into the stromal layer.

[1169] (b) Inserting a spatula below the lip of the incision facing the outer corner of the eye.

[1170] (c) Making a pocket (its base is 1-1.5 mm form the edge of the eye).

[1171] (d) Positioning a pellet, containing 50 ng-5 ug of an agonist or antagonist of the invention, within the pocket.

[1172] Treatment with an agonist or antagonist of the invention can also be applied topically to the corneal wounds in a dosage range of 20 mg -500 mg (daily treatment for five days).

[1173] The studies described in this example tested activity of agonists or antagonists of the invention. However, one skilled in the art could easily modify the exemplified studies to test the activity of polynucleotides or polypeptides of the invention (e.g., gene therapy).

### Example 27

[1174] Diabetic Mouse and Glucocorticoid-Impaired Wound Healing Models

[1175] Diabetic db+/db+ Mouse Model.

[1176] To demonstrate that an agonist or antagonist of the invention accelerates the healing process, the genetically diabetic mouse model of wound healing is used. The full thickness wound healing model in the db+/db+ mouse is a well characterized, clinically relevant and reproducible model of impaired wound healing. Healing of the diabetic wound is dependent on formation of granulation tissue and re-epithelialization rather than contraction (Gartner, M. H. et al., J. Surg. Res. 52:389 (1992); Greenhalgh, D. G. et al., Am. J. Pathol. 136:1235 (1990)).

[1177] The diabetic animals have many of the characteristic features observed in Type II diabetes mellitus. Homozygous (db+/db+) mice are obese in comparison to their normal heterozygous (db+/+m) littermates. Mutant diabetic (db+/db+) mice have a single autosomal recessive mutation on chromosome 4 (db+) (Coleman et al. Proc. Natl. Acad. Sci. USA 77:283-293 (1982)). Animals show polyphagia, polydipsia and polyuria. Mutant diabetic mice (db+/db+) have elevated blood glucose, increased or normal insulin levels, and suppressed cell-mediated immunity (Mandel et al., J. Immunol. 120:1375 (1978); Debray-Sachs, M. et al., Clin. Exp. Immunol. 51(1):1-7 (1983); Leiter et al., Am. J. of Pathol. 114:46-55 (1985)). Peripheral neuropathy, myocardial complications, and microvascular lesions, basement membrane thickening and glomerular filtration abnormalities have been described in these animals (Norido, F. et al., Exp. Neurol. 83(2):221-232 (1984); Robertson et al., Diabetes 29(1):60-67 (1980); Giacomelli et al., Lab Invest. 40(4):460-473 (1979); Coleman, D. L., Diabetes 31 (Suppl):1-6 (1982)). These homozygous diabetic mice develop hyperglycemia that is resistant to insulin analogous to human type II diabetes (Mandel et al., J. Immunol. 120:1375-1377 (1978)).

[1178] The characteristics observed in these animals suggests that healing in this model may be similar to the healing observed in human diabetes (Greenhalgh, et al., Am. J. of Pathol. 136:1235-1246 (1990)).

[1179] Genetically diabetic female C57BL/KsJ (db+/db+) mice and their non-diabetic (db+/+m) heterozygous littermates are used in this study (Jackson Laboratories). The animals are purchased at 6 weeks of age and are 8 weeks old at the beginning of the study. Animals are individually housed and received food and water ad libitum. All manipulations are performed using aseptic techniques. The experiments are conducted according to the rules and guidelines of Human Genome Sciences, Inc. Institutional Animal Care and Use Committee and the Guidelines for the Care and Use of Laboratory Animals.

[1180] Wounding protocol is performed according to previously reported methods (Tsuboi, R. and Rifkin, D. B., J. Exp. Med. 172:245-251 (1990)). Briefly, on the day of wounding, animals are anesthetized with an intraperitoneal injection of Avertin (0.01 mg/mL), 2,2,2-tribromoethanol and 2-methyl-2-butanol dissolved in deionized water. The dorsal region of the animal is shaved and the skin washed with 70% ethanol solution and iodine. The surgical area is dried with sterile gauze prior to wounding. An 8 mm full-thickness wound is then created using a Keyes tissue punch. Immediately following wounding, the surrounding skin is gently stretched to eliminate wound expansion. The wounds are left open for the duration of the experiment. Application of the treatment is given topically for 5 consecutive days commencing on the day of wounding. Prior to treatment, wounds are gently cleansed with sterile saline and gauze sponges.

[1181] Wounds are visually examined and photographed at a fixed distance at the day of surgery and at two day intervals thereafter. Wound closure is determined by daily measurement on days 1-5 and on day 8. Wounds are measured horizontally and vertically using a calibrated Jameson caliper. Wounds are considered healed if granulation tissue is no longer visible and the wound is covered by a continuous epithelium.

[1182] An agonist or antagonist of the invention is administered using at a range different doses, from 4 mg to 500 mg per wound per day for 8 days in vehicle. Vehicle control groups received 50 mL of vehicle solution.

[1183] Animals are euthanized on day 8 with an intraperitoneal injection of sodium pentobarbital (300 mg/kg). The wounds and surrounding skin are then harvested for histology and immunohistochemistry. Tissue specimens are placed in 10% neutral buffered formalin in tissue cassettes between biopsy sponges for further processing.

[1184] Three groups of 10 animals each (5 diabetic and 5 non-diabetic controls) are evaluated: 1) Vehicle placebo control, 2) untreated group, and 3) treated group.

[1185] Wound closure is analyzed by measuring the area in the vertical and horizontal axis and obtaining the total square area of the wound. Contraction is then estimated by establishing the differences between the initial wound area (day 0) and that of post treatment (day 8). The wound area on day 1 is 64 mm², the corresponding size of the dermal punch. Calculations are made using the following formula:

[Open area on day 8]−[Open area on day 1]/[Open area on day 1]

[1186] Specimens are fixed in 10% buffered formalin and paraffin embedded blocks are sectioned perpendicular to the wound surface (5 mm) and cut using a Reichert-Jung microtome. Routine hematoxylin-eosin (H&E) staining is performed on cross-sections of bisected wounds. Histologic examination of the wounds are used to assess whether the healing process and the morphologic appearance of the repaired skin is altered by treatment with an agonist or antagonist of the invention. This assessment included verification of the presence of cell accumulation, inflammatory cells, capillaries, fibroblasts, re-epithelialization and epidermal maturity (Greenhalgh, D. G. et al., Am. J. Pathol. 136:1235 (1990)). A calibrated lens micrometer is used by a blinded observer.

[1187] Tissue sections are also stained immunohistochemically with a polyclonal rabbit anti-human keratin antibody using ABC Elite detection system. Human skin is used as a positive tissue control while non-immune IgG is used as a negative control. Keratinocyte growth is determined by evaluating the extent of reepithelialization of the wound using a calibrated lens micrometer.

[1188] Proliferating cell nuclear antigen/cyclin (PCNA) in skin specimens is demonstrated by using anti-PCNA antibody (1:50) with an ABC Elite detection system. Human colon cancer served as a positive tissue control and human brain tissue is used as a negative tissue control. Each specimen included a section with omission of the primary antibody and substitution with non-immune mouse IgG. Ranking of these sections is based on the extent of proliferation on a scale of 0-8, the lower side of the scale reflecting slight proliferation to the higher side reflecting intense proliferation.

[1189] Experimental data are analyzed using an unpaired t test. A p value of <0.05 is considered significant.

[1190] Steroid Impaired Rat Model

[1191] The inhibition of wound healing by steroids has been well documented in various in vitro and in vivo systems (Wahl, Glucocorticoids and Wound healing. In: Anti-Inflammatory Steroid Action: Basic and Clinical Aspects. 280-302 (1989); Wahlet al., J. Immunol. 115: 476-481 (1975); Werb et al., J. Exp. Med. 147:1684-1694 (1978)). Glucocorticoids retard wound healing by inhibiting angiogenesis, decreasing vascular permeability (Ebert et al., An. Intern. Med. 37:701-705 (1952)), fibroblast proliferation, and collagen synthesis (Beck et al., Growth Factors. 5: 295-304 (1991); Haynes et al., J. Clin. Invest. 61: 703-797 (1978)) and producing a transient reduction of circulating monocytes (Haynes et al., J. Clin. Invest. 61: 703-797 (1978); Wahl, “Glucocorticoids and wound healing”, In: Antiinflammatory Steroid Action: Basic and Clinical Aspects, Academic Press, New York, pp. 280-302 (1989)). The systemic administration of steroids to impaired wound healing is a well establish phenomenon in rats (Beck et al., Growth Factors. 5: 295-304 (1991); Haynes et al., J. Clin. Invest. 61: 703-797 (1978); Wahl, “Glucocorticoids and wound healing”, In: Antiinflammatory Steroid Action: Basic and Clinical Aspects, Academic Press, New York, pp. 280-302 (1989); Pierce et al., Proc. Natl. Acad. Sci. USA 86: 2229-2233 (1989)).

[1192] To demonstrate that an agonist or antagonist of the invention can accelerate the healing process, the effects of multiple topical applications of the agonist or antagonist on full thickness excisional skin wounds in rats in which healing has been impaired by the systemic administration of methylprednisolone is assessed.

[1193] Young adult male Sprague Dawley rats weighing 250-300 g (Charles River Laboratories) are used in this example. The animals are purchased at 8 weeks of age and are 9 weeks old at the beginning of the study. The healing response of rats is impaired by the systemic administration of methylprednisolone (17 mg/kg/rat intramuscularly) at the time of wounding. Animals are individually housed and received food and water ad libitum. All manipulations are performed using aseptic techniques. This study is conducted according to the rules and guidelines of Human Genome Sciences, Inc. Institutional Animal Care and Use Committee and the Guidelines for the Care and Use of Laboratory Animals.

[1194] The wounding protocol is followed according to section A, above. On the day of wounding, animals are anesthetized with an intramuscular injection of ketamine (50 mg/kg) and xylazine (5 mg/kg). The dorsal region of the animal is shaved and the skin washed with 70% ethanol and iodine solutions. The surgical area is dried with sterile gauze prior to wounding. An 8 mm full-thickness wound is created using a Keyes tissue punch. The wounds are left open for the duration of the experiment. Applications of the testing materials are given topically once a day for 7 consecutive days commencing on the day of wounding and subsequent to methylprednisolone administration. Prior to treatment, wounds are gently cleansed with sterile saline and gauze sponges.

[1195] Wounds are visually examined and photographed at a fixed distance at the day of wounding and at the end of treatment. Wound closure is determined by daily measurement on days 1-5 and on day 8. Wounds are measured horizontally and vertically using a calibrated Jameson caliper. Wounds are considered healed if granulation tissue is no longer visible and the wound is covered by a continuous epithelium.

[1196] The agonist or antagonist of the invention is administered using at a range different doses, from 4 mg to 500 mg per wound per day for 8 days in vehicle. Vehicle control groups received 50 mL of vehicle solution.

[1197] Animals are euthanized on day 8 with an intraperitoneal injection of sodium pentobarbital (300 mg/kg). The wounds and surrounding skin are then harvested for histology. Tissue specimens are placed in 10% neutral buffered formalin in tissue cassettes between biopsy sponges for further processing.

[1198] Three groups of 10 animals each (5 with methylprednisolone and 5 without glucocorticoid) are evaluated: 1) Untreated group 2) Vehicle placebo control 3) treated groups.

[1199] Wound closure is analyzed by measuring the area in the vertical and horizontal axis and obtaining the total area of the wound. Closure is then estimated by establishing the differences between the initial wound area (day 0) and that of post treatment (day 8). The wound area on day 1 is 64 mm², the corresponding size of the dermal punch. Calculations are made using the following formula:

[Open area on day 8]−[Open area on day 1]/[Open area on day 1]

[1200] Specimens are fixed in 10% buffered formalin and paraffin embedded blocks are sectioned perpendicular to the wound surface (5 mm) and cut using an Olympus microtome. Routine hematoxylin-eosin (H&E) staining is performed on cross-sections of bisected wounds. Histologic examination of the wounds allows assessment of whether the healing process and the morphologic appearance of the repaired skin is improved by treatment with an agonist or antagonist of the invention. A calibrated lens micrometer is used by a blinded observer to determine the distance of the wound gap.

[1201] Experimental data are analyzed using an unpaired t test. A p value of <0.05 is considered significant.

[1202] The studies described in this example tested activity of agonists or antagonists of the invention. However, one skilled in the art could easily modify the exemplified studies to test the activity of polynucleotides or polypeptides of the invention (e.g., gene therapy).

### Example 28

[1203] Lymphadema Animal Model

[1204] The purpose of this experimental approach is to create an appropriate and consistent lymphedema model for testing the therapeutic effects of an agonist or antagonist of the invention in lymphangiogenesis and re-establishment of the lymphatic circulatory system in the rat hind limb. Effectiveness is measured by swelling volume of the affected limb, quantification of the amount of lymphatic vasculature, total blood plasma protein, and histopathology. Acute lymphedema is observed for 7-10 days. Perhaps more importantly, the chronic progress of the edema is followed for up to 3-4 weeks.

[1205] Prior to beginning surgery, blood sample is drawn for protein concentration analysis. Male rats weighing approximately ˜350 g are dosed with Pentobarbital. Subsequently, the right legs are shaved from knee to hip. The shaved area is swabbed with gauze soaked in 70% EtOH. Blood is drawn for serum total protein testing. Circumference and volumetric measurements are made prior to injecting dye into paws after marking 2 measurement levels (0.5 cm above heel, at mid-pt of dorsal paw). The intradermal dorsum of both right and left paws are injected with 0.05 ml of 1% Evan's Blue. Circumference and volumetric measurements are then made following injection of dye into paws.

[1206] Using the knee joint as a landmark, a mid-leg inguinal incision is made circumferentially allowing the femoral vessels to be located. Forceps and hemostats are used to dissect and separate the skin flaps. After locating the femoral vessels, the lymphatic vessel that runs along side and underneath the vessel(s) is located. The main lymphatic vessels in this area are then electrically coagulated or suture ligated.

[1207] Using a microscope, muscles in back of the leg (near the semitendinosis and adductors) are bluntly dissected. The popliteal lymph node is then located. The 2 proximal and 2 distal lymphatic vessels and distal blood supply of the popliteal node are then ligated by suturing. The popliteal lymph node, and any accompanying adipose tissue, is then removed by cutting connective tissues.

[1208] Care is taken to control any mild bleeding resulting from this procedure. After lymphatics are occluded, the skin flaps are sealed by using liquid skin (Vetbond) (A J Buck). The separated skin edges are sealed to the underlying muscle tissue while leaving a gap of ˜0.5 cm around the leg. Skin also may be anchored by suturing to underlying muscle when necessary.

[1209] To avoid infection, animals are housed individually with mesh (no bedding). Recovering animals are checked daily through the optimal edematous peak, which typically occurred by day 5-7. The plateau edematous peak are then observed. To evaluate the intensity of the lymphedema, the circumference and volumes of 2 designated places on each paw before operation and daily for 7 days are measured. The effect of plasma proteins on lymphedema is determined and whether protein analysis is a useful testing perimeter is also investigated. The weights of both control and edematous limbs are evaluated at 2 places. Analysis is performed in a blind manner.

[1210] Circumference Measurements: Under brief gas anesthetic to prevent limb movement, a cloth tape is used to measure limb circumference. Measurements are done at the ankle bone and dorsal paw by 2 different people and those 2 readings are averaged. Readings are taken from both control and edematous limbs.

[1211] Volumetric Measurements: On the day of surgery, animals are anesthetized with Pentobarbital and are tested prior to surgery. For daily volumetrics animals are under brief halothane anesthetic (rapid immobilization and quick recovery), and both legs are shaved and equally marked using waterproof marker on legs. Legs are first dipped in water, then dipped into instrument to each marked level, then measured by Buxco edema software(ChenJVictor). Data is recorded by one person, while the other is dipping the limb to marked area.

[1212] Blood-plasma protein measurements: Blood is drawn, spun, and serum separated prior to surgery and then at conclusion for total protein and Ca2⁺ comparison.

[1213] Limb Weight Comparison: After drawing blood, the animal is prepared for tissue collection. The limbs are amputated using a quillitine, then both experimental and control legs are cut at the ligature and weighed. A second weighing is done as the tibio-cacaneal joint is disarticulated and the foot is weighed.

[1214] Histological Preparations: The transverse muscle located behind the knee (popliteal) area is dissected and arranged in a metal mold, filled with freezeGel, dipped into cold methylbutane, placed into labeled sample bags at −80EC until sectioning. Upon sectioning, the muscle is observed under fluorescent microscopy for lymphatics..

[1215] The studies described in this example tested activity of agonists or antagonists of the invention. However, one skilled in the art could easily modify the exemplified studies to test the activity of polynucleotides or polypeptides of the invention (e.g., gene therapy).

### Example 29

[1216] Suppression of TNF Alpha-Induced Adhesion Molecule Expression by a Agonist or Antagonist of the Invention

[1217] The recruitment of lymphocytes to areas of inflammation and angiogenesis involves specific receptor-ligand interactions between cell surface adhesion molecules (CAMs) on lymphocytes and the vascular endothelium. The adhesion process, in both normal and pathological settings, follows a multi-step cascade that involves intercellular adhesion molecule-1 (ICAM-1), vascular cell adhesion molecule-1 (VCAM-1), and endothelial leukocyte adhesion molecule-1 (E-selectin) expression on endothelial cells (EC). The expression of these molecules and others on the vascular endothelium determines the efficiency with which leukocytes may adhere to the local vasculature and extravasate into the local tissue during the development of an inflammatory response. The local concentration of cytokines and growth factor participate in the modulation of the expression of these CAMs.

[1218] Tumor necrosis factor alpha (TNF-a), a potent proinflammatory cytokine, is a stimulator of all three CAMs on endothelial cells and may be involved in a wide variety of inflammatory responses, often resulting in a pathological outcome.

[1219] The potential of an agonist or antagonist of the invention to mediate a suppression of TNF-a induced CAM expression can be examined. A modified ELISA assay which uses ECs as a solid phase absorbent is employed to measure the amount of CAM expression on TNF-a treated ECs when co-stimulated with a member of the FGF family of proteins.

[1220] To perform the experiment, human umbilical vein endothelial cell (HUVEC) cultures are obtained from pooled cord harvests and maintained in growth medium (EGM-2; Clonetics, San Diego, Calif.) supplemented with 10% FCS and 1% penicillin/streptomycin in a 37 degree C. humidified incubator containing 5% CO₂. HUVECs are seeded in 96-well plates at concentrations of 1×10⁴ cells/well in EGM medium at 37 degree C. for 18-24 hrs or until confluent. The monolayers are subsequently washed 3 times with a serum-free solution of RPMI-1640 supplemented with 100 U/ml penicillin and 100 mg/ml streptomycin, and treated with a given cytokine and/or growth factor(s) for 24 h at 37 degree C. Following incubation, the cells are then evaluated for CAM expression.

[1221] Human Umbilical Vein Endothelial cells (HUVECs) are grown in a standard 96 well plate to confluence. Growth medium is removed from the cells and replaced with 90 ul of 199 Medium (10% FBS). Samples for testing and positive or negative controls are added to the plate in triplicate (in 10 ul volumes). Plates are incubated at 37 degree C. for either 5 h (selectin and integrin expression) or 24 h (integrin expression only). Plates are aspirated to remove medium and 100 μl of 0.1% paraformaldehyde-PBS(with Ca++ and Mg++) is added to each well. Plates are held at 4° C. for 30 min.

[1222] Fixative is then removed from the wells and wells are washed 1× with PBS(+Ca,Mg)+0.5% BSA and drained. Do not allow the wells to dry. Add 10 μl of diluted primary antibody to the test and control wells. Anti-ICAM-1-Biotin, Anti-VCAM-1-Biotin and Anti-E-selectin-Biotin are used at a concentration of 10 μg/ml (1:10 dilution of 0.1 mg/ml stock antibody). Cells are incubated at 37° C. for 30 min. in a humidified environment. Wells are washed ×3 with PBS(+Ca,Mg)+0.5% BSA.

[1223] Then add 20 μl of diluted ExtrAvidin-Alkaline Phosphotase (1:5,000 dilution) to each well and incubated at 37° C. for 30 min. Wells are washed ×3 with PBS(+Ca,Mg)+0.5% BSA. 1 tablet of p-Nitrophenol Phosphate pNPP is dissolved in 5 ml of glycine buffer (pH 10.4). 100 μl of pNPP substrate in glycine buffer is added to each test well. Standard wells in triplicate are prepared from the working dilution of the ExtrAvidin-Alkaline Phosphotase in glycine buffer: 1:5,000 (10⁰)>10^{-0.5}>10⁻¹>10^{-1.5}0.5 μl of each dilution is added to triplicate wells and the resulting AP content in each well is 5.50 ng, 1.74 ng, 0.55 ng, 0.18 ng. 100 μl of pNNP reagent must then be added to each of the standard wells. The plate must be incubated at 37° C. for 4 h. A volume of 50 μl of 3M NaOH is added to all wells. The results are quantified on a plate reader at 405 nm. The background subtraction option is used on blank wells filled with glycine buffer only. The template is set up to indicate the concentration of AP-conjugate in each standard well [5.50 ng; 1.74 ng; 0.55 ng; 0.18 ng]. Results are indicated as amount of bound AP-conjugate in each sample.

[1224] The studies described in this example tested activity of agonists or antagonists of the invention. However, one skilled in the art could easily modify the exemplified studies to test the activity of polynucleotides or polypeptides of the invention (e.g., gene therapy).

### Example 30

[1225] Production of Polypeptide of the Invention For High-Throughput Screening Assays

[1226] The following protocol produces a supernatant containing polypeptide of the present invention to be tested. This supernatant can then be used in the Screening Assays described in Examples 32-41.

[1227] First, dilute Poly-D-Lysine (644 587 Boehringer-Mannheim) stock solution (1 mg/ml in PBS) 1:20 in PBS (w/o calcium or magnesium 17-516F Biowhittaker) for a working solution of 50 ug/ml. Add 200 ul of this solution to each well (24 well plates) and incubate at RT for 20 minutes. Be sure to distribute the solution over each well (note: a 12-channel pipetter may be used with tips on every other channel). Aspirate off the Poly-D-Lysine solution and rinse with 1 ml PBS (Phosphate Buffered Saline). The PBS should remain in the well until just prior to plating the cells and plates may be poly-lysine coated in advance for up to two weeks.

[1228] Plate 293T cells (do not carry cells past P+20) at 2×10⁵ cells/well in 0.5 ml DMEM(Dulbecco's Modified Eagle Medium)(with 4.5 G/L glucose and L-glutamine (12-604F Biowhittaker))/10% heat inactivated FBS(14-503F Biowhittaker)/1× Penstrep(17-602E Biowhittaker). Let the cells grow overnight.

[1229] The next day, mix together in a sterile solution basin: 300 ul Lipofectamine (18324-012 Gibco/BRL) and 5 ml Optimem I (31985070 Gibco/BRL)/96-well plate. With a small volume multi-channel pipetter, aliquot approximately 2 ug of an expression vector containing a polynucleotide insert, produced by the methods described in Examples 8-10, into an appropriately labeled 96-well round bottom plate. With a multi-channel pipetter, add 50 ul of the Lipofectamine/Optimem I mixture to each well. Pipette up and down gently to mix. Incubate at RT 15-45 minutes. After about 20 minutes, use a multi-channel pipetter to add 150 ul Optimem I to each well. As a control, one plate of vector DNA lacking an insert should be transfected with each set of transfections.

[1230] Preferably, the transfection should be performed by tag-teaming the following tasks. By tag-teaming, hands on time is cut in half, and the cells do not spend too much time on PBS. First, person A aspirates off the media from four 24-well plates of cells, and then person B rinses each well with 0.5-1 ml PBS. Person A then aspirates off PBS rinse, and person B, using a12-channel pipetter with tips on every other channel, adds the 200 ul of DNA/Lipofectamine/Optimem I complex to the odd wells first, then to the even wells, to each row on the 24-well plates. Incubate at 37 degree C. for 6 hours.

[1231] While cells are incubating, prepare appropriate media, either 1% BSA in DMEM with 1× penstrep, or HGS CHO-5 media (116.6 mg/L of CaCl2 (anhyd); 0.00130 mg/L CuSO₄-5H₂O; 0.050 mg/L of Fe(NO₃)₃-9H₂O; 0.417 mg/L of FeSO₄-7H₂O; 311.80 mg/L of Kcl; 28.64 mg/L of MgCl₂; 48.84 mg/L of MgSO₄; 6995.50 mg/L of NaCl; 2400.0 mg/L of NaHCO₃; 62.50 mg/L of NaH₂PO₄—H₂O; 71.02 mg/L of Na₂HPO4; 0.4320 mg/L of ZnSO₄-7H₂O; 0.002 mg/L of Arachidonic Acid; 1.022 mg/L of Cholesterol; 0.070 mg/L of DL-alpha-Tocopherol-Acetate; 0.0520 mg/L of Linoleic Acid; 0.010 mg/L of Linolenic Acid; 0.010 mg/L of Myristic Acid; 0.010 mg/L of Oleic Acid; 0.010 mg/L of Palmitric Acid; 0.010 mg/L of Palmitic Acid; 100 mg/L of Pluronic F-68; 0.010 mg/L of Stearic Acid; 2.20 mg/L of Tween 80; 4551 mg/L of D-Glucose; 130.85 mg/ml of L-Alanine; 147.50 mg/ml of L-Arginine-HCL; 7.50 mg/ml of L-Asparagine-H₂O; 6.65 mg/ml of L-Aspartic Acid; 29.56 mg/ml of L-Cystine-2HCL—H₂O; 31.29 mg/ml of L-Cystine-2HCL; 7.35 mg/ml of L-Glutamic Acid; 365.0 mg/ml of L-Glutamine; 18.75 mg/ml of Glycine; 52.48 mg/ml of L-Histidine-HCL—H₂O; 106.97 mg/ml of L-Isoleucine; 111.45 mg/ml of L-Leucine; 163.75 mg/ml of L-Lysine HCL; 32.34 mg/ml of L-Methionine; 68.48 mg/ml of L-Phenylalainine; 40.0 mg/ml of L-Proline; 26.25 mg/ml of L-Serine; 101.05 mg/ml of L-Threonine; 19.22 mg/ml of L-Tryptophan; 91.79 mg/ml of L-Tryrosine-2Na-2H₂O; and 99.65 mg/ml of L-Valine; 0.0035 mg/L of Biotin; 3.24 mg/L of D-Ca Pantothenate; 11.78 mg/L of Choline Chloride; 4.65 mg/L of Folic Acid; 15.60 mg/L of i-Inositol; 3.02 mg/L of Niacinamide; 3.00 mg/L of Pyridoxal HCL; 0.031 mg/L of Pyridoxine HCL; 0.319 mg/L of Riboflavin; 3.17 mg/L of Thiamine HCL; 0.365 mg/L of Thymidine; 0.680 mg/L of Vitamin B₁₂; 25 mM of HEPES Buffer; 2.39 mg/L of Na Hypoxanthine; 0.105 mg/L of Lipoic Acid; 0.081 mg/L of Sodium Putrescine-2HCL; 55.0 mg/L of Sodium Pyruvate; 0.0067 mg/L of Sodium Selenite; 20 uM of Ethanolamine; 0.122 mg/L of Ferric Citrate; 41.70 mg/L of Methyl-B-Cyclodextrin complexed with Linoleic Acid; 33.33 mg/L of Methyl-B-Cyclodextrin complexed with Oleic Acid; 10 mg/L of Methyl-B-Cyclodextrin complexed with Retinal Acetate. Adjust osmolarity to 327 mOsm) with 2 mm glutamine and 1× penstrep. (BSA (81-068-3 Bayer) 100 gm dissolved in 1 L DMEM for a 10% BSA stock solution). Filter the media and collect 50 ul for endotoxin assay in 15 ml polystyrene conical.

[1232] The transfection reaction is terminated, preferably by tag-teaming, at the end of the incubation period. Person A aspirates off the transfection media, while person B adds 1.5 ml appropriate media to each well. Incubate at 37 degree C. for 45 or 72 hours depending on the media used: 1% BSA for 45 hours or CHO-5 for 72 hours.

[1233] On day four, using a 300 ul multichannel pipetter, aliquot 600 ul in one 1 ml deep well plate and the remaining supernatant into a 2 ml deep well. The supernatants from each well can then be used in the assays described in Examples 32-39.

[1234] It is specifically understood that when activity is obtained in any of the assays described below using a supernatant, the activity originates from either the polypeptide of the present invention directly (e.g., as a secreted protein) or by polypeptide of the present invention inducing expression of other proteins, which are then secreted into the supernatant. Thus, the invention further provides a method of identifying the protein in the supernatant characterized by an activity in a particular assay.

### Example 31

[1235] Construction of GAS Reporter Construct

[1236] One signal transduction pathway involved in the differentiation and proliferation of cells is called the Jaks-STATs pathway. Activated proteins in the Jaks-STATs pathway bind to gamma activation site “GAS” elements or interferon-sensitive responsive element (“ISRE”), located in the promoter of many genes. The binding of a protein to these elements alter the expression of the associated gene.

[1237] GAS and ISRE elements are recognized by a class of transcription factors called Signal Transducers and Activators of Transcription, or “STATs.” There are six members of the STATs family. Stat1 and Stat3 are present in many cell types, as is Stat2 (as response to IFN-alpha is widespread). Stat4 is more restricted and is not in many cell types though it has been found in T helper class I, cells after treatment with IL-12. Stat5 was originally called mammary growth factor, but has been found at higher concentrations in other cells including myeloid cells. It can be activated in tissue culture cells by many cytokines.

[1238] The STATs are activated to translocate from the cytoplasm to the nucleus upon tyrosine phosphorylation by a set of kinases known as the Janus Kinase (“Jaks”) family. Jaks represent a distinct family of soluble tyrosine kinases and include Tyk2, Jak1, Jak2, and Jak3. These kinases display significant sequence similarity and are generally catalytically inactive in resting cells.

[1239] The Jaks are activated by a wide range of receptors summarized in the Table below. (Adapted from review by Schidler and Darnell, Ann. Rev. Biochem. 64:621-51 (1995).) A cytokine receptor family, capable of activating Jaks, is divided into two groups: (a) Class 1 includes receptors for IL-2, IL-3, IL-4, IL-6, IL-7, IL-9, IL-11, IL-12, IL-15, Epo, PRL, GH, G-CSF, GM-CSF, LIF, CNTF, and thrombopoietin; and (b) Class 2 includes IFN-a, IFN-g, and IL-10. The Class 1 receptors share a conserved cysteine motif (a set of four conserved cysteines and one tryptophan) and a WSXWS motif (a membrane proximal region encoding Trp-Ser-Xaa-Trp-Ser (SEQ ID NO:2)).

[1240] Thus, on binding of a ligand to a receptor, Jaks are activated, which in turn activate STATs, which then translocate and bind to GAS elements. This entire process is encompassed in the Jaks-STATs signal transduction pathway.

[1241] Therefore, activation of the Jaks-STATs pathway, reflected by the binding of the GAS or the ISRE element, can be used to indicate proteins involved in the proliferation and differentiation of cells. For example, growth factors and cytokines are known to activate the Jaks-STATs pathway. (See Table below.) Thus, by using GAS elements linked to reporter molecules, activators of the Jaks-STATs pathway can be identified.

| | | | JAKs | | | |
|---|---|---|---|---|---|---|
| Ligands | tyk2 | Jak1 | Jak2 | Jak3 | STATS | GA (elements) or ISRE |
| IFN family | | | | | | |
| IFN-a/B | + | + | − | − | 1, 2, 3 | ISRE |
| IFN-g | + | + | − | 1 | | GAS (IRF1 > Lys6 > IFP) |
| Il-10 | + | ? | ? | − | 1, 3 | |
| gp130 family | | | | | | |
| IL-6 (Pleiotrohic) | + | + | + | ? | 1, 3 | GAS (IRF1 > Lys6 > IFP) |
| Il-11 (Pleiotrohic) | ? | + | ? | ? | 1, 3 | |
| OnM (Pleiotrohic) | ? | + | + | ? | 1, 3 | |
| LIF (Pleiotrohic) | ? | + | + | ? | 1, 3 | |
| CNTF (Pleiotrohic) | −/+ | + | + | ? | 1, 3 | |
| G-CSF (Pleiotrohic) | ? | + | ? | ? | 1, 3 | |
| IL-12 (Pleiotrohic) | + | − | + | + | 1, 3 | |
| g-C family | | | | | | |
| IL-2 (lymphocytes) | − | + | − | + | 1, 3, 5 | GAS |
| IL-4 (lymph/myeloid) | − | + | − | + | 6 | GAS (IRF1 = IFP > > Ly6) (IgH) |
| IL-7 (lymphocytes) | − | + | − | + | 5 | GAS |
| IL-9 (lymphocytes) | − | + | − | + | 5 | GAS |
| IL-13 (lymphocyte) | − | + | ? | ? | 6 | GAS |
| IL-15 | ? | + | ? | + | 5 | GAS |
| gp140 family | | | | | | |
| IL-3 (myeloid) | − | − | + | − | 5 | GAS (IRF1 > IFP > > Ly6) |
| IL-5 (myeloid) | − | − | + | − | 5 | GAS |
| GM-CSF (myeloid) | − | − | + | − | 5 | GAS |
| Growth hormone family | | | | | | |
| GH | ? | − | + | − | 5 | |
| PRL | ? | +/− | + | − | 1, 3, 5 | |
| EPO | ? | − | + | − | 5 | GAS (B-CAS > IRF1 = IFP > > Ly6) |
| Receptor Tyrosine Kinases | | | | | | |
| EGF | ? | + | + | − | 1, 3 | GAS (IRF1) |
| PDGF | ? | + | + | − | 1, 3 | |
| CSF-1 | ? | + | + | − | 1, 3 | GAS (not IRF1) |

[1242] To construct a synthetic GAS containing promoter element, which is used in the Biological Assays described in Examples 32-33, a PCR based strategy is employed to generate a GAS-SV40 promoter sequence. The 5′ primer contains four tandem copies of the GAS binding site found in the IRF1 promoter and previously demonstrated to bind STATs upon induction with a range of cytokines (Rothman et al., Immunity 1:457-468 (1994).), although other GAS or ISRE elements can be used instead. The 5′ primer also contains 18 bp of sequence complementary to the SV40 early promoter sequence and is flanked with an XhoI site. The sequence of the 5′ primer is:

(SEQ ID NO: 3)

5′:GCGCCTCGAGATTTCCCCGAAATCTAGATTTCCCCGAAATGATTTCC
CCGAAATGATTTCCCCGAAATATCTGCCATCTCAATTAG:3′

[1243] The downstream primer is complementary to the SV40 promoter and is flanked with a Hind III site: 5′:GCGGCAAGCTTTTTGCAAAGCCTAGGC:3′ (SEQ ID NO: 4)

[1244] PCR amplification is performed using the SV40 promoter template present in the B-gal:promoter plasmid obtained from Clontech. The resulting PCR fragment is digested with XhoI/Hind III and subcloned into BLSK2−. (Stratagene.) Sequencing with forward and reverse primers confirms that the insert contains the following sequence:

(SEQ ID NO: 5)

5′:CTCGAGATTTCCCCGAAATCTAGATTTCCCCGAAATGATTTCCCCGA
AATGATTTCCCCGAAATATCTGCCATCTCAATTAGTCAGCAACCATAGTC
CCGCCCCTAACTCCGCCCATCCCGCCCCTAACTCCGCCCAGTTCCGCCCA
TTCTCCGCCCCATGGCTGACTAATTTTTTTTATTTATGCAGAGGCCGAGG
CCGCCTCGGCCTCTGAGCTATTCCAGAAGTAGTGAGGAGGCTTTTTTGGA
GGCCTAGGCTTTTGCAAAAAGCTT:3′

[1245] With this GAS promoter element linked to the SV40 promoter, a GAS:SEAP2 reporter construct is next engineered. Here, the reporter molecule is a secreted alkaline phosphatase, or “SEAP.” Clearly, however, any reporter molecule can be used instead of SEAP, in this or in any of the other Examples. Well known reporter molecules that can be used instead of SEAP include chloramphenicol acetyltransferase (CAT), luciferase, alkaline phosphatase, B-galactosidase, green fluorescent protein (GFP), or any protein detectable by an antibody.

[1246] The above sequence confirmed synthetic GAS-SV40 promoter element is subcloned into the pSEAP-Promoter vector obtained from Clontech using HindIII and XhoI, effectively replacing the SV40 promoter with the amplified GAS:SV40 promoter element, to create the GAS-SEAP vector. However, this vector does not contain a neomycin resistance gene, and therefore, is not preferred for mammalian expression systems.

[1247] Thus, in order to generate mammalian stable cell lines expressing the GAS-SEAP reporter, the GAS-SEAP cassette is removed from the GAS-SEAP vector using SalI and NotI, and inserted into a backbone vector containing the neomycin resistance gene, such as pGFP-1 (Clontech), using these restriction sites in the multiple cloning site, to create the GAS-SEAP/Neo vector. Once this vector is transfected into mammalian cells, this vector can then be used as a reporter molecule for GAS binding as described in Examples 32-33.

[1248] Other constructs can be made using the above description and replacing GAS with a different promoter sequence. For example, construction of reporter molecules containing NFK-B and EGR promoter sequences are described in Examples 34 and 35. However, many other promoters can be substituted using the protocols described in these Examples. For instance, SRE, IL-2, NFAT, or Osteocalcin promoters can be substituted, alone or in combination (e.g., GAS/NF-KB/EGR, GAS/NF-KB, Il-2/NFAT, or NF-KB/GAS). Similarly, other cell lines can be used to test reporter construct activity, such as HELA (epithelial), HUVEC (endothelial), Reh (B-cell), Saos-2 (osteoblast), HUVAC (aortic), or Cardiomyocyte.

### Example 32

[1249] High-Throughput Screening Assay for T-cell Activity.

[1250] The following protocol is used to assess T-cell activity by identifying factors, and determining whether supernate containing a polypeptide of the invention proliferates and/or differentiates T-cells. T-cell activity is assessed using the GAS/SEAP/Neo construct produced in Example 31. Thus, factors that increase SEAP activity indicate the ability to activate the Jaks-STATS signal transduction pathway. The T-cell used in this assay is Jurkat T-cells (ATCC Accession No. TIB-152), although Molt-3 cells (ATCC Accession No. CRL-1552) and Molt-4 cells (ATCC Accession No. CRL-1582) cells can also be used.

[1251] Jurkat T-cells are lymphoblastic CD4+ Th1 helper cells. In order to generate stable cell lines, approximately 2 million Jurkat cells are transfected with the GAS-SEAP/neo vector using DMRIE-C (Life Technologies)(transfection procedure described below). The transfected cells are seeded to a density of approximately 20,000 cells per well and transfectants resistant to 1 mg/ml genticin selected. Resistant colonies are expanded and then tested for their response to increasing concentrations of interferon gamma. The dose response of a selected clone is demonstrated.

[1252] Specifically, the following protocol will yield sufficient cells for 75 wells containing 200 ul of cells. Thus, it is either scaled up, or performed in multiple to generate sufficient cells for multiple 96 well plates. Jurkat cells are maintained in RPMI+10% serum with 1% Pen-Strep. Combine 2.5 mls of OPTI-MEM (Life Technologies) with 10 ug of plasmid DNA in a T25 flask. Add 2.5 ml OPTI-MEM containing 50 ul of DMRIE-C and incubate at room temperature for 15-45 mins.

[1253] During the incubation period, count cell concentration, spin down the required number of cells (10⁷ per transfection), and resuspend in OPTI-MEM to a final concentration of 10⁷ cells/ml. Then add 1 ml of 1×10⁷ cells in OPTI-MEM to T25 flask and incubate at 37 degree C. for 6 hrs. After the incubation, add 10 ml of RPMI+15% serum.

[1254] The Jurkat:GAS-SEAP stable reporter lines are maintained in RPMI+10% serum, 1 mg/ml Genticin, and 1% Pen-Strep. These cells are treated with supernatants containing polypeptide of the present invention or polypeptide of the present invention induced polypeptides as produced by the protocol described in Example 30.

[1255] On the day of treatment with the supernatant, the cells should be washed and resuspended in fresh RPMI+10% serum to a density of 500,000 cells per ml. The exact number of cells required will depend on the number of supernatants being screened. For one 96 well plate, approximately 10 million cells (for 10 plates, 100 million cells) are required.

[1256] Transfer the cells to a triangular reservoir boat, in order to dispense the cells into a 96 well dish, using a 12 channel pipette. Using a 12 channel pipette, transfer 200 ul of cells into each well (therefore adding 100,000 cells per well).

[1257] After all the plates have been seeded, 50 ul of the supernatants are transferred directly from the 96 well plate containing the supernatants into each well using a 12 channel pipette. In addition, a dose of exogenous interferon gamma (0.1, 1.0, 10 ng) is added to wells H9, H10, and H11 to serve as additional positive controls for the assay.

[1258] The 96 well dishes containing Jurkat cells treated with supernatants are placed in an incubator for 48 hrs (note: this time is variable between 48-72 hrs). 35 ul samples from each well are then transferred to an opaque 96 well plate using a 12 channel pipette. The opaque plates should be covered (using sellophene covers) and stored at −20 degree C. until SEAP assays are performed according to Example 36. The plates containing the remaining treated cells are placed at 4 degree C. and serve as a source of material for repeating the assay on a specific well if desired.

[1259] As a positive control, 100 Unit/ml interferon gamma can be used which is known to activate Jurkat T cells. Over 30 fold induction is typically observed in the positive control wells.

[1260] The above protocol may be used in the generation of both transient, as well as stable, transfected cells, which would be apparent to those of skill in the art.

### Example 33

[1261] High-Throughput Screening Assay Identifying Myeloid Activity

[1262] The following protocol is used to assess myeloid activity of polypeptide of the present invention by determining whether polypeptide of the present invention proliferates and/or differentiates myeloid cells. Myeloid cell activity is assessed using the GAS/SEAP/Neo construct produced in Example 31. Thus, factors that increase SEAP activity indicate the ability to activate the Jaks-STATS signal transduction pathway. The myeloid cell used in this assay is U937, a pre-monocyte cell line, although TF-1, HL60, or KG1 can be used.

[1263] To transiently transfect U937 cells with the GAS/SEAP/Neo construct produced in Example 31, a DEAE-Dextran method (Kharbanda et. al., 1994, Cell Growth & Differentiation, 5:259-265) is used. First, harvest 2×10⁷ U937 cells and wash with PBS. The U937 cells are usually grown in RPMI 1640 medium containing 10% heat-inactivated fetal bovine serum (FBS) supplemented with 100 units/ml penicillin and 100 mg/ml streptomycin.

[1264] Next, suspend the cells in 1 ml of 20 mM Tris-HCl (pH 7.4) buffer containing 0.5 mg/ml DEAE-Dextran, 8 ug GAS-SEAP2 plasmid DNA, 140 mM NaCl, 5 mM KCl, 375 uM Na₂HPO₄.7H₂O, 1 mM MgCl₂, and 675 uM CaCl₂. Incubate at 37 degrees C. for 45 min.

[1265] Wash the cells with RPMI 1640 medium containing 10% FBS and then resuspend in 10 ml complete medium and incubate at 37 degree C. for 36 hr.

[1266] The GAS-SEAP/U937 stable cells are obtained by growing the cells in 400 ug/ml G418. The G418-free medium is used for routine growth but every one to two months, the cells should be re-grown in 400 ug/ml G418 for couple of passages.

[1267] These cells are tested by harvesting 1×10⁸ cells (this is enough for ten 96-well plates assay) and wash with PBS. Suspend the cells in 200 ml above described growth medium, with a final density of 5×10⁵ cells/ml. Plate 200 ul cells per well in the 96-well plate (or 1×10⁵ cells/well).

[1268] Add 50 ul of the supernatant prepared by the protocol described in Example 30. Incubate at 37 degree C. for 48 to 72 hr. As a positive control, 100 Unit/ml interferon gamma can be used which is known to activate U937 cells. Over 30 fold induction is typically observed in the positive control wells. SEAP assay the supernatant according to the protocol described in Example 36.

### Example 34

[1269] High-Throughput Screening Assay Identifying Neuronal Activity.

[1270] When cells undergo differentiation and proliferation, a group of genes are activated through many different signal transduction pathways. One of these genes, EGR1 (early growth response gene 1), is induced in various tissues and cell types upon activation. The promoter of EGR1 is responsible for such induction. Using the EGR1 promoter linked to reporter molecules, activation of cells can be assessed by polypeptide of the present invention.

[1271] Particularly, the following protocol is used to assess neuronal activity in PC12 cell lines. PC12 cells (rat phenochromocytoma cells) are known to proliferate and/or differentiate by activation with a number of mitogens, such as TPA (tetradecanoyl phorbol acetate), NGF (nerve growth factor), and EGF (epidermal growth factor). The EGR1 gene expression is activated during this treatment. Thus, by stably transfecting PC12 cells with a construct containing an EGR promoter linked to SEAP reporter, activation of PC12 cells by polypeptide of the present invention can be assessed.

[1272] The EGR/SEAP reporter construct can be assembled by the following protocol. The EGR-1 promoter sequence (−633 to +1)(Sakamoto K et al., Oncogene 6:867-871 (1991)) can be PCR amplified from human genomic DNA using the following primers:

(SEQ ID NO: 6)

5′ GCGCTCGAGGGATGACAGCGATAGAACCCCGG-3′

(SEQ ID NO: 7)

5′ GCGAAGCTTCGCGACTCCCCGGATCCGCCTC-3′

[1273] Using the GAS:SEAP/Neo vector produced in Example 31, EGR1 amplified product can then be inserted into this vector. Linearize the GAS:SEAP/Neo vector using restriction enzymes XhoI/HindIII, removing the GAS/SV40 stuffer. Restrict the EGR1 amplified product with these same enzymes. Ligate the vector and the EGR1 promoter.

[1274] To prepare 96 well-plates for cell culture, two mls of a coating solution (1:30 dilution of collagen type I (Upstate Biotech Inc. Cat#08-115) in 30% ethanol (filter sterilized)) is added per one 10 cm plate or 50 ml per well of the 96-well plate, and allowed to air dry for 2 hr.

[1275] PC12 cells are routinely grown in RPMI-1640 medium (Bio Whittaker) containing 10% horse serum (JRH BIOSCIENCES, Cat. #12449-78P), 5% heat-inactivated fetal bovine serum (FBS) supplemented with 100 units/ml penicillin and 100 ug/ml streptomycin on a precoated 10 cm tissue culture dish. One to four split is done every three to four days. Cells are removed from the plates by scraping and resuspended with pipetting up and down for more than 15 times.

[1276] Transfect the EGR/SEAP/Neo construct into PC12 using the Lipofectamine protocol described in Example 30. EGR-SEAP/PC12 stable cells are obtained by growing the cells in 300 ug/ml G418. The G418-free medium is used for routine growth but every one to two months, the cells should be re-grown in 300 ug/ml G418 for couple of passages.

[1277] To assay for neuronal activity, a 10 cm plate with cells around 70 to 80% confluent is screened by removing the old medium. Wash the cells once with PBS (Phosphate buffered saline). Then starve the cells in low serum medium (RPMI-1640 containing 1% horse serum and 0.5% FBS with antibiotics) overnight.

[1278] The next morning, remove the medium and wash the cells with PBS. Scrape off the cells from the plate, suspend the cells well in 2 ml low serum medium. Count the cell number and add more low serum medium to reach final cell density as 5×10⁵ cells/ml.

[1279] Add 200 ul of the cell suspension to each well of 96-well plate (equivalent to 1×10⁵ cells/well). Add 50 ul supernatant produced by Example 30, 37 degree C. for 48 to 72 hr. As a positive control, a growth factor known to activate PC12 cells through EGR can be used, such as 50 ng/ul of Neuronal Growth Factor (NGF). Over fifty-fold induction of SEAP is typically seen in the positive control wells. SEAP assay the supernatant according to Example 36.

### Example 35

[1280] High-Throughput Screening Assay for T-Cell Activity

[1281] NF-KB (Nuclear Factor KB) is a transcription factor activated by a wide variety of agents including the inflammatory cytokines IL-1 and TNF, CD30 and CD40, lymphotoxin-alpha and lymphotoxin-beta, by exposure to LPS or thrombin, and by expression of certain viral gene products. As a transcription factor, NF-KB regulates the expression of genes involved in immune cell activation, control of apoptosis (NF-KB appears to shield cells from apoptosis), B and T-cell development, anti-viral and antimicrobial responses, and multiple stress responses.

[1282] In non-stimulated conditions, NF-KB is retained in the cytoplasm with I-KB (Inhibitor KB). However, upon stimulation, I-KB is phosphorylated and degraded, causing NF-KB to shuttle to the nucleus, thereby activating transcription of target genes. Target genes activated by NF-KB include IL-2, IL-6, GM-CSF, ICAM-1 and class 1 MHC.

[1283] Due to its central role and ability to respond to a range of stimuli, reporter constructs utilizing the NF-KB promoter element are used to screen the supernatants produced in Example 30. Activators or inhibitors of NF-KB would be useful in treating, preventing, and/or diagnosing diseases. For example, inhibitors of NF-KB could be used to treat those diseases related to the acute or chronic activation of NF-KB, such as rheumatoid arthritis.

[1284] To construct a vector containing the NF-KB promoter element, a PCR based strategy is employed. The upstream primer contains four tandem copies of the NF-KB binding site (GGGGACTTTCCC) (SEQ ID NO: 8), 18 bp of sequence complementary to the 5′ end of the SV40 early promoter sequence, and is flanked with an XhoI site:

(SEQ ID NO: 9)

5′:GCGGCCTCGAGGGGACTTTCCCGGGGACTTTCCGGGGACTTTCCGGG
ACTTTCCATCCTGCCATCTCAATTAG:3′

[1285] The downstream primer is complementary to the 3′ end of the SV40 promoter and is flanked with a Hind III site:

| | |
|---|---|
| 5′:GCGGCAAGCTTTTTGCAAAGCCTAGGC:3′ | (SEQ ID NO: 4) |

[1286] PCR amplification is performed using the SV40 promoter template present in the pB-gal:promoter plasmid obtained from Clontech. The resulting PCR fragment is digested with XhoI and Hind III and subcloned into BLSK2−. (Stratagene) Sequencing with the T7 and T3 primers confirms the insert contains the following sequence:

(SEQ ID NO: 10)

5′:CTCGAGGGGACTTTCCCGGGGACTTTCCGGGGACTTTCCGGGACTTT
CCATCTGCCATCTCAATTAGTCAGCAACCATAGTCCCGCCCCTAACTCCG
CCCATCCCGCCCCTAACTCCGCCCAGTTCCGCCCATTCTCCGCCCCATGG
CTGACTAATTTTTTTTATTTATGCAGAGGCCGAGGCCGCCTCGGCCTCTG
AGCTATTCCAGAAGTAGTGAGGAGGCTTTTTTGGAGGCCTAGGCTTTTGC
AAAAAGCTT:3′

[1287] Next, replace the SV40 minimal promoter element present in the pSEAP2-promoter plasmid (Clontech) with this NF-KB/SV40 fragment using XhoI and HindIII. However, this vector does not contain a neomycin resistance gene, and therefore, is not preferred for mammalian expression systems.

[1288] In order to generate stable mammalian cell lines, the NF-KB/SV40/SEAP cassette is removed from the above NF-KB/SEAP vector using restriction enzymes SalI and NotI, and inserted into a vector containing neomycin resistance. Particularly, the NF-KB/SV40/SEAP cassette was inserted into pGFP-1 (Clontech), replacing the GFP gene, after restricting pGFP-1 with SalI and NotI.

[1289] Once NF-KB/SV40/SEAP/Neo vector is created, stable Jurkat T-cells are created and maintained according to the protocol described in Example 32. Similarly, the method for assaying supernatants with these stable Jurkat T-cells is also described in Example 32. As a positive control, exogenous TNF alpha (0.1,1, 10 ng) is added to wells H9, H10, and H11, with a 5-10 fold activation typically observed.

### Example 36

[1290] Assay for SEAP Activity

[1291] As a reporter molecule for the assays described in Examples 32-35, SEAP activity is assayed using the Tropix Phospho-light Kit (Cat. BP-400) according to the following general procedure. The Tropix Phospho-light Kit supplies the Dilution, Assay, and Reaction Buffers used below.

[1292] Prime a dispenser with the 2.5× Dilution Buffer and dispense 15 ul of 2.5× dilution buffer into Optiplates containing 35 ul of a supernatant. Seal the plates with a plastic sealer and incubate at 65 degree C. for 30 min. Separate the Optiplates to avoid uneven heating.

[1293] Cool the samples to room temperature for 15 minutes. Empty the dispenser and prime with the Assay Buffer. Add 50 ml Assay Buffer and incubate at room temperature 5 min. Empty the dispenser and prime with the Reaction Buffer (see the Table below). Add 50 ul Reaction Buffer and incubate at room temperature for 20 minutes. Since the intensity of the chemiluminescent signal is time dependent, and it takes about 10 minutes to read 5 plates on a luminometer, thus one should treat 5 plates at each time and start the second set 10 minutes later.

[1294] Read the relative light unit in the luminometer. Set H12 as blank, and print the results. An increase in chemiluminescence indicates reporter activity.

[1295] Reaction Buffer Formulation:

| # of plates | Rxn buffer diluent (ml) | CSPD (ml) |
|---|---|---|
| 10 | 60 | 3 |
| 11 | 65 | 3.25 |
| 12 | 70 | 3.5 |
| 13 | 75 | 3.75 |
| 14 | 80 | 4 |
| 15 | 85 | 4.25 |
| 16 | 90 | 4.5 |
| 17 | 95 | 4.75 |
| 18 | 100 | 5 |
| 19 | 105 | 5.25 |
| 20 | 110 | 5.5 |
| 21 | 115 | 5.75 |
| 22 | 120 | 6 |
| 23 | 125 | 6.25 |
| 24 | 130 | 6.5 |
| 25 | 135 | 6.75 |
| 26 | 140 | 7 |
| 27 | 145 | 7.25 |
| 28 | 150 | 7.5 |
| 29 | 155 | 7.75 |
| 30 | 160 | 8 |
| 31 | 165 | 8.25 |
| 32 | 170 | 8.5 |
| 33 | 175 | 8.75 |
| 34 | 180 | 9 |
| 35 | 185 | 9.25 |
| 36 | 190 | 9.5 |
| 37 | 195 | 9.75 |
| 38 | 200 | 10 |
| 39 | 205 | 10.25 |
| 40 | 210 | 10.5 |
| 41 | 215 | 10.75 |
| 42 | 220 | 11 |
| 43 | 225 | 11.25 |
| 44 | 230 | 11.5 |
| 45 | 235 | 11.75 |
| 46 | 240 | 12 |
| 47 | 245 | 12.25 |
| 48 | 250 | 12.5 |
| 49 | 255 | 12.75 |
| 50 | 260 | 13 |

### Example 37

[1296] High-Throughput Screening Assay Identifying Changes in Small Molecule Concentration and Membrane Permeability

[1297] Binding of a ligand to a receptor is known to alter intracellular levels of small molecules, such as calcium, potassium, sodium, and pH, as well as alter membrane potential. These alterations can be measured in an assay to identify supernatants which bind to receptors of a particular cell. Although the following protocol describes an assay for calcium, this protocol can easily be modified to detect changes in potassium, sodium, pH, membrane potential, or any other small molecule which is detectable by a fluorescent probe.

[1298] The following assay uses Fluorometric Imaging Plate Reader (“FLIPR”) to measure changes in fluorescent molecules (Molecular Probes) that bind small molecules. Clearly, any fluorescent molecule detecting a small molecule can be used instead of the calcium fluorescent molecule, fluo-4 (Molecular Probes, Inc.; catalog no. F-14202), used here.

[1299] For adherent cells, seed the cells at 10,000-20,000 cells/well in a Co-star black 96-plate with clear bottom. The plate is incubated in a CO₂ incubator for 20 hours. The adherent cells are washed two times in Biotek washer with 200 ul of HBSS (Hank's Balanced Salt Solution) leaving 100 ul of buffer after the final wash.

[1300] A stock solution of 1 mg/ml fluo-4 is made in 10% pluronic acid DMSO. To load the cells with fluo-4, 50 ul of 12 ug/ml fluo-4 is added to each well. The plate is incubated at 37 degrees C. in a CO₂ incubator for 60 min. The plate is washed four times in the Biotek washer with HBSS leaving 100 ul of buffer.

[1301] For non-adherent cells, the cells are spun down from culture media. Cells are re-suspended to 2-5×10⁶ cells/ml with HBSS in a 50-ml conical tube. 4 ul of 1 mg/ml fluo-4 solution in 10% pluronic acid DMSO is added to each ml of cell suspension. The tube is then placed in a 37 degrees C. water bath for 30-60 min. The cells are washed twice with HBSS, resuspended to 1×10⁶ cells/ml, and dispensed into a microplate, 100 ul/well. The plate is centrifuged at 1000 rpm for 5 min. The plate is then washed once in Denley Cell Wash with 200 ul, followed by an aspiration step to 100 ul final volume.

[1302] For a non-cell based assay, each well contains a fluorescent molecule, such as fluo-4. The supernatant is added to the well, and a change in fluorescence is detected.

[1303] To measure the fluorescence of intracellular calcium, the FLIPR is set for the following parameters: (1) System gain is 300-800 mW; (2) Exposure time is 0.4 second; (3) Camera F/stop is F/2; (4) Excitation is 488 nm; (5) Emission is 530 nm; and (6) Sample addition is 50 ul. Increased emission at 530 nm indicates an extracellular signaling event caused by the a molecule, either polypeptide of the present invention or a molecule induced by polypeptide of the present invention, which has resulted in an increase in the intracellular Ca⁺⁺ concentration.

### Example 38

[1304] High-Throughput Screening Assay Identifying Tyrosine Kinase Activity

[1305] The Protein Tyrosine Kinases (PTK) represent a diverse group of transmembrane and cytoplasmic kinases. Within the Receptor Protein Tyrosine Kinase RPTK) group are receptors for a range of mitogenic and metabolic growth factors including the PDGF, FGF, EGF, NGF, HGF and Insulin receptor subfamilies. In addition there are a large family of RPTKs for which the corresponding ligand is unknown. Ligands for RPTKs include mainly secreted small proteins, but also membrane-bound and extracellular matrix proteins.

[1306] Activation of RPTK by ligands involves ligand-mediated receptor dimerization, resulting in transphosphorylation of the receptor subunits and activation of the cytoplasmic tyrosine kinases. The cytoplasmic tyrosine kinases include receptor associated tyrosine kinases of the src-family (e.g., src, yes, lck, lyn, fyn) and non-receptor linked and cytosolic protein tyrosine kinases, such as the Jak family, members of which mediate signal transduction triggered by the cytokine superfamily of receptors (e.g., the Interleukins, Interferons, GM-CSF, and Leptin).

[1307] Because of the wide range of known factors capable of stimulating tyrosine kinase activity, identifying whether polypeptide of the present invention or a molecule induced by polypeptide of the present invention is capable of activating tyrosine kinase signal transduction pathways is of interest. Therefore, the following protocol is designed to identify such molecules capable of activating the tyrosine kinase signal transduction pathways.

[1308] Seed target cells (e.g., primary keratinocytes) at a density of approximately 25,000 cells per well in a 96 well Loprodyne Silent Screen Plates purchased from Nalge Nunc (Naperville, Ill.). The plates are sterilized with two 30 minute rinses with 100% ethanol, rinsed with water and dried overnight. Some plates are coated for 2 hr with 100 ml of cell culture grade type I collagen (50 mg/ml), gelatin (2%) or polylysine (50 mg/ml), all of which can be purchased from Sigma Chemicals (St. Louis, Mo.) or 10% Matrigel purchased from Becton Dickinson (Bedford,Mass.), or calf serum, rinsed with PBS and stored at 4 degree C. Cell growth on these plates is assayed by seeding 5,000 cells/well in growth medium and indirect quantitation of cell number through use of alamarBlue as described by the manufacturer Alamar Biosciences, Inc. (Sacramento, Calif.) after 48 hr. Falcon plate covers #3071 from Becton Dickinson (Bedford,Mass.) are used to cover the Loprodyne Silent Screen Plates. Falcon Microtest III cell culture plates can also be used in some proliferation experiments.

[1309] To prepare extracts, A431 cells are seeded onto the nylon membranes of Loprodyne plates (20,000/200 ml/well) and cultured overnight in complete medium. Cells are quiesced by incubation in serum-free basal medium for 24 hr. After 5-20 minutes treatment with EGF (60 ng/ml) or 50 ul of the supernatant produced in Example 30, the medium was removed and 100 ml of extraction buffer ((20 mM HEPES pH 7.5, 0.15 M NaCl, 1% Triton X-100, 0.1% SDS, 2 mM Na3VO4, 2 mM Na4P2O7 and a cocktail of protease inhibitors (#1836170) obtained from Boeheringer Mannheim (Indianapolis, Ind.)) is added to each well and the plate is shaken on a rotating shaker for 5 minutes at 4° C. The plate is then placed in a vacuum transfer manifold and the extract filtered through the 0.45 mm membrane bottoms of each well using house vacuum. Extracts are collected in a 96-well catch/assay plate in the bottom of the vacuum manifold and immediately placed on ice. To obtain extracts clarified by centrifugation, the content of each well, after detergent solubilization for 5 minutes, is removed and centrifuged for 15 minutes at 4 degree C. at 16,000×g.

[1310] Test the filtered extracts for levels of tyrosine kinase activity. Although many methods of detecting tyrosine kinase activity are known, one method is described here.

[1311] Generally, the tyrosine kinase activity of a supernatant is evaluated by determining its ability to phosphorylate a tyrosine residue on a specific substrate (a biotinylated peptide). Biotinylated peptides that can be used for this purpose include PSK1 (corresponding to amino acids 6-20 of the cell division kinase cdc2-p34) and PSK2 (corresponding to amino acids 1-17 of gastrin). Both peptides are substrates for a range of tyrosine kinases and are available from Boehringer Mannheim.

[1312] The tyrosine kinase reaction is set up by adding the following components in order. First, add 10 ul of 5 uM Biotinylated Peptide, then 10 ul ATP/Mg₂₊ (5 mM ATP/50 mM MgCl₂), then 10 ul of 5× Assay Buffer (40 mM imidazole hydrochloride, pH7.3, 40 mM beta-glycerophosphate, 1 mM EGTA, 100 mM MgCl₂, 5 mM MnCl₂, 0.5 mg/ml BSA), then 5 ul of Sodium Vanadate (1 mM), and then 5 ul of water. Mix the components gently and preincubate the reaction mix at 30 degree C. for 2 min. Initial the reaction by adding 10 ul of the control enzyme or the filtered supernatant.

[1313] The tyrosine kinase assay reaction is then terminated by adding 10 ul of 120 mm EDTA and place the reactions on ice.

[1314] Tyrosine kinase activity is determined by transferring 50 ul aliquot of reaction mixture to a microtiter plate (MTP) module and incubating at 37 degree C. for 20 min. This allows the streptavidin coated 96 well plate to associate with the biotinylated peptide. Wash the MTP module with 300 ul/well of PBS four times. Next add 75 ul of anti-phospotyrosine antibody conjugated to horse radish peroxidase (anti-P-Tyr-POD(0.5 u/ml)) to each well and incubate at 37 degree C. for one hour. Wash the well as above.

[1315] Next add 100 ul of peroxidase substrate solution (Boehringer Mannheim) and incubate at room temperature for at least 5 mins (up to 30 min). Measure the absorbance of the sample at 405 nm by using ELISA reader. The level of bound peroxidase activity is quantitated using an ELISA reader and reflects the level of tyrosine kinase activity.

### Example 39

[1316] High-Throughput Screening Assay Identifying Phosphorylation Activity

[1317] As a potential alternative and/or complement to the assay of protein tyrosine kinase activity described in Example 38, an assay which detects activation (phosphorylation) of major intracellular signal transduction intermediates can also be used. For example, as described below one particular assay can detect tyrosine phosphorylation of the Erk-1 and Erk-2 kinases. However, phosphorylation of other molecules, such as Raf, JNK, p38 MAP, Map kinase kinase (MEK), MEK kinase, Src, Muscle specific kinase (MuSK), IRAK, Tec, and Janus, as well as any other phosphoserine, phosphotyrosine, or phosphothreonine molecule, can be detected by substituting these molecules for Erk-1 or Erk-2 in the following assay.

[1318] Specifically, assay plates are made by coating the wells of a 96-well ELISA plate with 1.0 ml of protein G (1 ug/ml) for 2 hr at room temp, (RT). The plates are then rinsed with PBS and blocked with 3% BSA/PBS for 1 hr at RT. The protein G plates are then treated with 2 commercial monoclonal antibodies (100 ng/well) against Erk-1 and Erk-2 (1 hr at RT) (Santa Cruz Biotechnology). (To detect other molecules, this step can easily be modified by substituting a monoclonal antibody detecting any of the above described molecules.) After 3-5 rinses with PBS, the plates are stored at 4 degree C. until use.

[1319] A431 cells are seeded at 20,000/well in a 96-well Loprodyne filterplate and cultured overnight in growth medium. The cells are then starved for 48 hr in basal medium (DMEM) and then treated with EGF (6 ng/well) or 50 ul of the supernatants obtained in Example 30 for 5-20 minutes. The cells are then solubilized and extracts filtered directly into the assay plate.

[1320] After incubation with the extract for 1 hr at RT, the wells are again rinsed. As a positive control, a commercial preparation of MAP kinase (10 ng/well) is used in place of A431 extract. Plates are then treated with a commercial polyclonal (rabbit) antibody (1 ug/ml) which specifically recognizes the phosphorylated epitope of the Erk-1 and Erk-2 kinases (1 hr at RT). This antibody is biotinylated by standard procedures. The bound polyclonal antibody is then quantitated by successive incubations with Europium-streptavidin and Europium fluorescence enhancing reagent in the Wallac DELFIA instrument (time-resolved fluorescence). An increased fluorescent signal over background indicates a phosphorylation by polypeptide of the present invention or a molecule induced by polypeptide of the present invention.

### Example 40

[1321] Assay for the Stimulation of Bone Marrow CD34+ Cell Proliferation

[1322] This assay is based on the ability of human CD34+ to proliferate in the presence of hematopoietic growth factors and evaluates the ability of isolated polypeptides expressed in mammalian cells to stimulate proliferation of CD34+ cells.

[1323] It has been previously shown that most mature precursors will respond to only a single signal. More immature precursors require at least two signals to respond. Therefore, to test the effect of polypeptides on hematopoietic activity of a wide range of progenitor cells, the assay contains a given polypeptide in the presence or absence of other hematopoietic growth factors. Isolated cells are cultured for 5 days in the presence of Stem Cell Factor (SCF) in combination with tested sample. SCF alone has a very limited effect on the proliferation of bone marrow (BM) cells, acting in such conditions only as a “survival” factor. However, combined with any factor exhibiting stimulatory effect on these cells (e.g., IL-3), SCF will cause a synergistic effect. Therefore, if the tested polypeptide has a stimulatory effect on hematopoietic progenitors, such activity can be easily detected. Since normal BM cells have a low level of cycling cells, it is likely that any inhibitory effect of a given polypeptide, or agonists or antagonists thereof, might not be detected. Accordingly, assays for an inhibitory effect on progenitors is preferably tested in cells that are first subjected to in vitro stimulation with SCF+IL+3, and then contacted with the compound that is being evaluated for inhibition of such induced proliferation.

[1324] Briefly, CD34+ cells are isolated using methods known in the art. The cells are thawed and resuspended in medium (QBSF 60 serum-free medium with 1% L-glutamine (500 ml) Quality Biological, Inc., Gaithersburg, Md. Cat#160-204-101). After several gentle centrifugation steps at 200×g, cells are allowed to rest for one hour. The cell count is adjusted to 2.5×10⁵ cells/ml. During this time, 100 μl of sterile water is added to the peripheral wells of a 96-well plate. The cytokines that can be tested with a given polypeptide in this assay is rhSCF (R&D Systems, Minneapolis, Minn., Cat #255-SC) at 50 ng/ml alone and in combination with rhSCF and rhIL-3 (R&D Systems, Minneapolis, Minn., Cat #203-ML) at 30 ng/ml. After one hour, 10 μl of prepared cytokines, 50 μl of the supernatants prepared in Example 30 (supernatants at 1:2 dilution=50 μl) and 20 μl of diluted cells are added to the media which is already present in the wells to allow for a final total volume of 100 μl. The plates are then placed in a 37° C./5% CO₂ incubator for five days.

[1325] Eighteen hours before the assay is harvested, 0.5 μCi/well of [3H] Thymidine is added in a 10 μl volume to each well to determine the proliferation rate. The experiment is terminated by harvesting the cells from each 96-well plate to a filtermat using the Tomtec Harvester 96. After harvesting, the filtermats are dried, trimmed and placed into OmniFilter assemblies consisting of one OmniFilter plate and one OmniFilter Tray. 60 μl Microscint is added to each well and the plate sealed with TopSeal-A press-on sealing film A bar code 15 sticker is affixed to the first plate for counting. The sealed plates are then loaded and the level of radioactivity determined via the Packard Top Count and the printed data collected for analysis. The level of radioactivity reflects the amount of cell proliferation.

[1326] The studies described in this example test the activity of a given polypeptide to stimulate bone marrow CD34+ cell proliferation. One skilled in the art could easily modify the exemplified studies to test the activity of polynucleotides (e.g., gene therapy), antibodies, agonists, and/or antagonists and fragments and variants thereof. As a nonlimiting example, potential antagonists tested in this assay would be expected to inhibit cell proliferation in the presence of cytokines and/or to increase the inhibition of cell proliferation in the presence of cytokines and a given polypeptide. In contrast, potential agonists tested in this assay would be expected to enhance cell proliferation and/or to decrease the inhibition of cell proliferation in the presence of cytokines and a given polypeptide.

[1327] The ability of a gene to stimulate the proliferation of bone marrow CD34+ cells indicates that polynucleotides and polypeptides corresponding to the gene are useful for the diagnosis and treatment of disorders affecting the immune system and hematopoiesis. Representative uses are described in the “Immune Activity” and “Infectious Disease” sections above, and elsewhere herein.

### Example 41

[1328] Assay for Extracellular Matrix Enhanced Cell Response (EMECR)

[1329] The objective of the Extracellular Matrix Enhanced Cell Response (EMECR) assay is to identify gene products (e.g., isolated polypeptides) that act on the hematopoietic stem cells in the context of the extracellular matrix (ECM) induced signal.

[1330] Cells respond to the regulatory factors in the context of signal(s) received from the surrounding microenvironment. For example, fibroblasts, and endothelial and epithelial stem cells fail to replicate in the absence of signals from the ECM. Hematopoietic stem cells can undergo self-renewal in the bone marrow, but not in in vitro suspension culture. The ability of stem cells to undergo self-renewal in vitro is dependent upon their interaction with the stromal cells and the ECM protein fibronectin (fn). Adhesion of cells to fn is mediated by the α₅.β₁ and α₄.β₁ integrin receptors, which are expressed by human and mouse hematopoietic stem cells. The factor(s) which integrate with the ECM environment and are responsible for stimulating stem cell self-renewal have not yet been identified. Discovery of such factors should be of great interest in gene therapy and bone marrow transplant applications

[1331] Briefly, polystyrene, non tissue culture treated, 96-well plates are coated with fn fragment at a coating concentration of 0.2 μg/cm². Mouse bone marrow cells are plated (1,000 cells/well) in 0.2 ml of serum-free medium. Cells cultured in the presence of IL-3 (5 ng/ml)+SCF (50 ng/ml) would serve as the positive control, conditions under which little self-renewal but pronounced differentiation of the stem cells is to be expected. Gene products of the invention (e.g., including, but not limited to, polynucleotides and polypeptides of the present invention, and supernatants produced in Example 30), are tested with appropriate negative controls in the presence and absence of SCF(5.0 ng/ml), where test factor supernatants represent 10% of the total assay volume. The plated cells are then allowed to grow by incubating in a low oxygen environment (5% CO₂, 7% O₂, and 88% N₂) tissue culture incubator for 7 days. The number of proliferating cells within the wells is then quantitated by measuring thymidine incorporation into cellular DNA. Verification of the positive hits in the assay will require phenotypic characterization of the cells, which can be accomplished by scaling up of the culture system and using appropriate antibody reagents against cell surface antigens and FACScan.

[1332] One skilled in the art could easily modify the exemplified studies to test the activity of polynucleotides (e.g., gene therapy), antibodies, agonists, and/or antagonists and fragments and variants thereof.

[1333] If a particular polypeptide of the present invention is found to be a stimulator of hematopoietic progenitors, polynucleotides and polypeptides corresponding to the gene encoding said polypeptide may be useful for the diagnosis and treatment of disorders affecting the immune system and hematopoiesis. Representative uses are described in the “Immune Activity” and “Infectious Disease” sections above, and elsewhere herein. The gene product may also be useful in the expansion of stem cells and committed progenitors of various blood lineages, and in the differentiation and/or proliferation of various cell types.

[1334] Additionally, the polynucleotides and/or polypeptides of the gene of interest and/or agonists and/or antagonists thereof, may also be employed to inhibit the proliferation and differentiation of hematopoietic cells and therefore may be employed to protect bone marrow stem cells from chemotherapeutic agents during chemotherapy. This antiproliferative effect may allow administration of higher doses of chemotherapeutic agents and, therefore, more effective chemotherapeutic treatment.

[1335] Moreover, polynucleotides and polypeptides corresponding to the gene of interest may also be useful for the treatment and diagnosis of hematopoietic related disorders such as, for example, anemia, pancytopenia, leukopenia, thrombocytopenia or leukemia since stromal cells are important in the production of cells of hematopoictic lineages. The uses include bone marrow cell ex-vivo culture, bone marrow transplantation, bone marrow reconstitution, radiotherapy or chemotherapy of neoplasia.

### Example 42

[1336] Human Dermal Fibroblast and Aortic Smooth Muscle Cell Proliferation

[1337] The polypeptide of interest is added to cultures of normal human dermal fibroblasts (NHDF) and human aortic smooth muscle cells (AoSMC) and two co-assays are performed with each sample. The first assay examines the effect of the polypeptide of interest on the proliferation of normal human dermal fibroblasts (NHDF) or aortic smooth muscle cells (AoSMC). Aberrant growth of fibroblasts or smooth muscle cells is a part of several pathological processes, including fibrosis, and restenosis. The second assay examines IL6 production by both NHDF and SMC. IL6 production is an indication of functional activation. Activated cells will have increased production of a number of cytokines and other factors, which can result in a proinflammatory or immunomodulatory outcome. Assays are run with and without co-TNFa stimulation, in order to check for costimulatory or inhibitory activity.

[1338] Briefly, on day 1, 96-well black plates are set up with 1000 cells/well (NHDF) or 2000 cells/well (AoSMC) in 100 μl culture media. NHDF culture media contains: Clonetics FB basal media, 1 mg/ml hFGF, 5 mg/ml insulin, 50 mg/ml gentamycin, 2% FBS, while AoSMC culture media contains Clonetics SM basal media, 0.5 μg/ml hEGF, 5 mg/ml insulin, 1 μg/ml hFGF, 50 mg/ml gentamycin, 50 μg/ml Amphotericin B, 5% FBS. After incubation at 37° C. for at least 4-5 hours culture media is aspirated and replaced with growth arrest media. Growth arrest media for NHDF contains fibroblast basal media, 50 mg/ml gentamycin, 2% FBS, while growth arrest media for AoSMC contains SM basal media, 50 mg/ml gentamycin, 50 μg/ml Amphotericin B, 0.4% FBS. Incubate at 37° C. until day 2.

[1339] On day 2, serial dilutions and templates of the polypeptide of interest are designed such that they always include media controls and known-protein controls. For both stimulation and inhibition experiments, proteins are diluted in growth arrest media. For inhibition experiments, TNFa is added to a final concentration of 2 ng/ml (NHDF) or 5 ng/ml (AoSMC). Add ⅓ vol media containing controls or polypeptides of the present invention and incubate at 37 degrees C./5% CO₂ until day 5.

[1340] Transfer 60 μl from each well to another labeled 96-well plate, cover with a plate-sealer, and store at 4 degrees C. until Day 6 (for IL6 ELISA). To the remaining 100 μl in the cell culture plate, aseptically add Alamar Blue in an amount equal to 10% of the culture volume (10 μl). Return plates to incubator for 3 to 4 hours. Then measure fluorescence with excitation at 530 nm and emission at 590 nm using the CytoFluor. This yields the growth stimulation/inhibition data.

[1341] On day 5, the IL6 ELISA is performed by coating a 96 well plate with 50-100 ul/well of Anti-Human IL6 Monoclonal antibody diluted in PBS, pH 7.4, incubate ON at room temperature.

[1342] On day 6, empty the plates into the sink and blot on paper towels. Prepare Assay Buffer containing PBS with 4% BSA. Block the plates with 200 μl/well of Pierce Super Block blocking buffer in PBS for 1-2 hr and then wash plates with wash buffer (PBS, 0.05% Tween-20). Blot plates on paper towels. Then add 50 μl/well of diluted Anti-Human IL-6 Monoclonal, Biotin-labeled antibody at 0.50 mg/ml. Make dilutions of IL-6 stock in media (30, 10, 3, 1, 0.3, 0 ng/ml). Add duplicate samples to top row of plate. Cover the plates and incubate for 2 hours at RT on shaker.

[1343] Plates are washed with wash buffer and blotted on paper towels. Dilute EU-labeled Streptavidin 1:1000 in Assay buffer, and add 100 μl/well. Cover the plate and incubate 1 h at RT. Plates are again washed with wash buffer and blotted on paper towels.

[1344] Add 100 μl/well of Enhancement Solution. Shake for 5 minutes. Read the plate on the Wallac DELFIA Fluorometer. Readings from triplicate samples in each assay were tabulated and averaged.

[1345] A positive result in this assay suggests AoSMC cell proliferation and that the polypeptide of the present invention may be involved in dermal fibroblast proliferation and/or smooth muscle cell proliferation. A positive result also suggests many potential uses of polypeptides, polynucleotides, agonists and/or antagonists of the polynucleotide/polypeptide of the present invention which gives a positive result. For example, inflammation and immune responses, wound healing, and angiogenesis, as detailed throughout this specification. Particularly, polypeptides of the present invention and polynucleotides of the present invention may be used in wound healing and dermal regeneration, as well as the promotion of vasculogenesis, both of the blood vessels and lymphatics. The growth of vessels can be used in the treatment of, for example, cardiovascular diseases. Additionally, antagonists of polypeptides and polynucleotides of the invention may be useful in treating diseases, disorders, and/or conditions which involve angiogenesis by acting as an anti-vascular agent (e.g., anti-angiogenesis). These diseases, disorders, and/or conditions are known in the art and/or are described herein, such as, for example, malignancies, solid tumors, benign tumors, for example hemangiomas, acoustic neuromas, neurofibromas, trachomas, and pyogenic granulomas; artheroscleric plaques; ocular angiogenic diseases, for example, diabetic retinopathy, retinopathy of prematurity, macular degeneration, corneal graft rejection, neovascular glaucoma, retrolental fibroplasia, rubeosis, retinoblastoma, uvietis and Pterygia (abnormal blood vessel growth) of the eye; rheumatoid arthritis; psoriasis; delayed wound healing; endometriosis; vasculogenesis; granulations; hypertrophic scars (keloids); nonunion fractures; seleroderma; trachoma; vascular adhesions; myocardial angiogenesis; coronary collaterals; cerebral collaterals; arteriovenous malformations; ischemic limb angiogenesis; Osler-Webber Syndrome; plaque neovascularization; telangiectasia; hemophiliac joints; angiofibroma; fibromuscular dysplasia; wound granulation; Crohn's disease; and atherosclerosis. Moreover, antagonists of polypeptides and polynucleotides of the invention may be useful in treating anti-hyperproliferative diseases and/or anti-inflammatory known in the art and/or described herein.

[1346] One skilled in the art could easily modify the exemplified studies to test the activity of polynucleotides (e.g., gene therapy), antibodies, agonists, and/or antagonists and fragments and variants thereof.

### Example 43

[1347] Cellular Adhesion Molecule (CAM) Expression on Endothelial Cells

[1348] The recruitment of lymphocytes to areas of inflammation and angiogenesis involves specific receptor-ligand interactions between cell surface adhesion molecules (CAMs) on lymphocytes and the vascular endothelium. The adhesion process, in both normal and pathological settings, follows a multi-step cascade that involves intercellular adhesion molecule-1 (ICAM-1), vascular cell adhesion molecule-1 (VCAM-1), and endothelial leukocyte adhesion molecule-1 (E-selectin) expression on endothelial cells (EC). The expression of these molecules and others on the vascular endothelium determines the efficiency with which leukocytes may adhere to the local vasculature and extravasate into the local tissue during the development of an inflammatory response. The local concentration of cytokines and growth factor participate in the modulation of the expression of these CAMs.

[1349] Briefly, endothelial cells (e.g., Human Umbilical Vein Endothelial cells (HUVECs)) are grown in a standard 96 well plate to confluence, growth medium is removed from the cells and replaced with 100 μl of 199 Medium (10% fetal bovine serum (FBS)). Samples for testing and positive or negative controls are added to the plate in triplicate (in 10 μl volumes). Plates are then incubated at 37° C. for either 5 h (selectin and integrin expression) or 24 h (integrin expression only). Plates are aspirated to remove medium and 100 μl of 0.1% paraformaldehyde-PBS(with Ca++ and Mg++) is added to each well. Plates are held at 4° C. for 30 min. Fixative is removed from the wells and wells are washed 1× with PBS(+Ca,Mg)+0.5% BSA and drained. 10 μl of diluted primary antibody is added to the test and control wells. Anti-ICAM-1-Biotin, Anti-VCAM-1-Biotin and Anti-E-selectin-Biotin are used at a concentration of 10 μg/ml (1:10 dilution of 0.1 mg/ml stock antibody). Cells are incubated at 37° C. for 30 min. in a humidified environment. Wells are washed three times with PBS(+Ca,Mg)+0.5% BSA. 20 μl of diluted ExtrAvidin-Alkaline Phosphatase (1:5,000 dilution, referred to herein as the working dilution) are added to each well and incubated at 37° C. for 30 min. Wells are washed three times with PBS(+Ca,Mg)+0.5% BSA. Dissolve 1 tablet of p-Nitrophenol Phosphate pNPP per 5 ml of glycine buffer (pH 10.4). 100 μl of pNPP substrate in glycine buffer is added to each test well. Standard wells in triplicate are prepared from the working dilution of the ExtrAvidin-Alkaline Phosphotase in glycine buffer: 1:5,000 (10⁰)>10^{-0.5}>10⁻¹>10^{-1.5}0.5 μl of each dilution is added to triplicate wells and the resulting AP content in each well is 5.50 ng, 1.74 ng, 0.55 ng, 0.18 ng. 100 μl of pNNP reagent is then added to each of the standard wells. The plate is incubated at 37° C. for 4 h. A volume of 50 μl of 3M NaOH is added to all wells. The plate is read on a plate reader at 405 nm using the background subtraction option on blank wells filled with glycine buffer only. Additionally, the template is set up to indicate the concentration of AP-conjugate in each standard well [5.50 ng; 1.74 ng; 0.55 ng; 0.18 ng]. Results are indicated as amount of bound AP-conjugate in each sample.

### Example 44

[1350] Alamar Blue Endothelial Cells Proliferation Assay

[1351] This assay may be used to quantitatively determine protein mediated inhibition of bFGF-induced proliferation of Bovine Lymphatic Endothelial Cells (LECs), Bovine Aortic Endothelial Cells (BAECs) or Human Microvascular Uterine Myometrial Cells (UTMECs). This assay incorporates a fluorometric growth indicator based on detection of metabolic activity. A standard Alamar Blue Proliferation Assay is prepared in EGM-2MV with 10 ng /ml of bFGF added as a source of endothelial cell stimulation. This assay may be used with a variety of endothelial cells with slight changes in growth medium and cell concentration. Dilutions of the protein batches to be tested are diluted as appropriate. Serum-free medium (GIBCO SFM) without bFGF is used as a non-stimulated control and Angiostatin or TSP-1 are included as a known inhibitory controls.

[1352] Briefly, LEC, BAECs or UTMECs are seeded in growth media at a density of 5000 to 2000 cells/well in a 96 well plate and placed at 37degrees C. overnight. After the overnight incubation of the cells, the growth media is removed and replaced with GIBCO EC-SFM. The cells are treated with the appropriate dilutions of the protein of interest or control protein sample(s) (prepared in SFM) in triplicate wells with additional bFGF to a concentration of 10 ng/ ml. Once the cells have been treated with the samples, the plate(s) is/are placed back in the 37° C. incubator for three days. After three days 10 ml of stock alamar blue (Biosource Cat#DAL1100) is added to each well and the plate(s) is/are placed back in the 37° C. incubator for four hours. The plate(s) are then read at 530 nm excitation and 590 nm emission using the CytoFluor fluorescence reader. Direct output is recorded in relative fluorescence units.

[1353] Alamar blue is an oxidation-reduction indicator that both fluoresces and changes color in response to chemical reduction of growth medium resulting from cell growth. As cells grow in culture, innate metabolic activity results in a chemical reduction of the immediate surrounding environment. Reduction related to growth causes the indicator to change from oxidized (non-fluorescent blue) form to reduced (fluorescent red) form (i.e., stimulated proliferation will produce a stronger signal and inhibited proliferation will produce a weaker signal and the total signal is proportional to the total number of cells as well as their metabolic activity). The background level of activity is observed with the starvation medium alone. This is compared to the output observed from the positive control samples (bFGF in growth medium) and protein dilutions.

### Example 45

[1354] Detection of Inhibition of a Mixed Lymphocyte Reaction

[1355] This assay can be used to detect and evaluate inhibition of a Mixed Lymphocyte Reaction (MLR) by gene products (e.g., isolated polypeptides). Inhibition of a MLR may be due to a direct effect on cell proliferation and viability, modulation of costimulatory molecules on interacting cells, modulation of adhesiveness between lymphocytes and accessory cells, or modulation of cytokine production by accessory cells. Multiple cells may be targeted by these polypeptides since the peripheral blood mononuclear fraction used in this assay includes T, B and natural killer lymphocytes, as well as monocytes and dendritic cells.

[1356] Polypeptides of interest found to inhibit the MLR may find application in diseases associated with lymphocyte and monocyte activation or proliferation. These include, but are not limited to, diseases such as asthma, arthritis, diabetes, inflammatory skin conditions, psoriasis, eczema, systemic lupus erythematosus, multiple sclerosis, glomerulonephritis, inflammatory bowel disease, crohn's disease, ulcerative colitis, arteriosclerosis, cirrhosis, graft vs. host disease, host vs. graft disease, hepatitis, leukemia and lymphoma.

[1357] Briefly, PBMCs from human donors are purified by density gradient centrifugation using Lymphocyte Separation Medium (LSM®, density 1.0770 g/ml, Organon Teknika Corporation, West Chester, Pa.). PBMCs from two donors are adjusted to 2×10⁶ cells/ml in RPMI-1640 (Life Technologies, Grand Island, N.Y.) supplemented with 10% FCS and 2 mM glutamine. PBMCs from a third donor is adjusted to 2×10⁵ cells/ml. Fifty microliters of PBMCs from each donor is added to wells of a 96-well round bottom microtiter plate. Dilutions of test materials (50 μl) is added in triplicate to microtiter wells. Test samples (of the protein of interest) are added for final dilution of 1:4; rhuIL-2 (R&D Systems, Minneapolis, Minn., catalog number 202-IL) is added to a final concentration of 1 μg/ml; anti-CD4 mAb (R&D Systems, clone 34930.11, catalog number MAB379) is added to a final concentration of 10 μg/ml. Cells are cultured for 7-8 days at 37° C. in 5% CO₂, and 1 μC of [³H] thymidine is added to wells for the last 16 hrs of culture. Cells are harvested and thymidine incorporation determined using a Packard TopCount. Data is expressed as the mean and standard deviation of triplicate determinations.

[1358] Samples of the protein of interest are screened in separate experiments and compared to the negative control treatment, anti-CD4 mAb, which inhibits proliferation of lymphocytes and the positive control treatment, IL-2 (either as recombinant material or supernatant), which enhances proliferation of lymphocytes.

[1359] One skilled in the art could easily modify the exemplified studies to test the activity of polynucleotides (e.g., gene therapy), antibodies, agonists, and/or antagonists and fragments and variants thereof.

### Example 46

[1360] Assays for Protease Activity

[1361] The following assay may be used to assess protease activity of the polypeptides of the invention.

[1362] Gelatin and casein zymography are performed essentially as described (Heusen et al., Anal. Biochem., 102:196-202 (1980); Wilson et al., Journal of Urology, 149:653-658 (1993)). Samples are run on 10% polyacryamide/0.1% SDS gels containing 1% gelain orcasein, soaked in 2.5% triton at room temperature for 1 hour, and in 0.1M glycine, pH 8.3 at 37° C. 5 to 16 hours. After staining in amido black areas of proteolysis apear as clear areas agains the blue-black background. Trypsin (Sigma T8642) is used as a positive control.

[1363] Protease activity is also determined by monitoring the cleavage of n-a-benzoyl-L-arginine ethyl ester (BAEE) (Sigma B-4500. Reactions are set up in (25 mMNaPO₄,1 mM EDTA, and 1 mM BAEE), pH 7.5. Samples are added and the change in adsorbance at 260 nm is monitored on the Beckman DU-6 spectrophotometer in the time-drive mode. Trypsin is used as a positive control.

[1364] Additional assays based upon the release of acid-soluble peptides from casein or hemoglobin measured as adsorbance at 280 nm or colorimetrically using the Folin method are performed as described in Bergmeyer, et al., Methods of Enzymatic Analysis, 5 (1984). Other assays involve the solubilization of chromogenic substrates (Ward, Applied Science, 251-317 (1983).

### Example 47

[1365] Identifying Serine Protease Substrate Specificity

[1366] Methods known in the art or described herein may be used to determine the substrate specificity of the polypeptides of the present invention having serine protease activity. A preferred method of determining substrate specificity is by the use of positional scanning synthetic combinatorial libraries as described in GB 2 324 529 (incorporated herein in its entirety).

### Example 48

[1367] Ligand Binding Assays

[1368] The following assay may be used to assess ligand binding activity of the polypeptides of the invention.

[1369] Ligand binding assays provide a direct method for ascertaining receptor pharmacology and are adaptable to a high throughput format. The purified ligand for a polypeptide is radiolabeled to high specific activity (50-2000 Ci/mmol) for binding studies. A determination is then made that the process of radiolabeling does not diminish the activity of the ligand towards its polypeptide. Assay conditions for buffers, ions, pH and other modulators such as nucleotides are optimized to establish a workable signal to noise ratio for both membrane and whole cell polypeptide sources. For these assays, specific polypeptide binding is defined as total associated radioactivity minus the radioactivity measured in the presence of an excess of unlabeled competing ligand. Where possible, more than one competing ligand is used to define residual nonspecific binding.

### Example 49

[1370] Functional Assay in Xenopus Oocytes

[1371] Capped RNA transcripts from linearized plasmid templates encoding the polypeptides of the invention are synthesized in vitro with RNA polymerases in accordance with standard procedures. In vitro transcripts are suspended in water at a final concentration of 0.2 mg/mi. Ovarian lobes are removed from adult female toads, Stage V defolliculated oocytes are obtained, and RNA transcripts (10 ng/oocytc) are injected in a 50 nl bolus using a microinjection apparatus. Two electrode voltage clamps are used to measure the currents from individual Xenopus oocytes in response polypeptides and polypeptide agonist exposure. Recordings are made in Ca2+ free Barth's medium at room temperature. The Xenopus system can be used to screen known ligands and tissue/cell extracts for activating ligands.

### Example 50

[1372] Microphysiometric Assays

[1373] Activation of a wide variety of secondary messenger systems results in extrusion of small amounts of acid from a cell. The acid formed is largely as a result of the increased metabolic activity required to fuel the intracellular signaling process. The pH changes in the media surrounding the cell are very small but are detectable by the CYTOSENSOR microphysiometer (Molecular Devices Ltd., Menlo Park, Calif.). The CYTOSENSOR is thus capable of detecting the activation of polypeptide which is coupled to an energy utilizing intracellular signaling pathway.

### Example 51

[1374] Extract/Cell Supernatant Screening

[1375] A large number of mammalian receptors exist for which there remains, as yet, no cognate activating ligand (agonist). Thus, active ligands for these receptors may not be included within the ligands banks as identified to date. Accordingly, the polypeptides of the invention can also be functionally screened (using calcium, cAMP, microphysiometer, oocyte electrophysiology, etc., functional screens) against tissue extracts to identify its natural ligands. Extracts that produce positive functional responses can be sequentially subfractionated until an activating ligand is isolated and identified.

### Example 52

[1376] Calcium and cAMP Functional Assays

[1377] Seven transmembrane receptors which are expressed in HEK 293 cells have been shown to be coupled functionally to activation of PLC and calcium mobilization and/or cAMP stimulation or inhibition. Basal calcium levels in the HEK 293 cells in receptor-transfected or vector control cells were observed to be in the normal, 100 nM to 200 nM, range. HEK 293 cells expressing recombinant receptors are loaded with fura 2 and in a single day >150 selected ligands or tissue/cell extracts are evaluated for agonist induced calcium mobilization. Similarly, HEK 293 cells expressing recombinant receptors are evaluated for the stimulation or inhibition of cAMP production using standard cAMP quantitation assays. Agonists presenting a calcium transient or cAMP fluctuation are tested in vector control cells to determine if the response is unique to the transfected cells expressing receptor.

### Example 53

[1378] ATP-Binding Assay

[1379] The following assay may be used to assess ATP-binding activity of polypeptides of the invention.

[1380] ATP-binding activity of the polypeptides of the invention may be detected using the ATP-binding assay described in U.S. Pat. No. 5,858,719, which is herein incorporated by reference in its entirety. Briefly, ATP-binding to polypeptides of the invention is measured via photoaffinity labeling with 8-azido-ATP in a competition assay. Reaction mixtures containing 1 mg/ml of the ABC transport protein of the present invention are incubated with varying concentrations of ATP, or the non-hydrolyzable ATP analog adenyl-5′-imidodiphosphate for 10 minutes at 4° C. A mixture of 8-azido-ATP (Sigma Chem. Corp., St. Louis, Mo.) plus 8-azido-ATP (³²P-ATP) (5 mCi/μmol, ICN, Irvine Calif.) is added to a final concentration of 100 μM and 0.5 ml aliquots are placed in the wells of a porcelain spot plate on ice. The plate is irradiated using a short wave 254 nm UV lamp at a distance of 2.5 cm from the plate for two one-minute intervals with a one-minute cooling interval in between. The reaction is stopped by addition of dithiothreitol to a final concentration of 2 mM. The incubations are subjected to SDS-PAGE electrophoresis, dried, and autoradiographed. Protein bands corresponding to the particular polypeptides of the invention are excised, and the radioactivity quantified. A decrease in radioactivity with increasing ATP or adenly-5′-imidodiphosphate provides a measure of ATP affinity to the polypeptides.

### Example 54

[1381] Small Molecule Screening

[1382] This invention is particularly useful for screening therapeutic compounds by using the polypeptides of the invention, or binding fragments thereof, in any of a variety of drug screening techniques. The polypeptide or fragment employed in such a test may be affixed to a solid support, expressed on a cell surface, free in solution, or located intracellularly. One method of drug screening utilizes eukaryotic or prokaryotic host cells which are stably transformed with recombinant nucleic acids expressing the polypeptide or fragment. Drugs are screened against such transformed cells in competitive binding assays. One may measure, for example, the formulation of complexes between the agent being tested and polypeptide of the invention.

[1383] Thus, the present invention provides methods of screening for drugs or any other agents which affect activities mediated by the polypeptides of the invention. These methods comprise contacting such an agent with a polypeptide of the invention or fragment thereof and assaying for the presence of a complex between the agent and the polypeptide or fragment thereof, by methods well known in the art. In such a competitive binding assay, the agents to screen are typically labeled. Following incubation, free agent is separated from that present in bound form, and the amount of free or uncomplexed label is a measure of the ability of a particular agent to bind to the polypeptides of the invention.

[1384] Another technique for drug screening provides high throughput screening for compounds having suitable binding affinity to the polypeptides of the invention, and is described in great detail in European Patent Application 84/03564, published on Sep. 13, 1984, which is herein incorporated by reference in its entirety. Briefly stated, large numbers of different small molecule test compounds are synthesized on a solid substrate, such as plastic pins or some other surface. The test compounds are reacted with polypeptides of the invention and washed. Bound polypeptides are then detected by methods well known in the art. Purified polypeptides are coated directly onto plates for use in the aforementioned drug screening techniques. In addition, non-neutralizing antibodies may be used to capture the peptide and immobilize it on the solid support.

[1385] This invention also contemplates the use of competitive drug screening assays in which neutralizing antibodies capable of binding polypeptides of the invention specifically compete with a test compound for binding to the polypeptides or fragments thereof. In this manner, the antibodies are used to detect the presence of any peptide which shares one or more antigenic epitopes with a polypeptide of the invention.

### Example 55

[1386] Phosphorylation Assay

[1387] In order to assay for phosphorylation activity of the polypeptides of the invention, a phosphorylation assay as described in U.S. Pat. No. 5,958,405 (which is herein incorporated by reference) is utilized. Briefly, phosphorylation activity may be measured by phosphorylation of a protein substrate using gamma-labeled ³²P-ATP and quantitation of the incorporated radioactivity using a gamma radioisotope counter. The polyp eptides of the invention are incubated with the protein substrate, ³²P-ATP, and a kinase buffer. The ³²P incorporated into the substrate is then separated from free ³²P-ATP by electrophoresis, and the incorporated ³²P is counted and compared to a negative control. Radioactivity counts above the negative control are indicative of phosphorylation activity of the polypeptides of the invention.

### Example 56

[1388] Detection of Phosphorylation Activity (Activation) of the Polypeptides of the Invention in the Presence of Polypeptide Ligands

[1389] Methods known in the art or described herein may be used to determine the phosphorylation activity of the polypeptides of the invention. A preferred method of determining phosphorylation activity is by the use of the tyrosine phosphorylation assay as described in U.S. Pat. No. 5,817,471 (incorporated herein by reference).

### Example 57

[1390] Identification of Signal Transduction Proteins that Interact with Polypeptides of the Present Invention

[1391] The purified polypeptides of the invention are research tools for the identification, characterization and purification of additional signal transduction pathway proteins or receptor proteins. Briefly, labeled receptor PTK polypeptide is useful as a reagent for the purification of molecules with which it interacts. In one embodiment of affinity purification, receptor PTK polypeptide is covalently coupled to a chromatography column. Cell-free extract derived from putative target cells, such as carcinoma tissues, is passed over the column, and molecules with appropriate affinity bind to the receptor PTK polypeptides, or specific phosphotyrosine-recognition domains thereof. The receptor PTK polypeptide interacting protein-complex is recovered from the column, dissociated, and the recovered molecule subjected to N-terminal protein sequencing. This amino acid sequence is then used to identify the captured molecule or to design degenerate oligonucleotide probes for cloning the relevant gene from an appropriate cDNA library.

### Example 58

[1392] IL-6 Bioassay

[1393] To test the proliferative effects of the polypeptides of the invention, the IL-6 Bioassay as described by Marz et al. is utilized (Proc. Natl. Acad. Sci., U.S.A., 95:3251-56 (1998), which is herein incorporated by reference). Briefly, IL-6 dependent B9 murine cells are washed three times in IL-6 free medium and plated at a concentration of 5,000 cells per well in 50 μl, and 50 μl of the IL-6-like polypeptide is added. After 68 hrs. at 37° C., the number of viable cells is measured by adding the tetrazolium salt thiazolyl blue (MTT) and incubating for a further 4 hrs. at 37° C. B9 cells are lysed by SDS and optical density is measured at 570 nm. Controls containing IL-6 (positive) and no cytokine (negative) are utilized. Enhanced proliferation in the test sample(s) relative to the negative control is indicative of proliferative effects mediated by polypeptides of the invention.

### Example 59

[1394] Support of Chicken Embryo Neuron Survival

[1395] To test whether sympathetic neuronal cell viability is supported by polypeptides of the invention, the chicken embryo neuronal survival assay of Senaldi et al is utilized (Proc. Natl. Acad. Sci., U.S.A., 96:11458-63 (1998), which is herein incorporated by reference). Briefly, motor and sympathetic neurons are isolated from chicken embryos, resuspended in L15 medium (with 10% FCS, glucose, sodium selenite, progesterone, conalbumin, putrescine, and insulin; Life Technologies, Rockville, Md.) and Dulbecco's modified Eagles medium [with 10% FCS, glutamine, penicillin, and 25 mM Hepes buffer (pH 7.2); Life Technologies, Rockville, Md.], respectively, and incubated at 37° C. in 5% CO₂ in the presence of different concentrations of the purified IL-6-like polypeptide, as well as a negative control lacking any cytokine. After 3 days, neuron survival is determined by evaluation of cellular morphology, and through the use of the calorimetric assay of Mosmann (Mossman, T., J. Immunol. Methods, 65:55-63 (1983)). Enhanced neuronal cell viability as compared to the controls lacking cytokine is indicative of the ability of the inventive purified IL-6-like polypeptide(s) to enhance the survival of neuronal cells.

### Example 60

[1396] Assay for Phosphatase Activity

[1397] The following assay may be used to assess serine/threonine phosphatase (PTPase) activity of the polypeptides of the invention.

[1398] In order to assay for serine/threonine phosphatase (PTPase) activity, assays can be utilized which are widely known to those skilled in the art. For example, the serine/threonine phosphatase (PSPase) activity is measured using a PSPase assay kit from New England Biolabs, Inc. Myelin basic protein (MyBP), a substrate for PSPase, is phosphorylated on serine and threonine residues with cAMP-dependent Protein Kinase in the presence of [³²P]ATP. Protein serine/threonine phosphatase activity is then determined by measuring the release of inorganic phosphate from 32P-labeled MyBP.

### Example 61

[1399] Interaction of Serine/Threonine Phosphatases with Other Proteins

[1400] The polypeptides of the invention with serine/threonine phosphatase activity as determined in Example 60 are research tools for the identification, characterization and purification of additional interacting proteins or receptor proteins, or other signal transduction pathway proteins. Briefly, labeled polypeptide(s) of the invention is useful as a reagent for the purification of molecules with which it interacts. In one embodiment of affinity purification, polypeptide of the invention is covalently coupled to a chromatography column. Cell-free extract derived from putative target cells, such as neural or liver cells, is passed over the column, and molecules with appropriate affinity bind to the polypeptides of the invention. The polypeptides of the invention-complex is recovered from the column, dissociated, and the recovered molecule subjected to N-terminal protein sequencing. This amino acid sequence is then used to identify the captured molecule or to design degenerate oligonucleotide probes for cloning the relevant gene from an appropriate cDNA library.

### Example 62

[1401] Assaying for Heparanase Activity

[1402] In order to assay for heparanase activity of the polypeptides of the invention, the heparanase assay described by Vlodavsky et al is utilized (Vlodavsky, I., et al., Nat. Med., 5:793-802 (1999)). Briefly, cell lysates, conditioned media or intact cells (1×10⁶ cells per 35-mm dish) are incubated for 18 hrs at 37° C., pH 6.2-6.6, with ³⁵S-labeled ECM or soluble ECM derived peak I proteoglycans. The incubation medium is centrifuged and the supernatant is analyzed by gel filtration on a Sepharose CL-6B column (0.9×30 cm). Fractions are eluted with PBS and their radioactivity is measured. Degradation fragments of heparan sulfate side chains are eluted from Sepharose 6B at 0.5<Kₐᵥ<0.8 (peak II). Each experiment is done at least three times. Degradation fragments corresponding to “peak II,” as described by Vlodavsky et al., is indicative of the activity of the polypeptides of the invention in cleaving heparan sulfate.

### Example 63

[1403] Immobilization of Biomolecules

[1404] This example provides a method for the stabilization of polypeptides of the invention in non-host cell lipid bilayer constucts (see, e.g., Bieri et al., Nature Biotech 17:1105-1108 (1999), hereby incorporated by reference in its entirety herein) which can be adapted for the study of polypeptides of the invention in the various functional assays described above. Briefly, carbohydrate-specific chemistry for biotinylation is used to confine a biotin tag to the extracellular domain of the polypeptides of the invention, thus allowing uniform orientation upon immobilization. A 50 uM solution of polypeptides of the invention in washed membranes is incubated with 20 mM NaIO4 and 1.5 mg/ml (4 mM) BACH or 2 mg/ml (7.5 mM) biotin-hydrazide for 1 hr at room temperature (reaction volume, 150 ul). Then the sample is dialyzed (Pierce Slidealizer Cassett, 10 kDa cutoff; Pierce Chemical Co., Rockford Ill.) at 4 C. first for 5 h, exchanging the buffer after each hour, and finally for 12 h against 500 ml buffer R (0.15 M NaCl, 1 mM MgCl2, 10 mM sodium phosphate, pH7). Just before addition into a cuvette, the sample is diluted 1:5 in buffer ROG50 (Buffer R supplemented with 50 mM octylglucoside).

### Example 64

[1405] Taqman

[1406] Quantitative PCR (QPCR). Total RNA from cells in culture are extracted by Trizol separation as recommended by the supplier (LifeTechnologies). (Total RNA is treated with DNase I (Life Technologies) to remove any contaminating genomic DNA before reverse transcription.) Total RNA (50 ng) is used in a one-step, 50 ul, RT-QPCR, consisting of Taqman Buffer A (Perkin-Elmer; 50 mM KCl/10 mM Tris, pH 8.3), 5.5 mM MgCl₂, 240 μM each dNTP, 0.4 units RNase inhibitor(Promega), 8% glycerol, 0.012% Tween-20, 0.05% gelatin, 0.3 uM primers, 0.1 uM probe, 0.025 units Amplitaq Gold (Perkin-Elmer) and 2.5 units Superscript II reverse transcriptase (Life Technologies). As a control for genomic contamination, parallel reactions are setup without reverse transcriptase. The relative abundance of (unknown) and 18 S RNAs are assessed by using the Applied Biosystems Prism 7700 Sequence Detection System (Livak, K. J., Flood, S. J., Marmaro, J., Giusti, W. & Deetz, K. (1995) PCR Methods Appl. 4, 357-362). Reactions are carried out at 48° C. for 30 min, 95° C. for 10 min, followed by 40 cycles of 95° C. for 15 s, 60° C. for 1 min. Reactions are performed in triplicate.

[1407] Primers (f & r) and FRET probes sets are designed using Primer Express Software (Perkin-Elmer). Probes are labeled at the 5′-end with the reporter dye 6-FAM and on the 3′-end with the quencher dye TAMRA (Biosource International, Camarillo, Calif. or Perkin-Elmer).

### Example 65

[1408] Assays for Metalloproteinase Activity

[1409] Metalloproteinases (EC 3.4.24.-) are peptide hydrolases which use metal ions, such as Zn²⁺, as the catalytic mechanism. Metalloproteinase activity of polypeptides of the present invention can be assayed according to the following methods.

[1410] Proteolysis of alpha-2-macroglobulin

[1411] To confirm protease activity, purified polypeptides of the invention are mixed with the substrate alpha-2-macroglobulin (0.2 unit/ml; Boehringer Mannheim, Germany) in 1+ assay buffer (50 mM HEPES, pH 7.5, 0.2 M NaCl, 10 mM CaCl₂, 25 μM ZnCl₂ and 0.05% Brij-35) and incubated at 37° C. for 1-5 days. Trypsin is used as positive control. Negative controls contain only alpha-2-macroglobulin in assay buffer. The samples are collected and boiled in SDS-PAGE sample buffer containing 5% 2-mercaptoethanol for 5-min, then loaded onto 8% SDS-polyacrylamide gel. After electrophoresis the proteins are visualized by silver staining. Proteolysis is evident by the appearance of lower molecular weight bands as compared to the negative control.

[1412] Inhibition of alpha-2-macroglobulin Proteolysis by Inhibitors of Metalloproteinases

[1413] Known metalloproteinase inhibitors (metal chelators (EDTA, EGTA, AND HgCl₂), peptide metalloproteinase inhibitors (TIMP-1 and TIMP-2), and commercial small molecule MMP inhibitors) are used to characterize the proteolytic activity of polypeptides of the invention. The three synthetic MMP inhibitors used are: MMP inhibitor I, [IC₅₀=1.0 μM against MMP-1 and MMP-8; IC₅₀=30 μM against MMP-9; IC₅₀=150 μM against MMP-3]; MMP-3 (stromelysin-1) inhibitor I [IC₅₀=5 μM against MMP-3], and MMP-3 inhibitor II [Kᵢ=130 nM against MMP-3]; inhibitors available through Calbiochem, catalog #444250, 444218, and 444225, respectively). Briefly, different concentrations of the small molecule MMP inhibitors are mixed with purified polypeptides of the invention (50 μg/ml) in 22.9 μl of 1× HEPES buffer (50 mM HEPES, pH 7.5, 0.2 M NaCl, 10 mM CaCl₂, 25 μM ZnCl₂ and 0.05% Brij-35) and incubated at room temperature (24° C.) for 2-hr, then 7.1 μl of substrate alpha-2-macroglobulin (0.2 unit/ml) is added and incubated at 37° C. for 20-hr. The reactions are stopped by adding 4× sample buffer and boiled immediately for 5 minutes. After SDS-PAGE, the protein bands are visualized by silver stain.

[1414] Synthetic Fluorogenic Peptide Substrates Cleavage Assay

[1415] The substrate specificity for polypeptides of the invention with demonstrated metalloproteinase activity can be determined using synthetic fluorogenic peptide substrates (purchased from BACHEM Bioscience Inc). Test substrates include, M-1985, M-2225, M-2105, M-2110, and M-2255. The first four are MMP substrates and the last one is a substrate of tumor necrosis factor-α (TNF-α) converting enzyme (TACE). All the substrates are prepared in 1:1 dimethyl sulfoxide (DMSO) and water. The stock solutions are 50-500 μM. Fluorescent assays are performed by using a Perkin Elmer LS 50B luminescence spectrometer equipped with a constant temperature water bath. The excitation λ is 328 nm and the emission λ is 393 nm. Briefly, the assay is carried out by incubating 176 μl 1× HEPES buffer (0.2 M NaCl, 10 mM CaCl₂, 0.05% Brij-35 and 50 mM HEPES, pH 7.5) with 4 μl of substrate solution (50 μM) at 25° C. for 15 minutes, and then adding 20 μl of a purified polypeptide of the invention into the assay cuvett. The final concentration of substrate is 1 μM. Initial hydrolysis rates are monitored for 30-min.

### Example 66

[1416] Characterization of the cDNA Contained in a Deposited Plasmid

[1417] The size of the cDNA insert contained in a deposited plasmid may be routinely determined using techniques known in the art, such as PCR amplification using synthetic primers hybridizable to the 3′ and 5′ ends of the cDNA sequence. For example, two primers of 17-30 nucleotides derived from each end of the cDNA (i.e., hybridizable to the absolute 5′ nucleotide or the 3′ nucleotide end of the sequence of SEQ ID NO:X, respectively) are synthesized and used to amplify the cDNA using the deposited cDNA plasmid as a template. The polymerase chain reaction is carried out under routine conditions, for instance, in 25 ul of reaction mixture with 0.5 ug of the above cDNA template. A convenient reaction mixture is 1.5-5 mM MgCl₂, 0.01% (w/v) gelatin, 20 uM each of dATP, dCTP, dGTP, dTTP, 25 pmol of each primer and 0.25 Unit of Taq polymerase. Thirty five cycles of PCR (denaturation at 94 degree C. for 1 min; annealing at 55 degree C. for 1 min; elongation at 72 degree C. for 1 min) are performed with a Perkin-Elmer Cetus automated thermal cycler. The amplified product is analyzed by agarose gel electrophoresis. The PCR product is verified to be the selected sequence by subcloning and sequencing the DNA product.

[1418] It will be clear that the invention may be practiced otherwise than as particularly described in the foregoing description and examples. Numerous modifications and variations of the present invention are possible in light of the above teachings and, therefore, are within the scope of the appended claims.

[1419] The entire disclosure of each document cited (including patents, patent applications, journal articles, abstracts, laboratory manuals, books, or other disclosures) in the Background of the Invention, Detailed Description, and Examples is hereby incorporated herein by reference. In addition, the CD-R copy of the sequence listing submitted herewith and the corresponding computer readable form are both incorporated herein by reference in their entireties. The specification and Sequence Listing of International Application No. PCT/US01/16450, filed on May 18, 2000, is herein incorporated by reference in its entirety. Additionally, the specification and Sequence Listing of U.S. application Ser. No. 60/205,515, filed on May 19, 2000, are herein incorporated by reference in their entirety.

What is claimed is:

1. An isolated nucleic acid molecule comprising a polynucleotide having a nucleotide sequence at least 95% identical to a sequence selected from the group consisting of:
(a) a polynucleotide fragment of SEQ ID NO:X or a polynucleotide fragment of the cDNA sequence contained in Clone ID NO:Z, which is hybridizable to SEQ ID NO:X;
(b) a polynucleotide encoding a polypeptide fragment of SEQ ID NO:Y or a polypeptide fragment encoded by the cDNA sequence contained in cDNA Clone ID NO:Z, which is hybridizable to SEQ ID NO:X;
(c) a polynucleotide encoding a polypeptide fragment of a polypeptide encoded by SEQ ID NO:X or a polypeptide fragment encoded by the cDNA sequence contained in cDNA Clone ID NO:Z, which is hybridizable to SEQ ID NO:X;
(d) a polynucleotide encoding a polypeptide domain of SEQ ID NO:Y or a polypeptide domain encoded by the cDNA sequence contained in cDNA Clone ID NO:Z, which is hybridizable to SEQ ID NO:X;
(e) a polynucleotide encoding a polypeptide epitope of SEQ ID NO:Y or a polypeptide epitope encoded by the cDNA sequence contained in cDNA Clone ID NO:Z, which is hybridizable to SEQ ID NO:X;
(f) a polynucleotide encoding a polypeptide of SEQ ID NO:Y or the cDNA sequence contained in cDNA Clone ID NO:Z, which is hybridizable to SEQ ID NO:X, having biological activity;
(g) a polynucleotide which is a variant of SEQ ID NO:X;
(h) a polynucleotide which is an allelic variant of SEQ ID NO:X;
(i) a polynucleotide which encodes a species homologue of the SEQ ID NO:Y;
(j) a polynucleotide capable of hybridizing under stringent conditions to any one of the polynucleotides specified in (a)-(i), wherein said polynucleotide does not hybridize under stringent conditions to a nucleic acid molecule having a nucleotide sequence of only A residues or of only T residues.

2. The isolated nucleic acid molecule of claim 1, wherein the polynucleotide fragment comprises a nucleotide sequence encoding a protein.

3. The isolated nucleic acid molecule of claim 1, wherein the polynucleotide fragment comprises a nucleotide sequence encoding the sequence identified as SEQ ID NO:Y or the polypeptide encoded by the cDNA sequence contained in cDNA Clone ID NO:Z, which is hybridizable to SEQ ID NO:X.

4. The isolated nucleic acid molecule of claim 1, wherein the polynucleotide fragment comprises the entire nucleotide sequence of SEQ ID NO:X or the cDNA sequence contained in cDNA Clone ID NO:Z, which is hybridizable to SEQ ID NO:X.

5. The isolated nucleic acid molecule of claim 2, wherein the nucleotide sequence comprises sequential nucleotide deletions from either the C-terminus or the N-terminus.

6. The isolated nucleic acid molecule of claim 3, wherein the nucleotide sequence comprises sequential nucleotide deletions from either the C-terminus or the N-terminus.

7. A recombinant vector comprising the isolated nucleic acid molecule of claim 1.

8. A method of making a recombinant host cell comprising the isolated nucleic acid molecule of claim 1.

9. A recombinant host cell produced by the method of claim 8.

10. The recombinant host cell of claim 9 comprising vector sequences.

11. An isolated polypeptide comprising an amino acid sequence at least 90% identical to a sequence selected from the group consisting of:
(a) a polypeptide fragment of SEQ ID NO:Y or the encoded sequence contained in cDNA Clone ID NO:Z;
(b) a polypeptide fragment of SEQ ID NO:Y or the encoded sequence contained in cDNA Clone ID NO:Z, having biological activity;
(c) a polypeptide domain of SEQ ID NO:Y or the encoded sequence contained in cDNA Clone ID NO:Z;
(d) a polypeptide epitope of SEQ ID NO:Y or the encoded sequence contained in cDNA Clone ID NO:Z;
(e) a full length protein of SEQ ID NO:Y or the encoded sequence contained in cDNA Clone ID NO:Z;
(f) a variant of SEQ ID NO:Y;
(g) an allelic variant of SEQ ID NO:Y; or
(h) a species homologue of the SEQ ID NO:Y.

12. The isolated polypeptide of claim 11, wherein the full length protein comprises sequential amino acid deletions from either the C-terminus or the N-terminus.

13. An isolated antibody that binds specifically to the isolated polypeptide of claim 11.

14. A recombinant host cell that expresses the isolated polypeptide of claim 11.

15. A method of making an isolated polypeptide comprising:
(a) culturing the recombinant host cell of claim 14 under conditions such that said polypeptide is expressed; and
(b) recovering said polypeptide.

16. The polypeptide produced by claim 15.

17. A method for preventing, treating, or ameliorating a medical condition, comprising administering to a mammalian subject a therapeutically effective amount of the polynucleotide of claim 1.

18. A method of diagnosing a pathological condition or a susceptibility to a pathological condition in a subject comprising:
(a) determining the presence or absence of a mutation in the polynucleotide of claim 1; and
(b) diagnosing a pathological condition or a susceptibility to a pathological condition based on the presence or absence of said mutation.

19. A method of diagnosing a pathological condition or a susceptibility to a pathological condition in a subject comprising:
(a) determining the presence or amount of expression of the polypeptide of claim 11 in a biological sample; and
(b) diagnosing a pathological condition or a susceptibility to a pathological condition based on the presence or amount of expression of the polypeptide.

20. A method for identifying a binding partner to the polypeptide of claim 11 comprising:
(a) contacting the polypeptide of claim 11 with a binding partner; and
(b) determining whether the binding partner effects an activity of the polypeptide.

21. The gene corresponding to the cDNA sequence of SEQ ID NO:Y.

22. A method of identifying an activity in a biological assay, wherein the method comprises:
(a) expressing SEQ ID NO:X in a cell;
(b) isolating the supernatant;
(c) detecting an activity in a biological assay; and
(d) identifying the protein in the supernatant having the activity.

23. The product produced by the method of claim 20.

24. A method for preventing, treating, or ameliorating a medical condition, comprising administering to a mammalian subject a therapeutically effective amount of the polypeptide of claim 11.

The application's sequence listing, which the Patent Office published only in electronic form, follows.

SEQUENCE LISTING (2876 sequences)

SEQ ID NO: 1 - DNA, 733 bp, Homo sapiens
gggatccggagcccaaatcttctgacaaaactcacacatgcccaccgtgcccagcacctgaattcgagggtgcaccgtcagtcttcctcttccccccaaaacccaaggacaccctcatgatctcccggactcctgaggtcacatgcgtggtggtggacgtaagccacgaagaccctgaggtcaagttcaactggtacgtggacggcgtggaggtgcataatgccaagacaaagccgcgggaggagcagtacaacagcacgtaccgtgtggtcagcgtcctcaccgtcctgcaccaggactggctgaatggcaaggagtacaagtgcaaggtctccaacaaagccctcccaacccccatcgagaaaaccatctccaaagccaaagggcagccccgagaaccacaggtgtacaccctgcccccatcccgggatgagctgaccaagaaccaggtcagcctgacctgcctggtcaaaggcttctatccaagcgacatcgccgtggagtgggagagcaatgggcagccggagaacaactacaagaccacgcctcccgtgctggactccgacggctccttcttcctctacagcaagctcaccgtggacaagagcaggtggcagcaggggaacgtcttctcatgctccgtgatgcatgaggctctgcacaaccactacacgcagaagagcctctccctgtctccgggtaaatgagtgcgacggccgcgactctagaggat

SEQ ID NO: 2 - protein, 5 aa, Homo sapiens
  MISC_FEATURE (3): Xaa equals any of the twenty naturally occurring L-amino acids
WSXWS

SEQ ID NO: 3 - DNA, 86 bp, Artificial Sequence
  Contains 4 tandem copies of the GAS binding site found in the IRF promoter (Rothman et al., Immunity 1:457-468 (1994)), 18 nucleotides complementary to the SV40 early promoter,and a Xho I restriction site.
gcgcctcgagatttccccgaaatctagatttccccgaaatgatttccccgaaatgatttccccgaaatatctgccatctcaattag

SEQ ID NO: 4 - DNA, 27 bp, Artificial Sequence
  Contains a Hind III restriction site.
gcggcaagctttttgcaaagcctaggc

SEQ ID NO: 5 - DNA, 271 bp, Artificial Sequence
  Contains GAS binding sites found in the IRF1 promoter (Rothman et al., Immunity 1:457-468 (1994)).
ctcgagatttccccgaaatctagatttccccgaaatgatttccccgaaatgatttccccgaaatatctgccatctcaattagtcagcaaccatagtcccgcccctaactccgcccatcccgcccctaactccgcccagttccgcccattctccgccccatggctgactaattttttttatttatgcagaggccgaggccgcctcggcctctgagctattccagaagtagtgaggaggcttttttggaggcctaggcttttgcaaaaagctt

SEQ ID NO: 6 - DNA, 32 bp, Artificial Sequence
  Contains a Xho I restriction site.
gcgctcgagggatgacagcgatagaaccccgg

SEQ ID NO: 7 - DNA, 31 bp, Artificial Sequence
  Contains a Hind III restriction site.
gcgaagcttcgcgactccccggatccgcctc

SEQ ID NO: 8 - DNA, 12 bp, Homo sapiens
ggggactttccc

SEQ ID NO: 9 - DNA, 73 bp, Artificial Sequence
  Contains 4 tandem copies of the NF-KB binding site, 18 nucleotides complementary to the 5' end of the SV40 early promoter sequence, and a XhoI restriction site.
gcggcctcgaggggactttcccggggactttccggggactttccgggactttccatcctgccatctcaattag

SEQ ID NO: 10 - DNA, 256 bp, Artificial Sequence
  Contains NF-KB binding sites.
ctcgaggggactttcccggggactttccggggactttccgggactttccatctgccatctcaattagtcagcaaccatagtcccgcccctaactccgcccatcccgcccctaactccgcccagttccgcccattctccgccccatggctgactaattttttttatttatgcagaggccgaggccgcctcggcctctgagctattccagaagtagtgaggaggcttttttggaggcctaggcttttgcaaaaagctt

SEQ ID NO: 11 - DNA, 482 bp, Homo sapiens
  misc_feature (419)..(419): n equals a,t,g, or c
  misc_feature (429)..(429): n equals a,t,g, or c
  misc_feature (440)..(440): n equals a,t,g, or c
  misc_feature (452)..(452): n equals a,t,g, or c
tcgacccacgcgtccgctgccttctagtttttagtctcagaccagaccaccgggcgcgccccgatgccgagcccgcagcttctggtgctcttcggcagccagacaggcacggctcaggatgtgtcggagagactgggtcgcgaggcccggcgccggcggcttggctgccgggtgcaggccctggactcctacccggtggtgaatctgattaacgagcccctggtgatatttgtttgtgcaactacaggccaaggagacccccctgacaacatgaagaacttctggaggtttatattccggaagaacctgccctccactgccctctgtcagatggatttggccgtcctggggcttcggggatcctcatacgccaatttcaatttcgtgggccaagaagtgcaccgaagggtaatggcagntttggggggnagggcctcctnggcccgtgttgncttgggcgatgaaccagcatgaattggggg

SEQ ID NO: 12 - DNA, 623 bp, Homo sapiens
  misc_feature (84)..(84): n equals a,t,g, or c
  misc_feature (171)..(171): n equals a,t,g, or c
  misc_feature (538)..(538): n equals a,t,g, or c
  misc_feature (549)..(549): n equals a,t,g, or c
  misc_feature (568)..(568): n equals a,t,g, or c
aggtgagccttttaagttcatttcacaaagcctggataaagttgctgtttttataatttgaaaaagataattttgaaaacttanattttttttttccttttgaacaaagttgaccgctgttgccttgtcttctcacccagggcatgtgggacgtgctcttggctgtgaaantgtggggtgtgtgcagagagcctgggcctggggttcccagaggagcatcttggggaggcctgcacagtaggatcctgcccatgtgccctgagctgatgtgccagccgtgtgaaagtgctctgacaccgtgggccgtacggagggcctccagaggggatgttgaaggcaggagacagctgtgccgggagcctctgcaggccgtggagggcccgtcctgtgacgtgtcttgccctccctgcttccacctctggtgtttgcttgcttcttgcgttcagggaccctttgcttgcagcgccatgttcttgcatctttcttttgctttttgtaagcttttgggatctttcagttttgatgggattgggacaancatttatcctncttgttgggcacgggtttnaacctaaaaggaaagaaggacagagatttttttcccacaagaagggttaaagttt

SEQ ID NO: 13 - DNA, 556 bp, Homo sapiens
  misc_feature (408)..(408): n equals a,t,g, or c
ggcacgagctgggccgggccaccactgccctcttgctcagtttccttggccgccgcaccatccaggcgggttcccaggccatggccggcctcgccattctagccaacatgctggtgccgcaagatttgcagaccctgcgtgtggtctttgctgtgctgggraagggatgttttgggataagcctaacctgcctcaccatctacaaggctgaactctttccaacgccagtgcggatgacagcagatggcattctgcatacagtgggccggctgggggctatgatgggtcccctgatcctgatgagccgccaagccctgcccctgctgcctcctctcctctatggcgttatctccattgcttccagcctggttgtgctgttcttcctcccggagacccagggacttccgntccctgacactatccaggacctggagagccagaaatcaacagcagcccagggcaaccggcaagaggccttcactgtggaaagtacctcgcttttagaaattgttgccttgcatggagccctttagtcaaagattcctgggaaaggatt

SEQ ID NO: 14 - DNA, 994 bp, Homo sapiens
  misc_feature (7)..(7): n equals a,t,g, or c
  misc_feature (498)..(498): n equals a,t,g, or c
ggcacgnagacagggtttcaccatgttggccaggctggtcttgcactcctgacctcgtgatccgcccgcctcagcctcgcacagtgctgggattacagatgtgagccaccgtgcccggcgcaaatgcatttattgcatacaggacggtgcacctggactgtgctggccgaatgcttctracactggagaaggcggaaaccaaagcccaccttccttcactcctgtctccagttaccctccagatagacgtttgggarggttctcmrgcraktagatktagraaktktgawktgctgttgtgtttgttggcramramactgtkgamtwrgggcatggtttgtgcttggtktkaarccycttcttccttcccagggaccctgatgccccacaaccctgcggvaccacagagccgaccacaagctccagtctgtgtgggatcgatsatsrggsgytcaacaagcagattatggagtacaaaagggggaaagttaagggttnggggccttgtttgcaggggcaggtggttgaattgacaacgcagtggaaaggggagggaggggcccaacccccgcttggagcaggacagttccttcaaggattacctttcagggggaggagttggaagatgaacttggaacttggttggtgcccccggagtacgaatgttatgccccggaacacagaggagttggaggcagagagaggaggtggcagaacagaggatggccacagctgcggagcaagcagggagtagatggagaggctctgcccatcccacatttgcagggaaaagcattggcacgcaacgcagcatgtggcttcattgaggcagttgatggagttaaaccatctgctcttctgctacttcaacattttctagcttttccatgtatctaaacacaatttgctacacaagtcactgtttttttttccatgcactgtgtgtaatttaaaaattaaatggccatcttatcacaaaaaaaaaaaaaaaaaa

SEQ ID NO: 15 - DNA, 431 bp, Homo sapiens
ttttatatcttactatgtttctcagcagtgtagggttttctgtagtgatgatgtccatatggccatatctccaaaagattgatccgacagctgatacaagttttttgggctgggttattgcttcatatagtcttggccaaatggtagcttcacctatatttggtttatggtctaattatagaccaagaaaagagcctcttattgtctccatcttgatttccgtggcagccaactgcctctatgcatatctccacatcccagcttctcataataaatactacatgctggttgctcgtggattgttgggaattggagcaggtaaggttgtatgtatatgtttggttgtgtcatattcacattcattctgacatttatggctcacttttaactggtctcatccccttttaaactcatatttcacagttcaacat

SEQ ID NO: 16 - DNA, 630 bp, Homo sapiens
tcctaatgcctgtcacttcccaggacgctggcagcagcagcagcccggagcccccgagccctcggaggtttgcgtgtccttccccgcgatctgattggataaagtgggggctcgacggtggccgacgtgggacagtctggctgtggcaggggtctcggaaaccatgggttattgcagtggcaggtgcacgcttatctttatctgtggcatgcaactggtttgtgtgctggagaggcaaatatttgacttccttggatatcagtgggcacctatcctggcaaattttgtacatattattatcgtcattcttggtttgtttggaactattcaatatagacctcgttacataacaggatatgctgtctggctagtcctctgggttacgtggaatgtgtttgttatctgcttctatttggaggctggggacctctcaaaggaaacagaccttatcckgacttttaatatatcaatgcaccgatcttggtggakggagaatggaccaggatgtacggtgactcatggacacctgccccagactgggccccagaagaccatcgctacatcacggtctcaggtgtttgctggataccatacatagartggctcatagttccctccagattgtcctcg

SEQ ID NO: 17 - DNA, 970 bp, Homo sapiens
  misc_feature (959)..(959): n equals a,t,g, or c
  misc_feature (962)..(962): n equals a,t,g, or c
aattcggcacgagtgcaacccttactcacttctgtgggagatgctatagaggccataatcatyaccatgcatcaagaagacttttctgggtcattatccagctcaggaaaacctgatgttccttgttctctgtacatgaaggagctacaaggtttcattgccagagttatgagtgactattttaaacactttgaatgcttggattttgtctttgacaacactgaggctattgcccaaagagctgttgaactttttatccgccatgccagtctcataagacctcttggtgaaggtgggaaaatgcgacttgctgctgattttgcacagatggagttggctgtgggtccattctgtagacgagtatctgatttaggaaagtcctatcggatgctgagatcattcagacctctgctcttccaggcaagtgaacatgtagccagtagtcctgcattgggggatgtgattccgttcagcatcattattcagtttttgttcacgagagcacccgctgaactgaaatctcctttccagagggcagagtggtcccacacacgcttctctcagtggctggatgaccatccatctgaaaaggacaggctcctcctcatcaggggagccctggaagcttatgttcaatcagtgagaagtagagaaggcaaagaatttgcaccagtttatcccataatggttcagctgcttcaaaaggctatgtctgctcttcagtaatgacatgaaatctttgttcatctccactttgtgctaacccattcatagttggcagttaaacacatactccaaaagactgctactatctactattttaaggatgtaattgattgttcggtatttcctatcgacgkttatttaccctttrgcacttatacttagcataaaaatgttgagttatcaccaccaaaaaaaaaaaaaaaaaacccggggggggccccgtaccccattgnccnttgggggg

SEQ ID NO: 18 - DNA, 415 bp, Homo sapiens
  misc_feature (16)..(16): n equals a,t,g, or c
  misc_feature (241)..(241): n equals a,t,g, or c
gtgtccaggaacaggntcgatgacccttgtaggacactgggggcgctgttacctcctcaccgagcgcaggtcgctgccctgtggtctaacagagcatgtattcagacccgcaccctcatctttggcggatgctgaagatgcaagaaaagccacctgcttgatgcttgcttggcctggagatcgttctcctcttggtctgtgtcccgtggcggcaggccttgcagggaggggggcgcaacantggggagcatccgaatggagtcccactttccaaccttggggctgctgcatcggcctcccacatgtgacctcccaggccctgatgctgcttcttttgaagggggtgaggcctgatgggcaggtcaagtcggtccttcagggaggggtctacctcccttgccccggggtggtgccg

SEQ ID NO: 19 - DNA, 460 bp, Homo sapiens
  misc_feature (403)..(403): n equals a,t,g, or c
  misc_feature (419)..(419): n equals a,t,g, or c
  misc_feature (431)..(431): n equals a,t,g, or c
tcagcagctgaagtgctgcccacctgtgtgagttgggtccaggaaaccatgtctgcccttctgataagggaagatgaatctagagctgggtgaagatctaaattttaaccaaacccctgggcccaggaaaataacaattgaaaatgtacaaggcagtgttttcaatattaaacttccccaaggaaagcacaaactagtctttttggaaagggagaaaggattaagccacacagtattagtctttgaagcagtactggtctctaggggctggtgccaaaatgggagtcccatagtagttacacttcgatgggcctcatgtactatattactgtgccaaattgtatttaaacagtgggtggggggagttactggggataaggaacttgttctaaaaagttttacnaaacccaaaacaggtnctgtttaggttnggtgccaaagttaagttttttggccttac

SEQ ID NO: 20 - DNA, 329 bp, Homo sapiens
  misc_feature (315)..(315): n equals a,t,g, or c
gcgggagaagagcggacagtggtcggagatgtggcgaccggtgcagctctgtcatttccactctgctctgctgcacagmaggcagaagccctggccgtcccctgctgtgttcttcaggagaaacgtsaggggccttcctccaaggttctccagccccacacccctgtggaggaaggtgctctccaccgcggtagtgggggcgcccctgctcctcggagccygctatgtcatggcagaggcacgggagaagaggaggatgcggctcgtggtggatggcatggggcgctttggcaggtctctgaagtcggcctgcanatctccctggacta

SEQ ID NO: 21 - DNA, 542 bp, Homo sapiens
  misc_feature (524)..(524): n equals a,t,g, or c
  misc_feature (539)..(539): n equals a,t,g, or c
  misc_feature (542)..(542): n equals a,t,g, or c
ggctttacggctgcgagaagacgacagaagggggagaatcgaggcactcgctggcgtacccatgtatcgaaatgagttcacggcctggtaccggcggatgtcggtggtctacgggatcggcacctggtctgtgttgggctcactgctttactatagccggacaatggcgaagtcgtcagaccaaaaggatggctcagcaagtgaagtacccagtgaactctctgaacgcccaaaaggattttatgtggaaacagttgtcacatataaagaagattttgttccaaatacagaaaagatcctcaactattggaaatcatggactggtggccctggtacagaaccatgactggctgctgaattctgaaaaccaggacttggttcaacatttaaatttgatagttgccctgattcccattttgggtttgtgaaaagtgtatgtatttaaatttgctgtaaaacataatcactaataatatgcaataaatattttcttgaagggaaaaaaaaaaaaaaaaaaaaaaatnccgggggggggcccngtn

SEQ ID NO: 22 - DNA, 431 bp, Homo sapiens
  misc_feature (427)..(427): n equals a,t,g, or c
ttcttattttgatgctaggaagcttattggcatttcattatggattatatttttatactgtaaagttccttgctgtggttttttgccttattggttatgttccatcagttattctgttcacttatattgcttctttcacctttaagaaaattttaaataccaaagaattttggtcatttatctattctgtggcagcgttggcttgtattgcaatcactgaaataactttctttatgggatacacaattgcaactattsttcattatgccttttgtatcatcattccaatctatccacttctaggttgcctgatttctttcataaagatttcttggragaatgtrcgaaaaatgtgggacacctataatcctgggataggctttcagtagctgttatatcgccttacccgccgtgttgtaccgtgggntttt

SEQ ID NO: 23 - DNA, 599 bp, Homo sapiens
  misc_feature (499)..(499): n equals a,t,g, or c
  misc_feature (580)..(580): n equals a,t,g, or c
ggcacgaggatttccagctcagcgatgcccccaggtccctgggagagctgcttctgggtggggggcctcattttgtggctcagcgttggaakttcaggggatgcacctcctaccccacagccaaagtgcgctgacttccagagcgccaacctttttgaaggcaccgatctcaaagtccagtttctcctctttgtcccttcgaatcctagctgtgggcagctagtagaaggaagcagtgacctccaaaactctgggttcaatgccactctgggaaccaaactaattatccatggattcagggttttaggaacaaagccttcctggattgacacatttattagaacccttctgcgtgcaacgaatgctaatgtgattgccgtggaytggatttatgggtytacaggagtytacttctcagctgtgaaaaatgtgattaagttgagcctcgagatctcccttttcctcaataaactcctggtgctgggtgtgtcggaatccnctatccacatcattggtgttagctgggggcccacgttgggggcatggtgggacagctttcgaaggcaagctgggacagatnaaaggcctgaacccgctgg

SEQ ID NO: 24 - DNA, 590 bp, Homo sapiens
  misc_feature (55)..(55): n equals a,t,g, or c
  misc_feature (556)..(556): n equals a,t,g, or c
actgagcgcggccgccgagcccagctccgccgccgagcgcctgtgccggcagwancaccatggagcgcccggataaggcggcgctgaacgcactgcagcctcctgagttcagaaatgaaagctcattagcatctacactgaagacgctcctgttcttcacagctttaatgatcactgttcctattgggttatatttcacaactaaatcttacatatttgaaggcgcccttgggatgtccaatagggacagctatttttacgctgctattgttgcagtggtcgccgtccatgtggtgctggccctctttgtgtatgtggcctggaatgaaggctcacgacagtggcgtgaaggcaaacaggattaaagtgaacatcacctttttatagcattaaattcattttttaaaatgataaatgctggagggggccatctgatttgaataaagttgaaagaacatgttaaagtcagtcttaaggagtcacgtttgagtatgtaaattttgatccttccaatatgktggttgtaaatcagtttaactgtatgaatcygattgcnatgagaattggaaagtagtaccaagaatatgtta

SEQ ID NO: 25 - DNA, 424 bp, Homo sapiens
cccacgcgtccgggaaagctggctgcccgccagagccgtcgttgcaaatggcaaatactaatttcctctccaccttatcccctgaacactgcagacctttggcgggggaatgcatgaacaagctcaaatgcggcgctgctgaagcagagataatgaatctccccgagcgcgtggggacyttttccgctatcccggctttagggggcatctcattacctccaggggtcatcgtcatgacagcccttcactcccccgcagcagccttcagcagccgtyamagacagtgcgtttcaaattgccaatctggcagaytgcccgcagawtcattcctcctcctcctcgtcctcctcagggggagcttggsggascaaccccagccaagaagaagaggaaaaggtktggggtcttcgtgccctgcaagagg

SEQ ID NO: 26 - DNA, 642 bp, Homo sapiens
ctcagaggatcaaaaagccttcagtgttgaacatacaagctgcaatgaggaagaaaatttcgcaaatatgaaaaagaaggccaaaataggcattcatcacaaaaatagtccccccaaagtcactgttccaactagtggaaatactatagagtctcctcttcatgaaaacatctctaattcaacatcatttaaagatgagaaaatcatggagactgatagtgaaccagaggaaggtgaaattacagactctcagactgaggatagttatgacgargccattaccagtgaaggcaatgtaactgcagaagatagtgaggatgaagatgaagacaaaatctggcccccatgtattagagtaattgtcattagatcacctgtgttgcagataggatcactctttatcattactgctgtaaaccctgctacaattggaagagaaaaggatatggaacatactctccgaatccctgaagttggtgtcagtaagtttcatgcagaaatttattttgaccatgacttacaaagttatgtccttgtggatcaaggcagtcaaaatggcacaattgttaatgggaaaacagattcttcagccgaaaactaaatgtgaccttacgtacttgagcatggagatgaagtcaaaat

SEQ ID NO: 27 - DNA, 319 bp, Homo sapiens
  misc_feature (201)..(201): n equals a,t,g, or c
  misc_feature (315)..(315): n equals a,t,g, or c
caaggacaggcatgattgagggccggcaggatctaggagcttccatcaggcctttgacaaagagccctcgctcgggggtcaccgcgtgttcaggaggggctgagttaccgcttctcatcttccacttgcaccccgacagagtggtattcccgcagaccgcggctctccgtgtcagaatctgtggccgtttccacctaattnaacagagaacgtcttattttagaactggaaacatggggcctgggcaaggggactattttgttggttgttgtgggattttgctgttaattaaatttacgggatttgttttaattnaatg

SEQ ID NO: 28 - DNA, 376 bp, Homo sapiens
ggcacgaggaaagaagtaaaaatgtttgcttcctcttggctttcattcttatatgcaggcagaacctgaacaaatacttgggagtcactggagggatcttactgtggtcaccttcctcatttcctcttcttccttctttccttctctttatccttctcttttctctcaaagtcacttagagatgctggaatcacacatgctaatattagtcctggaaagaaattatagggattttscttctcccttccttctccctggggctgttgttccccttttcctctatatccccactgttagaaaaaatggggtcactgagaaatggggcactacatttgggggtagcaggataaggacggrtattttagtagaatatcct

SEQ ID NO: 29 - DNA, 482 bp, Homo sapiens
  misc_feature (372)..(372): n equals a,t,g, or c
  misc_feature (464)..(464): n equals a,t,g, or c
  misc_feature (468)..(468): n equals a,t,g, or c
atggaagtgctatctggagagcagaacatgatgacaaaggttcgagaaaacaactacacctatgaatttgatttttcaaaagtctattggaatcctcgtctgtctacagaacacagccgtatcacagaacttctcaaacctggggatgtcctatttratgtttttgctggggttgggccctttgccattccagtagcaaagaaaaactgcactgtatttgccaatgatctcaatcctgaatctcataaatggctgttgtacaactgtaaattaaataaagtggaccaaaaggtgaaagtcttcaacttgggatgggaaagacttcctccaaggaccagtcaaagaagagttaatgcagctgctgggtctgtncaaaagaaagaaaaccctctgtgcacgtwgtcatgacttgccagcaaagctataggtttcttagtgcttccaggggctttaaatgggcgccngcancgtagtccttccct

SEQ ID NO: 30 - DNA, 986 bp, Homo sapiens
  misc_feature (10)..(10): n equals a,t,g, or c
  misc_feature (17)..(17): n equals a,t,g, or c
ggcacgactncactatnagggcgaattgggtaccggtttaccagagaacaaaaacttcagtaacgggatgcgcaaatgaatttcatacagaattatcgcaatccctactacaaatatcaggccacagagaaaaccaagccagttggaggtgatgtgcggtgtaatgtatgcgccgaaaaacagcgttaacgggtggtgaaccagatagataaacagcgatgcgttaacaaaataagtcacccgcgctgactggaagttaagcaaacggtggccaaaggagaagaccacattcaccatccacagaccgaggaccatggtgatcaccgactcggtttcgtacatccaggcatcgccactgccatagcgctggttgagtaaataagcgacaaacgccaatgctgctgcaagggtacagccacgagacggcgtggtaaacaaggctttaagatgagggaaaatgaaagccagtgcgccgaggataaagaacggcaaataaaacagcgtttgcatgacataaattgaacatgccattactcagaatgggcggatacacaataaaaatcgktcttcttattmccgcwtaaccgatgccgaggcataaaaaaatcaccgatagttttaccatcgagrattttttattcgttttatcagaattttctaaattatttctgatgcgcttaaatatccatagcacagcgtcgtcatgaccactaacaccagtaaaaaccacaggtgtgatattaattcccaggccaacgtattatatttgtcatacaatgacagcccaggccaactttccgcttttcctttgacatattgcagcataataaattgcggtaatgtcagtagggggatggctgttaacatcgggatacctacacgttcgacacgtactttccaccattttttcaagggatagcgtaaaaaaagcatgtaggaaaagtagcccgggggatccactagttctagagcggccgccaccgacg

SEQ ID NO: 31 - DNA, 671 bp, Homo sapiens
  misc_feature (654)..(654): n equals a,t,g, or c
ggccatcatctccggcatgaacatgagccctgtctccaggctgaagaagacctggggccaaagtgaggacggccaagtttttcatcctcgagcaccagatggacccaacgggaatttctgcaactacaggacagccctgcgcggggcggcccaccgctccctgacggcccacagcagccgagagaagattgtcattcctttcttcagcctgctcatcaaagacatctayttcctgaatgagggytgcgccaaccgccttcccaatggacacgtcaaytttgagaawttcctggagytggccaagcaggtgggggagttcatcacctggaaacaagtggagtgtcccttcgagcaagacgccagcatcacccactaactgtacaccgcccccatcttcagtgaggatggtctttatttggcttcttatgaaagtgagagcccagagaaccaaacagaaaaagaaagatggaaagctctaagatcttctattttggggaagacatgaaagcsctgagctgagggacgaggaagagctggagcccgcagaagccgtccacagccctgcctcagtggcccagtgggcagaggccagggaagtgcctcactattttgcaaatgccgaccctgtggcctgctgcccgccccccccccccnaaagtggccataagggg

SEQ ID NO: 32 - DNA, 476 bp, Homo sapiens
  misc_feature (476)..(476): n equals a,t,g, or c
aattggcacgagctctactccagattcttctccatccacactgtctcctttctccagggagctcacaggctcttccaggccacccaaatggttcagtcgctgaaaagcatggaaggaattcaggtggaacctgcaagaaagaggacaaaaggcaggacttacttttgcccatctgtctccctgaatggggccagcaatggtgagtctctgaggcatgggaagagttgggattctcttctggttttgatcccagcaaccacaatagtagctaccatcaatcaagtgtctacgtgccatacagtctacatacattattcccttttgccctccaacagccctgtatgtgcttatttccctattttaccagaagggaacttgaggstcagaagggttaagtgtctgggccaaggtcaaaaagttcytatgggggacacagggtaaaaaaccagtttgccctatggggttggggtkagggn

SEQ ID NO: 33 - DNA, 652 bp, Homo sapiens
  misc_feature (444)..(444): n equals a,t,g, or c
cgacgccccggccgcccgcccgtccgcttgccaaccatggagctggaggacggtgtggtgtatcacggaggagcccggcggctccggggccgtgatgtcggagcgggtgtccgcctggccggctccatctaccgcgagttcgagcggcttatcgggcgctatgacgaggaggtggtcaaagagctgatgccgytggtggtggctgtgctggagwacctggactcggtgttcgcgcaggaccaggagcaccaggtggagctggagctgctgcgggacgacaacgagcagctcatcacccagtacgagcgggagaaggcgctgcgcaagcacgctgaggagaaattcattgaatttgaagactctcaagaacaggaaaaaaaggacttacagacccgagtggaatctttagaatctcaaacaagacaacttgagctgaaagcgwanaaactatgctgaccagattagcagacttgaagaaagagaagcagaactgaagaaggaatataatgcattacatcaaagacacacttgagatgatccataattatatgggaacatttagaaagaacaaaacttccatccagctcttcagggagtggttcaactaggattccacagctccttagttaggatttggaaaagaacgccctat

SEQ ID NO: 34 - DNA, 822 bp, Homo sapiens
  misc_feature (361)..(361): n equals a,t,g, or c
  misc_feature (769)..(769): n equals a,t,g, or c
ccagacatgactctccctggaatctccccaccacccgagaaacagaaacgtaagaagaagaaaatgccagaratcttgaaaaacggagctggatgagtgggctgcggcatgaatgccgagtttgaagctgctgagcagtttgatctcctggttgaatgagatgcagtggggggtgcacctggccagactctccctcctgtcctgtacatagccacctccctgtggagaggacacttagggtcccctcccctggtcttgttacctgtgtgtgtgctggtgctgcgcatgaggactgtctgcctttgagggcttgggcagcagcggcagccatcttggttttaggaaatggggccgcctggcnagccactcactggtgtcctgtctcttgtcgtcctgtccttcctatctccccaaagtaccatagccagtttccagatgggccacagactggggaggagaatcagtggcccagccagaagttaaagggctgagggttgaggtgagaggcacctctgctcttgttgggaggggtggctgcttggaaataggcccaggggctctgccagcctcggcctctccctcctgagttgccttctgttggtggctttcttcttgaacccacctgtgtaaagaggttttmagttccgtgggtttcccctttgaattctgtaaatagtcccagagagaattcgtgggctgagggcaattctgtcttggaggaagaagctggacattcagcctgtggagtctraggttttgaaggatgtangggagccttagttgggtctcaraccwtaagtgtgtactacacagaagctgtgt

SEQ ID NO: 35 - DNA, 1042 bp, Homo sapiens
  misc_feature (959)..(959): n equals a,t,g, or c
  misc_feature (980)..(980): n equals a,t,g, or c
  misc_feature (1006)..(1006): n equals a,t,g, or c
  misc_feature (1023)..(1023): n equals a,t,g, or c
  misc_feature (1033)..(1033): n equals a,t,g, or c
tggtaaaacctgacgcgctggtggaaatcgccacaattgcgcatatcgccaagtgaggccgcgatgaaactttcactctcacctcccccttatgctgatgcgcccgtagtggtgttgatttcgggtcttgggggtagcggcagttactggttaccgcaactggcggtgctggagcaggagtatcaggtagtctgttacgaccagcgcggcaccggcaataatcccgacacgctggcagaagattacagtatcgcccagatggcagcggaactgcatcaggcgctggtagccgcagggattgagcattacgcagtggtcggccatgcgctcggtgcgctggtgggaatgsagctggcgctggattatcccgcgtcggtaactgtgctgatcagcgttaacggctggctacgaataaacgcccatacgcgccgctgttttcaggttcgcgaacgattactgtatagcggcggcgcgcargcatgggtggaagcgcascgttgttcctctatcccgccgactggatggcggcccgcgcacctcgcctggrggcagaagacgcgctggcactggcgcattttcagggcaaaaataatttactgcgtcgacttaacgccctcaaacgcgctgactttagtcaccatgcggatygcatccgctgcccggtgcaaatcatctgcgccagtgatgatctgctggtgccaacagcatgttccagtgaacttcatgccgccctgcccgatagccagaaaatggtgatgccctatggcggacacgctgcaacgtgaccgatcccgaaacgtttaatgctctgttactcaacgggcttgccagcctgttacatcaccgtgaagccgccctgttaaggaattgctatgaacgaagccgttagcccaggtgcggttagcaccctgtttcaacgttgcccgcattcacaacggttggcgggagacaaccttcancgatgagacgttaagggaggntttttgccctgatggaatgggggccnacatcagttaactgttntccggaaggntcgtgttta

SEQ ID NO: 36 - DNA, 875 bp, Homo sapiens
  misc_feature (66)..(66): n equals a,t,g, or c
  misc_feature (872)..(872): n equals a,t,g, or c
ggcacagcgcgaggctgggtcccggcccaggagaaggaagtcgctgaaggcagtggccatgctggncgtggaaatgggaggcggttgcagrgggtctatggggcccggtcctggatactcggcaggaagccgtgtctgcagaggctcctccctgcctcaggtggccccgttcaaccccagccgtgcccatctcctgccaccgcctgtcggtgggggtttaaattcggtgtggctttctggggtgcagctcagcacccccccttatgcagactgggagggggtcgggcagtcccctcagccacgaggaccctggatgggttctagttcacttgggaccgtggggcctggctgcgtactgagtgggtgccccacagtcaaggccaacgggggctccccctgctctgagatgttgggagaaaggcggcttctggaaccttccgtgggacccgtaagtggctgtccagaaaggcgggagggtgggcacggggcacggggggcagctggggtcgtcgttaagggtcacgcatccgtacagttgaatttcctttctcttatcatgttttacccaccttgtcccttttttccccaattgtgcttttgcatttttttccttggcaaatgtaaactcagcctttcattcatgacgtgtgaaatttcagtttctctggagtttgtcagacggcgtgggaaccacgcctgaaactcaggtaataggaggaaaaaaaaaaaacttaaaaaaatttttaaaaaacataaaactactctctacctctgctggsccagcctgtctcgccctggccgcggcagggtggcctgtaacaatttcagttttcgcagaacattcaggtattaaaaggaaaaaaaaaaaaaanggg

SEQ ID NO: 37 - DNA, 413 bp, Homo sapiens
  misc_feature (342)..(342): n equals a,t,g, or c
  misc_feature (389)..(389): n equals a,t,g, or c
gtgacgggggcttccagcccactgaacacccctgtcctgccatagccccagaggtaccaccttgggctctgccagtgctgcttcaacacctccagatgggaggagagggacctttccttccagttctaacccccacatcagtcaagggaaccctgtacaaaatgctgagaaagccaaagaaagtcagagtgcaggcagcttcttgtgacttactgcgggggctccttgtgtctcccctcctcctgcctgttagacttctccttgctggctgggcccacgcgtggatgcacgggtgcggaggatgggaacccaggatcaytcagcaaagtgcttcttgtcagnttctggcaaaggggagaaatcaagggtcaaccaaaagttttaaatgnaaattggaggactcctaactttat

SEQ ID NO: 38 - DNA, 417 bp, Homo sapiens
  misc_feature (387)..(387): n equals a,t,g, or c
  misc_feature (408)..(408): n equals a,t,g, or c
  misc_feature (410)..(410): n equals a,t,g, or c
  misc_feature (412)..(412): n equals a,t,g, or c
tggaagtgactcatccaaactccatgccagctgtcaacattcagtatgaagtcatcgataatgcctgtgttctttttgccgtctctgttcttatgtttataatcagttcaatgctggtttatggagcaatttcttatcaagtgggttggctgattccattcttctgttaccgactttttgacttcgtcctcagttgcctggttgctattagttctctcacctatttgccaagaatcaaagaatatctggatcaactacctgattttccctacaaaggatggacctcctgggccttgggactccagctgcctcctgttccattgttcttgtgttcttgcctattcatcattttaaggsttatctaataacgtgtttggaactgctatnaaatacatcaacaaccgaaangngncggga

SEQ ID NO: 39 - DNA, 329 bp, Homo sapiens
  misc_feature (193)..(193): n equals a,t,g, or c
  misc_feature (309)..(309): n equals a,t,g, or c
  misc_feature (324)..(324): n equals a,t,g, or c
ggcacgagcccaaatcaattatgacaatgatgattgtctttctgtctctctctctctctctatatatatacacacacatatatacacacatatacacacacatatatatacacatatatatatacacatacatatatatatacacacacacacatacatatatttgttttgttttgcttttgttttgtttttntgttttgagacaaggtcttgttttgtttcccagggctgggagtgcagtgacacagtcatggattcactggcaaccctggacctcctgggtcttcaagctagcctcccaacttcagnctttcccagtagctngggga

SEQ ID NO: 40 - DNA, 1326 bp, Homo sapiens
  misc_feature (912)..(912): n equals a,t,g, or c
cccccctcgagttttttttttttttttttttttttttttttttttttttttacagtaaaaatatttattggtataaaaatgcccatgatacacttttatgtaaatgaaatatgtttcaaaatagcacgtaaagcagggtactaatttgttaaggacatccacacacatgtccacacaagcatctatactaaaagaaggtacacatgcatgctgctgtatgaacggtgatcctctgcctatggtgaggttattacaggrtatatttaatttactatgtcttgattttctaagtgtcaaaatttttttcacataaatatttattttcttggtacatagaaataattacattaaaaataataaagagtctatgaagaaacatgactaactatactacgaactcagaaccttaaaataagtaatccagttacattttttattgatacatwatcttgcattcttcagacctatggccctcctgggcatgtagactttctcttgcatagggccagagcatcaggacactgttctctgcagatgagtgaacacagtgtgtcacccagactcggctatactggagtaagtaagttactaccaagagatgctattctgcactttaaaggctttaaatgagtacatggaatacactattgggttggtgctagaggcaagtgctggatgaagaggargtgtgctttatgccacaatcaacagcaaagcaactgtgcaccaaaatcatgtgttttcaattatcttcattcattcattcattcatccatcaaaacacctacagcgtgtctgttgagttccacccactatgtgccaggtactgtgtgaggcawtagagcagacatgaggtatatagattatggtccctgtccttgtcaagaaattgtctgtgagggagtcagaaantacagaacggtgagtgctctggcgaccagagaagcaagaaggcttgtcctatgcagaaaatgtgttcttagatgaggcgatgtttgaaacatgtctgaaaggaacccacccatcagagaggaagaggaagggctctctcggcaagagaaaggactcacacatatcacgtatatccaaatgatgaggaaaggcatgggacatgagtggagcaacaggtagtggtgggagaggaagtgaaaggtaatttgggatttgaccatagtgtcttgtaatgtagtatctcccaactcttcacaataggacacacatagaatagaaaccatctatttgtacagcacactgggtaaatgaagggactgcatgcaactaagtgactgttcatttgctcagctccattagagactgaggggatcc

SEQ ID NO: 41 - DNA, 1219 bp, Homo sapiens
ggcacgaggagccttgggcccctctggcctcagccggatttcccagccaaacgcagagagagatgccctggaccatcttgctctttgcagctggctccttggcgatcccagcaccatccatccggctggtgcccccgtacccaagcagccaagaggaccccatccacatcgcatgcatggcccctgggaacttcccgggggcgaatttcacactgtatcgaggggggcaggtggtccagctcctgcaggcccccacggaccagcgcggggtgacatttaacctgagcggcggcagcagcaaggctccagggggacccttccactgccaatatggagtgttaggtgagctcaaccagtcccagctgtcagacctcagcgagcccgtgaacgtctccttcccatgcccacttggatcttggtgctctccctgagcctggctggtgccctcttcctccttgctgggctggtggctgttgccctggtggtcagaaaagttaaactcagaaatttacagaagaaaagagatcgagaatcctgctgggcccagattaacttcgacagcacagacatgtccttcgataactccctgtttaccgtctccgcgaaaacgatgccagaagaagacccggccaccttggatgatcactcaggcaccactgccacccccagcaactccaggacccggaagaggcccacttccacgtcctcctcgcctgagacccccgaattcagcacttttccgggcctgccagtgaggctgaggactgggggacccctctgtctccaggcattcgggggcctgaggtccctccagctacttctgggggggctctgtcagccactttctcagggaattggacagaggaaaggaaggggaaccctggccttgggattttcatcacagaggagtgggagaggggacacaggcatgggcctggcactatacagacaacaggaagttcccctctcgacttcggctcctcaggaccaccagagaaggagatgtcaggaccccttcttgtcccccagctgggccataagacgtcccaggtctctgcacacccgtggaattcctcccttccccagtgggtttttgagcatagggtgcccttgggtgtgttgtgtgtctgcctgctggcttgcttaagttattaattataacacgggtcaaggtgaaaaaaaaaaaaaaaaaaaaaaaaaaaaaaaaaaaaaaaaaaaa

SEQ ID NO: 42 - DNA, 1154 bp, Homo sapiens
  misc_feature (1136)..(1136): n equals a,t,g, or c
  misc_feature (1139)..(1139): n equals a,t,g, or c
tcgacccacgcgtccgctggcgggagtctgagaagttggataaggcgggcaggcggggaagagggaaaggagcgaggagcccggcggactggcgcccctagcggtggttctaacgcgtgcactgggcaatgctggctatcggcttcctctccctgccagtttcccagcagtcttgcccattggggagcagccccccgaaggcagtggcaacatcaagcagaggtacagattgcccgaaagcttcagtgcattgcagaccagttccaccggcttcatgtgcagcaacaccagcagaaccaaaatcgtgtgtggtggcagatcctcctcttcctgcacaaccttgctttgaatggagaagagaacaggaacggggcaggccctaggtgagggtgggctgccctcttcacatggggcaccaggaacaccgtctggaacaggaaggacatcgggcaggactgacactgtgtcttgtgaaattgtttttttgttgttattttgtgttwtaattttttttaatttctctctgagtgtacatacaacatactcaagcgggaccttctttctctgtcaggcccttgacctggaatgggggcctgtgtcaaacactgttgaaggagaggctgatgtgtctgtgatggtgagaattcccaagggctctgacaagtagattcttcgactgaggaatctaccagttgtcgaagatgatccgttagtgatgttctctgggaagtggactgtggtttttccagaggaactcagttaagaaatcgagagtggattagactcccagttccaccaaacctatgarccttccactgtggatgggggccgtgatcctgatggtcacattgctttaacccagcagggcttcggccaggggctttccacttgaggatagcagcttcactaggctggccggccagctccacatctgactgggttcttacttctcagccagtacctgccccatgggctcaaggattcctggccagctcctgccacctccagcagacctcarggagggttgggtttctctaaagaccctcaaacatgtcgcaaaatgaarcaaacttctggctawgsctcaaaactgamttggtcccacttggaggcccaagattggtcctgaagttcanaancactgccaccactgg

SEQ ID NO: 43 - DNA, 1029 bp, Homo sapiens
taccgctcgccctgacatccggtaccttacaggcctggatgacggtcgagaatatcgatctcaaaaccattggtttcttctctctggtaggccaggcttacgtttttaaattcctctggtcaccgctgatggaccgctacacgcctccattttttgggcggcggcgcggttggctgctcgccacgcaaatcctgttattagtcgccattgcggcgatgggttttctcgaaccaggcacccaactccgctggatggcggcgctggcagtggtgatcgctttttgctctgcttcccaggratatagtcttcgatgcgtggaaaaccgatgtgcttccggcagaagaacgtggtgcgggcgcggcaatcagcgtgctgggttaccgtttagggatgctggtttccggcggcctagccctgtggctggcagataaatggctgggctggcagggcatgtactggttaatggcggcactgttgatcccctgtattaatcgcgacgttgcttgcaccagaaccaaccgacaccattcctgtgcccaaaacgctggaacaagcggttgttgcacctctgcgagatttctttggtcgcaataatgcctggcttattttgcttcttatcgtgctgtataagctgggcgacgcattcgccatgagcctgacaaccacgtttttgattcgcggcgtcgggtttgatgcgggtgaagtaggcgtggttaacaaaacgcttggcttactagcgaccattgttggcgcattgtacggtgggattttgatgcagcgcctgtcactgttccgggcactgctgattttcggcattttacaaggtgcgtctaacgccggttactggctgctgtcgattactgataagcatctctacagcatgggcgcagccgtctttttcgaaaacctctgtggcgggatgggcacatcagcctttgtcgcgctgttaatgacgctatgtaataagtcattttccgctactcaatttgccctgctctcagcgctttctgctgtagggcgagtttatgt

SEQ ID NO: 44 - DNA, 700 bp, Homo sapiens
atggaagtttgcagaaattgttcagctgtattatgctgtcgtatggctccactgcagaaagcaaaagtaataagactaataaaaatatcacctgcagaaacctataacattggctgttggtgatggtgctaatgacgtaagcatgatacaagaagcccatgttggcataggaatcatgggtaaagaaggaagacaggctgcaagaaacagtgactatgcaatagccagatttaagttcctctccaaattgctttttgttcatggtccattttattatattagaatagctacccttgtacagtattttttttataagaatgtgtgctttatcacaccccagtttttatatcagttctactgtttgttttctcagcaaacattgtatgacagcgtgtacctgactttatacaatatttgttttacttccctacctattctgatatatagtcttttggaacagcatgtagaccctcatgtgttacaaaataagcccaccctttatcgagacattagtaaaaaccgcctcttaagtattaaaacatttctttattggaccatcctgggcttcagtcatgcctttattttcttttttggatcctatttactaatakggaaagatacatctctgcttggaaatggccagatgtttgggaaactggacatttggcactttggtcttcacagtcatggttattacagt

SEQ ID NO: 45 - DNA, 1246 bp, Homo sapiens
  misc_feature (36)..(36): n equals a,t,g, or c
  misc_feature (42)..(42): n equals a,t,g, or c
  misc_feature (1207)..(1207): n equals a,t,g, or c
  misc_feature (1225)..(1225): n equals a,t,g, or c
tatagaagtgcgcatgcagtacaggtcagggaattnggggtngacccacgcgtcmggtctcmtgctgcttagggactctactagccttttacttaaagccagttctgatatgtttgtttttgtaatcmaaatatgttccmaaaagattgatctatsaggggacagtttgagtataatgcacattttgtgtttgcttagcaggattttgttcacaagaaacactagtaaacaaagaaaactgtacctgcatgagccggagcatgtagaaatgcacacaatgtacacaggcaatgccgtgagcatctcccagtcactcccatccacagcctgtgtagtgagcccgtcacatctggtgtgagactttccatcgaatttcgtacaaccttctttcctccacttcacaatgggctcacaagctgcaaacttcagttcattttcaagatcaagggccatctttattagtattccatctcttaatatgtgtgaaattatgttactatttttatgaggtttctacattttaggtaaaaagtgtccgtgataaagtttgtgagtgttgtgccccaaccccatttttcttcctataaaccctgctgttcctacgacataatcacacatagttacaatgatattttagaaactcttatgtcacatcatagcaaaattgattatgcataatctcatttagtttagcttaattgagacaggtgggtattatgtcagtatttattatgtgggtgttatttktyccaatttgcagctgtaggaattgaaggtcaggttgatccaggtcaccatctactatgtgtagtgctgaaattaaaacccaggtcastctgcttcctaagtgtggctattagccatggtgctttgaggatggaagaaatctacttccttaatactcaggagattcacagagtcaggaccaaatactcacagagcatttgaagatttccagccaacattttcagarcctggctactatccargggaatttaaagtgtgacgcagcccaccaaagttgattgcatcttagagaatggaatccaagtctcccaccaggaaaaatacaggcattcattagttccttcccctaaaaggttggacattgatccaggcactatagagcacctgggatacaacactgagcaaagcggtcttcctccctgcctcactctgcttagaggaccaattcctgggaatgganggggttgcacacattaangaaaggactcttcacagcaaa

SEQ ID NO: 46 - DNA, 813 bp, Homo sapiens
caagggctagatccaaggggtcatacaatgtcattgagacctacctctgtggtaccacttctgagatgacttcaggcataacagacaggctttctccaaggtgaagacccccaggttcagacggcccttgggcttaccagccctattggggcactccttttttttccactcaaaagcactctccttggttctgtttgcgtcgtgagccgatccctgagccaaacactgtttccagggggtgaggtacctagactagaatcctgggcctgggtccctcacatgtggcacagagggaatggcartgttaccaggtttggagcaagagtggagacagttcctgaaaacaaaagttgccggacaggaaaaaataataarsaccccacaaaaaatcatgcaaagaaaacaccggttagaagacagcagaatagacttgtcctcaaggagggagataagagaaagcatgaaggaagagctgtcaggtacagggataaggaaccaaaaactcagttgtttaactctctgtgagtccaccttgttaattctgcttcatctttccattaatttttatttttcctttattaaaaattctactttgatggtagtgcttttggagccaattattcctcacagcctctggatgagagttggccaaggtaagcaagacatactttaaaagatatgatgggcatgtgttatttttagataatttcactttatccactttgaatgttgtttagaaattctaatataaagcatagaatcctgtttctcttataacatttaatttcagtgggaggatcacttgagaccagg

SEQ ID NO: 47 - DNA, 485 bp, Homo sapiens
  misc_feature (363)..(363): n equals a,t,g, or c
  misc_feature (395)..(395): n equals a,t,g, or c
  misc_feature (424)..(424): n equals a,t,g, or c
  misc_feature (441)..(441): n equals a,t,g, or c
ggcacgaggcaaaacactgtctctctaatttcttaggtaacctgccatctgcattcaaatttacctcacttactgatgagtttcttttggccatgaagaggtcttgtgtctcctgtggtttggaaccttgggagtctgggtgggaaagagtaggtgaaatcacccatccctgggcctggggggaattcccagaaatggtgctagccatcaggatgtataagtatgtgttcacgcatgccttcatatccttgagcaccagtagtgatggaagtgcctgtgtgctgtcagctggggcgggtgcagggtgtcccctcgcttgccagttcgccttgttctggactggtccattggccctttgccttnaggcaggaagggcagaaagagtgctctctgtnaaagaggggttgggccccgtgccctcaantcaagcctgccatgganttgtggttttcctcctaggtctgttgacattgtgaactgtgccc

SEQ ID NO: 48 - DNA, 429 bp, Homo sapiens
  misc_feature (236)..(236): n equals a,t,g, or c
  misc_feature (414)..(414): n equals a,t,g, or c
  misc_feature (425)..(425): n equals a,t,g, or c
ggcagcgtaagaacatgccatggagtgtggttgaggcttccacacagctaggcccatccaccaaggtcctgcatggcctctacaacaaagtcagccaattcccagagctcaccagtcataccatgcgcttcaacgccttcatcctcggcctgctcaacatccggtccctggagttctggtttaatcacctctataaccacgaagacatcatccagacccactaccagccctggggnttcctgagtgcagctcataccgtgtgtcccggcctctttgaagagctgctgctgctgytacagcccctggccctgcttgcccttcagcctcgayttgctgttccagcaccggytgytgcaaagtgkggcagcagcagcggcagmacaaggaactgttgcggggttgttcccagggacntgctggttgtnctgt

SEQ ID NO: 49 - DNA, 439 bp, Homo sapiens
  misc_feature (356)..(356): n equals a,t,g, or c
  misc_feature (361)..(361): n equals a,t,g, or c
  misc_feature (377)..(377): n equals a,t,g, or c
  misc_feature (380)..(380): n equals a,t,g, or c
cccacgcgtccggaaacaggagagtgaagtggaaatagcctggcccgcgtgacttaaaccggcccggagatgtgcgggtacgaatggagccgccttggggtcgggataggacccagagtggcttctcagtcaaaggccttcagaagcagagggagcaccttgagtgaccttacctgggccgcgaaagacaagaaacctttggcacaggaagaggaactgatctctggaagccaccagggcgggtggaaagtcagggtttcaaggttattttggaatttaggtgctgtgggccttgtacggtggctcatgcttgtcatcccagtgctttgggaggccgaggcaggaggttcgctttnagccnaggagtttccagagcntcntgggcaacatagtgagatttttgtttacaaaaaaaaaaaaaaaaaaaaaaaaaaggggg

SEQ ID NO: 50 - DNA, 701 bp, Homo sapiens
  misc_feature (1)..(1): n equals a,t,g, or c
  misc_feature (583)..(583): n equals a,t,g, or c
  misc_feature (674)..(674): n equals a,t,g, or c
ntatgcacagtctgaatgtataccaggagtgtgagagacacatgcccacttcatgcaactcctaaactcaaagtctaaatcagatatttttattaacaatgacaacttgttgccaactccctgtttctaatsaccaaagacccagggtacctaaaaggactttgcaaccaagcaaagtcactgtcttcaaatctggatacacactttcccctctgtagattcaaaaggtgcttccttcccggctgtctccagcttccttactctcttttctggggatttctttttctcttctttctgstcttcctccactgctgaactgctccctaactgaaacagcccctgacttagcccaagcatgcttcctttagctgctgtgagaatttgtcttcctcaccagccaggtcctcaggcaaagtcctcagccagtgctttagrgcaacttcccgcaaatcagaaactcactgtgattccaaaaatgtttctgagccctgggacccctgcccccaaaatattttcatctttcccccaaacctcctttaaaggaggcatgcataacagtgtgctggaaaggacagttgttggntttttggattttaggcatatttattttcctgttatggaaatatgttttatattaatctcctatttattttttatcttatgtttttgtattngtttgataaatcccttttggtccctct

SEQ ID NO: 51 - DNA, 354 bp, Homo sapiens
  misc_feature (53)..(54): n equals a,t,g, or c
  misc_feature (225)..(225): n equals a,t,g, or c
  misc_feature (235)..(235): n equals a,t,g, or c
ggcagagtccggtactcaatcaagtgtcttgaatgtaacaagcagatgcgggnntacatggtcctggctgcacatttccagaggacaacagaggagacagaggggctgacctgccaggtatgccagatgctgctgcccaaccagtgcagtttctgtgcccaccagcggrtttcatgcacacaagtccccctactgctgcccggagtgtggggtcctctgccgctntgcctacttncagacccatgtaaaggagaattgcctgcactatgcccgcaaggtgggctacaggtgcatccactgtggtgtcgtccacctgaccttgggcttgctgaaaaggcacatccaggagcgaca

SEQ ID NO: 52 - DNA, 662 bp, Homo sapiens
  misc_feature (106)..(107): n equals a,t,g, or c
attacaggcgcctgccaccacgcccagctaatttttgtatttttagcagagatggggtttcaccgtgttggccaggctggtcttgaactcctgacctcaggtgatnnaactgcctcggcgtcccaaagtgctgggattacagctgtgaagccactgcacccggccgggaatttatcaaaggggggactacttagatttggggcttcaaacctgagtctagcacaatgcagctggaggccaggggtactcctacaaacccaagttctgactccttccagggaagtatcagcttaagaaacttgatcaggaaagtgacamtggtytttyaaaagagccctctttaccctcccatccctgcccttccaacaactgcaagctgcattccagccacaacgcccttttctaaatctattttcattcatctcctattctggtctgtagccttgattccaaccattgaatgcacggagacagcccagtggcttgtcagattggtaaataatgacacctggtggataaatgttacattctagaagactattctggtcagcctaggtctgaaacactaaggagacttggcctgagatagggccatccacttcctacaggcactctgcttttattattaaaaatagtcactttgttactataataaaatttaa

SEQ ID NO: 53 - DNA, 640 bp, Homo sapiens
  misc_feature (157)..(157): n equals a,t,g, or c
  misc_feature (638)..(638): n equals a,t,g, or c
ggcagagtttcccccagtgtattccttgcataggcaacctctgctgcttaaatgttttggagactttgggatgtctgatttcaactgtaccgtgaacaggtagtggcttgacttagtaagcatctgaaggactgttttgttctactcttgcagagtngagtagttttcaaaaggaaaggaaaggaattgttgagtgggacctatgamgtatagcaggatggatagaatatgaggcagatgggtcctagtttgctaaagagcttgggccgtctgataagttgtctttcttgccaaacaagggagtcacgtggggtatacacattgtataagcttttcagtcaccgaggttgcctgtccttcctgcctccctgtttcgttgcctccttgcctcccttcctcacttcccttcctttcccacctccctgtccacaccccttccttcccctgcctctcttcgtttccctttccttcattctttcctgccctcctgcctacttccctgcctcctttcctttacctcttgtcttaggtctattttctgttgctgtaaccacagattgggataatgggataaattttaaagaaaagaggatttatcgctgggggtgggtgggcttaatggtttcaaaatcccaggnat

SEQ ID NO: 54 - DNA, 553 bp, Homo sapiens
  misc_feature (508)..(508): n equals a,t,g, or c
  misc_feature (546)..(546): n equals a,t,g, or c
  misc_feature (548)..(548): n equals a,t,g, or c
cccagatgcctgccagagtctcccgaccacaaacccagcacgttgatagttgtgtccttgccatatacacagtggaatcttttgccttttctttccttttgtgcctttaacattttcccctttgtatctcctaaatttgcatactttgtagcaattcttcaaaacgatattaatatgcccattttatagatgagggatctgaggctcagaaagtttcagtgtcttgtttatgctgcctggcatcagtctgaatgctccgagccttaagcccaagcctcttttcaacagtgctgcagccctgtcaaagatgtacttgtgaattcaaaacagcactcaggcatataggttacattggcaccaggaaacctaagcagtatttccatgaccaaattctaagtgaattcaacaccaaaggtggaaaaggaaatgttctttgctctctgtatagattcctcttctgcttgcttgggttttacaaagttcttctaatttttatgtgcgattgggncaatgcagttttggtaaagttgcttaaaaccctaactngnttact

SEQ ID NO: 55 - DNA, 488 bp, Homo sapiens
  misc_feature (395)..(395): n equals a,t,g, or c
  misc_feature (471)..(471): n equals a,t,g, or c
  misc_feature (478)..(478): n equals a,t,g, or c
tcgacccacgcgtccggttttccgtctccagcgcatctggagaggcacctgtcccagcaccatagtgactggatgtgtgtgcggaagaaggaaygcggtgccctctactccaagggcaagagctactggagtctttttgaaaataaaagtgttgttacatgtgtgatatgtaagtggcatgtgctaatacacattttctttcttattaacagtggttcagcactgagtcatgcttgcttctgctacgcactgatttgttctattccagtttycacgtacatcgttttggtgacatctctgcgttatcatttatttatatggagtgtattttctccaaaacttctctacgagggaatgcacctgctcattacagctgctgtctgtgtattcttcanggcaatgggtcaaaccagactcacacagtcttaggctaagstggamcactgggaaaaaatatacatggcttaaagnctgctgntattctaaat

SEQ ID NO: 56 - DNA, 599 bp, Homo sapiens
caataaccctcactaaaggcacaaaagctgggtacgggaccccccctcggtaccctcatctggttaggcgtccatatcagttggacggcagctctcattattctgcccttcgtggcgcttgccggctatgttgtgccctttgctttctcgggccctacacaccgggcagcccgccacatgctgcgcgtccgcggtgacctcacccagcatctcaccgacactacacagggcatgcgggaagtcctcggattcggctatggggatcgtcgcctcgccgaaactgaccgtatttccgaagaggttggcaatgctgctttcgcgaaccgcctcacctccggtatccgtcgcagtctctgtgagggcctccgccttttcgcagttgtgaccactgtacttgttggtgctgacgctgttcgccgcggcgacctcagcattccccacctggctatctgcgcaacagtggcattgggagttttcaccccggcccgcggtacagaagatttcgccgacgatttggaacgctcctttgccgccgccgaacgcatgagcgttatyaaataccgtgaaccgcctgmagcccgggggatccactagttcta

SEQ ID NO: 57 - DNA, 429 bp, Homo sapiens
  misc_feature (382)..(382): n equals a,t,g, or c
  misc_feature (415)..(415): n equals a,t,g, or c
  misc_feature (429)..(429): n equals a,t,g, or c
tcttgagtgaagatgaaaatgacaagaagcaaaatgcccagtcttcggacgagtcctttgagccttacccagaaaggaaagtctctggtaagaagagtgaaagcaaagaagccaagaagtctgaagaaccaagaattcggaagaagccgggacccaagcccggatggaagaagaagcttcgttgtgagaggtgatgcctgcaacgcgaggctcgccctgcctgtcggggccggggctccatgcatgctcttcattgcagggaggagcttcccaccatctacaagtgtccttaccagggctgcacggccgtgtaccgaggcgctgacggcatgaaggtgagcactggctgtgctgacccaggcccggcagctgtcatgttganctggggggagtagcagtgtttcttgcagctaanttcagacttggtgn

SEQ ID NO: 58 - DNA, 917 bp, Homo sapiens
  misc_feature (833)..(833): n equals a,t,g, or c
tcgagttttttttttttttttttttttttttttttttttttttttttaataaagttgttgtttatttccacctgccagctccttcatggggcgaggggtcggaggctggaracccgggaggaaagcaagtcaagacaaatgcttgacccacggggactccaggcctggcctgcagccactctggtggacttggctttgggtctggggtcttagtgtcttaggcttgagggagaggggcagtgaagaggtgccctcagcctccccattaccccgcctctcctccacagaacccacatcctaggctggcctagccacaagcaagggggctcaggaggggcccacgcggatgtgagggttcatgagtgggtccaggttgggatcgctgtcagctgcggcccggcctaggcgagacatgagggcaaggagggccaggaagcccagcagtcccaagagtagcagcagccccgcccgctggagcagggtcagcggycgcttccgagacccagcccggctccttagcagccgggccagccaacccaaggccggccgacgtcggtacttgtcatcgtcacagtctccatggaggcctggtgtccggtcatcatcccgcgtatcatacaccttcctaggggcgtgagtcaagggctcaggattgcccatgtggatcactgtgtgctgctcgggccggcctggggaagctgggggccggggggctcggctgtagaaggctggggcagcagaggcgctgtctacctcctctggtccaggggtactgctggcattaaaactagaccagtcagagaagtcagacgtgttgaggggctcgggctctngggctcaccacctcatcgatcagagggaggcccagtcctgcccgggcccagttgactgtggccaactttctctctcagtgcgga

SEQ ID NO: 59 - DNA, 703 bp, Homo sapiens
  misc_feature (594)..(594): n equals a,t,g, or c
  misc_feature (597)..(597): n equals a,t,g, or c
  misc_feature (680)..(680): n equals a,t,g, or c
  misc_feature (691)..(691): n equals a,t,g, or c
tctttctctgtctagtttcctctgttctcagtttatattctatgttatcagtctctctttccacagtacaaacatccatcctttctcctgtgcaattctgtctctccctcttattatctttatttgtactttttccttcctccctgtctaggcattgggcatgtgcctcttcttagcctgtgattttgccttgggactgatgataaattatttccagattcaatcagccctggtcctaccccagtccaatcagaagtatgttggtgggaatcaacctgatcctggccctttcttcttctccattttcattcgtaatccccctcagcagatctttacaagcagtttccttatagctcatgtatctttaggtctttgccttccaagcactgtacagaatactttgtggttcctttttagtctgacattttgtggagcagtgaagcgtgctcagagacataatcagctgaagagaaaaaatccacccatggatttatatcagctaaatactaataattgattttgtttgatgtgcccataatttttaaagctgcaatataatataatgrgggaccacaggwaatttcyccctgtcanttngttttggctggatgggggtgggggagtaattgcytaaagtttaccmtacacattaaatctctaaataatcctggttgggctgncaacggtgagnggtttaacaaaa

SEQ ID NO: 60 - DNA, 508 bp, Homo sapiens
  misc_feature (252)..(252): n equals a,t,g, or c
  misc_feature (472)..(472): n equals a,t,g, or c
gccggacccagcaggacgggatatctccatccgccctctcctggagcactgtgagaacacccatatgaccatctggcttggcatcgtctatgcctacaagggacttctcatgttgttcggttgtttcttagcttgggagacccgcaacgtcagcatccccgcactcaacgacagcaagtacatcgggatgagtgtctacaacgtggggatcatstgcatcatcggggccgctgtctccttcctgacccgggnaccagcccaatgtgcagttctgcatcgtggctctggtcatcatcttctgcagcaccatcaccctctgcctggtattcgtgccgaagctcatcaccctgaggaacaaacccagatgcagcaacgcagkaacaggcgattccagtttcacttcaggattcagaaggaaagaagrttyttaaaacgtccaccttcgggttcaccatgtgaaacccaagccagnacatcccgcctgggagggccttacattcagaaaacc

SEQ ID NO: 61 - DNA, 499 bp, Homo sapiens
  misc_feature (16)..(16): n equals a,t,g, or c
  misc_feature (63)..(63): n equals a,t,g, or c
  misc_feature (305)..(305): n equals a,t,g, or c
  misc_feature (356)..(356): n equals a,t,g, or c
  misc_feature (371)..(371): n equals a,t,g, or c
  misc_feature (447)..(447): n equals a,t,g, or c
  misc_feature (497)..(497): n equals a,t,g, or c
cgaccgatcacagaanggcgcagtgtgtgaattcggcttgycaccaacgwgttcatcctgwgnctggccatcgccgacgagctcttcacgctggtgctgcccatcaacatcgccgacttcctgctgcggcagtggcccttcggggagctcatgtgcaagctcatcgtggctatcgaccagtacaacaccttctccagcctctacttcctcaccgtcatgagcgccgaccgctacctggtggtgttggccactgcggagtcgcgccgggtggccggccgcacctacagcgccgcgcgcgcggttgnagcctgggccgtgtgggggatcgtcacactcgtcgtgctgccctttcgcantctttcgcccggctnagacgaagagcaaggccggcgccaatgcgtgctaattttttccggcaacccgaaggctttctggttggcgcgcgancgcttcttaaaaggttctgctggggtttgcaatccccgttgttccaacantt

SEQ ID NO: 62 - DNA, 926 bp, Homo sapiens
  misc_feature (853)..(853): n equals a,t,g, or c
  misc_feature (864)..(864): n equals a,t,g, or c
  misc_feature (876)..(876): n equals a,t,g, or c
tgatcgccaggctggcagccccaagtggagtgaccgggcccctaaatgtctcctggaacagctcaagccatgccatggtctcagtgcccctgagaatggtgcccgaagtcctgagaagcagctacacccagcagggccaccatccacttctcgtgtgcccctggctatgtgctgaagggccaggscagcatcaagtgtgtgcctgggcaccctcgcattggagtgaccccccacccatctgtagggctgcctctctggatgggttctacaacagtcgcagcctggatgttgccaaggcacctgctgcctccagcaccctggatgctgcccacattgcagctgccatcttcttgccactggtggcgatggtgttgttggtaggaggtgtatacttctacttctccaggctccagggaaaaagctccctgcagctgccccgcccccgcccccgcccctacaaccgcattaccatagagtcagcgtttgacaatccaacttacgagactggatctctttcctttgcaggagacgagagaatatgaagtctccatctaggtgggggcagtctagggaagtcaactcagacttgcaccacagtccagcagcaaggctccttgcttcctgctgtccctccacctcctgtatataccacctaggaggagatgccaccaagccctcaagaagttgtgcccttccccgcctgcgatgccaccatggcctattttcttggtgtcattgcccacttggggcccttcattgggccatgtcagggggcatcttacctgtggggaagaacatagctgggagcacaagcattcaacagccagcattccttgagcctccttcattgccnggggaccagcntggggaacacanttaggcaggagcagggagttaccttttctttccacatggaccaccattcc

SEQ ID NO: 63 - DNA, 556 bp, Homo sapiens
ggcagagctgctctgccatgatgacactggsttctacagctctcattccgggcctgactcatggggcaggcagatgggtgatggagcagggaccctcccagcccagtcacctgctggggaattccaggctcaccatgcagcgtgtgcatgcttgtgatttttgtttccttgtttggaacagaacaaaggaacatgaggacatttggatctttttcctgcctcttctccatgtgtatattggagtttgccctaaatctcttctgctacaagatggggtagaaataaatacacatgcagagttgtgtcccctgcagccacactcaacttgtgcttcctcttgtgtcctgacaggggaatgtaggtgacatttctccccattcctcttggctctgtttgccctggggaatcaaggttagaggacagtcgggggratgggataaatgccagtcctggaggtcccactggaagcagcgaggggaaattcctgaggaaatactatttgagatcctaacagtactcttacgtgcttagcagtttatggtttacaaagtccttt

SEQ ID NO: 64 - DNA, 473 bp, Homo sapiens
acccagggtacgacgaagcagtcggcgggagcccacggtcgctgggcggtgtctttaagggagggggcggagccacgtctctggacatcctgagcccaagtcccccacactcagtgcagtgatgagtgcggaagtgaaggtgacagggcagaaccaggagcaatttctgctcctagccaagtcggccaagggggcagcgctggccacactcatccatcaggtgctggaggcccctggtgtctacgtgtttggagaactgctggacatgcccaatgttagagagctggctgagagtgactttgcctctaccttccggctgctcacagtgtttgcttatgggacatacgctgactacttagctgaagcccggaatcttcctccactaacagaggctcagaagaataagcttcgacacctctcagttgtcaccctggctgctaaagtaaagtgtatcccatatgcagtgttgctgg

SEQ ID NO: 65 - DNA, 1204 bp, Homo sapiens
  misc_feature (981)..(981): n equals a,t,g, or c
  misc_feature (1070)..(1070): n equals a,t,g, or c
  misc_feature (1105)..(1105): n equals a,t,g, or c
  misc_feature (1159)..(1159): n equals a,t,g, or c
  misc_feature (1201)..(1201): n equals a,t,g, or c
ctatgcgacaatcctaggaacaccagctgacaatggactgccactgacggattcctgtggatatggggaacccagagcttactcacagctaccttatcactggcaaggtacttgcttcctaggcacaattcaacctggattctttttacttccgaagcaggcgggcaacaccctcagagtccctgtgtatgatmaccagagaaaaatgatccttggaggtaggagggagccaaagattgtgagaggacgagtggcctcygcaacggatcattgaatactatggtcctgccacttgggcagaggatggttcatggggttatcgcactcccatatatatgccaaatagagcgattagactacaagctgttctagagataatcactaaccaaactgcctcagccctagaaatgctcgcgcaacaacaaaaccaaatgcgcgcggcaatttatcaaaacaggctggccctagactacttattagcagaagagggtgcgggctgtggtaagtttaacatctccaattgctgtcttaacataggcaataatggagaagaggttctggaaatcgcttcaaacatcagaaaagtagcccgtgtaccagtccaaacctgggagggatgggacccagcaaaccttctaggagggtggttctctaatttaggaggatttaaaatgctggtggggacagtcattttcatcactggggtcctcctgtttctcccctgtggtatcccattaaaactcttgttgaaactacagttaacctcctgacaatccagatgatgctcctgctacagcggcacgatggataccaacccgtctctcaagaataccccaaaaattaagtttttctttttccaaggtgcccacgccacccctatgtcacgcctgaagtagttattgagaaagtcgtccctttccccttttctataaccaaatagacaggaatggaagattctcctcggggcctgaaagcttgcgngatgaataactcctcctcctcaggcccagtcccaaggtacaaacttgcaccagcaggcaagataggcagaggcaggaagagagctgggntgggaaggacacgttaccccctggaaggttcaagnrggggaggtcgcctgggtactacataggcagttcacgtttaggcttggggacanttcctgtttttacagagggattttttaaaacccctggccccntcc

SEQ ID NO: 66 - DNA, 480 bp, Homo sapiens
caagatgcaagcaccagccttcagggacaagaaacagggggtctcagccaagaatcaaggtgcccatgacccagactatgagaatatcaccttggccttcaaaaatcaggaccatgcaaagggtggtcattcacgacccacgagccaagtcccagcccagtgcaggccgccctcagactccacccaggtcccctgctggttgtacagagccatcctgagcctgtacatcctcctggccctggcctttgtcctctgcatcatcctgtcagccttcatcatggtgaagaatgctgagatgtccaaggagctgctgggctttaaaagggagctttggaatgtctcaaactccgtacaagcatgcgaagagagacagaagagaggctgggawtccgttcagcagagcatcaccatggtcaggagcaagattgatagattagagacgacattagcaggcataaaaaacattgacacaaaggtaca

SEQ ID NO: 67 - DNA, 525 bp, Homo sapiens
  misc_feature (476)..(476): n equals a,t,g, or c
  misc_feature (498)..(498): n equals a,t,g, or c
  misc_feature (506)..(506): n equals a,t,g, or c
  misc_feature (509)..(509): n equals a,t,g, or c
cccacgcgtccggccatcccactgctcgtctccgtagcccctggagctgcccgtggtatcggataccggcgcgtgcggtccccgagtcctggctgccctcgcccggctgccagccttctcagccagtcatgttggagcatctgagctcgctgcccacacaaatggattacaagggccagaagctagccgaacagatgtttcagggaattattattttttctgcaatagttggatttatctacgggtacgtggctgaacagttcgggtggactgtctatatagttatggccggatttgctttttcgtgtttgttgacacttcctccatggcccatttaccgccggcaccccctcaagtggttacctgttcaagactcaggctcagaagacaagaaaccaggggaaaggaaaattaagaggcatgctaaaaataactaaattaggtttttcatgatttagctttactcttgcacctgntttccttttgcttgagaagaantcagtttncanactccaaaacatgggc

SEQ ID NO: 68 - DNA, 1113 bp, Homo sapiens
  misc_feature (151)..(151): n equals a,t,g, or c
  misc_feature (726)..(726): n equals a,t,g, or c
  misc_feature (1057)..(1057): n equals a,t,g, or c
  misc_feature (1073)..(1073): n equals a,t,g, or c
ctctagtgcctgggcatgggcccacccagagcacctgtctggaggatgccgagagggactctcgtctgtgggacgggatccaagagtttggggattaggggtattagggcttttcagctccagcttcctgatgaaagggctgtctttacangcccaaccctcagaccctcgccttccaaggcaggcccctcagcctggcctgctctcaccacctcctccaaagcactgaggtcctggcagggctcctctgaggccttggacgaggacgtggagtcatcagtgttgcccttgcccctaacctcagcccgagggtctccaggatgttgcctggcccaggacttgggacagtggccttgtctttgtcctccccaccccccagccctagggacacsccaggcagtcctgggtgtggacacgatgaagcaccggctccataagacaccttttggggaagtggttgtgcatattttatttttctttgacttgtgtgagttcaaagtaaacacyaccaccgtggacaactcttgaattaaatcccactagagcgagctttaaaactaatctgagcataacccccaacgtggctctatgcttgtgtacctttgcacatattttgtttagtacagtttcatatttgagtttgcagaattatcctaatagtctttttttggctaatatttttataacgtggttcttatttaactgtctagttttgatagaatttanccaggtctggctgaatgaagatgttggcacgtgtcattttagtggtttaaatcctcttatttatggttttaactctaagaaaattttaaaaggaagagatgtttggatgacaaaaaaatgccttattgaaaaactaaagcaaattctttataggaagaaaatatgggaatttgattacacatagatgatgatgtttatttaaaaaaaaaacaacagcaacaaaaaatcctagcctccagttgccttttcctttctttagctcctgtttttggtgaattactaaactgattgactttcagcctttttggctagatcctgagaggctattttncttacgaatataccancatcctgaaagttaaagaaaaaatctaatgtatgatgtga

SEQ ID NO: 69 - DNA, 627 bp, Homo sapiens
  misc_feature (566)..(566): n equals a,t,g, or c
  misc_feature (589)..(589): n equals a,t,g, or c
  misc_feature (602)..(602): n equals a,t,g, or c
  misc_feature (624)..(624): n equals a,t,g, or c
acccacgcgtccgtgataaaccagtggaatgtggataccatgtcaagactgaagatccagacttgaggacttcctcctggattaaacagtttgatacttccagatttcatcctcaggatctaagtagaagccagaaatgcatcagaaaggaaggttcatcagaaattagtcagagggtacaaagtaggaattatgtggacagcagcggctcaagccttcagaatggaaagtatatgcagaattcaaacctgacttcgggggcgtgccagataagtaatggcagtctaagcccagaaaggccagttggtgaaacttccttctcggtgccccttcaccccaccaagagaccggcatcaaatccaccacctatcagcaaccaggcaacaaaaggtaaacgtccaaaaaaaggaatggcaacagccaaacaacgtcttgggaagatccttaagttgaacagaaatggccatgcacgtttctttgtgttgacagagcttgctgttgcagccattcttccctttggagaccagtctaggggtgcaggagcctgggagcttccgctgtccccntgcctggagcagtttgtgtgtantagttaagaacantgcccgaagaacagattgaacntga

SEQ ID NO: 70 - DNA, 380 bp, Homo sapiens
ggagaagcggagaatctcttcatgtctagggaggggtaaagagaatatgattcccctctgttgggtgttgggagacggaggcatggactgcatgacctctcaaaagtccttggggactagaacgccttcactctcctgtggattaccccacccctccctgagccatggatctggccggggtattagtaaggtactctgctccctaggaacagtctccagaattttactgtgttcccctcarccctctgctggaattgtgagaaktgggggtaagagaagraggagacaggattggaagagacctgggggcaaagagctctctgtgcatccttccctgctgctcttcctcctagccatgtggcccagcttcatccttcccc

SEQ ID NO: 71 - DNA, 754 bp, Homo sapiens
  misc_feature (208)..(208): n equals a,t,g, or c
  misc_feature (731)..(731): n equals a,t,g, or c
  misc_feature (740)..(740): n equals a,t,g, or c
  misc_feature (743)..(743): n equals a,t,g, or c
cagacttcaaacctcagaatcataatgaagtccagtctaccacaccacccttcactactgttgattcacagaaagactgtagaaaatttccagttccacagaaggatggtagtgctttggaggattctagcacttcaggggcatcctgttccaagtcaagaccacatttagctgggacacatacttctcttagacttccgcagaaggnaaaaggaacctgtattcttgtaggtggtcatgaaatcacttctggattagaagtaatttcttccctaagagcaattcatgggttgcaagtagaagtttgtcctcttaatggctgtgattacatcgtgagtaatcgcatggtggtggaaaggaggtctcaatctgagatgttaaatagtgtcaataagracaagttcmttgagcagatccagcacctgcagagtatgtttgaaagaatatgtgtgattgtggaaaaggacagagaaaaaacaggagacacatcaaggatgtttaggagaacaaagasctatgacagcctgctgactaccttaattggcgctggaatccgaattcttttcagktcctgccaagaagaaaccgcagatttgctaaaggaacygtctttagtggaacaaagaaagaatctcacttcaagaaatctccatgtatgcacaagtaactcatcagaaggctgaggagatctatagatatattcactatgtgatttggacatacaaatgttnaccaaatgntcnttaaccaagat

SEQ ID NO: 72 - DNA, 749 bp, Homo sapiens
  misc_feature (718)..(718): n equals a,t,g, or c
  misc_feature (725)..(725): n equals a,t,g, or c
gtgggaagaaggtggtgtcttcgcctgggtatcaaatactctggggccgagatggggatttgcagcgatctcatttggctatctgcaaatcgccattggttttattccgatgctctatttcgtgttaggggcactctcctacatcctgaaatggccagcgctgaatgaagaccccattaccaaaactattgcagcactcatcattctttgggcgctggcattaacgcagtttggtggcacgaaatacacggcgcgaattgctaaagttggcttcttcgccggtatcctgttacctgcatttattttgatcgcattagcggctatttatctgcactccggtgcccccgttgctatcgaaatggattcgaagaccttcttccctgacttctctaaagtgggcaccctggtagtatttgttgccttcattttgagttatatgggcgtagaagcatccgcaacccacgtcaatgaaatgagcaacccagggcgcgactatccgttggctatgttactgctgatggtggcggcaatctgcttaagctctgttggtggtttgtctattgcgatggtcattccgggtaatgaaatcaacctctccgcaggggtaatgcaaacctttaccgttctgatgtcccatgtggcaccagaaattgagtggacggttcgcgtgatctccgcactgctgttgmgggtkgtctkgcggaaaatcccctcctgnattgttngggtccctcctccccgggaatgtt

SEQ ID NO: 73 - DNA, 1067 bp, Homo sapiens
  misc_feature (368)..(368): n equals a,t,g, or c
  misc_feature (383)..(383): n equals a,t,g, or c
tcccactcatttttgaagtaactctggaacatcaggagagcattctgggtaataccatgcaaagtgtgattgcattactcagcaatctagttgcctgcaaagattcgaatatggaactactttatgaacaaggacttgtcagtcacatctgtaacctgctcactgaaactgccacactgtgcttggatgtggacaataaaaacaacaatgagatggcagctccactgctcttttccctgcttgatattttgcacagcatgctgacctatacctccggtattgtacggctggctttgcaggcccagaagtctggctcaggagaggaccctcaggctgcagaagacctgctgctgctcaacagacctctngacagacctgattangcctgctcatttccactgctttcctaatgaagatcctgagattttgatgtttcatccaagtgcctgtcyatactggttcagctgtatggagggaaaacccggacagcctctctcctgaaaatgtggaaatttttgctcatttactgacatccaaggaggacccaaaggagcagaagcttctgttaaggattctcagaagaatgatcacctccaatgagaagcacttggagagcctcaagaatgcaggcagcctcctgcgggctctggagcggctggcccctgggagtggttcatttgccgacagtgcggtggctcccttggccctggaaatcctccaagccgttgggcactaggcaagaaggtgcttagcacaagcccgccctgtgccccagccctcggatgcataagcaaggtcagctcccagacacctttgccacatcccctcacagctgtctttggacctaataaagtcagcttaacccagaacctggtggcccaagtgctcactaaccccagggcctagaaaactgactcagaatggacttccttggttcctgtggaatgcatctgggaagcccaggtttgttagctgttctcagaaatgttctttccctctctgtgtgggccaggtgggctaaggttagcactgcctgtggtaataaagcagtggatcaaagcacaaaa

SEQ ID NO: 74 - DNA, 520 bp, Homo sapiens
  misc_feature (474)..(474): n equals a,t,g, or c
  misc_feature (503)..(503): n equals a,t,g, or c
  misc_feature (520)..(520): n equals a,t,g, or c
atggtccactgtcctcacgagttgctacagatgcctctttcactgttcagtcagcgttcctgggtaactcagtgcttggacacttggaaaacatgcaccctgataactcaaaggcacctggcttcagaccaccttcccagcgagtttctactagtccagttggtgactctcctattccatctgtttcttcgggatcatcttcacctctttcagccacttctgccccaccaacgttgggccaaccaaaaggagtcagtgccagtcaagatcgaaagatacctcccccaattggaacagagagactggcccgaattcggcaaggagggtctgttgcacaagccccggcggggaaccagttttgtcgstcccgttggacacaktggratctggttcatttggtgtcaatgctgtgtcagaaggcttatcaggttggtcgcaatctgtgatggggaacatccaatgcatcaacattancggacccagcaaattctcccaaatcagcnatggagaaagatgatcn

SEQ ID NO: 75 - DNA, 671 bp, Homo sapiens
  misc_feature (574)..(574): n equals a,t,g, or c
  misc_feature (608)..(608): n equals a,t,g, or c
  misc_feature (622)..(622): n equals a,t,g, or c
  misc_feature (627)..(627): n equals a,t,g, or c
ttgtgaacctagaaaaggcaccactgaaagtacttgaaaactggtggtcagtacttgaacctccactattcctcaagatagtagaactttttaaggaagttgtggtacatcttttgaaactctacaagatcggtattcccccttctgaaaraagattttcaacagttttcttcatactgcattaaaggttttagaaatactacatagggtaaatgagaaaatgggacagattatacagtatgataaattttatatacatgaagtacaagaattgatagacatargaaatgattatatcaactgggtccaacagcaggcctatggaatgttggcagatatccctgttacaatctgtacatatccatttgtatttgatgcccaagcaaaaactactctgttacagaccgatgcagtcttacagatgcagatggctattgatcaggcccacaggcagaatgyctccyctctttttctcccagtgattgaatctgtgaatccctgcttaattctagtggtgcgtagagaaaatattgtaggagatgcaatggaagtccttaggaaacaaagacatagnttacaagaagccactcaaggttatatttttttgngaggtgctttggtncaggngggtgcgcaagaattttcttgctcatcatgggggattattggtc

SEQ ID NO: 76 - DNA, 866 bp, Homo sapiens
  misc_feature (690)..(690): n equals a,t,g, or c
  misc_feature (839)..(839): n equals a,t,g, or c
gtcagccctgaagctaacaaagagatgccagggctggaccctaatttgagaagtgcagtttccatagcaaggcgtgtacaagatccattagctgagctagtgaaaattgagccaaagcacattggagttggaatgtatcagcatgacgtatcccagactttactcaaggcaacactggacagtgttgtagaagaatgtgtcagctttgtgggagtggatattaacatctgttcagaagttttgttaaggcatattgcaggactcaatgccaacagggccaaaaatattattgaatggcgagagaaaaatggaccctttatcaaccgagaacagctgaagaaagtgaaagggctgggccmaaaatccttccaacagtgtgctggcttcatcagaatcaaccaggrttatatccgaacgttttgcagtyagcaaactgaaacttcaggccaaattcaaggagttgctgtgacatcttcagcagacgttgaggtcacaaatgagaagcagggcaaaaagaagagcaaaactgcagtgaatgttttactgaagccaaatcctttggaccaaacttgtattcatccagaatcatatgacatagcaakgaggtttttgtcmtccattggagggacactgtatgaggttggaaagcctgaaatgcaacaaaaaataaattcattccttgaaaagganggaatggagaaaattgcagaaagattgcaaacaacagtacacaccttacaggttcatcatagatgggtcttcagccagcctgaaggctttgactttcgaacagatttttgataaacctggattttcaaggaggaaggcatagtatgccnggggagtttctgccaggtttggggaca

SEQ ID NO: 77 - DNA, 573 bp, Homo sapiens
  misc_feature (9)..(9): n equals a,t,g, or c
  misc_feature (506)..(506): n equals a,t,g, or c
  misc_feature (548)..(548): n equals a,t,g, or c
gagcgcctncgctgcgtccgcccgttccatagtgccgcggatcagggcggacgtgaagcctttagcgtggtcctcagacctcgctgtgcccggggtggggcgtgtcggctgctaccgagaacctgctcgggggacgcgtycgtcaaccggaatccaggggacagaagcttccgacgcgcgaggcctcgggaggagcgtcaacttggtaactctcctccggtcgcaagacctggaagtggcctcagggggtcgcccttcctgtccgtcgtggatgaaggggaccacttggcttcagaaatccccgctggcctccgcctcccctggggtttccctttcggcgcaggcggggcagcggcgtcatcacaaccatcgccaccccagtaatcacagcgagcggccctttgcgcacgcgtggagccttctmaggcctcagtacttctmacttcgcccggcaaggctggccaggaggggtgcattctccctttccgcgtatttcaagaccactnccttctgcatgctcggtgtcccagtctgtctcctcgctgccncccgaggcctggaaatgaagcaaag

SEQ ID NO: 78 - DNA, 445 bp, Homo sapiens
  misc_feature (337)..(337): n equals a,t,g, or c
  misc_feature (397)..(397): n equals a,t,g, or c
ggcacgaggtttcactgaagaatgatctggctggactgcttatttggggtagccctgaagccagaatcttcagatcttttcttttgtgtcagttatgttcctcagaaatggtttttcattctcctgcctggcagcgctgttcataagatgattgtggacaggcagtatatgggcgtgtctaagcggaagtgcatcgtgtggggtgtcgccttcttgtccgatggcactatcataagtgtggactctgctgggaaggtgcagttctgggactcagccactgggacgcttgtgaagagccatctcatcgctaatgctgacgtgcagtccattgctgtanctgaccaagaagacagtttcgtggtgggcacagccgaaggaaccagtcttccattttcanctggtccctgtgacatctaaacagcagtgagaagcagtgggtgcggac

SEQ ID NO: 79 - DNA, 518 bp, Homo sapiens
  misc_feature (354)..(354): n equals a,t,g, or c
  misc_feature (414)..(414): n equals a,t,g, or c
  misc_feature (457)..(457): n equals a,t,g, or c
  misc_feature (506)..(506): n equals a,t,g, or c
agggccagtggatgtgggagtgctggggaagccccacggagagtgaccccaccccccttgaggacaggtggctgcattcacagagacggtgatggtggggatgcgtcctgccttcgctctagcccagcccaggctccagccccatcaccctcattccagggagagggtgaaagctgcgcccagggacagagccaagacgcaggcccagacagctcactcttcccctcagcccctctgcccacttgtgcacactgtcttcattctctttcctttagctgggcccctccactgggaaaagatgaaacgtcttctcagatccagttcaaaagactcccaaggaaagtcctgcttggnccacactgggtcatgcgttaaaacctgggaccaattaagctgctgtttgggccaaaaagntggctgtgattggcaagttccaacgggagcctccgtgggtttngggggctggccccggccccaagaaaggcaaactggccttggaaggggcncaaggaaccctt

SEQ ID NO: 80 - DNA, 492 bp, Homo sapiens
  misc_feature (284)..(284): n equals a,t,g, or c
tttaagtttgctgtttctcctctctctctctgcaggggtgctgatggtctgtatagtgattggtgctcgaaagctcggggtcaacccagacaacattgccacgcccattgcagccagcctgggagacctcatcacactgtccattctggctttggttagcagcttcttctacagacacaaagatagtcggtatctgacgccgctggtctgcctcagctttgcggctctgaccccagtgtgggtcctcattgccaagcagagcccacccatcgtgaagatcctgnaagtttggctggttcccaatcatcctggccatggtcatcagcagtttcggaggactcatcttgagcaaaaccgtttytaaacagcagtacaaaggcatggcgatatttacccccgtgcatatgtggtgttggtggcaatctggtggccattcagaccagccgaatctcaacctacctgcacatgtggagtgcacctggcgtcctgccc

SEQ ID NO: 81 - DNA, 1186 bp, Homo sapiens
  misc_feature (54)..(55): n equals a,t,g, or c
ggcacgagccggcaagccgagctagggtgaaaactgggggcgcaccaggatgtnngacagaaaagcagaagatgagactctgttcattcacttttcctaggcccatcctgtggtcatctttccccctcccatcatacctcctccttcctggagcctctgccggcttggctgtaatggtggcacttacctggatatttcagtgggaggatgaaaggcgagactcaccctacgcggtgggacagatggggagaggaaaaaggcagagatggccaggagaggggtgcaggacaaaccagagaggttgggtcaggggaaaagggtggggagaaagaggggtgcaggccctgcaggccggttagccagcagctgcggcctccccgggcccttggcatccaacttcgcagacagggtaccagcctcctggtgtgtatcataggatttgttcacatagtgttatgcatgatcttcgtaaggttaagaagccgtggtggtgcaccatgacatccaacccgtatatataaagataaatatatatatatatgtatgtaaattatggcacgagaaattatagcactgagggccctgctgccctgctggaccaagcaaaactaagccttttggtttgggtattatgtttcgttttgttatttgtttgtttttgtggcttgtcttatgtcgtgatagcacaagtgccagtcggattgctctgtattacagaatagtgtttttaattcatcaatgttctagttaatgtctacctcagcacctcctcttagcctaattttaggaggttgcccaattttgtttcttcaattttactggttacttttttgtacaaatcaatctctttctctctttctctcctccccacctctcacccttgccctctccatctccctctcccgccctcccctcctccctctggctccccgtctcatttctgtccactccattctctctccctctctcctgcctcctgctgccccctccccagcccacttccccgagttgtgcttgccgctccttatctgttctagttccgaagcagtttcactcgaagttgtgcagtcctggttgcagctttccgcatctgccttcgtttcgtgtagattgacgcgtttctttgtaatttcagtgtttctgacaagatttaaaaaaaaaaaaaggaaaaaaaaaaaaaaaaaaa

SEQ ID NO: 82 - DNA, 2031 bp, Homo sapiens
  misc_feature (41)..(41): n equals a,t,g, or c
  misc_feature (1855)..(1855): n equals a,t,g, or c
  misc_feature (2016)..(2016): n equals a,t,g, or c
caattaacccgtttgaggcctaggttgtttggcaagccccnggcctaaagttttaattcggcagagccaagggcctgaaaggaagggaaaggggagggtagcgggagggtagcaggtgagttcctagggctggaaggtttagcagcagcctggtgcagtgccctgtcatcaagacaaacccacggtcctcctgggtgcctaccaagcttggtttgtacaaaagcaaggtgggagtctatttttgtacatgagatacatcacacttacctgtgggccagtattgtgaagtgagtctgagttgtttacactgatgccttccctgcccaccacaaattgtgtacatagtcttcagaatgataccacccctttccccagctcccaaccaagagctggttctaggcctgtgttatatgtcatatttagcgtttttatatatgacctttgatttctgttgtttgtattttagcacagtgtatgcaccttcatttaaatacatctgtgtgcatacagatacgcatatatgtgtgtgcgtatgcatatatctctcatctgtagtttccaagagttcagctgaagcagatggagtcctgcagcccaggagacaccctgcatccctgctaatagtgtttgccacaagtattagtgagtcttccttattaatattttcatttcagaagactgaagcaaagctgatagtgtttgctgtttctttggcagctaagtgagggtcttgggatgacttgctgtgttcctcaagctgcactttggggccatctctgcagtattaagccccctttttgcttggtggtactctgtctgtgcctgtgtgtgtgtgtgatagtcactcttgcatggcttccatgtctggtttgtggcatttggggataagtgctgaaccagagcatttgcagtttgtttgaggcctcgttgccaatgatagatcactcctgttgacctggtatgtctgcttgcttgctgcttttccttgctttctcttggaagaggaaaggactctggtcaggcccaggctgagtgagatgagctgcagctggctcatggccttcttagagcagagagaggagtatgtcattttactaagttcctaaacaaacatttatgcaggcaacactccttgcagatccagaaactgaggcacaatagggttatgacttgctcaagaatatgtagctgctagggggtaaatcaaggcatcacaatttctgttcagcgggcaggaataggctgtgaattgctagcactttttttttaagcaattactttttgacttgttcctctgaaagtgcaagaggcgtacacctttcccaaatgtagactagaatctgcaggatgccacccactgtatagttctgctttcccagagaggaagaacttttagaaaccaaatgatcttaattgttattgcccacccctggcttttccgggtagaaaattcacagtaggaatgattgttaagagagagtgcttggaaccatgggttaacaggaaaggctacctaacttcacatatctgcaaccagagcagccaccaagcattacttagcagcaggaaaatgattgtatttgagttcctgtgtgtccaaaactgaggcaccatgttctttgaaaacatgccacctcaaggctgggcgcggtggctcacacctgttaatcccagcactttgggaggccgaggcgggcggatcaccggagtcggggagtttgagaccagcctggaccaacatgggagaaaccccatctctacctaaaaatacaaaattagccgggcgtggtggcatgcgcctataatctcagctacttgggagggytgaggcaggrgaattgcttgaacccrgganggcggaggtttgcggttgagttgaggatcgtgccattgcacttccgggccttggggcaacaacagcaaaaaytccgtcttcaamwmrtgccgaattcgatatcaagcttatcgataccgtcgacctcgagggggggcccggtacccaattcgccctatagngatcgtattacaatc

SEQ ID NO: 83 - DNA, 1153 bp, Homo sapiens
ggcacagagcctccgacccaggtggtctggagcctgccgggagagtggtggcatctgagaggctggtcgtggactgtggttgggggaggtgggagctgttttaaccgtgtgccccctctcctgtgccggcgtgggcatcccccggggcagtggaacccgggcgctcctccagcttccgagtccagccagcctgggcgcggggcgcgccccgagacacccgaggagtccgttcctccctggttacgtggactgtggagctggtctcttgtggctcagcgccgtgcggaggttgaagcgtacctgcggaggtcgcaccagggcgtgaggaggaggaggaagggcatgagccgagcttgaggaatccgtgctccaaactctacactcaaggatgcactgcgcaactctggtggcgatgggctggggcagatgtccttggagttctaccagaagaagaagtctcgctggccattctcagacgagtgcatcccatgggaagtgtggacggtcaaggtgcatgtggtagccctggccacggagcaggagcggcagatctgccgggagaaggtgggtgagaaactctgcgagaagatcatcaacatcgtggaggtgatgaatcggcatgagtacttgcccaagatgcccacacagtcggaggtggataacgtgtttgacacaggcttgcgggacgtgcagccctacctgtacaagatctccttccagatcactgatgccctgggcacctcagtcaccaccaccatgcgcaggctcatcaaagacaccctgccctctgagcgtcgctggatctctgggagctccttgatggctcccagaccttggcttttgggaattgcacttttgggcctttgggctctggaacctgctctgggtcattggtgagacttggaaggggcagcccccgctggcttcttggttttgtggttgccagcctcaggtcatccttttaatctttgctgacggttcagtcctgcctctactgtctctccatagccctggtggggtcccccttctttctccactgtacagaagagccaccactgggatggggaataaagttgagaacatgagtttgggctgaaaaaaaaaaaaaaaaaaaaaaaaaaaaaaaaaaaaaaaaaaaaaaaaaaaaaaaaaa

SEQ ID NO: 84 - DNA, 1346 bp, Homo sapiens
ggcacgaggcgcctaccctgcctgcaggtgagcagtggtgtgtgagagccaggcgtccctctgcctgcccactcagtggcaacacccgggagctgttttgtcctttgtggagcctcagcagttccctctttcagaactcactgccaagagccctgaacaggagccaccatgcagtgcttcagcttcattaagaccatgatgatcctcttcaatttgctcatctttctgtgtggtgcagccctgttggcagtgggcatctgggtgtcaatcgatggggcatcctttctgaagatcttcgggccactgtcgtccagtgccatgcagtttgtcaacgtgggctacctcatcgcagccggcgttgtggtctttgctcttggtttcctgggctgctatggtgctaagactgagagcaagtgtgccctcgtgacgttcttcttcatcctcctcctcatcttcattgctgaggttgcagctgctgtggtcgccttggtgtacaccacaatggctgagcacttcctgacgttgctggtagtgcctgccatcaagaaagattatggttcccaggaagacttcactcaagtgtggaacaccaccatgaaagggctcaagtgctgtggcttcaccaactatacggattttgaggactcaccctacttcaaagagaacagtgcctttcccccattctgttgcaatgacaacgtcaccaacacagccaatgaaacctgcaccaagcaaaaggctcacgaccaaaaagtagagggttgcttcaatcagcttttgtatgacatccgaactaatgcagtcaccgtgggtggtgtggcagctggaattgggggcctcgagctggctgccatgattgtgtccatgtatctgtactgcaatctacaataagtccacttctgcctctgccactactgctgccacatgggaactgtgaagaggcaccctggcaagcagcagtgattgggggaggggacaggatctaacaatgtcacttgggccagaatggacctgccctttctgctccagacttggggctagatagggaccactccttttaggcgatgcctgactttccttccattggtgggtggatgggtggggggcattccagagcctctaaggtagccagttctgttgcccattcccccagtctattaaacccttgatatgccccctaggcctagtggtgatcccagtgctctactgggggatgagagaaaggcattttatagcctgggcataagtgaaatcagcagagcctctgggtggatgtgtagaaggcacttcaaaatgcataaacctgttacaatgttaaaaaaaaaaaaaaaaaaaaaaaaaaaaaa

SEQ ID NO: 85 - DNA, 1019 bp, Homo sapiens
  misc_feature (949)..(949): n equals a,t,g, or c
  misc_feature (968)..(968): n equals a,t,g, or c
  misc_feature (974)..(974): n equals a,t,g, or c
  misc_feature (1003)..(1003): n equals a,t,g, or c
ggcacagcagcggcggtcgcggctgaggctgaggaggaggcggcggcggcgggcggggctcggctcgggctccgcgggcgggcgggcggacatggcggccaacatgtaccgggtcggagattatgtctactttgagaattcctccagcaacccatacctaataagaaggatagaagaactcaacaagactgcaatggcaacgtggaagcaaaagtagtatgcttttatagacgacgtgatatttccaacacacttataatgctcgcagataagcatgctaaagaaattgaggaagaatctgaaacaacagttgaggctgacttgaccgataagcagaaacatcagttgaaacatagggaactctttttgtcacgccagtatgaatctctgcccgcaacacatatcaggggaaagtgcagtgttgcccttctgaatgagacagaatcagtattgtcatatcttgataaggaggataccttcttctactcattggtctatgacccctcattgaaaacactattagctgacaaaggtgaaatcagagtgggacctagatatcaagcagacattccagaaatgctgttagaaggagaatcagatgagagggaacaatcaaaattggaagttaaagtttgggatccaaatagcccacttacggatcgacagattgaccagtttttagttgtagcacgtgctgttgggacattcgccagagccctggattgcagcagttctgtgaggcagcctagtttgcatatgagtgctgctgcagcttcccgagacatcaccttgtttcacgctatggatacattgtatagacacagytakgatttgagcagtgccattagtgtcttagtaccactcggaggacctgttttatgcagagatgaaatggaggaatggtcagcctctgaagctagcttatttgaagaggcctggaaaattggcnaagacttcaatgacatacngcagantttcttccttggaatcattgactagcacnttgatatattactgtg

SEQ ID NO: 86 - DNA, 1540 bp, Homo sapiens
cccacgcgtccggaaggattgaccagttaaccaacatcttagcccccatggctgttggccagattatgacatttggctccccagtcatcggctgtggctttatttcgggatggaacttggtatccatgtgcgtggagtacgtcctgctctggaaggtttaccagaaaaccccagctctagctgtgaaagctggtcttaaagaagaggaaactgaattgaaacagctgaatttacacaaagatactgagccaaaacccctggagggaactcatctaatgggtgtgaaagactctaacatccatgagcttgaacatgagcaagagcctacttgtgcctcccagatggctgagcccttccgtaccttccgagatggatgggtctcctactacaaccagcctgtgtttctggctggcatgggtcttgctttcctttatatgactgtcctgggctttgactgcatcaccacagggtacgcctacactcagggactgagtgggttccatcctcagtattttgatgggagcatcagctataactggaataatgggaactgtagcttttacttggctacgtcgaaaatgtggtttggttcggcaggtctgatctcaggattggcacagctttcctgtttgatcttgtgtgtgatctctgtattcatgcctggaagccccctggacttgtccgtttctccttttgaagatatccgatcaaggttcattcaaggagagtcaattacacctaccaagatacctgaaattacaactgaaatatacatgtctaatgggtctaattctgctaatattgtcccggagacaagtcctgaatctgtgcccataatctctgtcagtctgctgtttgcaggcgtcattgctgctagaatcggtctttggtcctttgatttaactgtgacacagttgctgcaagaaaatgtaattgaatctgaaagaggcattataaatggtgtacagaactccatgaactatcttcttgatcttctgcatttcatcatggtcatcctggctccaaatcctgaagcttttggcttgctcgtattgatttcagtctcctttgtggcaatgggccacattatgtatttccgatttgcccaaaatactctgggaaacaagctctttgcttgcggtcctgatgcaaaagaagttaggaaggaaaatcaagcaaatacatctgttgtttgagacagtttaactgttgctatcctgttactagattatatagagcacatgtgcttattttgtactgcagaattccaataaatggctgggtgttttgctctgtttttaccacagctgtgccttgagaactaaaagctgtttaggaaacctaagtcagcagaaattaactggattaatttcccttatgttgagggccatggraaaaaaattgggaaaaggaaaaactcagttttaaatacgggagactataatggataacactgrattcccctatttctcatgagtagatacaatcttacgtaaaagagtggttagtcacgtgaattcagttatcatttgacagattc

SEQ ID NO: 87 - DNA, 624 bp, Homo sapiens
ggcacgagggtgtggtagccggcgccgcgcccatagccggacggggatctgagctggcaggatgaatgtgggggtggcacacagcgaagtaaaccccaacacccgagtgatgaatagccgaggcatctggctggcctacatcatcttggtaggattgctgcatatggttctactcagcatccccttcttcagcattcctgttgtctggaccctgaccaacgtcatccataacctggctacgtatgtcttccttcatacggtgaaagggacaccctttgagactcctgaccaaggaaaggctcggctactgacacactgggagcaaatggactatgggctccagtttacctcttcccgcaagttcctcagcatctctcctattgtgctctatctcctggccagcttctataccaagtatgatgctgcgcacttcctcatcaacacagcctcattgctaagtgtactgctgccgaagttgccccagttccatggggttcgtgtctttggcatcaacaaatactgagggatgggttttgggacagctccatgggcatggggaaggcactgaaacagaggactataaaacatccttctcttattctccaaaaaaaaaaaaaaaaaaaa

SEQ ID NO: 88 - DNA, 646 bp, Homo sapiens
  misc_feature (16)..(16): n equals a,t,g, or c
  misc_feature (523)..(523): n equals a,t,g, or c
  misc_feature (610)..(611): n equals a,t,g, or c
  misc_feature (631)..(631): n equals a,t,g, or c
  misc_feature (635)..(635): n equals a,t,g, or c
gcctgtcatgcctatngcctagctgccagattaaccttgccttgaaaataacgattgccccataggctattcagtgtaaggaagacaaaaattccttgggaacctactagtgggtttgccttccagatttggtagacgcaaaaagcaaagggggaacatgggcaaaggaagatttgatgaaaaagaaaatgtgtccaactgcatccagttgaaaacttcagttattaagggtattaagaatcaattgatagagcaatttccaggtattgaaccatggcttaatcaaatcatgcctaagaaagatcctgtcaaaatagtccgatgccatgaacatatagraatccttacagtaaatggagaattactcttttttagacaaagagaagggcctttttatccaaccctaagattacttcacaaatatccttttatcctgccacaccagcagtttgataaagggagccatcaaatttgtactcagttggagcaaatatcatgtttcccaggcttacttctcctggancttaactttacccctgctgcagtaaataccattgtttgctatcattggccaaaaaggaaaacagcatgcctattttttgggaatccnnaaaattttttgcaaaaaaanttanaaaatttcccc

SEQ ID NO: 89 - DNA, 368 bp, Homo sapiens
  misc_feature (321)..(321): n equals a,t,g, or c
  misc_feature (350)..(350): n equals a,t,g, or c
aattcggcagagctggcatggcccaaatagtattattctcactttttcctgtttctatagaccctgtcagggagggtaaattaaascaaagtccctccttaggaaaaagcagctgggtcttaagtagaaasctgctctcaggctgggattacaggcatgagccaccgtgcccagccgatwaatgccttttaaagctgggaatttttttacccaatctgggrttcagtcaaaggccatacattgcatattgttgtcttgtctctagtctcctccagaacagttacctgtgtattttttttgtctttaatgatgttttgaagngtccaggctagttgttttacagaatttcnggttttggacagaaatcc

SEQ ID NO: 90 - DNA, 527 bp, Homo sapiens
  misc_feature (3)..(3): n equals a,t,g, or c
  misc_feature (495)..(495): n equals a,t,g, or c
ttntttttttttcttcattttcctagcaacctcactaaggctgggaggaggagaataatcttccatgtcagaatctgacggacttcggtttcgataacgaccaccacctgaactccttcttccttcatgagagtggccacttctcctatgatccccagagcttcttctgtcacgctcttcatattcccaagctttatcatcatcttttttatgtcgtttcctagaggattcaaaagcttcatcactatcattatcttcatctgaactgatttcagcatattttggcttttcattaactgtgtacgcttgcgtttgttcattttcacacgttcacaaagtggcatggtggactcaatttctgccaggagttcagggggtaattcttttaacactgattgatctatactacctttatttgactttgatggtttattcttgataggtttaagggaacttcttgatttgtcctctctatctttaataagtttctgaacntcatccaaagacagtttttgtagcacaactac

SEQ ID NO: 91 - DNA, 395 bp, Homo sapiens
  misc_feature (335)..(335): n equals a,t,g, or c
  misc_feature (365)..(365): n equals a,t,g, or c
  misc_feature (377)..(377): n equals a,t,g, or c
gaagagggctataagggcagcggcccaggcgggcgggatccaggcgggccatggcggatgtccccggggcacagcgagcggttcctggtgacggcccagagccccgggaccccctggactgttgggcctgcgctgttcttgtaacagcccagaatctgctggtggctgccttcaatcttctcctgctggtgctggtgctagggaccatcttgctacccgctgtcaccatgctgggcttcggcttcctctgccactctcagttcctgcgctcccagggcacccccttgcaccgcgcacctgcggaaccccggttttcacgggccctactggttcancggatttcctggttccttcgtggccgttgnttcgtggtttgnttttgggccaagttaacc

SEQ ID NO: 92 - DNA, 1088 bp, Homo sapiens
  misc_feature (962)..(962): n equals a,t,g, or c
  misc_feature (995)..(995): n equals a,t,g, or c
  misc_feature (1055)..(1055): n equals a,t,g, or c
  misc_feature (1060)..(1060): n equals a,t,g, or c
  misc_feature (1068)..(1068): n equals a,t,g, or c
  misc_feature (1081)..(1081): n equals a,t,g, or c
atccaaagaaccgcgagtgcttgctctctgctcctcggaagaaacttaaccatcttttgaaagcccttgaaacgtcaaaggcagatctggagtcacttctgcagacaccgggtgggaagcctcgtggcttcagtgaagcagctgccccgcgagcctttggtctccactgtcgcctgagcatccatcttcagcacaagttctgctcagaaggaaaggtgtatttgtccatgttggaagacactggcttttggttagaaagcaaaattttatcttttattcaagatcaagaagaagactacctgaagcttcatagggtcatttatcagcaaattatccagacctacctgactgtgtgtaaagatgttgttatggtaggccttggtgaccatcagtttcagatgcaactcttacagcggagtcttggaatcatgcaaacagtgaagggrtttttttatgtttcattacttcttgacattctgaaagagataactggaagttccttgattcagaaaacagattcagatgaagaagttgcaatgctgttggacacagtccagraagtatttcagaaaatgttggaatgtattgcacggagcttcaggaagcagccggaagaaggcctgcggtgctttattctgttcagaggcctcttcatgagttcattactgctgttcagtctcggcacacagacacccctgtgcaccggggtgtactttctactctgatcgctgggcctgtggttgagataagtcaccagctacggaaggtttctgacgtagaagagcttacccctccagagcatctttctgatcttccaccattttcaaggtgtttaataggaataataataaagtcttcgaatgtggtcaggtcatttttggatgaattaaaggcatgtgtggcttctaatgatattgaaggcattgtgtgcctcacggctgctgtgatattatcctggttantaatgcaggtaaacataaaagctcaaaagtganggaggttgcaagcactgtcacagaaactaaagcatccatggaaataccttggagagatancttgnaagattcnctagaaccaccancagacct

SEQ ID NO: 93 - DNA, 542 bp, Homo sapiens
  misc_feature (2)..(2): n equals a,t,g, or c
  misc_feature (85)..(85): n equals a,t,g, or c
  misc_feature (210)..(210): n equals a,t,g, or c
  misc_feature (262)..(262): n equals a,t,g, or c
cncaggttcgggaccaccgcagcttggggtggcagcggcgcaggaggggtcgcggggagggagtggactgaccagggccaagtgncgctcgggggcactacatggcggagggtgaagggtacttcgccatgtctgaggacgagctggcctgcagcccatacatccccctaggcggcgacttcggcggcggcgacttcggcggcggcgacnttcggcggcggcgacttcggcggcggcgactttcggcggtggcggcagttcnggtgggcattgcttggactattgcgaaaccctacggcgcactgcaatgtgctgaactgggagcaagtgcagcggctggacggcatcctgagcgagaccattccgattcacgggygcggcaacttccccacgctcgagctgcagccgagcctgatcgtgaaggtggtgcggcggcgcctggccgagaagcgcatyggcgtccgcgactgcgcctcaacggctcggcagccagccatgtcctgcaccaggacagcggcctgggctacaaggactggacctca

SEQ ID NO: 94 - DNA, 880 bp, Homo sapiens
ttatccgctggctcctgtttccaattgattgagggatgcccccaaggaagttaacttcactgcaattctgagctgtaattgactttaataagctccaacagcactgaaagacgtttggattattttcagtttgggataatactactatgaacattcctgtacatgtcttttgagaacacgcatgtgtacatttgtgatgggtatgtaatggggtggaattactggttcatagaatatgtgcatattcacctttagatatagaggctgccaaccatttttctraagtgattatactaatttatattctcactatctgtaaatgaacatttctgttgctccacatccttgctggcacttggtattgattgatttctcttttaattttaggctttttaatacgtgtgtagtgatatctcacttgctgtttgtttgctttttggtaaattttttattgaagtataatttacatacagaaaatcacacaaattgtgtacaggtgtgatttttcacaccgtgaatacatgcaaaaactagtatgaaattaagagttggaacatcaccagtactccagaagccccatgcatgttctcttccagttactataccactatcccaaggatggtctattaattcaacagcatagatttattttgcctgtttttcaacttcaaataaatgaaataatatgcactcttgtgtctggcttctttgactcaacagtatgtctatacaactcatctgtattgttgcatgttgtagttcgttcattcatactgttgtatacagtattgaattgtataaattactcattctgttactatgcatttgggctgtttccagttttggctattatgaataaagctgctatgaacattctagg

SEQ ID NO: 95 - DNA, 627 bp, Homo sapiens
cagcgaatcctcaagcataacatggactttgggaagtgcccgcgactgaggctgtttactcaggagtacatccttgccttgaacgagctcaacgcggggatggaagtggtgaagaagttcattcagagcatgcacggccccacagggcactgcccccacccccgggtcctgcccaacctggtggccgtgtgcctggctgccatctactcctgctatgaagagttcatcaacagccgcgacaattccccaagcctgaaggaaatccggaacggctgccagcagcgtgcgaccggaagcccactttacctctgcgccttctgcaccccagcccggacctggtgtctcaggaagccacgctgtctgaggcccggctcaagtcggtggtcgtggcctccagtgagatccacgtggaggtggaacgcaccarcactgccaagccggcgstgacggccarcgcaggcaacgacagcgagcccaacctcatcgactgcctcatggtcagccccgcctgcagcaccatgagcatcgagctgggcccccaggccgaccgcacgctcggctgctacgtggaaatcctcaagctgctgtcagactatgatgactggagaccgtctctgggccagtttg

SEQ ID NO: 96 - DNA, 1071 bp, Homo sapiens
  misc_feature (1010)..(1010): n equals a,t,g, or c
  misc_feature (1048)..(1048): n equals a,t,g, or c
  misc_feature (1062)..(1062): n equals a,t,g, or c
  misc_feature (1066)..(1066): n equals a,t,g, or c
ggcaggaggctgccggggcgcgggctgctgcgggagaaggggctccgaggagtccgccgcggctcgctctgtcgccggcgcgggattggggcgcgagggccatgggcgcgctctcctaaggcggaggtcgcgggcgggaggggaggaggcccgagagaggctgctgcgaaggccgcgggcccgtgactgggcgcgaggcggccggcggcggcggcggcaccagcaccaccatgtcgcgctcagtgctgcagcccagtcagcagaagctggcggagaagctcaccatcctcaacgaccggggcgtcggcatgctcacccgcctctacaacatcaagaaggcatgtggagaccccaaggcaaaaccatcctatcttatcgacaaaaacctggaatctgctgtgaaattcatagtcagaaaattccctgctgtagaaacccgcaacaacaatcaacagcttgcacaactacagaaagaaaaatcagagattctgaaaaatctggcattatattacttcacatttgtagatgttatggaatttaaggaccatgtttgtgaattgctgaatactattgacgtttgccaagtcttctttgatattactgtaaactttgatttaacaaagaactacttagatttaattataacctatacaacactaatgatactgctgtctcgaattgaagaaaggaaggcaatcattggattatacaactatgcccatgaaatgactcatggagcaagtgacagagaatacccacgccttggccagatgattgtggattatgaaaaccctttaaagaagatgatggaagaatttgtaccccatagcaagtctctttcagatgcactaatttctcttcaaatggtatatcctcgaaggaatctttcagctgaccagtggagaaatgcccagttattgagcctcatcagtgcacctagtacaatgcttaatccagcacagtccgacactatgccttgtgaatacctctctttgggatgcaatgggaanattggattatctttggctttatttgtgccatggggatncttaaatacttgangctncagta

SEQ ID NO: 97 - DNA, 539 bp, Homo sapiens
  misc_feature (509)..(509): n equals a,t,g, or c
  misc_feature (518)..(518): n equals a,t,g, or c
ggcacgagtaactcagtgcttggacacttggaaaacatgcaccctgataactcaaaggcacctggcttcagaccaccttcccagcgagtttctactagtccagttgggttaccatccattgacccatcaggcagctccccatcttcctcttctgctcctctggcaagtttttccggcataccaggaacaagggttttcctgcaaggccagctcctgttgggactcctagtttcaacagacaacatttttctccccatccttggacaagcgcctcaaactcatccacttctgccccaccaacgttgggccaaccaaaaggagtcagtgccagtcaagatcgaaagatacctcccccaattggaacagagagactggcccgaattcggcaaggagggtctgttgcacaagccccggcgggggaccagttttgtcgctcccgttgggacacagtgggaatctggttcatttggtgttcaatgctgtgtaraagggttwataggktggggcanactgtggangggggaaccatccaatggcat

SEQ ID NO: 98 - DNA, 827 bp, Homo sapiens
  misc_feature (418)..(418): n equals a,t,g, or c
  misc_feature (484)..(484): n equals a,t,g, or c
acaaagaatcaactttattgaacattcagggtcagtttctcttcttgctcttgcctgtgaccttggctggtgtgaggactggagctgctgcctggtacagggtggaggagatcttgttgatgtagtacagaccaaccatggagaagatgaagcaggtggtgacacagactcggtggatgaggccagatgcaaagagagccaacaggaggcacaggagaatctcagggaagatctttgcttggaatcctttgccaaagacaagattctccagattattgaaggcagtgagcgagaacacgaagagacccgaaccaagcaggccgccctggatggtgagccactcggtggaggccagctgacggctgtacatctgcatcccagcaaagagcagcagggacaggagggaggagagcgccangmgaggtgcccgtacccaccactggaggggatgggagaagggacggagagtcagctccgccytccntccggcaagctacgggcagatcagccggtccggaagctcggtgggccgaccccctccaagaactcccgggactgcagccacacgccccaactccccacaccgcgcggcaacccctacgtattccccagccccggacaccccgaaccctcccgtccggtggaaatgcccgctcccggtggaacccaggacacgtcagctctgtcgggagaggacgaggaaagcttgtccacccaaaccccgaccccctctaggacttcctggggaccccaccggtcctgttacccatcatgccccgcccgtgagtccaaccggcgcctctggccaagaaaggccggacgcgtgg

SEQ ID NO: 99 - DNA, 1538 bp, Homo sapiens
aattcggcacgagcaaatttatacaagctttttctagggacaccggtgctatgcaatttctggaaaattatgaaaaagaagacataacagtagcagaactggaaggaaactcaaattctttgtggaccatcagcccacccagtaagcagaaaatgatacacgaactcctggaccccaatagtagcttctctgttgttttttcatggagtattcagagaaacttaagtctgggtgcaaaatcggaaatagcaacagataagctttcttttcctcttaaaaatattactcgaaagaatatcgctaaaatgatagcaggcaacagcacagaaagttcaaaaacaccagtgaccatagraaagrtttatccmtattatgtgaaagcacctagtgrttctaactcaaaacctataaagcaacttttatctgaaaataatttcatggrtattaccatcattttgtccagagacaatacaactaaatataacagtgagtggtgggttctcaacctgactggaaacagaatatacaatccgaactctcaggccctggaactggtggtcttcaatgacaaagtcagtcccccaagtctggggttcctggctggctatggtattatgggattatatgcttcagttgtccttgtgattgggaaatttgtccgtgaattcttcagtgggatttctcactccatcatgtttgaagagcttccaaatgtggatcgaattttgaagttgtgcacagatatttttttagttcgagagacaggagaactggagctagaagaagatctctatgccaaattaatattcctatatcgctcaccagagacaatgatcaaatggactagagaaaaaacaaattgaaaccttagaacacagactgcaaataatgttaacatttgaattttttttaaaagcacaatattctcataagagctaagcatttctagttcgacggaaatggtttgtttctcttctgataggtagacaaaaggagctgatatccttctgcagtaaaagctaccttgcaagttaaggcactgttgaaaatgttatttgtaactccatttctctgaaatcagggctacttgctttatgttttagtcaacagtgtctcgcattctgattgatcatgtgaaggaatcatttatgggccccgtccctaagagaaacagaagaggagtcagaaagaaagatgcctgtgttttcctctgtggggcccgtgcacttcctggagagatgctacaatgcaatatacagcgctccatcccactggggaagctgctgtgatgagactagatgagccttcaacacactcagaaaatgcaacagcaatagggggcagacagctcctacctgtgtttctaggagcaaaagagagggaactaattgcccgtgaagacgccagtggaaggatcagcctcattctaagcaaaaacatagtattagtgatactcttactgccttatcttaaccaaggactaataggatacctttccattaaacaccagtgacttctcaggaaaaaaaaaaaaaaag

SEQ ID NO: 100 - DNA, 480 bp, Homo sapiens
  misc_feature (450)..(450): n equals a,t,g, or c
  misc_feature (475)..(475): n equals a,t,g, or c
gacagcgctggcactggggacctctcttacggttaccagggccgctcctttgaacctgtaggtactcggccccgagtggactccatgagctctgtggaggaggatgactacgacacattgaccgacatcgattccgacaagaatgtcattcgcaccaagcaatacctctatgtggctgacctggcacggaaggacaagcgtgttctgcggaaaaagtaccagatctacttctggaacattgccaccattgctgtcttctatgcccttcctgtggtgcagctggtgatcacctaccagacggtggtgaatgtcacagggaatcaggacatctgctactacaacttcctctgmgcccacccactgggacaatctcagcgccttacaacaacatcctcagcaacctggggtacatcctgctggggctgcttttctgctcatcaaccttgcaanggggagatcaaccaaaaaccggggncctgg

SEQ ID NO: 101 - DNA, 1170 bp, Homo sapiens
  misc_feature (15)..(15): n equals a,t,g, or c
acacgcacagtcacnccttacacatagccctagcccagtggtcctcaaagtgtgacccatagactaatagcatagcattacctgagaacttgataatgcatatttgcaggccccacgcaaaacctgctgaatcagaagctctgagagtaaggcctaccaatctggtttaacaagcccgtcaggtgattctgatttacagtacagtttgagacccactggctagaacatatcctccagagacttggcttaattggtctgggtaaatatggctgagcgttgttatcttttgttatcttttatatgccctaggaaagtacaaccagaattgaaaaccaactgatctataccagttctttcaattaatagtcaagaacattgagtccagtgagattaagtgatttttgcaggctatgaggttttatgctattcctgtgttctccaaaacaagaaaataaaaagacatgacttattctctgttcatacagcaagtatggaaaaaagatgatctagaagtcaactatctcaacctccattgttacccactaggtttttttctaataatgttaaaggctatttaatttatttaatcaactttaagcattacattctcaattggggacaaaaattggttcttggggtgaaaaaatattagatatggcttgtggacttccaatatcatcctatccaacaaaatcytattccytagtattaatttatctcattgggaagaaatttgtagttaaaactaatataatttgaatttaatttctgtaattgggaaggagggtaataatgaacaaaaagtttgagaaaaaaatgctttaatgggttttacaggcatgctacaatccaggactgtggtgttctatgtgccgtgtatggtcatattagtagctatttgttgcaagatacttgaagccaaatgtttgcagtataggttcctggctactgtttatgctgtgatttcactctgtctatcatgggcagtattagaaaacacactggttttcactatctggtttacaaacactatcattattttacctggattgaagtgcagaatttggcatatcgatgcatgcaatggaaagaaaaaaaatttgttaaaatttgtaaatgttcagctaaatctcagatatactgtgggatgagtatctcagggtaagtaac

SEQ ID NO: 102 - DNA, 639 bp, Homo sapiens
  misc_feature (573)..(573): n equals a,t,g, or c
  misc_feature (625)..(625): n equals a,t,g, or c
aattcggcacagtgggcacggactactggttatattccagaggtgtgtgcaggactaaatctacaagtgataatgaaaccagcaggaagaatgaagaagtaatgacccattcggggctgtggaggacctgctgcctagaaggggctttccgaggcgtgtgcaagaaaatcgatcacttccctgaagatgctgactacgaacaggacacagccgaatatctcctgcgagctgtgagggcctccagtgtcttccccatcctcagtgtcacgctgctgttcttcggcgggctctgcgtggcagccagtgagttccaccgcagcagacacaacgtcattctcagcgcgggcatcttttttgtctctgcagggttaagcaacatcattggcatcatagtttatatatcagccaacgccggagaccccggggcagcgtggaytccaaaaaaagttaytcctatggttggtccttttattttcgggagccttctctttcatcatcggcaggaaatttgttagggagtgggtttgccgtggcacatctattatttgaaaaaacattcaggcagtttacggngccaaattcccattcggagtttcctggaggaaatcttactttttggccccgncttcccaccttaca

SEQ ID NO: 103 - DNA, 545 bp, Homo sapiens
tggaattattccaccgccttccagttgtaatgtacccagacagatacaggcaaaatatctgaaaggaaggacaatcattggcgttgcagcaggcaggtttcatacagtcctatggctagagaagctgtttacactatgggactaaatggtggacaactgggttgtttgctagatcccaatggagaaaagtgtgtaactgctcctcgtcaggtctctgcccttcaccataaagacattgctctgtctttggttgctgcaagtgatggagctacagtctgtgttaccacaaggggagatatttacttacttgcagactatcagtgcaagaagatggcttctaaacagttgaacttgaaaaaagttcttgtgtctgggggtcatatggaatacaaggttgatcctgaacatttgaaagaaaatgggggtcaaaaaatttgcattcttgcaatggatggagctggaagggtgttttgctggagawcagtcaacagttctctkaagcagtgtcgatgggcctaccacgtcaggtcttcatttctgatatt

SEQ ID NO: 104 - DNA, 1579 bp, Homo sapiens
taatccagaatagttttagtgaaccgtagttactctggccaggtgcacgtctaactagattagatgttgtttgaaacatctacatccaccatttgttatgcagtgttcccaaatttctgttctacaagcatgttgtgtggcagaaaactggagaccaggcatcttaattttacttcagccatcgtaccctcttctgactgatggacccgtcatcacaaaggtccctctcatcatgttccagtgagaggccagcgattgctttcttcctggcatagtaaacattttcttggaacatatgtttcacttaatcactaccaaatatctggaagacctgtcttactcagacagcaccaggtgtacagaagcagcagacaagatcttccagatcagcagggagaccccggagcctctgcttctcctacactggcatgctgatgagatcgtgacatgcccacattggcttcttccacatctggttgcactcgtcatgatgggctcgctgcatctccctcagtcccaaattctagagccaagtgttcctgcagaggctgtctatgtgtcctggctgcccaaggacactcctgcagagccatttttgggtaaggaacacttacaaagaaggcattgatcttgtgtctgaggctcagagcccttttgataggcttctgagtcatatataaagacattcaagccaagatgctccaactgcaaatataccaaccttctctgaattatattttgcttatttatatttcttttctttttttctaaagtatggctctgaatagaatgcacattttccattgaactggatgcatttcatttagccaatccagtaatttatttatattaatctatacataatatgtttcctcagcataggagctatgattcattaattaaaagtggagtcaaaacgctaaatgcaatgtttgttgtgtattttcattacacaaacttaatttgtcttgttaaataagtacagtggatcttggagtgggatttcttggtaaattatcttgcacttgaatgtctcatgattacatatgaaatcgctttgacatatctttagacagaaaaaagtagctgagtgagggggaaattatagagctgtgtgactttagggagtaggttgaaccaggtgattacctaaaattccttccagttcaaaggcagataaatctgtaaattattttatcctatctaccatttcttaagaagacattactccaaaataattaaatttaaggctttatcaggtctgcatatagaatcttaaatyctaataaagtttcatgttaatgtcataggatttttaaaagagctataggtaatttctgtataatatgtgtatattaaaatgtaattgatttcagttgaaagtattttaaagctgataaatagcattagggttctttgcaatgtggtatctagctgtattattggttttatttactttaaacattttgaaaagcttatactggcagcctagaaaaacaaacaattaatgtatctttatgtccctggcacatgaataaactttgctgtggtttactaaaaaaaaaaaaaaaaaactcga

SEQ ID NO: 105 - DNA, 524 bp, Homo sapiens
  misc_feature (466)..(466): n equals a,t,g, or c
  misc_feature (477)..(477): n equals a,t,g, or c
  misc_feature (484)..(484): n equals a,t,g, or c
ggccatgtgatgctaggaacaatggatgtccatcaccactggacaaaaactgttgaaaagtagaatactatttcaccctcgaagtttgcgtggtttacaaatgatccttaacagtgacagatatgctccaagcttgcatgaactcgggcattttaatattccaacactctgtgatccagcaaatctccagtggtttattctcaccaaagctcagcaggcaagagagaacatgaaaagaaaggaagagttaaaggttattgaaaatgaattgatacaggcatcaacaaagaaattttctttggagaagttatataaagagcccagcattctagtatacaaatggtggattgttgtaagagctctagaacaacactgccttcctacatgggatgcactctgcatttacatttttctctgttatgcaagatggagactttgtatccttggaattggaagaatggagaancattaagtacncagaaantgttttatttttagagatagaaggacttaattaaaatatt

SEQ ID NO: 106 - DNA, 713 bp, Homo sapiens
  misc_feature (596)..(596): n equals a,t,g, or c
  misc_feature (659)..(659): n equals a,t,g, or c
  misc_feature (668)..(668): n equals a,t,g, or c
  misc_feature (677)..(677): n equals a,t,g, or c
ggaggtgaagaatcagacaaagaaaaacaggaaatgtttgcagttcattctgtcaacttgctgttgaaaagcataggtgctactctgactgatgtggatgaccttatattcaaacttgcttattatgaaattcgatatcagttctacaagagagatcagcttatatggagtgttgttaggcattacagtgaacagttcttgaaacagatgtatgtccttgtattggggttagatgtacttggaaacccatttggattaattagaggtctgtctgaaggagttgaagctttattctatgaacccttccagggtgctgttcaaggccctgaagaatttgcagaggggttagtgattggagtgagaagcctctttggacacacagtaggtggtgcagcaggagttgtatctcgaatcaccggttctgttgggaaaggtttggcagcaattacaatggacaaggaatatcagcaaaaaagaagagaagagttgagtcgacagcccagagattttggagacagcctggccagaggaggaaagggctttctgcgaggagttgttggtggagtgactggaataataacaaaacctgtgggaangtgccaaaaaggaaggagctgctggattctttaaaggattggaaaaggcttttggtgctgtgnccgtccaantgtggaacntaatatggccataataccttccaggcttcaaggcgc

SEQ ID NO: 107 - DNA, 2066 bp, Homo sapiens
ggcacgaggcggcggagggccacaatcacagctccgggcattgggggaacccgagccggctgcgccgggggaatccgtgcgggcgccttccgtcccggtcccatcctcgccgcgctccagcacctctgaagttttgcagcgcccagaaaggaggcgaggaaggagggagtgtgtgagaggagggagcaaaaagctcaccctaaaacatttatttcaaggagaaaagaaaaagggggggcgcaaaaatggctggggcaattatagaaaacatgagcaccaagaagctgtgcattgttggtgggattctgctcgtgttccaaatcatcgcctttctggtgggaggcttgattgctccagggcccacaacggcagtgtcctacatgtcggtgaaatgtgtggatgcccgtaagaaccatcacaagacaaaatggttcgtgccttggggacccaatcattgtgacaagatccgagacattgaagaggcaattccaagggaaattgaagccaatgacatcgtgttttctgttcacattcccctcccccacatggagatgagtccttggttccaattcatgctgtttatcctgcagctggacattgccttcaagctaaacaaccaaatcagagaaaatgcagaagtctccatggacgtttccctggcttaccgtgatgacgcatttgctgagtggactgaaatggcccatgaaagagtaccacggaaactcaaatgcaccttcacatctcccaagactccagagcatgagggccgttactatgaatgtgatgtccttcctttcatggaaattgggtctgtggcccataagttttaccttttaaacatccggctgcctgtgaatgagaagaagaaaatcaatgtgggaattggggagataaaggatatccggttggtggggatccaccaaaatggaggcttcaccaaggtgtggtttgccatgaagaccttccttacgcccagcatcttcatcattatggtgtggtattggaggaggatcaccatgatgtcccgacccccagtgcttctggaaaaagtcatctttgcccttgggatttccatgacctttatcaatatcccagtggaatggttttccatcgggtttgactggacctggatgctgctgtttggtgacatccgacagggcatcttctatgcgatgcttctgtccttctggatcatcttctgtggcgagcacatgatggatcagcacgagcggaaccacattgcagggtattggaagcaagtcggacccattgccgttggctccttctgcctcttcatatttgacatgtgtgagagaggggtacaactcacgaatcccttctacagtatctggactacagacattggaacagagctggccatggccttcatcatcgtggctggaatctgcctctgcctctacttcctgtttctatgcttcatggtatttcaggtgtttcggaacatcagtgggaagcagtccagcctgccagctatgagcaaagtccggcggctacactatgaggggctaatttttaggttcaagttcctcatgcttatcaccttggcctgcgctgccatgactgtcatcttcttcatcgttagtcaggtaacggaaggccattggaaatggggcggcgtcacagtccaagtgaacagtgcctttttcacaggcatctatgggatgtggaatctgtatgtctttgctctgatgttcttgtatgcaccatcccataaaaactatggagaagaccagtccaatggaatgcaactcccatgtaaatcgagggaagattgtgctttgtttgtttcggaactttatcaagaattgttcagcgcttcgaaatattccttcatcaatgacaacgcagcttctggtatttgagtcaacaaggcaacacatgtttatcagctttgcatttgcagttgtcacagtcacattgattgtacttgtatacgcacacaaatacactcatttagcctttatctcaaaatgttaaatataaggaaaaaagcgtcaacaataaatattcttgagtataaaaaaaaaaaaaaaaaaaaaaaaaaa

SEQ ID NO: 108 - DNA, 643 bp, Homo sapiens
  misc_feature (18)..(18): n equals a,t,g, or c
  misc_feature (585)..(585): n equals a,t,g, or c
  misc_feature (594)..(594): n equals a,t,g, or c
  misc_feature (597)..(597): n equals a,t,g, or c
  misc_feature (630)..(630): n equals a,t,g, or c
ggacgaggcatgtatganctgaaaccagaatgtgccaaacagttcaacttgtatttctatcacttttcaagggcagaacagtccaaggcagaagaagcgcaacggaaattgaaaagacaaaatagagaagatacagcactcccacctccggtgttgcctccattctgccctctgtttgcaagcctggttaacattttgcagtcagatgtcatgttgtgcatcatgggaacaattctgcaatgggctgtggaacataatggatatgcctggtcagagtccatgctgcaaagggtgttacatttaattggcatggcactacaagaagaaaaacaacatttagagaatgtcacggaagagcatgtagtaacatttaccttcactcagaagatatcaaaacctggtgaagcgccaaaaaattctcctagcatactagctatgctggaaacactacaaaatgctccctacctagaagtccacaaagacatgattcggtggatattgaagacttttaatgctgttaaaaagatgaaggagagttcacctaccagtcccgtggcagagacagaaggaaccataatggaagancataattcnganttcaagggacaaagacaagcttgagaggaaganaaaacataattgc

SEQ ID NO: 109 - DNA, 793 bp, Homo sapiens
  misc_feature (786)..(786): n equals a,t,g, or c
cagaacctgaaatttactgggtcactcccattggaaataagataactgtggaaaccctttcagataaatacaagctaagtagcgaaggtaccttggaaatatctaacatacaaattgaagactcaggaagatacacatgtgttgcccagaatgtccaaggggcagacactcgggtggcaacaattaaggttaacgggacccttctggatggtacccaggtgctaaaaatatacgtcaagcagacagaatcccattccatcttagtgtcctggaaagttaattccaatgtcatgacgtcaaacttaaaatggtcgtctgccaccatgaagattgataaccctcacataacatatactgccagggtcccagtcgatgtccatgaatacaacctaacgcatctgcagccttccacagattatgaagtgtgtctcacagtgtccaatattcatcagcagactcaaaagtcatgcgtaaatgtcacaaccaaaaatgccgccttcgcagtggacatctctgatcaagaaaccagtacagcccttgctgcagtaatggggtctatgtttgccgtcattagccttgcgtccattgctgtgtactttgccaaaagatttaagagaaaaaactaccaccacttcattaaaaaagtattatggcaaaaaacctctttcaatcccactaaatgagctgttacccaccactcatttaacctctggggaaggtggacagcgaggaaggacaaggtgggttctggcggacaccaggccaacccgggtcggacacttccgnaggtttt

SEQ ID NO: 110 - DNA, 726 bp, Homo sapiens
  misc_feature (218)..(218): n equals a,t,g, or c
  misc_feature (333)..(333): n equals a,t,g, or c
  misc_feature (336)..(336): n equals a,t,g, or c
  misc_feature (371)..(371): n equals a,t,g, or c
  misc_feature (682)..(682): n equals a,t,g, or c
  misc_feature (699)..(699): n equals a,t,g, or c
  misc_feature (712)..(712): n equals a,t,g, or c
aaaaaaatatggggtcagaatggttgggttttaattgtgactctgatagttactgattacggaaccttgggcacagtatttaactagtctatatatctgcttcctcatctgtaaattggaagttattataaagccttccatatagacttcttatggaaataaaatgaaataattcatacaaataccctggcacatattaggtactcagtgaatgttanctagtattacaaatgtctatgacaatttaattagcatgatgtctaaaaccgccattatttgattagaattagtttagcaggaggatgaaaaaactgagaaggaccctaaaatgantanccatgctgttttatttactcctttctttatttaanacatgaacaacactctaggtacagttttatattttaatggctatgttcttctcttcgtccttacatgaaataccctcaccctctcccccagaaaaaaagaaaagaatcattccattgttagaatgcagtttagagattataaactccaaactctgtacgtcattaaaatttatattcactgggaccttggaacttagtcttcaacttttacatgcaataccattagtttatttaagttcagttggattcactgtttgtctccctccacaaaccaacctcttgcatcagatgttctccttaacttgcttagngggctgccatttctttnggatttttttttnccatttttatcacc

SEQ ID NO: 111 - DNA, 3259 bp, Homo sapiens
tttgcagtacgggccggatttcccgggtcgacccacgcgtccgcggaggctacgtgaagagaggcgcggcgtgactgagctacggttctggctgcgtcctagaggcatccggggcagtaaaaccgctgcgatcgcggaggcggcggccaggccgagaggcaggccgggcaggggtgtcggacgcagggcgctgggccgggtttcggcttcggccacagctttttttctcaaggtgcaatgaaagccttccacactttctgtgttgtccttctggtgtttgggagtgtctctgaagccaagtttgatgattttgaggatgaggaggacatagtagagtatgatgataatgacttcgctgaatttgaggatgtcatggaagactctgttactgaatctcctcaacgggtcataatcactgaagatgatgaagatgagaccactgtggagttggaagggcaggatgaaaaccaagaaggagattttgaagatgcagatacccaggagggagatactgagagtgaaccatatgatgatgaagaatttgaaggttatgaagacaaaccagatacttcttctagcaaaaataaagacccaataacgattgttgatgttcctgcacacctccagaacagctgggagagttattatctagaaattttgatggtgactggtctgcttgcttatatcatgaattacatcattgggaagaataaaaacagtcgccttgcacaggcctggtttaacactcatagggagcttttggagagcaactttactttagtgggggatgatggaactaacaaagaagccacaagcacaggaaagttgaaccaggagaatgagcacatctataacctgtggtgttctggtcgagtgtgctgtgagggcatgcttatccagctgaggttcctcaagagacaagacttactgaatgtcctggcccggatgatgaggccagtgagtgatcaagtgcaaataaaagtaaccatgaatgatgaagacatggatacctacgtatttgctgttggcacacggaaagccttggtgcgactacagaaagagatgcaggatttgagtgagttttgtagtgataaacctaagtctggagcaaagtatggactgccggactctttggccatcctgtcagagatgggagaagtcacagacggaatgatggatacaaagatggttcactttcttacacactatgctgacaagattgaatctgttcatttttcagaccagttctctggtccaaaaattatgcaagaggaaggtcagcctttaaagctacctgacactaagaggacactgttgtttacatttaatgtgcctggctcaggtaacacttacccaaaggatatggaggcactgctacccctgatgaacatggtgatttattctattgataaagccaaaaagttccgactcaacagagaaggcaaacaaaaagcagataagaaccgtgcccgagtagaagagaacttcttgaaactgacacatgtgcaaagacaggaagcagcacagtctcggcgggaggagaaaaaaagagcagagaaggagcgaatcatgaatgaggaagatcctgagaaacagcgcaggctggaggaggctgcattgaggcgtgagcaaaagaagttggaaaagaagcaaatgaaaatgaaacaaatcaaagtgaaagcccatgtaaagccatcccagagatttgagttctgatgccacctgtaagctctgaattcacaggaaacatgaaaaacgccagtccatttctcaaccttaaatttcagacagtcttgggcaactgagaaatccttatttcatcatctactctgtttggggtttgggttttacagagattgaagatacctggaaagggctctgtttccaagaatttttttttccagataatcaaattattttgattattttataaaaggaatgatctatgaaatctgtgtaggttttaaatattttaaaaattataatacaaatcatcagtgcttttagtacttcagtgtttaaagaaataccgtgaaatttataggtagataaccagattgttgctttttgtttaaaccaagcagttgaaatggctataaagactgactctaaaccaagattctgcaaataatgattggaattgcacaataaacattgcttgatgttttctatttcagggacccagaacataatgtagtgtatgtttttaggtgggagatgctgataacaaaattaataggaagtctgtaggcattaggatactgacatgtacatggaaaattctagggacaggagcatcattttttccttacctgataccacgaaccagtgacaacgtgaatgctgtattttaagtggttgtatgtttattttctggagtaacaaatgcatgaaaaattaatgcttcacctaggtaagatcattggtctgtgtgaaatcacaaatgttttttccttcttggttgctgcagcctggtggatgttcatggagaagctctgttctctatattatggctgtgtgccgttgcttctccctctgcttttatcttttccacagttgaggctgggtatgttctttcaaagaaatggccatgaatatgtgtaagtatacttttgaaaatgagctttcctaaactattgagagttctttccacctcttgcggaaccaactcttggaggagaggcccatgtatctgcacgagcacttagcttgttcagatctctgcattttataaatgcttcttaccaagaaagcatttttaggtcattgcttgtaccaggtaatttttgccggggatgggtaagggttgggttttctggtgggagtggggtggtgggtattttttgttgatgctttagtgcaggcctgttctgaggcaataacaagttgctgtgaaaacgcatgtgctgctgcctttgtaactgccatggaaacttttcacatgggtttttctccaagttaatacagaaatatgtaaactgagagatgcaaatgtaatatttttaacagttcatgaagttgttattaaaataactaacataaaacttaattactttaatattatataattatagtagtggccttgttttacaaacctttaaattacattttagaaatcaaagttgatagtcttagttatcttttgagtaagaaaagctttcctaaagtcccatacatttggaccatggcagctaattttgtaacttaagcattcatatgaactacctatggacatctattaaagtgattgacaaaaaaa

SEQ ID NO: 112 - DNA, 606 bp, Homo sapiens
  misc_feature (583)..(583): n equals a,t,g, or c
tcgacccacgcgtccggttcggtgcagctgccagatccgctgatctagtgcttctcgaaaaaaaccttcaggcggcccatggatttatagcgcccgtcacaaagggcaggaccgctgcaaaaaaatggaatcttaaaactttagccatcgttcgctaaaggaaatgaaaggagaaattcaacagtcgcttggagcctgggttttgcttactgtcgatattcaaccrgsatgccttggactttattgtgggaagaccctattatttaaaaatggctcaactgaaatatatggagaatgtggggtatgcccaagaggacagagaacgaatgcacagaaatattgtcagccttgcacagaatctcckgaactttatgattggstcyatcttggatttatggcaatgcttcctctggttttacattggttcttcattgaatggtactcggggaaaaagagttccagcgcacttttccaacacatcactgcattatttgaatgcaggcatggcagctattatcaccttacttgtgagtgatccagttgggtgttctttatattcgtttcatgtcgagtattggatgcnttctggactgggtacacggatgg

SEQ ID NO: 113 - DNA, 653 bp, Homo sapiens
  misc_feature (330)..(330): n equals a,t,g, or c
  misc_feature (367)..(367): n equals a,t,g, or c
  misc_feature (620)..(620): n equals a,t,g, or c
  misc_feature (633)..(633): n equals a,t,g, or c
  misc_feature (637)..(637): n equals a,t,g, or c
  misc_feature (647)..(647): n equals a,t,g, or c
ttttgctcgtaacaaagaaattttaatgcataaggcacagtgagaggctggaatcattaagcatcctcaaacacaaagggcccagcaggctgagcaaaagaacagagacactctccctcactaccactgggcgccctggacagtcccctgaggagtagggggcatccagtytttggcacggtgcctgggggaggaagtgactagcatgatcccagctacccctctgtgggaatactgccaccaagaggcagctctttggtctggataaagtcagtgcaaatgtccaggggtcaagctctggaggaatgagggtggcacagtgccctaggntgggcagtctctgaacagtctcctcagccctcatggnaaacatgtgggcttcttcttgctggcagttaggtagaggttgctgtcatcactgttgaatgcggacaacattccccaatgcgttcgagcccccgatttctccagcttcagccagcacattggcctcaaaggttcagtgctgccacacggaagaagaattctcggacattctcaccatgaagagatgagattgcccattactcaggctttatttctggggcacctggagggggttttttttccataaggggctnttggggaaggggnttcncaaacttttngggacc

SEQ ID NO: 114 - DNA, 574 bp, Homo sapiens
ggggggcgaattcccctggcacgaggctgacgcatgcgcatagctaaccgcacccggttcagctcgcctttcttggccagaggcgccggttggactcacgggcggggcatgatggtggtgggtacgggcacctcgctggcgctctcctccctcctgtccctgctgctctttgctgggatgcagatgtacagccgtcagctggcctccaccgagtggctcaccatccagggcggcctgcttggttcgggtctcttcgtgttctcgctcactgccttcaataatctggagaatcttgtctttggcaaaggattccaagcaaagatcttccctgagattctcctgtgcctcctgttggctctctttgcatctggcctcatccaccgagtctgtgtcaccacctgcttcatcttctccatggttggtctgtactacatcaacaagatctcctccaccctgtaccaggcagcagctccagtcctcacaccagccaaggtcacaggcaagagcaagaagagaaactgaccctgaatgttcaataaagttgattctttgtaaaaaaaaaaaaaaaaaaaaa

SEQ ID NO: 115 - DNA, 1987 bp, Homo sapiens
  misc_feature (5)..(5): n equals a,t,g, or c
ggcanagccctgctgaagtacaggttcttctatcagtttctgttgggcaatgaacgagcaacagcaaaggagatcagggatgaatatgtggagacgctgagcaagatttacctgtcttactaccgctcttacctggggcggctcatgaaggtgcagtatgaggaagtcgctgagaaagatgatctaatgggtgtggaagatacagcaaagaaaggattcttctcaaagccatcgctccgcagcaggaacaccattttcaccctaggaacccgcggctctgtcatctcccccactgaacttgaggcccccatcctggtgcctcacacagcgcacgcggaagagcagaggtatccatttgaggccctcttccgcagccagcactacgccctcctagacaattcctgccgcgaataccttttcatctgtgaattttttgttgtgtctggcccagctgcacacgacctgttccatgctgtcatgggccgtacactcagcatgaccctgaaacacctggattcttatctagctgactgctacgatgccattgctgtttttctctgtatccacattgttctccggttccgtaacattgcagcaaagagggatgttcctgccctggacaggtactgggaacaggtgcttgccttgctatggccacggtttgaactgatcctggagatgaatgttcagagcgtccgaagcactgacccccagcgcctaggggggttggatactcggccccactatatcacacgccgctatgcagagttctcctccgctcttgtcagtatcaaccagacaattcctaatgaacggaccatgcaattgctgggacagctgcaggtggaggtggagaattttgtcctccgagtggcagctgagttctcctcaaggaaggagcagcttgtgtttctgatcaacaactatgacatgatgctgggtgtgctgatggagcgggctgcagatgacagcaaagaggttgagagcttccagcagctgctcaatgctcggacacaggaattcattgaagagttgctgtctcccccttttgggggtttagtggcatttgtgaaggaggctgaggctttgattgagcgtggacaggctgagcgacttcgaggggaagaagcccgggtaactcagctgatccgtggctttggtagttcctggaaatcatcagtggaatctctgagtcaggatgtaatgcggagtttcaccaacttcagaaatggcaccagtatcattcagggagcgctgacccagctgatccagctctatcatcgcttccaccgggtgctgtcccagccgcagctccgagccctccctgcccgggctgagctcatcaacattcaccaccttatggtggagctcaagaagcataagcccaacttctgatgtgccagaaaccgccctgagatctgccggtcatctccatggacttctgcaccccattccatacccttcttcacctggggtaccccttccagttttccccttgcttcccaggcccttgacatggcttacctgccttcactcccagcaccttgcccaacaggataagctggatccccttggccttctgaatatcccagtgtcttcaggtttcccaagaccacttccctgtgggcttccaaaatggcctttatcatttctccagtctgtcaccctcctttcctgctcccatacacccaaggcttgtttcttcccctgtaaaaaccactgcctcaatctctggttcactcaactagtcaccatgtcctgaggcatgaagcctcctcagctcttggaattgctggcaaggggtgactgcctctgagtcattgtgtttttcaaagtgatttcttttctgtagctttttgacctaagatctcagcaatttgaacactaacctctcccctcctggctcaagaattactccgaagtcagtctgcagaaaataaatatttagtatgacatgacaaaaaaaaaaaaaaaaaaaaaaaaaaac

SEQ ID NO: 116 - DNA, 634 bp, Homo sapiens
  misc_feature (13)..(13): n equals a,t,g, or c
cggacgcgtgggntggcccagctactgttctcacttctgtgaagaagaaagtgaagaatgtggggattttcctaaagaatgaagatgaggaagaagaggaggaggagaaagatgaggcagaggaccttttgggaagaggttctcgggcagcattacttacagaaagaacaagaaatgaaatgactgcagaagagaagcgaagagcacatcaraaagaactagcggctcaactcaatgaagaagcaaagaggcgattractgaacaaaagggagaacagcagattcaraaagctcgcaagtctaatgtgtcctataaaaacccatctctgatgcctaaggaaccgcatattcgggaaatgaagatctacatcgataagaaatatgagactgtaataatgcccgtgtttggcattgcaacaccgtttcacattgccacaatcaagaatataagtatgtccgtggaaggagattatacttacttgcgaatcaacttttattgccaggcagtgctctgggcaggaatgaaggcaacatctttcctaaccctgaagcgacttttgtcaaggaaattacataccgagcatcaaatattaaggcacccggagaacagacagtaccagccttgaaccttcag

SEQ ID NO: 117 - DNA, 1009 bp, Homo sapiens
  misc_feature (880)..(880): n equals a,t,g, or c
  misc_feature (929)..(929): n equals a,t,g, or c
  misc_feature (935)..(935): n equals a,t,g, or c
aatttaagagtattaaaaaaacatcattaataaaaaactgtgattctaaaagccagaagtataattgtttagtcatggtgctatctccatgccatgtgaaggaaataaacataaaattcggaccaaattctggctctaaagtgcctttagcaacagttacagtaattgatcaatcagaaactaagaagaaggtttttctgtggaggactgcagcattttgggsatttacagtgtttcttggagatataattttactcacagatgttgttattcatgaggaccaatggattggcgagacagtactacaatcaacatttagcagtcagttattaaatcttgggagttattcatctattcagcctgaagaatattccagtgtagttwgtgaagttgtacttcaagacttactggcatatgtgtcctcaaaacattcctacctcagagatcttcctccgaggcagcctcagagggtgaacagtatagactttgtagaattggagcaccttcaacctgatgtattagtccacgcagtactaagagttgttgatttcactatactgacagaggcagtatacagttatagaggacagaagcagaaaaaagttatgttaacagtggaacaggcccaagatcaacattatgcgcttgtattatggggtcctggagcagcctggtaccctcaacttcaaaggaaaaaaggttatatttgggaatttaaatatctttttgttcagtgcaattacacactagaaaacctagaattgcatacaacgscttggtcatcctgtgagtgcttgtttgatgatgatataagggcaattacatttaaagcaaaatttcaaaaaagtgcaccctcctttgtgaaggtatcagacttagnaacccacctagagggtwagtgttcaggagtggttctgattaagcccagnttcagngtggcattccttttcagattcagagttgcgtaatggtcacagtctctgagggttttttctctttccacatggta

SEQ ID NO: 118 - DNA, 715 bp, Homo sapiens
  misc_feature (337)..(337): n equals a,t,g, or c
ggctttaccaaggatttgatactgtttgccacctttaatgaagttaaaagtcaaaatcttttggtaaaaggacttaagctttctaattcctatgaagattttgagttgaagaaattactattcaaygtaattgtgatcttatgtaaagatttacctactgtacagctattaattgatggcaaagttattttggctttgtttacctatgttaagaagcctgagaagcaaaaaataattgactggtctgcagcacagcatgaagaattacaactgcatgcaattgcactttgtcatcagtggctcctttattaatagaagaatacatgtcatgccaggnaaatgctcgagtccttgcatttctagaatggtgtgagagtgaagatccgtttttcagtcatggtaacagttttcatggtacaggtggccgaggcaacaagtttgcccagatgcgttacagtttaagactcctgagagccatggtctaccttgaagatgagactgtaaacaaagatctttgtgaaaagggaacaattcagcaaatgataggaatctttaaaaatataataagcaagcctaatgaaaaggaagaagccattgttttggaaatccagtctgatatattacttatcctatctggcctttgtgagaatcacattcaaaggaaggtatgtatgcctgtgaaagtcttgttcaggtctcccagtcacctaacact

SEQ ID NO: 119 - DNA, 2432 bp, Homo sapiens
atgaagggtcgttggtgggaaagatggcggcgactctgggaccccttgggtcgtggcagcagtggcggcgatgtttgtcggctcgggatgggtccaggatgttactccttcttcttttgttggggtctgggcaggggccacagcaagtcggggcgggtcaaacgttcgagtacttgaaacgggagcactcgctgtcgaagccctaccagggtgtgggcacaggcagttcctcactgtggaatctgatgggcaatgccatggtgatgacccagtatatccgccttaccccagatatgcaaagtaaacagggtgccttgtggaaccgggtgccatgtttcctgagagactgggagttgcaggtgcacttcaaaatccatggacaaggaaagaagaatctgcatggggatggcttggcaatctggtacacaaggaatcggatgcagccagggcctgtgtttggaaacatggacaaatttgtggggctgggagtatttgtagacacctaccccaatgaggagaagcagcaagagcgggtattcccctacatctcagccatggtgaacaacggctccctcagctatgatcatgagcgggatgggcggcctacagagctgggaggctgcacagccattgtccgcaatcttcattacgacaccttcctggtgattcgctacgtcaagaggcatttgacgataatgatggatattgatggcaagcatgagtggagggactgcattgaagtgcccggagtccgcctgccccgcggctactacttcggcacctcctccatcactggggatctctcagataatcatgatgtcatttccttgaagttgtttgaactgacagtggagagaaccccagaagaggaaaagctccatcgagatgtgttcttgccctcagtggacaatatgaagctgcctgagatgacagctccactgccgcccctgagtggcctggccctcttcctcatcgtctttttctccctggtgttttctgtatttgccatagtcattggtatcatactctacaacaaatggcaggaacagagccgaaagcgcttctactgagccctcctgctgccaccacttttgtgactgtcacccatgaggtatggaaggagcaggcactggcctgagcatgcagcctggagagtgttcttgtctctagcagctggttggggactatattctgtcactggagttttgaatgcagggaccccgcattcccatggttgtgcatggggacatctaactctggtctgggaagccacccaccccagggcaatgctgctgtgatgtgcctttccctgcagtccttccatgtgggagcagaggtgtgaagagaatttacgtggttgtgatgccaaaatcacagaacagaatttcatagcccaggctgccgtgttgtttgactcagaaggcccttctacttcagttttgaatccacaaagaattaaaaactggtaacaccacaggctttctgaccatccattcgttgggttttgcatttgacccaaccctctgcctacctgaggagctttctttggaaaccaggatggaaacttcttccctgccttaccttcctttcactccattcattgtcctctctgtgtgcaacctgagctgggaaaggcatttggatgcctctctgttggggcctggggctgcagaacacacctgcgtttcactggccttcattaggtggccctagggagatggctttctgctttggatcactgttccctagcatgggtcttgggtctattggcatgtccatggccttcccaatcaagtctcttcaggccctcagtgaagtttggctaaaggttggtgtaaaaatcaagagaagcctggaagacatcatggatgccatggattagctgtgcaactgaccagctccaggtttgatcaaaccaaaagcaacatttgtcatgtggtctgaccatgtggagatgtttctggacttgctagagcctgcttagctgcatgttttgtagttacgatttttggaatcccactttgagtgctgaaagtgtaaggaagctttcttcttacaccttgggcttggatattgcccagagaagaaatttggctttttttttcttaatggacaagagacagttgctgttctcatgttccaagtctgagagcaacagaccctcatcatctgtgcctggaagagttcactgtcattgagcagcacagcctgagtgctggcctctgtcaacccttattccactgccttatttgacaaggggttacatgctgctcaccttactgccctgggattaaatcagttacaggccagagtctccttggagggcctggaactctgagtcctcctatgaacctctgtagcctaaatgaaattcttaaaatcaccgatggaaccaaaaaaaaaaaaaaaaaaaaaaaaaaaaaaaaaaaaaa

SEQ ID NO: 120 - DNA, 776 bp, Homo sapiens
acctcatggtgtcccacccccttcggcagcgcagtgtgtccctggacagccagatgggctacctcccggcaccaggcggcatggccaacctgcccttctagaagtcgctgccagggctggagccggggcaatgttgcaaatacgataaccttaacaaagttcttcccctcaatgttgggatggcctgggtcgtggggtggggtggagggggtgggaaggggctttttgtaagggagtggcatttgtggaaaccagatgtgctggcagcttagggggaagtggcagtgtggggtgggggattttgcattggggttggttccatttcggccaccaggactgcccctcccccactcctcccaattcctatggagcctctctattttacctctttccgtgcatccctgcacccsccacacccccttcagctatgcttttggagtcctggatgggaatctggggggagagaggaaggacaggtcaggtctcccccagccccttctgctcctgtctcctcgtgtccgcattgctggagctccacctccctcttggtttctccgcacccgcccattttccttctgyctttacctgcttcgtatcctttccctgctgatgtggctgacccctctcccacccctccctgcaggcggctggccaggtgggcaggtgccagccggagctgtaaatagamcgctgcgcttttgtgctggtttgtgcgtgtgctgtatttctgtgttttgatagaagtcacacaaaaaaaaaaaaaaaggatccctcga

SEQ ID NO: 121 - DNA, 1788 bp, Homo sapiens
  misc_feature (1)..(1): n equals a,t,g, or c
  misc_feature (8)..(8): n equals a,t,g, or c
ngtagttncgacagaacctcacggctcgccaaactgaaagtactggattcagtatctggcctttgcagacaatgtttgctgaccccytactccagaagagcccagcccagaatacccggccactccctacaataccagctcctgcttgagaaaggataggctttaatttgatggccaattaggaagaaaaggcctatttaggtgatgttttaaataacccaagaaacccactgctgagacttttaatgaaaatcctcactctcctttcctcgtatttttagttctgtctcttctctctgcctttatttgtccccttggactcctctccttattgctaaatttccaattaggatctggaaaatcctgtcccttagagattttcagcagtctccttgattttatgtaaaaggtcagcatttcctgatgggaattactaagtagtcttcattctcttctttcctttcccatcccctcacatggagaagccaggtttccagctgggtctcctggaatcgccaggacgcagctttaccaatcttggctgagggtcaaggtgagataacgaaatcctaagggaaatttgtcaaatgtactccccaggtgtgtattttcctctgggtataaggtttcccccaagtgggcaggagtccatgtcaggcagtcagatgtatggctatgtcgctgtttgatagcttttaaaatagaacttaaaaaaaagaaaaatcagcctcaaaggatgggctggttttttttttttaaaccccctttgagctggttttaatgacccagttgctttgtttgaaagccatttatttagatgacagatatgtagatataactggataaataaaaaaagtgaaatcgagatttgaagcagtggttaaaatataaactcataggggccactcccttggacagtgtcccccccagcccagacagtacaatggctcagaaattacacatagaaatgacactcctccctccaccctcgccaagagctctgaaccgcaagccccacacaagaaactgaatttcagtttggcaccaagcaccccctcggcccctgcctcctctccacccttctcctgcattctaagcgatatttatttttacattcactcctgtcctggaatccagccgccctgacttccgcggagacagcaccagaggctgctgcaccagaagcttcggggcgaggcccagcacccactgtgtggcccagctctgggggccctgccttgccctgcccctccctggttcacctcccccacaacagagcggccgacacccactgactccacagatggaaagaagacaaaggtacgaggataacgcgggcgcgctcccttgagtacgtgtaagtgcagaattcaccaggcacccctgagaccccacggccccaggggtctccatctcacctgtccgttccgcgaacacacacctcgatgaagtccacagtccccacagaatcctgcgtgtgacatcccccctctctaatggtaaatgttttggaatgtccatagataagaaaatggacggcgtggaggaaagatttcgtggccaggcctttcatttcacctccggatatcagaatactcagactgttcgtcttcccactcgctgcttccggaaggtccctgagccccaaggcccccgactctgcctcgggcatgggcgtttgggtggctcttgctacctcgctcacccttggcacctcggcmagtctccctactgctgggctmtgggaggtgatgtcctgcttccccgtggtgggccctggagagcttg

SEQ ID NO: 122 - DNA, 416 bp, Homo sapiens
  misc_feature (185)..(185): n equals a,t,g, or c
  misc_feature (376)..(376): n equals a,t,g, or c
  misc_feature (403)..(403): n equals a,t,g, or c
  misc_feature (409)..(409): n equals a,t,g, or c
ggcgctccgtcatggggatccagacggtaagaccctcattcagtatcctccactgggggacccctccccatctggttctggccactcagctccggaccaggggctgtcgctgccgaccccgccccgcaggctctgggcccaccgtggatgctggggtcccgatcccgcacatccgggctcgggantccgccaggttacccctctgcccttggcatgcctccgcgctggagctcgggatcgccacccctgggacggtcaccacccaagccccgggctcttacccagcctggcggtcacgctgcctcctctacccacagagccccgtcctgctggcctccctgggggtggggctggtcaatctgctcggctggctgtnggctcctaattggttcggaagtcccgncggctnaagtcat

SEQ ID NO: 123 - DNA, 370 bp, Homo sapiens
gattttttctactttaagatcagaactatacaagcttcttgctttgtgtcagcatgctgttgtacccatgggcaaattcttaggtaagacaaaaacacagccccaagggcaggtagtaattttttcagaaaaaggtaaggcaatcatttatctcagtctgcccaggacagtcccaatttacacatgtatattctcccaatctgtaggctgtcttttcattttgttgattatttcatttaattttttattatttatttattttatagagacagatctcattatgttgcccagggtgatccttgatctcctggcctcaagtgatcctccaaccttggtctcccaaagtgctgggattacagatgtgaactac

SEQ ID NO: 124 - DNA, 705 bp, Homo sapiens
agcagctccatgagcacacagatatcctagaaaatattcctttctcacacagggcttctgattactcagaaacatgcccctcttccctgaataaccaagaacatgttctatgaacccaatctctgccacatgtcaatacctgctcttcaaagccccttttgaaactcagttttgtgccaagtcctctggatctaattaccttaaacaagcagatttagccatttttaaacagacattcccagtcatcctggtgcttgtacttctcctacatgtcatgaaggaccttggatttactgagaactcaagccgtggccttggctttgawacttawaaggtgtcarcccytgggccgattgttgatcatcccagagccctcagttctgtacttgtaaaagtggagacagcagttcctcatcctccatccttttagcccatggggtggttgtaaggctggattgaaatatgcatgtgactaagccatgtagctataaagtgagggatgacttgtgttttggatcacttattttaattctacttataatccacggcttagaatatttaaacattgtttctattaaactagaaaggttcagcatttctgtcatttacttctgctatgatacacaagaacttatgttggaatgaagtgaaaagtaaaatggccattcttatgaacctaaaaaaaaaaaaaaaaaaaaaaaaatt

SEQ ID NO: 125 - DNA, 2119 bp, Homo sapiens
ggcacgaggacgaagggacgggacccgggagcctggacgagtccgagcgcgtcacctcctcacgctgcggctgtcgcccgtgtcccgccggcccgttccgtgtcgccccgcagtgctgcggccgccgcggcaccatggctgtgtttgtcgtgctcctggcgttggtggcgggtgttttggggaacgagtttagtatattaaaatcaccagggtctgttgttttccgaaatggaaattggcctataccaggagagcggatcccagacgtggctgcattgtccatgggcttctctgtgaaagaagacctttcttggccaggactcgcagtgggtaacctgtttcatcgtcctcgggctaccgtcatggtgatggtgaagggagtgaacaaactggctctacccccaggcagtgtcatttcgtaccctttggagaatgcagttccttttagtcttgacagtgttgcaaattccattcactccttattttctgaggaaactcctgttgttttgcagttggctcccagtgaggaaagagtgtatatggtagggaaggcaaactcagtgtttgaagacctttcagtcaccttgcgccagctccgtaatcgcctgtttcaagaaaactctgttctcagttcactccccctcaattctctgagtaggaacaatgaagttgacctgctctttctttctgaactgcaagtgctacatgatatttcaagcttgctgtctcgtcataagcatctagccaaggatcattctcctgatttatattcactggagctggcaggtttggatgaaattgggaagcgttatggggaagactctgaacaattcagagatgcttctaagatccttgttgacgctctgcaaaagtttgcagatgacatgtacagtctttatggtgggaatgcagtggtagagttagtcactgtcaagtcatttgacacctccctcattaggaagacaaggactatccttgaggcaaaacaagcgaagaacccagcaagtccctataaccttgcatataagtataattttgaatattccgtggttttcaacatggtactttggataatgatcgccttggccttggctgtgattatcacctcttacaatatttggaacatggatcctggatatgatagcatcatttataggatgacaaaccagaagattcgaatggattgaatgttacctgtgccagaattagaaaagggggttggaaattggctgttttgttaaaatatatcttttagtgtgctttaaagtagatagtatactttacatttataaaaaaaaatcaaattttgttctctatgttgtgtgtgcctgtgatgtttttctagagtgaattatagtattgacgtgaatccccctgtggtatagattccataatatgcttgaatattatgatatagccatttaataacattgatttcattctgtttaatgaatttggaaatatgcactgaaagaaatgtaaaacatttagaatagctcgtgttatggaaaaaagtgcactgaatttattagacaaacttacgaatgcttaacttctttacacagcataggtgaaaatcatatttgggctattgtatactatgaacaatttgtaaatgtcttaatttgatgtaaataactctgaaacaagagaaaaggtttttaacttagagtagccctaaaatatggatgtgcttatataatcgcttagttttggaactgtatctgagtaacagaggacagctgttttttaaccctcttctgcaagtttgttgacctacatgggctaatatggatactaaaaatactacattgatctaagaagaaactagccttgtggagtatatagatgcttttcattatacacacaaaaatccctgagggacattttgaggcatgaatataaaacatttttatttcagtaacttttccccctgtgtaagttactatggtttgtggtacaacttcattctatagaatattaagtggaagtgggtgaattctactttttatgttggagtggaccaatgtctatcaagagtgacaaataaagttaatgatgattccaaaaaaaaaaaaaaaaaaaaaaaaaaaaaaaaaaaaaaaaaaaaaaaaaaaaa

SEQ ID NO: 126 - DNA, 500 bp, Homo sapiens
aattcggcagagtgaagccaccaaaatggtggtgttcgggtatgaggctgggactaagccaagggattcaggtgtggtgccggtgggaactgaggaagcgcccaaggttttcaagatggcagcatctatgcatggtcagcccagtccttctctagaagatgcaaaactcagaagaccaatggtcatagaaatcatagaaaaaaattttgactatcttagaaaagaaatgacacaaaatatatatcaaatggcgacatttggaacaacagctggtttctctggaatattctcaaacttcctgttcagacgctgcttcaaggttaaacatgatgctttgaagacatatgcatcattggctacacttccatttttgtctactgttgttactgacaagctttttgtaattgatgctttgtattcagataatataagcaaggaaaactgtgttttcagaagctcactgattggcatagtttgtggtgtttccatcccagttcttt

SEQ ID NO: 127 - DNA, 473 bp, Homo sapiens
gcacagtgtacaaaatttattaatcagttacttggagttgttcctttgtcgacaccaacagaggataagctggcactgcctgctgacatcagagctctgcagcaacatttgtgtgtggtgcagctgacgaggttacttggcttgtaccacaccatggataaaaatcagaaattgagtgtggtcagagaattgatgttaaggtaccagcatggactggaatttgggaaaacctgtttgaaaacagaattgcaattttctgactattactgtctccttgctgtccatgcgcttattgatgtatggagggaaacaggtgatgagaccactgtgtggcaggccctgactttgctggaagagggattaacccatagcccttccaatgctcagttcaaattgctgcttgttcgaatctactgtatgctgggtgcatttgaaccagtggtggatctttactccagcctcgatgctaagca

SEQ ID NO: 128 - DNA, 772 bp, Homo sapiens
  misc_feature (737)..(737): n equals a,t,g, or c
ggaaaatttcagaccacaggttggttattgggtgacagctacttatttttaaaaccatctagattgttataactgtgtgtagatgacaattgccctagaaatgttgtatgcttttgaaaagcttacataattgctcatatggcaattgcaaaatcatcccttgacgcgaatttacaccagagaagaaagtgtcttacttaaaatttcagtctttccctcctgcagagaggaggcggccgggtagtggggaagggagggctagtaaggaagataggaagaggggaggagtttgtgcaatgagcagaaaaaagtcactgaagagtttataaacagtctctgtactgaggagatgacatttgaaactgtgggaaaaaaaaccataaacccaatcatttgtcctgcttttatgggggrgatgattatccatttggcttttgtccttttatgttttaaagattgtcaaaataaaaacaacgtattcatagcattttatttcctaatttgtcagttgaaaactacccaaaaaaacactacagaagagtttattcagaatctctattacctgtcatttcagaatttttttctccttaattttaaaagagcagtgaaggtttcagtgagaaattttccaccagaaaccagtttaggaagtctgttatttggaggatgcttggtggtctgtaatcttaaaatctgagacggtwaaaggrtttttcmaaatwatcgaaagccggggnttgtaggggaggtaatgrtgttacsgtatagggga

SEQ ID NO: 129 - DNA, 1451 bp, Homo sapiens
ctccattgcttcatggatactggtcctatcatgctctttgaggctattgaactcatcaatacagcaaaggcccgcatctgcaagaactaatgccccagcctccaaattccattctcctgagtcttttacagcagttaccgtcagactttgttctccgcctttgtcctaatccacaccagcaggtggagccgcagttaaagtttccgagtccattccgggagcgggagcccatcttgctggctgccgaggccctcgctggaggaggagggtcagaactcgggtgcagccaatcgagggcaacgctgctacttatcagagcagaatgggctgtagtttagtgaaataggaaagctgcaamacactgtggagtgctcccgtgtaaataaaaagaggaaaaaagtttctcaagtcgccgctgcacgacgtctggccggcgctggagcgggggtctgcgctctcccgagcggccgcgcgctggactttattgtgccgcaaccagccccagttcccattgtttgtgtttttttcaaaatatggcaaaggttcaggtgaacaatgtagtggtgctggataacccttctcctttctacaacccgttccagttcgagatcaccttcgagtgcatcgaggacctgtctgaagacttggaatggaaaattatctatgtgggctctgcagaaagtgaagaatacgatcaagttttagactctgttttagtgggtcctgttcccgcaggaaggcatatgtttgtatttcaggctgatgcacctaatccaggactcattccagatgcagatgcagtaggcgtaactgttgtgctaattacttgtacctatcgaggacaagaatttattagagttggctattatgtaaataatgaatatactgagacagaattaagggaaaatccaccagtaaaaccagacttttctaagcttcaaaggaatattttggcatctaatcccagggtcacaagattccacattaattgggaagataacacagaaaaactggaagatgcagagagcagtaatccaaatctacagtcacttctttcaacagatgcattaccttcagcatcaaagggatggtccacatcagaaaactcactaaatgtcatgttagaatcccacatggactgcatgtgaccacctaccatccctttagtacaaattaagctattaaaaatacacagaactatttccctgaaattccgtaagtacatagtcaaaacacaatgtgaagaatttgtttaaaaacatcctgtagaaagtttataagaaaaccagtatttgaacaaattgtggaatataaatacaactatttttaagtaatttttttctctaatgtgttattttatttgttctgaaactaatctgattaaagcatatatattattttcttctcctttatatgtaatgaaagcacttataaagaaacaggaatcatta

SEQ ID NO: 130 - DNA, 648 bp, Homo sapiens
ttctgttgggattttttatttggtgtgcgtgaatgaggagcttcgccctgcttgaatgggacccctctcagtggtgtcagcttggggaggaggagatggccctggagactaaatacttgtatgctttcttaccctcttaggtctcagccttagatccaaggacagtccaaggaagtcctaagaccatggagttggtgatctgggatctgggtttgctgatatttctcaccgtggtgagttgatgccaagagccagaacccacarccagaggctcagctggtccgtgtttatgcagatgggaacctcaaatcactggtctcacttgtcctttgtttcagaatctcttggtggtgtttgtgggcacgagaggggcagagaatggagagtgaggctaccacatgaagcgtcaccagagctgctccctgctgcctgctcagagcaccccggatccactgttcaatctgcacaagattcsgggtccagacatgggagacttcagctgcctcagaggaccgtkgacagggaargccagcctcgcatccctctgtccatgcctggaatgactttaatamccaagagttttatttttgaatttgtagctgtcgttcactttttacccacccattcaataaaccttacagaattgca

SEQ ID NO: 131 - DNA, 525 bp, Homo sapiens
  misc_feature (470)..(470): n equals a,t,g, or c
  misc_feature (501)..(501): n equals a,t,g, or c
  misc_feature (525)..(525): n equals a,t,g, or c
ttaacagaagcactctgcctggaggtgcgaccaacatattttgagatgaagaacgaaaaactgctgtccaaagcatcagaaccaaaataccagctttttgttccccagcttgtgactggcagatgcgctacaagagcttttcatagaaaatcacatagtttggatctgaacatcagtgagaaactgactttattacccactttatatgaaatacatagtaagactactgcctattccagactaaatgaaacacagcctattgacctttcaggcttgctttacaatctagtaaaaatagctattcctttcagaatccatccagttttgatcctagtatgctgctgcaaagattttcagtggccccccatgagacccagacacaaagaggaggagaatttcagtgtggtctagaagctgcttcatgtattctgaccatactaatactaacaatctggactttccgatggacnggccctcagcggcaggagcatgccggaggtncagaccaggaagagcactctcccn

SEQ ID NO: 132 - DNA, 1437 bp, Homo sapiens
  misc_feature (20)..(20): n equals a,t,g, or c
  misc_feature (66)..(66): n equals a,t,g, or c
  misc_feature (82)..(82): n equals a,t,g, or c
  misc_feature (780)..(780): n equals a,t,g, or c
  misc_feature (1436)..(1437): n equals a,t,g, or c
aactggtgggtcccccgggnctggcaggaattcggcacgggctctaattgctagttgtaaaactgntatccaaattttcagnaaaagacagcttcagcttgcaaattctatcctctaaacttatctggtgcattctccccaccccacccccattatataagggctattttagatgcttttaacctccccaacaaataatttgccaagtgtccaatgagaacttatcatgttggtgtgttaggtaaatcgggcaaatatgatagtgtcttacattgggccttgattttaagttgttatatttgtacaatcgagtattttagaaattacatgaaacatgaaacagtttttgcaattttttttaaactgggcatctggtttctaaaaatttatttgaaacaatctagaattttcttggtgcaaagtgtatcatgtggratatccycatatttttaccatattttaagaactttaagacgattaattgtaaataatttatttgattggtgcagtycyaatccctaaatcataatcttaaaatcaggaatgtgtggagaacagagccatgtcatatcactttgctcttaccattccttttgatcagcctcaattcagcctcattgtgtagtatgttttttctttctatgaaaaacaacagaaagcatttcatttatttgcctatgttcaaatatgtttaataatgaccaaagtgcattctgagttttttcaaggaakgtaatactggagctttaagaacatacytagttycycakgkgaaaactnaggctttgtctgatgtttttccttcctctattgtctaatgttgaggttgtttttaggaattatgttttataaactttttcaatataaggtacatgcctatacagaacttaacattttgcacagaatatatcaaatatattttgagaaaaaaagtacggcatgagttctgttaggaataaaagatgaaactattgtatctcacaaaaaatcttatttcagaatggaaatatttttgagaaaagtagctgagtatactggtttaagaaaatgcttgttttagattgaggttaacttagagttgggagttgatttattaagtacagtatacctctcaacagtttataaataatatgttgaattatgtcagtgtgggcagcagtagaatactaaaaggaaaatgtcatgttaagcaatttcagaacattaactgaactattttcaaagcagaaaaattgacattgctgcctttaagaataccatgaatgtaagaaattgaaagaaattgtaaaatatcacataatatagaaatggcagttcaaagagaattgtggcagatgttgtgtgtgaactgttgtttctttgccacatgtgttgtatttgaaagttttacagtaagtttaaaataaaacattctgtgactgaaaaaaaaaaaaaann

SEQ ID NO: 133 - DNA, 466 bp, Homo sapiens
  misc_feature (361)..(361): n equals a,t,g, or c
  misc_feature (395)..(395): n equals a,t,g, or c
  misc_feature (459)..(459): n equals a,t,g, or c
cggcgctgccggggtgaaatcgtaggacagtgaagatgctgctggaattgtccgaggagcataaggaacacctggccttcctgcctcaagtggacagcgcgggtcagcgggcgtgggggcggtgttctgtgggctggggaggaggtcaaaggcagcgcctggcactcaacagccttctgactttcattgcagtggtcgccgagtttgggcggattgctgtggaattcctgagacgsggcgcaaacccaaaaatctacgraggcgccgccagtaagaagggaaaggggaaggctccgcaggcttctagggcggttgcgagccattccctgtctcccgggagagaaacggattattgcgagtnctagggtcttgttccgattgtagtagaataaaancagcagagtctttcagtcagggtgcaatcctgcccgtcccttaagtagtgtgagattgttaaanctctatt

SEQ ID NO: 134 - DNA, 572 bp, Homo sapiens
cgaccgtacggcaaatgaagatagatttgaagatgatcgatattttttgggtttcttgtccaactcaaaaagatttaatgttgcaatcaccagacccaaagctttgctgatagtgctggraaacccccatgttctcgttcgagacccctgttttggtgctttgctggaatacagtattacaaacggtgtttacatgggatgcgatttacctcctgcactgcagtctctgcaaaactgtggcgagggggtggcagacccctcctacccrgtggtgccagaatccacaggaccagagaagcatcaggagcccagctgatctgcagtggctgacagcagggaggccatgtgctcagcctggccacgttgccgttacagtctgctccgtggctcctgtggcctgcccttgtctcgcagccaggcagggtcgtgtgtgggtgtggggctgccaggttggacgcagctgctgctgccctgactttggcatatgccagcctgtwcctgccacagggcagtcactgccgcctaccctgaaataaaccctcgagtgacccccaaaaaaaaaaaaaaaaaaa

SEQ ID NO: 135 - DNA, 1076 bp, Homo sapiens
  misc_feature (35)..(35): n equals a,t,g, or c
gacggctgcagaacatccgccgcaccgctgggggncaacgttgtcggaccgaggagtccgaggtggcgactgagtgagatacccagctgtgcggagctaggacgcggaacatcccagaggccagcatcaacatgctgccacctgcccaccaccaggcctttgtccgacatcgcctggaggaggccttccgtgtggcccttgttgggcaccgacatcccctgcctgtcctggcctatgtccgcctcacacaccggagatctgggaggttcctgtcccaggatgaccttgtgcagtccattggtgtgagtgcagcactaggggcagccggcgtggtgctctggggggacctgagcctctccagctctgaggaggagtgctggcatctccatgactacctggtggacaccttgggcccctatgtgatcaatgtgaccagggcagcgatggcctgcagtcaccagcggtgccatggccacgggcgctgtgcccggcgagatccaggacagatggaagcctttctacacctgtggccagacggcagccttggagattggaagtccttcagctgccactgttactggggctgggctggccccacctgccaggagcccaggcctgggcctaaagaagcagtataaagccagggcccctgccactgcctcttcttttccctgctgccacttttccagtcctggaactactctgtcccactcttgctctattcagtttacagtcaaccctcccaagcacacaccccgcttcccttggaatccctgaggggtagaaggggccagaaaaaacgcttataaaaccagaggccctctgagatcatgtgagtcctccatggcaaggaagcagttccagggagagtcaggttccagctagttagggctgccagcctagggctttgtgcctacacctcactaagcccatggagaggtcacagatgggccgtgcacgggcagatgggccccaaaaaatcttggcgaaggtcggtaaagtgctaagctgttgtctgcactctttcatcataaagtcacttttttccactaaaaaaaaaaaaaaaaaaactcgag

SEQ ID NO: 136 - DNA, 713 bp, Homo sapiens
  misc_feature (712)..(712): n equals a,t,g, or c
agaaaacagattcctattttaaccccaaaatgaaactaaatcggcagctaatattctgtacattggctgctttggctgaggaacgaaaacctttggaatgtctagatgcttttggagccactgggataatgggattacagtgggcaaaacatcttggaaatgcagtcaaagttacaatcaatgacttgaatgaaaattctgtgacactgattcaggaaaactgccatttaaacaaattgaaagtggtggtggacagtaaggaaaaggaaaagagtgatgatattcttgaagaaggagagaaaaatcttggtaatattaaggtgaccaaaatggatgccaatgtactgatgcatttgagatcttttgatttcatacatctagacccttttggaacatcagtgaattatctagattctgcattcagaaatataagaaaccttggcatagtgtcagtgacttctacagatatcagttctttatatgccaaggcacagcatgttgcccggcgtcactacggatgtaacattgtccgaactgaatattacaaggaactagcagccagaattgttgtagctgcagtggcaagagctgcagcccgatgcaacaaaggcatagaagtactgtttgcagtggctctggaacattttgtgttggtagttgtgagagtttgaggggacctacttcagcagatgaaacagccaagaagattcant

SEQ ID NO: 137 - DNA, 780 bp, Homo sapiens
  misc_feature (557)..(557): n equals a,t,g, or c
  misc_feature (596)..(596): n equals a,t,g, or c
  misc_feature (624)..(624): n equals a,t,g, or c
  misc_feature (705)..(705): n equals a,t,g, or c
  misc_feature (722)..(722): n equals a,t,g, or c
  misc_feature (732)..(732): n equals a,t,g, or c
  misc_feature (767)..(767): n equals a,t,g, or c
gcttattgcccgcgcggtgagggagcgtggtctcgcgcaascggcgtgcggtcccgcggcgctgcagttgtgtccagccggtcacggggcggctatggcggccacgttcttcggagaggtggtgaaggcgccgtgccgagctgggactgaggacgaagaggaggaggaggaggggcggagggagacgcccgaggacagggaggtgcgtctgcagctggcgcggaagagggaagtgcggctccttcgaagacaaacaaaaacatctttggaagtttctttgctagaaaaatatccgtgctccaagtttataattgctataggaaataatgcagtagcatttctgtcatcatttgttatgaattcaggagtctgggaggaagttggttgtgctaaactctggaatgaatggtgtagaacaacagacactacacatctgtcctccacagaggctttttgtgtgttttatcatctaaaatccaatccctcggtttttctctgtcagtgcagttgctatgttgcagaagatcaacagtatcagtggctggaaaaggtttttnggctcttgtccaaggaagaacatgcagataactattctncacatgtcgacatgtttaccggattatnaaaacctcagaatccaccggggcagcctttcctttctccttttccctggagaaggcccttaaaacmcagaattccaaagantcgggcgtggtttggtnccattggctnaggaacaaccggattatagttacacggaccttccngggcaggcagttc

SEQ ID NO: 138 - DNA, 629 bp, Homo sapiens
  misc_feature (372)..(372): n equals a,t,g, or c
  misc_feature (374)..(374): n equals a,t,g, or c
  misc_feature (494)..(494): n equals a,t,g, or c
agctgatgcggctggaccggycggggaaacagtattttctggaagggggcccctctsaascggtccaggatcctgcacatggcgctgaccggggcctcagacccctctgcagaggcagaggccaacggggagaagccctttctgctgcgggcattgcagatcgcgctggtggtctccctctactgggtcacctccatctccatggtgttccttaataagtacctgctggacagcccctccctgcggctggacacccccatcttcgtcaccttctaccagtgcctggtgaccacgctgctgtgcaaaggcctcagcgctctggccgcctgctgccctggtgccgtggacttccccagcttgcgcctggacctnanggtggcccgcagcgtcctgcccctgtcggtggtcttcatcggcatgatcaccttcaataacctctgctyaagtacgtcggtgtggccttctacaatgtgggccgctcactcaccaccgtnttcaacgtgctgctctcctacctgctgctcaagsaamccacctccttctatgccctgcttcacctgcggtattcatcatcgggggcttctggcttggtgtgggaccaggagggggcagaaggcaccttgtcgtgg

SEQ ID NO: 139 - DNA, 411 bp, Homo sapiens
  misc_feature (411)..(411): n equals a,t,g, or c
cccacgcgtccggcggtggtctcattcctggaaaatctcttgtgtttgcaactatggagctgctgatgttcattttagtacggcatatgccacatctcagtaccaaggtgtcagactctccaagtcacatagccactaaaactcgactatcagaasaaagtgctcgtttggtggcagccacagttaccatactctctgatttaccatccctttgttcacccgctggatgtatgacaatcctgcccacaattctgttcttaattgcmagaatattgaaagacacagcaataaagtctgcagataatcaggttcctccaccagtcagtgcagctcttcaagggattaaaagtattgtgacactttcaatggccaaaactgaggctggcgttcaaaaacagtggacagctctgn

SEQ ID NO: 140 - DNA, 957 bp, Homo sapiens
  misc_feature (21)..(21): n equals a,t,g, or c
  misc_feature (934)..(934): n equals a,t,g, or c
aaggtcatgcaaaatttaggncgtgtattaaaagcctgggtagtgtctcatcctgatcttgtgtattggcaaggtcttgactcactttgtgctccattcctatatctaaacttcaataatgaagccttggcttatgcatgtatgtctgcttttattcccaaatacctgtataacttcttcttaaaagacaactcacatgtaatacaagagtatctgactgtcttctctcagatgattgcatttcatgatccagagctgagtaatcatctcaatgagattggtttcattccagatctctatgccatcccttggtttcttaccatgtttactcatgtatttccactacacaaaattttccacctctgggataccttactacttgggaattcctctttcccattctgtattggagtagcaattcttcagcagctgcgggaccggcttttggctaatggctttaakgagtgtattcttctcttctccgatttaccagaaattgacattgaacgctgtgtgagagaatctatcaacctgttttgttggactcctaaaagtgctacttacagacagcatgctcaacctccaaagccatcttctgacagcagtggaggcagaagttcggcaccttatttctctgctgagtgtccagatcctccaaagacagatctgtcaagagaatccatcccattaaatgacctgaagtcagaagtatcaccacggatttcagcagaggacctgattgacttgtgtgagctcacagtgacaggccacttcaaaacacccagcaagaaaacaaagtccagtaaaccaaagctcctggtggtttgacatccggawtagtgaagactttattcgtggtcacatttcaggaaggcattcaacattccatcagtgctgccttcaytgcagaaggggggagctttacccagggggncctttacactgggctaatgggct

SEQ ID NO: 141 - DNA, 895 bp, Homo sapiens
  misc_feature (430)..(430): n equals a,t,g, or c
  misc_feature (825)..(825): n equals a,t,g, or c
  misc_feature (853)..(853): n equals a,t,g, or c
  misc_feature (875)..(875): n equals a,t,g, or c
gtcgattcaccaatgcctccccagtaactggactggaacttgtaccataggctatgtaaccccagacatcttcatagcccctggcaatctctctcttccaataccaatctatgggaattccccgttgcccagggtgaggagggcaatccatttcattccccttctcgcgggactcggcattctagctggtacgggaaccggaattgctggaatcacaaaagcttccctcacctatagccagctctcaaaggaaatagccaacaacattgacaccatggctaaagccttaacgaccatgcaagaacaaatcgactctttagcagccgtagtccttcaaaatcgtcgaggactagacatgttaacggcagcacagggaggaatttgtttggccttagatgaaaaatgttgcttttgggtaaatcaatcaggnaamgtacaagacaacatcagacaactcctaaatcaagcctccagtttacgggaacgagccaytcagggtkggttaaawtgggraggracttggaaatggktctcttgggttcttccccttamaggcccacttgttagtctcctacttttgctcctttttggtccatgtctcctaaatctaataacccaatttgtctcctctcgccttcaggccataaagctccagacgaatctcagtgcaggacgccatcctcgcaatattcaagagtcacccttctaaggaggacccctagactgctcgstagtgggaacagacagaggcgaaatcctgccccgtyttcccgtgggacckggstggatatggtttwwgrccaatccacagagccatcctggccntgtacagctaggcaagagggccaagganccacaggaacaaccattacagncccttttgttcaggcaggga

SEQ ID NO: 142 - DNA, 779 bp, Homo sapiens
  misc_feature (728)..(728): n equals a,t,g, or c
gtgaagggttatactctgctgtcggagggcattgatgagatggtgggcatcatctacaagcccaaaactaaagagactcgggagacctatgaggtgctactcagcttcatccaggctgctcttggggaccagccacgtgatatcctttgtggggcagctgatgaagttctagctgttctaaagaatgaaaagctgcgggacaaggaaaggcgaaaggagattgacctgctgctgggtcaaacagatgataccagataccatgtgctagtgaacctgggcaaaaagatcacagactatggtggagataaggaaatccaaaatatgggtaagtgcgcgctttatgttctgatcatgttcattggttgttgttgacccctaaacatgcatcttctagcatcattcatttaaaaccttaatgtcagtgagttcccataatctgttctgtgttttttgaagagttacaattgatggacaccagaatccctagattccagcagctgttccttactctgagacccttttattgtgtggaatatgaraaaatgtgggcagagccttgggggctcaagtggttgagcaagcaragctgggctgactccaaggctggcaggtggagaaggtcttggcaggagcagcataggtggctctcttcatgttgatcatctaagtatctgtatgtgtccttaggcacttaggatcttttcctgaggagaggtagtcggggaggncattggctccagagtgccttgttttactaggcctttcactgccctcttttt

SEQ ID NO: 143 - DNA, 1575 bp, Homo sapiens
  misc_feature (20)..(20): n equals a,t,g, or c
  misc_feature (1524)..(1524): n equals a,t,g, or c
  misc_feature (1556)..(1556): n equals a,t,g, or c
  misc_feature (1571)..(1571): n equals a,t,g, or c
agctgtggggagcagagcgnctttgggsamgagtggagtgactagacacctaatgccctggcagctggagactcaaactcctgtacagctaccttctgggaaatagtttttracacctatttttcagattcttgtccggaatttctgctgctcttttcaaaaaagggcattaacaattctctggaaataaagcacctgttagcctgacatatgcaaaaagcagggcggcatcacccattacgagctcccccagccagcagtcagtattggattggccttgcctggctggtggcagtttgggagaaacagccaaagaggttagtttatttcaacaccaaattagaccatggcccatttccaacgggtctctttaaaggcctctatggaatacattgcctggtttccttctttgcagttcaccacagcaaggaatgtcacctccatcccaagccaccattttctcatgaaggcaaatccaagaagggcttgcagttcttgctgaagggggtaccatttgtgggcagagtgatcaataccatctagttgggggaggaggagcttatttcttggtgtacttgaatcagaaggtccctgcaagccagtatgcttcatttgccagtggccagaaattctcccttgcctccttgattgaggtgtcccagatgtagtattcccacaggggtctggcaggcccctcctgtaaccactccagtcacattttctgctcttgaggcagaggtgacatcaggacgtttacagcctccacatgaattgagtgttcatttacctcagtattaccgtgttcatttttgtcctcgtgctacagttagctccctgccgcctcttgcaggtcttacttcagctcttgcctgtgacccacacagcttctgggctctgcctctgctctaagaagtgctgtgggggtagagaaccaggaaggacatgctgttgggaatgtacacctgggcagaggtggccctgttaagatgtgactgtagccacagccagggatgggatccctgggtctctggaatctgaaacctcaacaaataccagtcttgacccctagcagcagagataagaataaaggggttggtttgctattaagtcagatgggggctctctccttgtcatgctgtccctgtgggtaacagacagggattgaccatcttactgttgtacaggtagctggtggtgttggattatcccattgaagctgggacagctgttcctttctcatagtgataacttgggtctgttgtcctctaaggaacgtgaaacatacacttcttaagctgaaccacgtaaacttgaaattctgcgcactgggagaaatgtgtcctgtgtttcaaaggataaaactgttctaaaggcttccagggtcatgatgggattttttaaataaatgcaaaaaataaaaataaaaaagaaaaaagaaaacaaaaaaaaaaargaaaaaatgctaggttggggaggcgctgttctggatccccaccgggctgggaaccaagaatgtcgtttccntttttaaagaagttttaaacgccccggggggnggatatttataaccnaaat

SEQ ID NO: 144 - DNA, 722 bp, Homo sapiens
tgcgtcgtagcggccgcccttttttttttttttttttttttttttttttttttttttttttttttttttttttccaaatcttgactttatttttaatataaaaaatgcaaatttggaaacccaccctactttccccaacataatgctttacctcttaaaaataaaaataaagtactaattctatatacatcacaggtaccatacaaaaatgtatccaaagtttctattgctaccaaagtgttctaaattaaaacaagttacagaaagcccctcattgtaaacaaaagattacaagttataaaatcaaagtacacacaggccagagtcatttatacaatgcaatgcattctgctcccaggccaagttgaatttttatgtgcctgtataaaaatgcatatcaatatacctttgcaaatggtatttttcattataaagcaaatgaatacactttctacaataaataatccgctgggaggcacactgcggggtttgaggtgggcgggacgacgggagcggggacacacccaccggcggtcacgggcagcggagtgtttttggtgatctgccaagtgatgtacmcagcataactttattctcccctctttccacaaagtaccattcmaaataatgtcattttctttcttaaaatacacatttgtcattgtaaatttacatcccgtcttattaaataagtggtactctgcggacgcgtgggtcgaccc

SEQ ID NO: 145 - DNA, 850 bp, Homo sapiens
  misc_feature (781)..(781): n equals a,t,g, or c
  misc_feature (802)..(802): n equals a,t,g, or c
  misc_feature (821)..(821): n equals a,t,g, or c
ttgtagcccttgtacggtccggaattcccgggtcgacccacgcgtccgcccacgcgtccgcccacgmgtccggtcgattggctcttagagcatatttttaatacaaaatctgtctttgtgaatagagaatagggacgtattttttaaaattgctaccaatcccaaggagcaaggagcatcgatgctttgacttttctgcagggcaggtgacttggcctagctggttttgggtggtgagtgcagtgagtgggccatgacacagtacacgccatgttcacctgtttcccaaaatgtttaggtttttcccctycagtaaatgtgactgtctctccccgttctgaagaaagccatacaacgacggtttctggtggcaatgggagcgtgttccaggcgggcccgcagcttcaggcactggctaacttagaagccargagggggtctataggtgctgctctctcatcccgggatgtcagtgggctgcctgtttatgctcagtcaggagagcctaggaggctgacccaggcacaggtggcagcgtttcctggagagaatgctttggaacactcttcagaccaggacacctgggacagcctgaggagcccgggtttctgcagccctttgtcatctggtggtggagcagagtccctgccgcctggggggcctggacatgcagaggcaggacacctcggcaaggtttgtgacttccacctgaaccaccagcagcccagccccaccagcgtcctgcctaacagaggtgggcagcccctccgctttgagaaanttttgttctgttggattagcntggcattgggattgttgcntacagggattgttgccccaagccaggggc

SEQ ID NO: 146 - DNA, 481 bp, Homo sapiens
  misc_feature (465)..(465): n equals a,t,g, or c
tttcaggctccagggagcagtgtcagggccagggagacgatggtctccgtgactatggccacttccgagtggatccagttctttaaggaagccggcattcctccaggacctgccgtcaattatgccgtgatgtttgtggataataggattcagaagagcatgctgctggatctcaataaggagataatgaatgagctgggcgtgaccgtggtgggtgacatcatcgccattctcaagcatgccaaagtggtgcaccgtcaggacatgtgcaaagctgccactgagtcagtaccctgcagccctagcccccttgcaggcgaaattcgccgtggcaccagtgctgcctcccgaatgatcaccaacagcctgaaccatgactctccacccagcacaccccccaggcgcccggacaccagcacctccaagatctccggtcactgtgtccaacaagatagcagcaaagantgccaaggccactgca

SEQ ID NO: 147 - DNA, 830 bp, Homo sapiens
  misc_feature (691)..(691): n equals a,t,g, or c
  misc_feature (724)..(724): n equals a,t,g, or c
  misc_feature (729)..(729): n equals a,t,g, or c
  misc_feature (740)..(740): n equals a,t,g, or c
  misc_feature (756)..(756): n equals a,t,g, or c
  misc_feature (809)..(809): n equals a,t,g, or c
gggaggaggaggaggacggggaggagcttcgccgcggcctgctccgcccagccggggtcggtggccgcatggcttcggtctcctctgcgaccttctcgggccacggggctcggtccctactgcagttcctgcggctggtagggcagctcaagagagtcccacgaactggctgggtatacagaaatgtccagaggccggagagcgtttcagatcacatgtaccggatggcagttatggctatggtgatcaaagatgaccgtcttaacaaagaccggaagctatgaagcagataacccagctcctaccagaggacctcagaaaggagctctatgaactttgggaagagtacgagacccaatctagtgcagaagccaaatttgtgaagcagctagaccaatgtgaaatgattcttcaagcatctgaatatgaagaccttgaacacaaacctgggagactgcaagacttctatgattccacagcaggaaaattcaatcaccctgagatagtccagcttgtttctgaacttgaggcagaaagaagcactaacatagctgcagtgccagtgagccacactcctgagacactctctaaattgctgcactcctgtaacaaacattatttttccatttcattgtattgtgttttgccattgttggtctgttgatttcctagatgtgagctgtttgtttcnattggctgaacttcagcaagaatgtggtccacnttggnctaaagaagcncagaccaggaaccggnctgaagtgcatggtgacactggaggggcatccctgttatgactaataataatnttacccctaaaaaaaaaaagt

SEQ ID NO: 148 - DNA, 469 bp, Homo sapiens
  misc_feature (329)..(329): n equals a,t,g, or c
  misc_feature (442)..(442): n equals a,t,g, or c
ggccccgggatgctacacacaacccagctgtaccagcatgtgccagagacacgctggccaatcgtgtactcgccgcgctacaacatcaccttcatgggcctggagaagctgcatccctttgatgccggaaaatggggcaaagtgatcaatttcctaaaagaagagaagcttctgtctgacagcatgctggtggaggcgcgggaggcctcggaggaggacctgctggtggtgcacacgargcgctatcttaatgagctcaagtggtcctttgctgttgctaccatcacagaaatcccccccgttatcttcctccccaacttccttgtgcnaragraagtgctgaggcccttcsgamccaracaggargaaccataatggcggggaarctggctktggarcraggytgggcatcaacktgggggtggsttccacactgtccaanaacgtgggggggttctttgctatgcga

SEQ ID NO: 149 - DNA, 487 bp, Homo sapiens
  misc_feature (476)..(476): n equals a,t,g, or c
  misc_feature (481)..(482): n equals a,t,g, or c
cctttgtaaccaaaggaaataaactattttctctaycttttawtttttcaaaratattatttgactctatcaaaagtctctcctttttaaaccttttcttatggatggctgtcaatcccgaggcagaagttttcaggtggagaccaagcggcctttgctcttcttccttcttcctgccacactctgctttcttcctgccatggacccctggaggagacctatggagggacagttttgacctgacccctagaggagacagttttgacctcttcagcaccaggaaggaagctctgaggatggttgcagtgaggaagcatgggtctttaaggacttctctctcttttttgctggacattattgagtttgtgggaccctgcctcttcctgctacctgtgggtctgcccagagtccctgcaggcctgtccatgcattaaaaattcctattgtctctcaaaaaaaaaaaaaaagaaaaaaanaaaannggaaa

SEQ ID NO: 150 - DNA, 698 bp, Homo sapiens
  misc_feature (388)..(388): n equals a,t,g, or c
  misc_feature (401)..(401): n equals a,t,g, or c
gcgccgctccagccatgtcagcgcgcgcgagcctgggcccaccatgagccatggccatgtccgtgagcgccgaggacgacgactatgaatcggagccggaccagaaccgggctgtgggtcggcccaaggggaagctgggcccggcctccgcggtgaagttggccgccaaccggacaacggcaggagctcggcggcgccggacgcgatgccgcaagtgcgaggcctgcctgcggaccgagtgcggagagtgccacttctgcaaggacatgaagaagttcgggggccccgggcgcatgaagcagagctgcatcatgcggcagtgcatcgcgccagtgctgccccacaccgccgtgtgccttgtgtgttgcgaagcggggaaggaagacanggtggaagaagangaaagcaagtttaacctcatgctcatggagtkctccatctgcaatgaatcatccaccctggatgccttaaggtgagtggcccagtggggacaggtggtgtgacgctctggggcaggtagggttgctggagatgctggtgagatggtgggatgcaggtcgtgcagtgaattcctggaggacccctgagtctgggtgatcctgtgtgtcaagggataagcccggggcaaggagggcctggagtacctcagagacccagtgtcatcaaaggaataaacacacccccacctcccaggatgt

SEQ ID NO: 151 - DNA, 612 bp, Homo sapiens
  misc_feature (533)..(533): n equals a,t,g, or c
  misc_feature (606)..(606): n equals a,t,g, or c
gccgcgcgcagcacgctcaaggccgggatggcggcggcggcggcggcaggaagcgggacgccccgagaggaggaggtacctgctggggaggcagcggcctcgcagccccaggccccaacgagtgtgcctggggctcgtctctcgaggttgcctctggcgcgagtgaaggccttggtgaaggcagatcccgacgtgacgctagcgggacaggaagccatcttcattctggcacgagccgcggaactgtttgtggagaccattgcaaaagatgcctactgttgcgctcagcaggggaaaaaggaaaacccttcagaggagagacttggataatgcatagaagctgtggatgatttgcttttctggaaggtacttakattgattgccgagcggggcattttktgagcttcatctgaagccttcagttcacccctctgcacaggcctcagctttgaagaacggagtctttgcacttacacacactcttcctgttctgccttcacctatgccgggataagcagagatctcatcaattnagctcttctctgcaaggtcttccacttatttctgtctgtcttccatatcaagcctgggatgcagctgctgctntttatt

SEQ ID NO: 152 - DNA, 646 bp, Homo sapiens
  misc_feature (566)..(566): n equals a,t,g, or c
  misc_feature (588)..(588): n equals a,t,g, or c
  misc_feature (603)..(603): n equals a,t,g, or c
gccctgtggctcgcgccgtcccccgccgcccgtcgaccccgcttccatgtccctggcggacacagctcccaggaacctccacgcccatggccactaggcagagggaatcctctatcacctcctgctgttccacctcgagctgcgacgcagacgacgagggcgtgcgcggcacctgcgaagatgcttccctgtgcaagaggatattttgctcgagtccatggtgtcagtcagcttataaaggcatttctacggaagacagaatgtcattgtcaaattgtcaaccttggggcaggcatggataccaccttctggagattaaaggatgaagatcttctcccaagtaaatattttgaggttgactttccaatgattgtcacgagaaagctgcacagtatcaaattgccaacactcctgatagctgaatgtgtgctggtttacatgamtccagagcagtccgcaaacctcctgaagtgggcagccaacagttttgagagagccatgttcataaactacgaacaggtgaacatgggtgatcggttggggcagatcatgattgaaaacctgcngagacgccagtgtgacctggcnggagttgagactgcnagtcattagagtcacagaaagaaccgctcctgtccaatggtgg

SEQ ID NO: 153 - DNA, 522 bp, Homo sapiens
  misc_feature (476)..(476): n equals a,t,g, or c
  misc_feature (488)..(488): n equals a,t,g, or c
  misc_feature (495)..(495): n equals a,t,g, or c
  misc_feature (512)..(512): n equals a,t,g, or c
tagtatcacattccttgggatgtgtaattacttatgacataatgactggctggaatccagttcggctgtatgaacagttgctgcaaaaggaagaagagttgcctgatgaacgatggatgagctatgaagaacgacatcttcttgatgaactctatataacaaaacgacggctgaaggaaatagaagaacggcttcacggattgaaagcatcatctatgacacaaacacctgccttaaaatttaaggttgagaatttcttctgtatgggatccccattagcagttttcttggcgttgcgtggcatccgcccaggaaatactggaagtcaagaccatattttgcctagagagatttgtaaccggttactaaatatttttcatcctacagatccagtgggcttatagattagaaccattaatactggaaacactacagcaacattttcacctgtccagatccactgggtacaatacttnaaatcctttacnttatggnacatatggaggccaagnttttcttcaa

SEQ ID NO: 154 - DNA, 593 bp, Homo sapiens
  misc_feature (153)..(153): n equals a,t,g, or c
  misc_feature (155)..(155): n equals a,t,g, or c
  misc_feature (158)..(158): n equals a,t,g, or c
  misc_feature (590)..(590): n equals a,t,g, or c
ggcacgaggggcactcccccgggagtgagggttgctgggcctgatgacgtggcttggcaacgtccctaccgccgctgcttcccgggaacctggcgccgccggaactgatcgcggcctagtcccgacgcgcctgcacccgctgttccgcggcangncgnagacatgaggagaccccgcgacaggggcagcggcggcggctcgtgagccccgggatggaggagaaatacggcggggacgtgctggccggccccggcggcggcggcggccttgggscgktggacgtacccagcgctcggactgcattttttatggttttgtttcaaaagccattttcttctgggaaaaytattaccaaacaccagtggatcaaaatatttaaacatgcagttgctgggtgtattatttcactcttgtggttttttggcctcactctttgtggaccactaaggactttgctgctatttgagcacagtgatattgttgtcatttcactactcagtgttttgttcaccagttctggaggaggaccagcaaagacaaggggagctgcttttttcattattgctgtgatctgtttattgctttttganaat

SEQ ID NO: 155 - DNA, 601 bp, Homo sapiens
  misc_feature (477)..(477): n equals a,t,g, or c
  misc_feature (549)..(549): n equals a,t,g, or c
  misc_feature (577)..(577): n equals a,t,g, or c
  misc_feature (582)..(582): n equals a,t,g, or c
cagcgtcccgtctttgagagatcatcctctccactgcctgcatgaaccgggtcctcagcttccacagcgtgtctggaattctggtttgccaggcgggctgcgtcctggaggagctgagccggtatgtggaggaacgggacttcatcatgccgcagacttaggagccaagggagctgccacatcgggggaaacgtggcaaccaacgctggaggcctgcggtttcttcgatatggctcactgcatgggactgtcctgggcctggaagtggtgctggccgacggcactgtcctggactgcctgacctscctgaggaaggacaacacgggytatgacctgaagcagctgttcatcgggtcggagggcactttggggatcatcaccacggtgtccatcttgtgtccacccaagcccagggctgtgaacgtggctttcctccgtcacctgtgtgccgcccgcctgtggtcctgggaacccgangccaccccggcttgccgcatcctgctcttcccactcccaagcttgccaagctttgctgaaagttcctgcaanaccttccacacctgcaaagggaatgctnggttnagatcctgtcttgcattcc

SEQ ID NO: 156 - DNA, 602 bp, Homo sapiens
  misc_feature (13)..(13): n equals a,t,g, or c
  misc_feature (554)..(554): n equals a,t,g, or c
  misc_feature (591)..(591): n equals a,t,g, or c
ctgcaggggcatntccgctgggccactgcagccatggatgccgctgagggctggttgtggacagtggtcagctggttgttaaaggtcatggtcaggttggtggacgtgctgggggccacgtgcgtgatgaaaggggtttwgctctggttcaccgtgtcatacatattcacccgacgcttgcagatctccatgttctggaaacatgatttgacgtgtgtgctgtggggaaaatcgagtaagtgtgtcatggtgacaaagggatggttcagggtttcgattggagtgattctcttgtcagcatcaatggtcagcatcttcttcaacaggtcaatgaactcccgccggtcagccttttctaccaacatgtcgctcccttccaaatctgtcgtcatgttcacctgggccatatcatctaaacagttgaaaatgtactttcttgcttcttttgacttaatccctgtctctgcttcatggtcatctggtgtcttcagtctccacaaaggatatggtgagtccgtgtcacggttgaaaaacctagttgtctttgtcccggngcttaataaatattcagcaggcaaaccctgtgttttntgaaatatacc

SEQ ID NO: 157 - DNA, 1332 bp, Homo sapiens
  misc_feature (9)..(9): n equals a,t,g, or c
  misc_feature (19)..(19): n equals a,t,g, or c
  misc_feature (32)..(32): n equals a,t,g, or c
  misc_feature (40)..(40): n equals a,t,g, or c
  misc_feature (68)..(68): n equals a,t,g, or c
  misc_feature (1332)..(1332): n equals a,t,g, or c
ccagaggtnagccagtgantacatgtctagancatctagnaataaagcttgcatggataggaaaagcnttcccaggatggaagaaaggaaggaaagagctttcttcgtcctaattaagcactcgtgaagtgcttaattggagacagcaatataatgagccagggtgaacttggcccacaagccaagacagtgagagacaaatgttctccttactcagatgatcgacatgctgtactttgtggtcatcatgctggtcgtgctcatgagtttcggagtagcccgtcaagccattctgcatccagaggagaagccctcttggaaactggcccgaaacatcttctacatgccctactggatgatctatggagaggtgtttgcagaccagatagacctctacgccatggaaattaatcctccttgtggtgagaacctatatgatgaggagggcaagcggcttcctccctgtatccccggcgcctggctcactccagcactcatggcgtgctatctactggtcgccaacatcctgctggtgaacctgctgattgctgtgttcaacaataccttctttgaagtaaaatcaatatccaaccaggtgtggaagttccagcgatatcagctgattatgacatttcatgacaggccagtcctgcccccaccgatgatcattttaagccacatctacatcatcattatgcgtctcagcggycgctgcaggaaaaagagagaaggggaccaagaggaacgggatcgtggattgaagctcttccttagcgacgaggagctaaagaggctgcatgagttcgaggagcagtgcgtgcaggagcmttccgggagaaggaggatgagcagcagtcgtccagcgacgagcgcatccgggtcacttctgaaagagttgaaaatatgtcaatgaggttggaagaaatcaatgaaagagaaacttttatgaaaacttccctgcagactgttgaccttcgacttgctcagctagaagaattatctaacagaatggtgaatgctcttgaaaatcttgcgggaatcgacaggtctgacctgatccaggcacggtcccgggcttcttctgaatgtgaggcaacgtatcttctccggcaaagcagcatcaatagcgctgatggctacagcttgtatcgatatcattttaacggagaagagttattatttgaggatacatctctctccacgtcaccagggacaggagtcaggaaaaaaacctgttccttccgtataaaggaagagaaggacgtgaaacgcacctagtcccagaatgtcagaacagtcttcaccttcactgggcacaagcacatcagcaan

SEQ ID NO: 158 - DNA, 437 bp, Homo sapiens
  misc_feature (364)..(364): n equals a,t,g, or c
  misc_feature (377)..(377): n equals a,t,g, or c
  misc_feature (412)..(412): n equals a,t,g, or c
  misc_feature (415)..(415): n equals a,t,g, or c
cgcgtcgtagagttggggagcgggarggcaacggcagcgggatcgggatgaacagcggcggcggcttcggtttgggcttaggcttcggcctcacccccacgtcggtgattcaggtgacgaatctgtcgtcggcggtgaccagcgagcagatgcggacgcttttttccttcctaggagaaatcgaggagctgcggctctaccccccggacaacgcacctcttgctttttcctccaaagtatgttatgttaagtttcgtgatccatcaagtgttggcgtggcccagcatctaactaacacggtttttattgacagagctctgatagttgttccttgtgcagaaggttggatctcgctttttttccncctattgaattcngtcctgtctgtaatgccttagcttcctagagattngcnagtagacagtactcctggggtg

SEQ ID NO: 159 - DNA, 675 bp, Homo sapiens
  misc_feature (617)..(617): n equals a,t,g, or c
  misc_feature (647)..(647): n equals a,t,g, or c
  misc_feature (659)..(659): n equals a,t,g, or c
gtggtttccgcccggcagcccgcagcccgctggccgcccttcgtctgggtctccgcccccaggacccgcggccgagagctccggagcgcggcttccccggccggctgcgcgatgggctgcgggaactccaccgccaccagcgcgggcgcgggccaaggccctgcaggagcagccaaagatgtaacagaagaatccgtaacagaagatgacaagaggagaaactatggaggagtatatgttggcctaccatctgaagctgtcaatatggtgtccagtcaaacaaagacggttcggaaaaattagaagaaaataacatcatgactcaagaatcaagagcttgctcatcagtttggaaggaatttggctccgtgggacgttgtaatgtgcacagacatttccaaggaaattctaaacagtcacccttcccttttgcattcccccaaatcttaagtgtatacataaaaccctgggtacatattgttgtggtaatagaagggaattggttaaacagtacacttgtttatggractttctgtggccacctacgaaagacaagttacaamctscakggaggcygttgttgcccagccaggggccgckgcattttgacaacattnccaccctggccactcagcacatttcatggngggcatgccttncactgaaccttttgat

SEQ ID NO: 160 - DNA, 500 bp, Homo sapiens
  misc_feature (470)..(470): n equals a,t,g, or c
  misc_feature (475)..(475): n equals a,t,g, or c
  misc_feature (499)..(499): n equals a,t,g, or c
gcaactattcgttcatctgtgtagatgccactgtaaatccagggcctaagagaccctataatttctttggaattttagataagaaaaagatggaggagctcttattactggccaaggaaagcagtcggagcaaccatacaatttggtttggacactttacaacatccactattctttctccatcaccaggaatccggtcaataatgagttcggctatagcttatttgtgtggacatctccatacacttggtggactgatgcctgttttgcacactcgtcacttccagggcactttggaacttgaggtgggagactggaaggataataggaggtaccggatttttgcttttgatcacgacctctttagctttgcagatttgatctttgggaagtggcctgtggttcttatcaccaatcctaaatcactcctttatagttgtggtgaacatgaaccactaagaaagacttcntcacnccaacacacatcagagtcctgggnc

SEQ ID NO: 161 - DNA, 585 bp, Homo sapiens
  misc_feature (519)..(519): n equals a,t,g, or c
  misc_feature (530)..(530): n equals a,t,g, or c
agcgggtcttcaagatgacattccaccactcaatgaccttcaagcagatcgtgctggttggtcaggagacccagcggctctactgctcctcacagaggaaggaaagatctactctttggtagtgaatgagacccagcttgaccagccacgctcctacacggttcagctggccctgaggaaggtgtcccactacctgcctcacctgcgcgtggcctgcatgacttccaaccagagcagcaccctctacgtcacagaccaggggggagtgtattttgaggtgcataccccaggggtgtatcgcgatctctttgggacccttcaagcctttgaccccctggaccagcagatgccgcttgctctctmactgcctgccaagatcctattctgtgctcttggctacaaccaccttggcctggtggatgaatttggccgaatcttcatgcaaggaaataacagatacgggcagctaggaacaggggacaaaatkgaccgagggggaacccacacaggtttgtttanctgcagcgggnccatcaccctgtgggtgcggggccttcaaaccaattccctggttgcttgaggcca

SEQ ID NO: 162 - DNA, 1431 bp, Homo sapiens
gggattggcaagcttgcgtgccccagcgacacaggcctcgaggctgtctctgacaagtgttcacaggaggtggggacgcctctgcgcgaggaacgaggagctacgggcctgggcccggttattgccatgggcagcggctgccgcatcgaatgcatattcttcagcgagttccaccccacgctgggacccaagatcacctatcaggtccctgaagacttcatctcccgagagctgtttgacacagtccaagtgtacatcatcaccaagccagagctgcagaacaagcttatcactgtcacagctatggaaaagaagctgatcggctgtcctgtgtgcatcgaacacaagaagtacagccgcaatgctctcctcttcaacctgggcttcgtgtgtgatgcccaggccaagacctgcgccctcgagcccattgttaaaaagctggctggctatctgaccacactagagctagagagcagcttcgtgtccatggaggagagcaagcagaagttggtgcccatcatgaccatcttgctggaggagctaaatgcctcaggccggtgcactctgcccattgatgagtccaacaccatccacttgaaggtgattgagcagcggccagaccctccggtggcccaggagtatgatgtacctgtctttaccaaagacaaggaggatttcttcaactcacagtgggacctcactacacaacaaatcctgccctacattgatgggttccgccacatccagaagatttcagcagaggcagatgtggagctcaacctggtgcgcattgctatccagaacctgctgtactacggcgttgtgacactggtgtccatcctccagtactccaatgtatactgcccaacgcccaaggtccaggactggtagatgacaagtccctgcaagaggcatgtctatcctacgtgaccaagcaagggcacaagagggccaktctccgggatgtgttccagctatactgcagcctgagccctggcactaccgtgcgagacctcattggccgccacccccagcagctgcagcatgttgatgaacggaagctgatcccagttcgggcttatgaagaacctcatcaggcgactacagaagtatcctgtgcgggtgactcgggaagagcagagccaccctgcccggctttatacaggctgccacagctatgacgagatctgctgcaagacaggcatgagctaccatgagctggatgagcggcttgaaaatgaccccaacatcatcatctgctggaagtgaggctggtagtgactggatggacacattgctgtgggtagtccctcctactaggaggcttgtcatactgtctagaggttgactcttagttctgtaaataaagacatccatttcaaacagccaaaaaaaaaaaaaaaaaaaaaaaaaaaaaaaaaaaaaaaaaaa

SEQ ID NO: 163 - DNA, 668 bp, Homo sapiens
  misc_feature (198)..(198): n equals a,t,g, or c
  misc_feature (566)..(566): n equals a,t,g, or c
  misc_feature (575)..(575): n equals a,t,g, or c
  misc_feature (579)..(579): n equals a,t,g, or c
  misc_feature (586)..(586): n equals a,t,g, or c
  misc_feature (590)..(590): n equals a,t,g, or c
  misc_feature (632)..(632): n equals a,t,g, or c
agcctagttacagattgcactgcgtcagactgttccacacccagaagacgtcaggtgacttcagtcctgctgcagttgtgcagcagaggagactgcagacttcggttgaggaaacgggtatttcatgtctcagggagtaggtttgtgcagttacagcttttctgttggtatgcataattaataattggagctgcaaancagatcgtgacaagagatggacggtcagaagaaaaattggaaggacaaggttgttgacctcctgtactggagagacattaagaagactggagtggtgtttggtgccagcctattcctgctgctttcattgacagtattcagcattgtgagcgtaacagcctacattgccttggccctgctctctgtgaccatcagctttaggatatacaagggtgtgatccaagctatccagaaatcagatgaaggccacccattcagggcatatctggaatctgaagttgctatatctgaggagttggttcagaagtacagtaattctgctcttggtcatgtgaactgcacgataaagggaactcaggcgcctcttncttagttgnatgnatttagnttgnattctctgaaaggcttcttccattttccacttctttccagtngttttccctgtttatttttatgggaacgggccattt

SEQ ID NO: 164 - DNA, 926 bp, Homo sapiens
gttcgcaccccctgaggacgatgagattgaagagcatcaacaagaagaccaggacgagtactgagggcggccgcagccctggctgactgcacggcttccccgtgcctccctccctgctccactcccacattatagtcctttcctaacacggtcggccgggtgctttgtgtcagtsctgcagcatgggggagccaggcgaggggggcttgggggcatggggccggaaagcaggcagaagcccgtcctgggtggtgctggcccagttggtgggacccctgtccacacccaccctatttatttccgttgtctctctgctgtgtcgcccaacacttcccagggtgctgctgccacccgccccagccagccacctgctcctgacagccagcagctgtgtatttgacaaagtcattggtatatttttacttactggattctccttgcactttacctgttcttttccagagctgacagcacgggctccggcgcagtgtgcctggcttggcttcccttccccatggctgggggctggggtaggactcacccattctaatttattttgtcttttggcttctcagtagctaaggggaaggctgatgtcaggagagggagagggggctgaggaggtagtgctgtaggcccagggggtcagggaaagggaggggggcatgtgagggatggaaatgacctcctggcaccaggctcacccacccaaggccccctgccccagcactgaatcccagcgctgccctgaggcccccagccactccctccagcagcctggttcaccacacaaactctgcctggaccccattgtctgtctgcttcccacctgccctccccaccccctgccctcgggcaccagcctgcatatgtgttcacttttatttaaataaacttgtgtggtaaaaaaaaaaaaaaaaaaaatt

SEQ ID NO: 165 - DNA, 799 bp, Homo sapiens
ggcacgagctgaaggctttactcctggaggcgcagaaggggcctgtragtctcsaagaggccattcgagaacaggcgtctagctactcccgccagcagagggacctccacaatctcatggtggacttgaggggcctggtacatgctgctgggccagggcaggactctgggtcacaggcaggtagtcccccgaccagagacagagatgtagatgtcctttcagctgccttgaaagagcagcttagtcattccaggcaagtccattcatgtctagaaggcttacgagagcagcttgatggcctagaaaagacttgtagccaaatggctggggtggttcagcttgtaaagtctgcagcacacccaggcctggtggaaccagcagacggggctatgcccagcttcttgctggagcaggggagcatgatcttggcactgtcagacacggagcagagactagaagcccaagtcaacaggaacaccatctatagcaccctggtcacctgtgtgacatttgtggccacactgcctgtgctctacatgctattcaaagccagctaacccctggcccctcctccagagggtctgaggcaatagctgtgaatgtggatttaagtagagaatcgtagcaatgaagcgagcctttgggggcatgtacaacctcaatctgaaggagcagtatctgtgtggctcaccagcaggcatgctcgctttgtagacaaggttcatttacattaattatcaaaactttgtgctaatgtccaattaaaatatcctgagttttattatttaaaacaaaaaaa

SEQ ID NO: 166 - DNA, 563 bp, Homo sapiens
  misc_feature (282)..(282): n equals a,t,g, or c
aaataacaagatttttaatgcttgaatgatgattaatcttcagcattagcagatacttctttctttacacatggacctttgctgcagtagaataaaaaggacaaacttctacctaaattactccttattttatgtatatattttagcctcagaagttaagtattatttatcacacatgtgctttatattatttgactttcatattaatctattcattgtgctacttgatatttctagttgtttaagaataattactgaatcccaatgggcttgcaagttttntttaactaaaatatttttraccgtccactactcacctaactctatatatgctaccatagtcctaattaaggaagttctgcttttatttttaagaaaaattcataagcttcagaatataatttaaaatattttagagtgaaaaatgagcactgaaaattatacatggtcatgatttttaaataaatttttatccatgtttaaggrtaatgtgtcaggcacattgatctaaaatgtaattacgatgggtaaatgttcaaatctaggatcagtgtgtaatgtgg

SEQ ID NO: 167 - DNA, 864 bp, Homo sapiens
gggctgtggcggtggcgctggtggctgcggcggcggcggcggcagcggcgctcgagcggttcctgtcagggtcagccggcgggccccctgggtggtccacctgcaaatcgcggagcgcgccccagggatcgatggcgatgaactataacgcgaaggatgaagtggacggtgggcccccgtgtgctccggggggcaccgcgaagactcggagaccggataacacggccttcaaacagcaacggctgccagcttggcagcccatccttacggctggcacggtgctacctattttcttcatcatcggtctcatcttcattcccatcggcattggcatttttgtcacctccaacaacatccgcgagatcgagattgattataccggaacagagccttccagtccctgtaataaatgtttatctccggatgtgacaccttgcttttgtaccattaacttcacactggaaaagtcatttgagggcaacgtgtttatgtattatggactgtctaatttctatcaaaaccatcgtcgttacgtgaaatctcgagatgatagtcaactaaatggagattctagtgctttgcttaatcccagtaaggaatgtgaaccttatcgaagaaatgaagacaaaccaattgctccttgtggagctattgccaacagcatgtttaatgatacattagaattgtttctcattggcaatgattcttatcctatacctatcgctttgaaaaagaaaggtattgcttggtggacagwtaaaaatgtgraattcagaaatccccctggaggagacaacctggaagaacgatttaaaggtacaacaaagcctgtgaactggcttaaaccagtttacatgctggatg

SEQ ID NO: 168 - DNA, 771 bp, Homo sapiens
ttcagggcaaatcatctatgggcttcttttaaatgcctcaccacatctggacaagacatcctggaatgcattgcctcctcagcctctagctttcagtgaagtggaaaggattaataaaaatatcagaacctcaatcattgatgcagtagaactggccaaggatcattctgacttaagcagattgactgagctctccttgaggaggcggcagatgcttctgttagaaaccctgaaggtgaaacagaccattctggagccaatccctacttcactgaagttgcccattgctgtcagttgctactggttgcagcacaccgagaccaaagcaaagctacatcatctacaatccttactgctcacaatgctagtggggcccttgattgccataatcaacagccctggtaaggaagagctgcaggaagatggtgctaagatgttgtatgcagagttccaaagagtgaaggcgcagacacggctgggcacaagactggacttagacacagctcacatcttctgtcagtggcagtcctgtctccagatggggatgtatctcaaccagctgctgtccactcctctcccagagccagacctaactcgactgtacagtggaagcctggtgcacggactatgccagcaactgctagcatcgacctctgtagaaagtctcctgagcatatgtcctgaggctaagcaactttatgaatatctattcaatgccacaaggtcatatgcccccgctgaaatattcctaccaaaaggtagatcaaattc

SEQ ID NO: 169 - DNA, 977 bp, Homo sapiens
  misc_feature (863)..(863): n equals a,t,g, or c
  misc_feature (865)..(865): n equals a,t,g, or c
acccacgcgtccggaaccacgcatgggggctgttttagcacagctgctaaaataggccaggcctgcaggacatacgggtctgggagtgtggcaaataactggattgaaatttataatttcgtacagcaacttgcggagagatttgtgagccctgaaatgagattatctttcattgtgttttcttctcaagcaactattattttgccattaactggagacagaggcaaaatcagtaaaggcttggaggatttaaaacgtgttagtccagtaggagagacatatatccatgaaggactaaagctagcgaatgaacaaattcagaaagcaggaggcttgaaaacctccagtatcataattgctctgacagatggcaagttggacggtctggtgccatcatatgcagagaaagaggcaaagatatccaggtcacttggggctagtgtttattgtgttggtgtccttgattttgaacaagcacagcttgaaagaattgctgattccaaggagcaagttttccctgtcaaaggtggatttcaggctcttaaaggaataattaattctatactagctcagtcatgtactgaaatcctagaattgcagccctcaagtgtctgtgtgggggaggaatttcagattgtcttaagtggaagaggattcatgctgggcagtcggaatggcagtgttctctgcacttacactgtaaatgaaacatatacaacgagtgtaaaaccagtaagtgtacagcttaattctatgctttgtcctgcacctatcctgaataaagctggagaaactcttgatgtttcagtgagctttaatggaggaaaatctgtcatttcaggatcattaattgtcacagccananaatgttctaacgggatcgcagccatcattgttattttggtgttactgctactcctggggatcggtttgatgtggtggttttggacccctttgctgcaaagtggttattaagg

SEQ ID NO: 170 - DNA, 445 bp, Homo sapiens
  misc_feature (146)..(146): n equals a,t,g, or c
ggcacaggttccttccaaaagctctgggagaatgttccggctctctcctggcttctggcagtgccagaattccttggctgtctttggttcctagatgctgcactccagtctctgtctccgtggtcacatggtatcctctccgtgcntccctgcggcttcatgtgggcttcttataaggacaccagtcactggatttaggacccaccctaaatccaggaggacttcatctatgagaatggcatacacaaagagcctatttccaaatgaagttcacattctgaggttctgggtgggacaggtatttgttaagacactatttagcctagtccatmctcattcttctacttccaagatggaatttcctaaacttctaatagctatttttatcactgcagattttattaccttgaccaaaaaaaaaaaaaaaggggggccccttaagggg

SEQ ID NO: 171 - DNA, 1581 bp, Homo sapiens
ccatagactctttggcatagactctttcgcaggcagccactctgagtgtggccagttctataaccatccccaaactagctggagcctgatggataggaacgggtagtctgtcctcttccccataaaaatgttccaaaaagttatctccagagagagtcccttatgaagacagttgccaagctgtattctcattctttaaaccaatacccaggtcagggctagttcacactagcactgttagggacatggtgtggctagaaatgaattgagtgtgacttctccctacaaccccaggcccagggataggaggaggcagaggggtgcctggagtttctgcactctcatcagtgatgttcatgttacacttgcacaagggctgatttccacgtatgtgtgtgttaatttattcacttagtttcaaaagattttctctccccagccattcagaggtttccaaactaagccactgagtttgagtcagggaattccacgtaaaaagatcagattaaggtaaattctttgttctgtattgctgctgtgacttcagaaaaaaaaaattatgagagctcttcctggaattttgaaatttctatttaatgaagaagtgtataattccwtatttattgtttgaggtttgatttatctggargcttaaaaagaatgttttatttttgttgttaataaaatcccaatcacatttcacaataactaaaatgtctccaggtgggttactggtagatgatagtggtgacacctgcaggtctgcatttgaattggattcacagagaagcattccatggtcacataatgaatagggagaacagatattttcagaaaaatcaaccgattgttttttccagaaacagaacagaaaatgttcagaatattttcaaatttgtcagattcttttatgtttcctttgaaatttattatttaagcctattactaaacctttataaaaatatatttggcaaatacaccaaagaaaccagcttacaaaagattatgatcattaatgaactgcaaacctcatctttcgaaaacaaggttttgtgtttttttttttttgtaaatatttgtgtttataaatgtacagcagagtaagagtgttttttagattatttaattcccatatttctaaactatttactacacagtaatccatgcctgttagtttggaggacttgactgtctcattttttaattcattgtcagtcatgcttggaacagcatttccactagagaatccagcgttctggcagtagcaagagtacacatctggagcatgagggactctagcatgactcgtcagatgcacaccccaagagacaagaatgtgtagtttaatgaccggcgtggaccatacgaaattgagattctaactttcctgcaggagtgctcatgagcccagaatgtgattgggataaggccatttgcccacaaatttagctttcatgtaactcctagtgtgttatatcataatgtattttgttcttcctttttaatgtaagttttgctttgggtcaatttgaattaaaaaaatcaaatctgaaaaaaaaaaaaaaaaaaaaaaaaaaaaaa

SEQ ID NO: 172 - DNA, 440 bp, Homo sapiens
  misc_feature (415)..(415): n equals a,t,g, or c
ggcacgagcttgcacctcggcgatccccgactcccttctttatggcgtcgctcctgtgctgtgggccgaagctggccgcctgcggatcgtcctcagcgcctggggagtgatcatgttgataatgctcggaatatttttcaatgtccattccgctgtgttgattgaggacgttcccttcacggagaaagattttgagaatggcccccagaacatatacaacctttacgagcaagtcagctacaactgtttcatcgctgcaggcctttacctcctcctcggaggcttctctttctgccaattcggstcaataagcgcaaggaataacatgggttcgggagagatcttctcggcggccggcgcgctttcacgaastcggggagcgacgatgcagtgcatcccgtggccgattctctcngcgggcgcgaatggacggagaggaa

SEQ ID NO: 173 - DNA, 1395 bp, Homo sapiens
cagctcagctctgcgctgctgcacgccaaccacacactcagcaccattgaccacctggtgttggagacggtggagaggctgggcgaggcggtgaggacagagctgaccaccctggaggaggtgctcgagccgcgcacggagctggtggctgccgcccgaggggctcgacggcaggcggaggctgcggcccagcacctgcaggggctggccttctggcagggagtgcccctgagccccctgcaggtggctgaaaatgtgtcctttgtggaggagtacaggtggctggcctatgtcctcctgctgctcctggagctgctggtctgcctcttcaccctcctgggcctggcgaacagagcaagtggctggtgatcgtgatgacagtcatgagtctcctggttctcgtcctgagctggggctccatgggcctggaggcagccacggccgtgggcctcagtgacttctgctccaatccagacccttatgttctgaacctgacccaggaggagacagggctcagctcagacatcctgagctattatctcctctgcaaccgggccgtctccaaccccttccaacagaggctgactctgtcccaacgagctctggccaacatccactcccagctgctgggcctggagcgagaagctgtgcctcagttcccttcagcgcagaagcctctgctgtccttggaggagactctgaatgttgacagaaaggaaatttccaccagttggtggcactgctacactgccgcagccctgcacaaggactatggtgcagccctgcggggcctgtgcgaatacgccctggaaggcctgctcttcctgctgctcttctccctgctgtctgcaggagcgctggccactgccctctgcagcctgccccgagcctgggccctcttcccacccaggaatccaagcgctttgtgcagtggcagtcgtctatctgagcccctcctcccggctggactggagcctggctcccctcttcgttccttccctggctgccggaggagaccccactaacccagcctgcctgggctctgaccactaacactcttggccatggacagcctgcacaggaccgcctccctgctcttggccactgtgctcccatttctgtccttggccttgggagtagctgagggggcagactagggagtagggctggcaggggagggggcagacagcctcgcctcgcacccttcatccctggctgccggtcccatccttggagggactaagctgggggtgggggacatgagtccccctgctgcccctgccacatcccagtgggctctgaccccctgatctcaactcgtggcactaacttggaaaagggttgatttaaaataaaagggaagactattttacaagcaaaaaaaaaaaaaaaaaa

SEQ ID NO: 174 - DNA, 776 bp, Homo sapiens
  misc_feature (644)..(644): n equals a,t,g, or c
  misc_feature (655)..(655): n equals a,t,g, or c
  misc_feature (665)..(665): n equals a,t,g, or c
cgtgtcagacgtggcaagaaaaaccagcagttgccttttcatctcttttctgatgatctaaccatgaagtccccagtatttgagcatttaaggcagaatgtaaattcataatttaagaagattttttgttacgtggctagcccaggttgaagaaatatggagatcaacacaaaactgctcatcagtgttacctgtatcagctttttcacctttcagcttcttttctactttgtaagttactggttttcagcaaaagtttctccaggtttcaatagtctcagcttcaaaaagaagattgaatggaactcaagggtagtatccacatgccattctttggtggttggkatttttggcctgkacattttcttawtcgatgaggctactwaagctgatccactttkgggtggtccatcacttgcaaacgtgaatattgctattgcctcaggctacctcatttctgatttgtccattatmattttgtattkgaaagtgattggtgacaaattttttataatrcatcattgtgcgkccctgtrtgcatactrcyttrtactgatattagtgaataagagtttaatttggcataatttcttcaagatcagatatatcgaaacatctctccagaccacccatttggatcacgntataaataatnataaaaggtnttaaaactggtttcagttctttgggccactggaaatcaccaggcttagccctggctgtgccgtggattggcaagctggaaggtttaattaatgtgggggggacctaataat

SEQ ID NO: 175 - DNA, 539 bp, Homo sapiens
  misc_feature (28)..(28): n equals a,t,g, or c
  misc_feature (136)..(136): n equals a,t,g, or c
cgagaacgaggaggagatcatccgcaanatgcaggcgcaccaggagaagctgcagctggagcagttgcgcctggaggaggaggtggctcggctggcggccgaaaaggaggcactggagcaggtggcggaggagggnaggcagcagaacgagacacgcgtggcctgggacctctggagcaccctctgcatgatcctcttcctgatgatcgaggtgtggcggcaggaccaccaggaggggccctcacctgagtgcctgggcggtgaggaggatgagctgcctgggctggggggcgcccccttgcagggcctcaccctgcccaacaaggccacgcttggccacttttatgagcgctgcatccggggggccacggccgatgcagcccgtacccggragttcctggaargcttcgtggatgattgctggaagccctgaggagcctctgcaaccgggacaccgacatggaggtggaggacttcattggcgtggacagcatgtacgagaactggcaggtggacaggccactgctgtgccacctttt

SEQ ID NO: 176 - DNA, 674 bp, Homo sapiens
  misc_feature (533)..(533): n equals a,t,g, or c
  misc_feature (568)..(568): n equals a,t,g, or c
  misc_feature (626)..(626): n equals a,t,g, or c
gctcgtgccgaattcggcacgagaggacgcgggaggcgcacttgcttcaagtcgcgggcgtgggaacggggttgcaaaacggggcctctttatccgggcttgcttccggcgtcatggctcaaagggccttcccgaatccttatgctgattataacaaatccctggccgaaggykactttgatgctgccgggaggctgactcctgagttctcacaacgcttgaccaataagattcgggagcttcttcagcaaatggagagaggcctgaaatcagcagaccctcgggatggcaccggttacactggctgggcaggtattgctgtgctttacttacatctttatgatgtatttggggaccctgcctacctacagttagcacatggctatgtaaagcaragtctgaactgcttaaccaagcgctccatcaccttcctttgtggggatgcaggccccctggcagtggccgctgtgctatatcacaagatgaacaatgagaagcaggcagaagattgcatcacacggstaattcacctnaaataaggtttgatcctcatggttccaaatggaantgctctatggggcgaatagggttacatctatggttcttcttttttgttcattaggaanttgggagttggaaaagtttcctcaaagcctttttcagccggttttgtg

SEQ ID NO: 177 - DNA, 1424 bp, Homo sapiens
  misc_feature (1224)..(1224): n equals a,t,g, or c
  misc_feature (1261)..(1261): n equals a,t,g, or c
gcggccgccctttttttttttttttttttttttttttttttcaaaatttgcttttatttacacgtttgagtcaattacatgcatgttttatttttgaggagtgattagcaaaatgcattaaaattttaaaatagcaattaaatatacaaaaatatagcttacaaaaaactgcgaatgtttaaaaatattctgctgcagaatttttagtgtacaaagacgtctatgaaacctgaggttcagcatttcataaacctttttttgagggagttacacaatacctagtgaggaaacccgagggccaaactacaagacgaaaaagtgccccgttcctggcaatgatgtcagaagaccaagaggcgatagttaccagcaacactctaggaagaccagctgtcaccagaagggagttcctaacacttgccacacctgctcccccgaccgggggcctgggagggaagggcagatggagaggaacggtgtgcagtgggcgtgagatgcagatccaccaggcttgggactggcaaagggagctgagaagagagttcccccaaagcacaaacaagtctgctgacactggtggggcccttacagtcacagaagtaaggactggatggtaagccaaaggtgctgatgcttggtcaaaaagtggagtacatctttgcatcttgtaacaatttgggctctacagctgaattggcaaagtaaggtttactacacaagcccctctttttcttctgatatccccactcaaatggaagcacactccccagcacatggggatcccttattaatctttactaaagaaccgtgaaccagcattttccagttatcaactggatatttaggcatgaatctggacatgtccatctgcttaagaaatctgcttaagaaatctgtaacagctacaggaaaagacacacccagggccagakattctacaaatgccagaagagtggatgtgatagagaattttttctcaagttttgggttagggcaccagttgcaattttaatccaggggaggatctgggctgctgctgtagggggcaagtacaccagggaggtgggtgtggacagaggcactgggcagctgctgggaagcgaggcacaagtctgtgcccctactcccagggctgcctggaggaagcagctctaactttcatcagcggggacaaaaatgaacttaaactaaaaaaattattggccgggcgcagtgctcacgccngtaatcccagcactttgggaggtcaaggcgtgagccntcgcgcccgaccagaagcattttcttttcaaagtgtgtgcacagagtgaggaggccagcctgggcaacatagtgagttgagacctgtctctacaaaaaaataattacgaaaattagccaggtgtgctggtgtgcacctgtagacgcagctacagactgaggcg

SEQ ID NO: 178 - DNA, 507 bp, Homo sapiens
  misc_feature (6)..(6): n equals a,t,g, or c
  misc_feature (43)..(43): n equals a,t,g, or c
  misc_feature (464)..(464): n equals a,t,g, or c
  misc_feature (483)..(483): n equals a,t,g, or c
agggcnactggaatacccaaacaaacagaaaatactcccatantaccatcgaggttttaaaaaaaactccccaaaatacaagtcttcataggaaaatgtcttttattgcgcgacatgaagcatccgttatttgcgtgctcaggaatagaagggcctccctttctcaggagtctgaagtctgtycagcctcgcaacctgagaaggggaggggggcacatcttgccggaaggccccttgggaggggcgtaactggggtcctggactttcttatacgagtcatagttgctgggcccctcggaaggaggctgcttcttcatctgctgctccttccgcctctgtycctggcgaaggagctcctgagtttccagcatgaccctggcgttgaagccatgtcctcccagtagccgttcctggagccttggtagctggagtacctggggtctctttggcatctggaagccttncccaggggagtagtctgcncccaagagtctgggagaccgagtg

SEQ ID NO: 179 - DNA, 1166 bp, Homo sapiens
actctggtgcacgwgtatgtcaatgaaagtgtttctaatgcaactgcgattgactcccagatagctagaagtttgcacatcccactcacccaggatatagctggtgacccaagctatgaaattagcaaacagagactcagtattgtcattggcgtggttgctggcattatgacggtgattctaatcatcttaattgtagtgatggcaaggtactgcaggtccaaaaataaaaatggctatgaagccggcaaaaaagatcacgaagacttttttacaccccaacagcatgacaaatctaaaaagcctaaaaaggacaagaaaaacaaaaaatctaagcagcctctctacagcagcattgtcactgtggaggcttctaagccaaatggacagaggtatgatagtgtcaatgagaagctgtcagacagcccaagcatggggcgatacaggtccgttaatggtgggcccggcagtcctgacctggcaaggcattacaaatctagttccccattgcctactgttcagcttcatccccagtcaccaactgcaggaaaaaaacaccaggccgtacaagatctaccaccagccaacacatttgtgggagcaggagacaacatttcaattggatcagatcactgctctgagtacagctgtcaaaccaataacaagtacagcaaacagatgcgtctacatccatacattactgtgtttggctgaattccactctaatatgatgctccaytatgcaccatactgtgatgacctttctactccgaaacctgctggagcctgcccttggccgtggggtgtcagccaatcactgcttgttccacttgttgtacattttatttttgagtctttttctttctcatatacagaaaaatagtatgaaaataaaataaatgtatgaaacagtattaatgcagaaatgtgctactaatggatgtctgagtcaccagaaattccattcttaaagaggcggttagcacctattagacgtaacagtgatgtcttttaaaaaatccaaaagcatattgcaacaataagtttgagactttgtgtgaacaaagggaaattcagcctcttatgtctttgtctttaatacattaaatactgattttgaataaaaatctaaattgatcaataaaaaaaaaaaaaaaaaactcgta

SEQ ID NO: 180 - DNA, 730 bp, Homo sapiens
  misc_feature (660)..(661): n equals a,t,g, or c
cagcagtgcatccagaccatctccacactgcacgatgatgagatcctgcccagcaaccccgctgacctcttccactggctgcccaagggagcacatgtgtgtgcttgtctacctggtgactgtgatgcactccatgcaggccggctacctggagaargcgcagaagtacwcggacaaggccctcatgcagctggrgaagctcaagatgctggactgcagccccatcctgtcatccttccaagtgatcctgctggagcacatcatcatgtgccgccttgtcacgggtcacaargccacggcgctgcaggagatctcccaggtctgccagctgtgccagcartccccccggstcttctccaaccatgcagcacagctgcacacattgctgggcctgtactgtgtctctgtcaactgcatggacaacgcggaacccagttcaccacggccctgcggctcaccaaccaccaggagctgtgggccttcatcgtcaccaacctggcgagtgtgtatatacgggaaggaaatagacaccaagaggtactctacagtctgctggagaggatcaacccggaccacagcttccctgtcagctcgactgcytcgacagccgcttctatgtgcgtggctcttctctcttcagggacgtcaacgaggcaagcnntctgcggaaacttgaaagtcaatgtgagactgaccggtaagctgtctcggtttggcaattttatggtgg

SEQ ID NO: 181 - DNA, 1243 bp, Homo sapiens
gttctcctgcctcagcctcccaagtagttgggattacgggcatgcaccaccatgcctggataattttttcttatttttagtagagacaggatttcatcatgttggccatgctggtttcgaactcctgaccacatgtggtccacccaccttggcctcaattatgtgcattttggtatatttacttgtatttcaacatcttgtgagtttgaaaaacctgaaaggccagaatgcttccttttatttctcaccatttgggcagcacctaagtggttttgtaaaatgcagcatctggtgctgtgggtctctctcaggccttgagggacacttccttcctccccactcgcctcctctccactagactttggttcctagagggcgtggggccgggtctgaggttcttgcctgccttccctcccattggtctttggttgctcatccctctaactgcaccccttcttggtccttcctccacagacttcagataatagataagtcattagcaaaccagaccgaatctttagggtgaagagctccccaaagccatctggtgaggtcattgtggggaccagggactgattatttgtcacctggatcacaaagatgggactgtctgctcaggctggtggtgacaggatcctgacccgtggtcctctcccgctccctctgctccaccaggacacatgtataggacactgtgctgtgtgcagtggagaaatctccctgggccaggggaaagttcagacagtgcctctagattgtgttttgcctcctccaatgtagagttgacatctggaccccagagcccagcagggytttctgtcagacatgctagggtggtagaaatgggccctccaggtccccctgcagtgcactgggcagagacctccggaaagccggcagcgggagcgcttcctgggcagcttcccccagcacagtgttcccaaaccagtccatccggaaaacagtctgtacagcaaatgctgtgtgagatcttaggcttttcactttttttgttttgttttgtttttgaaagaaagaaaaaaatacaattaacaagcctcttttgtaaatgggtttcctttctatgtataaaatcgtggtggtcccttgtttttacatgttcatgctgtgtaattttgagatgttactgagatatgttctgaacataatgtgcatttttttctgtacagatgaaatgggagaatttaataaagagtttgcaggttttaaaaaaaaaaaaaaa

SEQ ID NO: 182 - DNA, 394 bp, Homo sapiens
  misc_feature (365)..(365): n equals a,t,g, or c
  misc_feature (389)..(389): n equals a,t,g, or c
aacaggaggaaacagttagggaataatgagcctggaggtgtaaagtgccacaggatatatgctgtacacaatttatttggcacaacagataatcgctttaattgaattcaaaagtgcattgttcagcagcactgtggccrctcacgcctggggactgagactgtttggaaggtttcagcctgactcttcggtgcctctcctcccctccctgcctctcccggccctccgaagtcctctgggcctggagtcagacctcggctgggggcggggcaggggattcctgggggtctcttcctctgctgtcagtgtgccccttgccttccgtttcttccttccttttctcctggggatgggtctgttggcanctgggggatgaggatgtgagacantggcc

SEQ ID NO: 183 - DNA, 658 bp, Homo sapiens
  misc_feature (627)..(627): n equals a,t,g, or c
  misc_feature (634)..(635): n equals a,t,g, or c
catcattggcgcggggctgtcagcggccggacgcggtcctctacgcccgccactacaacatcccggtgatccatgccttccgccgggccgtggacgaccctggcctggtgttcaaccagctgcccaagatgctgtaccccgagtaccacaaggtgcaccagatgatgcgggagcagtccatcctgtcgcccagcccctatgagggttaccgcagcctccccaggcaccagctgctgtgcttcaaggaagactgccaggccgtgttccaggacctcgagggtgtcgagaaggtgtttggggtctccctggtgctggtcctcatcggctcccaccccgacctctccttcctgcctggggcaggggctgactttgcagtggatcctgaccagccgctgagcgccaagaggaaccccattgacgtggaccccttcacctaccagagcacccgccagragggcctgtacgccatggggccgytggccggggacaacttcgtgaggtttgtgcaggggggcgccttggctgtkgccagctccctgctaaggaaggaacagaaccacctacatcgccaaccctggtccagcctragaggaatacatcctctgatcgacctcaaatccggagttnccccttnncttgtcaaattgaccgcccaata

SEQ ID NO: 184 - DNA, 947 bp, Homo sapiens
  misc_feature (353)..(353): n equals a,t,g, or c
ggccacggggaaaaaccaacaaaaaagcacaaaaaagacaaaaaggaaaaaaagaaaaaaaagaaagaaaaagagaaagccgaccgggaggtacaggcagagcaaccatcctcttcgtcacccagacgcaagacagtaaaggaaaaggatgacactggccctaagaagcacagcagcaagaactcagagagagctcwgaagaaggagaaacccaagcacgagcacaagtcctcaagcaggagggaggcaagagaagaaaagaccaggattagggacagagggcggagctcagatgcacattctagctggtataatgggcgttctgaagggcgtagttatagaagtagaagtangagccgagataaatcccataggcataaaagggcccgacgctcccgggagcgggagtcttcgaatcccagtgaccgttggcgtcactgaagacttcagctgcacagtagatttggaaataattatgttttttaaatgcagtcaaattcagttgggtggttactatttttgtatctaaaacttctggggctggattcttttaatcccytgactatttagagtcattgggagggctgcagtttcaacagctagatatcctggatattgtttgcaccatccattgtccctgtaccagagtatgtatcctgaactttggttcataaatatggctcttgaacccatagaccccagttgaagatggaattttcaggaaagggaaaatactagataattctagaattctagtcttcgtgttagatgtttatagcccagcatcttgggacctttccagttactaggtttggacagcttgatgtgaacgaatgggataggatttttaaaatcagccagctccatgcccaaaccttcctgtttgcagaactttttaatgtcytttcyttttcattaaaacttttttgttcgatatgcctctttcc

SEQ ID NO: 185 - DNA, 486 bp, Homo sapiens
  misc_feature (134)..(134): n equals a,t,g, or c
ttgccctcagtgcaactcggtgtcaatgtctgagcctggtgtttatgccccmactgctgtccyaaagtcccytggcgargggargtggaggagctgccccgtgggtgtttggagattctgttttactctgcctnagagaggaaacggctttggggagggagggggaagcctttattctttactgttgtccctgttttcctttgggggaatttactcagttagcagcccctcctcaccattccccccaggaaggccatgtcccagttttctgtccacccctcctgttcctctgcactatgtctctgattttccctgccagggaagctaacccagagcacgcacctgtgctcatgagtgtttccgcaggataattcgttctgagcatgataccacagtgtggattgtctgtctgtaaggagatgccatctactaaccaatttgtattgtgtttccaataaattcctggaaatttaaaaaaaaaaaaaa

SEQ ID NO: 186 - DNA, 603 bp, Homo sapiens
  misc_feature (464)..(464): n equals a,t,g, or c
  misc_feature (560)..(560): n equals a,t,g, or c
  misc_feature (581)..(581): n equals a,t,g, or c
  misc_feature (591)..(591): n equals a,t,g, or c
gggtaacttggaatctcagctaacctctgagagttactataaagaaaccctaagtgtcccaacagtggagcacattattcaggaacttaaagatatattctcagaacagcacctcaaagctcttaaatgcttatctctggtaccctcagtcatgggacaactcaaattcaatacgtcggaggaacaccatgctgacatgtatagaagtgacttacccaatcctgacacgctgtcagctgagcttcattgttggagaatcaaakggaaacacagggggaaagatatagagcttccgtccaccatctwtgragccctccacctgcctgacatcaagttttttcctaatgtgtatgcattgctgaaggtcctgtgtattcttcctgtgatgaaggttgagaatgagcggtatgaaaatggacgaaagcgtcttaaagcatatttgaggaacactttgacagaccaangtcaagtaacttggctttgcttaacataaattttgatataaacacgacctggatttaatggtggcacatatattaactctatacaagtaagtcagngcttcctacagataatcccgnaactgtgggnaaatcctaaggg

SEQ ID NO: 187 - DNA, 3303 bp, Homo sapiens
  misc_feature (5)..(5): n equals a,t,g, or c
  misc_feature (18)..(18): n equals a,t,g, or c
  misc_feature (3107)..(3107): n equals a,t,g, or c
  misc_feature (3139)..(3139): n equals a,t,g, or c
  misc_feature (3166)..(3166): n equals a,t,g, or c
  misc_feature (3168)..(3168): n equals a,t,g, or c
  misc_feature (3178)..(3178): n equals a,t,g, or c
  misc_feature (3224)..(3224): n equals a,t,g, or c
  misc_feature (3239)..(3239): n equals a,t,g, or c
  misc_feature (3265)..(3265): n equals a,t,g, or c
  misc_feature (3267)..(3267): n equals a,t,g, or c
  misc_feature (3273)..(3273): n equals a,t,g, or c
ttccnggatcttaggganccgcttttcgggccatggccaaccgtattcgcggcattttccagtagcggggaatttttccagcatgcgacaggaggaagtaactctttgatttctttgatgcgtaaatcgtcgttctgataattcatgtctgttccagtgttgccatacttatcttagtgaatgcaatacttccaatctatatcttccgtcagaatgtgtaaacggggttttacactatgaacggattaatcctggaattagcaagaaaaacgccagattgtcgcgaaaaacgagatctctcctacaatttctaactgtaactcctttgtttgttaattatttcaagattctctgctgcgtttcataacctggctgaaatcttaaaccaatgccttatattcacctgcaaatgcactgttggaagaggttatccgacataacgaccataacaggagcatcctatgaaaatgacaaaactggccacattatttctgactgccactctaagccttgccagcggtgccgcactggctgccgatagcggagcgcaaactaataacggccaggcaaacgccgcagctgatgcgggccaggtagcccctgacgcccgtgaaaatgtcgcgccaaataacgtcgacaataacggggtaaataccggttctggcggcacaatgctgcattcggatggttcttcaatgaacaatgacggaatgaccaaagatgaagagcacaagaacaccatgtgcaaagatggtcgctgtccggatatcaataaaaaggtacaaaccggtgatggcatcaataatgatgtcgataccaaaaccgacggtaccacgcagtaaccctgcaaaatagccaataatgggagagcggagtctctcccttttaatttttcacttctaaaagcagtatgatgtcataaagttaagtgagaataattaagggatgactcgtcatggcgcactcacactcacacacgtcctcacacctgccagaagataataatgctcgtcgcttgttgtatgctttcggcgtgactgccgggtttatgctggtagaagtcgttggtggttttctttctggttctctggcattgctggccgatgcgggtcatatgttgaccgatactgccgccctgcttttcgccctactcgccgtgcaattttcacgtcgtcctcccaccattcgccacactttcggttggctaagactgaccacgctcgcggcgtttgtgaatgccatagccctcgtggtaattaccattttgattgtctgggaggcgatagaacgcttccgcacgccgcgtccggtcgagggcggcatgatgatggcaattgccgtggctgggttgctggcaaatatactttctttctggttacttcatcacggcagcgaagagaaaaacctcaacgtacgagcagcggcactgcatgtgctcggggacctgctgggttcggttggggctattattgccgcgttgattattatctggactggctggacacctgctgaccccattctctcgatactggtgtcgcttctggttctgcgtagcgcgtggcgactgttgaaagatagcgtgaatgaattacttgaaggtgcaccggtatcgctggatatcgctgaactgaagcgtcgtatgtgccgggaaatcccggaagtccgcaatgtgcaccatgtacatgtatggatggtaggcgagaagccggtgatgacgttgcatgtgcaggtgatcccgccacacgatcacgatgccttgttggatcagatccaacactacctgatggatcactatcagattgagcacgccaccattcagatggaatatcaaccttgtcatgggccagactgccacctgaatgaaggggtgtctggccattcacatcatcaccattaatgggacagcgcgcgtgagcctctttcacgtgcgctgttgatccacatccggctgccgttgagcgcaataaaggtcaggatgatgtactccagagacatggcgtaaacgccctgaagtgcaaaaataacgacgctaatcacgttaataatcacccacaacagccagttttccacatacttacgcgtcatcagaatcattgccacgatagataacaccatcatgcatgaatcccagaacgggaaagcgtccggttgcagttcaggcatcacaacctgtaatcctaatgcttgcatgatcatgactgccacgcgggtcaaaaatgcaaacaccggattgataaataccgtcattcagaccaatcgaaacaacgcaaaccgccaaccagctgagtggccttcggcaatggcaaccagcgaattttcaactccgcctcgttctgactggtttgtcgcgaccacgcataccaaccgtaaatattcgcggcaaagaaaaacacctgtaatagcaggctggcatacagctgaatctgaaagaaaataatgccaaacaaggtgacgttgatcaggccaaagaagtagttgctgatcttctccagactggcaaggccaatacacagcaacccggcgatcgtgcctaccgcttcgatccatgagagatcataaccgcctgcccctattggtatatgtaccaggatattctgcacactaaaaaaatccatctttcccccaaagcgtaacgttacgccttattattcgttatccacgtagtgtagccgcaaaatccagcatacgattgagcggcaccagcgccctctctcgcagcctttcatcaacatgaacctcgtgattgcttccttcctgttctaatgcctctggcgatggcctgaaggccattcatggccatccacggacaatgcgcgcagctgcggcaggttgcaccctcactgcggttggtgcttccagtaactctttatctggcaccgcctgctgcattttgtagaaaataccccgatcggttgccacaataagcctctgatgtggcaatgttttcgcagcagcgatcagttgactggtggaacgaccgcatccgccatatcgacaatagcttgtggtgattctggatgcaccagtatggcagcatccgggtattcttcttgcaagcgggttaacgcctggagtcttaaattcatcatgcacaataacaggcaccnggccagcattagaaatgttctccaacccgtcnggttttttggcaagttaaaggccccanangttttgttcnggtggcccagatggatttttttcaacccaaattattcaagatgganccattaagttcgaanggcaaagcttggaagttaaccacccnantttggnggggggctttttaccgcagcaaaaatggtt

SEQ ID NO: 188 - DNA, 844 bp, Homo sapiens
  misc_feature (711)..(711): n equals a,t,g, or c
  misc_feature (721)..(721): n equals a,t,g, or c
  misc_feature (733)..(733): n equals a,t,g, or c
  misc_feature (779)..(779): n equals a,t,g, or c
acggcaccggctccataggtgcggctctggggcctctgctggctgggctcatctcccccacgggctggaacaatgtcttctacatgctcatctctgccgacgtcctagcctgcttgctcctttgccggttagtatacaaagagatcttggcctggaagtgtcctgagcagaaggcagcgggtataaagaaatatgaggccccaattggaacagcagcatggagggtcccagttgggtccccaacgtgctccccatgggcaagacaatggaaacttccacaagcagggaaggcaaaccctctttattgaacattagccagcccagcccagaccccagggctgctaaggacacagagattctccatgggaaggggactgccaagcatgaggaaatagaagaktcaggggcctgagctctggaagctgcaagcaaaagggatgggactagggctgagttgtgtctccattttgataaggaaaggatatgctcagactcttgcttgttcagattccaagacagaaggcttcacaaggccaacgcctggaaaatgggcatctctccttcccatgttaagctttaacctctgtaatctgcctgtatctataggtgggcatctcactccaccaaaggagcccagcctctctttgtccctctatccatgcaacagtcttctctgtgcatttccccaagctgggccctcttctactctcncatttttaanggccttgatttngggaatacctacgctatgtgtctcagggcagactcgggcgaagcangggagctgccttcggtacataatttgaaggggcactccctcttggggcacatgcccggccctgag

SEQ ID NO: 189 - DNA, 629 bp, Homo sapiens
tcgacccacgcgtccgcccacgcgtccgaagaaaccctaagtgtcccaacagtggagcacattattcaggaacttaaagatatattctcagaacagcacctcaaagctcttaaatgcttatctctggtaccctcagtcatgggacaactcaaattcaatacgtcggaggaacaccatgctgacatgtatagaagtgacttacccaatcctgacacgctgtcagctgagcttcattgttggagaatcaaatggaaacacagggggaaagatatagagcttccgtccaccatctatgaagccctccacctgcctgacatcaagttttttcctaatgtgtatgcattgctgaaggtcctgtgtattcttcctgtgatgaaggttgagaatgagcggtatgaaaatggacgaaagcgtcttaaagcatatttgaggaacactttgactaataggagttttaagtatgttaaaaatctatactggacagttacaagaaattaccggagaaaagcttgtgagctcaccaaacaaggatttcagtgtagattttgtctttcttgaacttaaagaaacaaatgaccaagtttgaatggaaaagcctgctgttgttccacatctcgttgctgtttaca

SEQ ID NO: 190 - DNA, 484 bp, Homo sapiens
  misc_feature (441)..(441): n equals a,t,g, or c
  misc_feature (447)..(447): n equals a,t,g, or c
  misc_feature (474)..(474): n equals a,t,g, or c
gctccgccacccgccgccatgagtagctttggagctggcaaaaccaaagaagttatcttcagtgtggaggatggctccgtgaaaatgttcctgaggggccgccctgtgcccatgatgatcccagacgagctggcacccacctacagcctggacacacgctcggagctgccttcttgccggctcaagctggagtgggtctatggctaccgtggccgagactgccgggccaacctttatttgctgcccaccggggagatagtgtactttgtggcctccgtagccgtgctatacagcgtggaggagcagaggcagcgacactacctgggacacaacgatgacatcaaatgcttggccatccacccagatatggtcaccatcgccamgggamargtggcgggaaccaytaagggaggggaacccttgcggcccaagtgggatttngggaanattttcctttcacttaaaagtttgggnttggggtttt

SEQ ID NO: 191 - DNA, 493 bp, Homo sapiens
  misc_feature (14)..(14): n equals a,t,g, or c
  misc_feature (54)..(54): n equals a,t,g, or c
  misc_feature (431)..(431): n equals a,t,g, or c
  misc_feature (449)..(449): n equals a,t,g, or c
gtgagggactgganggagtcggagaaaaagctgacctaatgaaactgtgcaacngtcagcgcttgaggcttgaagagggagacaagctaaaagaggatatccagttgtttcatgatggcatttgcacctccaaaaaacacagatggtcccaaaatgcagacaaagatgagcacctggacacccctaaaccatcagctattgaatgaccgggtatttgaagaaagaagagccctgcttggcaaatggtttgacaaatggacagactctcaaagaagaagaatcctcacaggcctgttggagcgctgctcgctgtcccagcaaaagttctgctgtcgaaagctttcaagagaaaattcccagcagaagccctgggacttttacaacccaagctttccaagggtgttatcctttatacatctttttcttttccngggaaccctcgggagccntttgttcgttgtggcacaggttaaagggccaagggaagggggta

SEQ ID NO: 192 - DNA, 1427 bp, Homo sapiens
aattttttttttttttttttagtttgtttaaagactttatttgaaaccaatgtcacagcacgttagtcataaaaatcatcagaatcatcggtgttatggtttctggggcgtaaagcagcctcaatttctgagttactgtcatcagactcatcccagagggctggaaaataaaaccagacagttatttaacatttttgcattctggttaagagcttacaaaacagcacagcacggaaggactggttaagcagagtgtcagtctgcaaaatgcataacagggacaccacatgatgtacctgaccagacacacccaaatgcatgtcatactgcacaaattacacattgcaaagtgtgtcctctgcactgttatgggaaaacaatttgcagaatacttccttttcccttctgttgtgcccaactctttattataggatagggatttaaggtcagggttacatggaagcagggttccctggggtgttgtatcagcctgatgccgccccacctcagctgcccctccactttcatctcccattcttctttatgagagcagagaggagaagggaaagacgtggcagaggaataagcagagatggttaccctgagacaggactttggtccacatcatttacttgagaggtgatcccaggaaccatggggacagtgacacaaggaagacaggaagccaatgaagggtatgatgacgagtgggtgcctggcagtgagtggacaggcaaggctcagcctgctggggccccctgagagactgcagaactctccccagattgtcccagtgaagagcaaggragtggggttamtgatccaccaacttgcctctgttggttgaggkttgctctcaacccagggcatcaactccctggtactttgggctgccttgtgagggctgagcacgctcctgcagccagagaaagccctcaggcagagagacacagctgcttggtgcaggaagctgtaggcgcgtctgtgaattggagctgaggtgccctgcaggtggtctggcaaggtgtagtggagcggaccacgtctactacatcaacaatcccttaactctgctgacacctgcatggcaccacctgccagctctgtgctgacttctcatacacaaccccatctcatcctcgcaccagcctggcaaggtaagtattaatgtttccatttcactgtgcaaacaaacggacgctgaagggggttaagaaattggccacaatcacaatgccagtgagtggccaagctgggagtcccatccaagtcatctgactcaagcccatactctccatcacaaccactgggtacttgtctcccccacagtaggtagctgtccttctagaagagtgattcacagtggggtgcttgctaaaaaggcagattcctaggcctaggttctacagcagctctgaatcagtttc

SEQ ID NO: 193 - DNA, 841 bp, Homo sapiens
  misc_feature (773)..(773): n equals a,t,g, or c
  misc_feature (815)..(815): n equals a,t,g, or c
  misc_feature (830)..(830): n equals a,t,g, or c
cccacgcgtccgagcccccaagatggcggcacggcggaggagcggatggcagaggaaggaggcggcggccaaggcgacggcggttcctctttggcctccggctctacccagcgacagcctccaccgcccgcgccacagcacccgcagccggggtcccaggcgctcccagcccccgcgctggctccggaccagctgcctcaaaacaacacgcttgtggcgctgcccatcgtagccatcgagaacatcctcagctttatgtcctacgacgaaattagccagctccgcctggtttgtaaaagaatggacttggtctgccagagaatgttgaatcagggatttctgaaagtggagaggtaccataatctatgtcagaaacaagttaaagcacaactcccaaggagagagtcagaaaggagaaaccattcattagctcgtcatgcagacattcttgctgctgttgaaacaaggctgtcactattaaatatgactttcatgaaatatgtggattccaatctctgttgcttcatcccaggaaaggtgattgatgagattwatcgkgtgktgagatatgtcaattctaccagagcccctcaacgagctcatgaagtacttcaagaattaagggatatatcctctatggcaatggagtactttgatgaaaagattgttccaattttaaagaggaaattaccaggatcagatgtttctggaagactcatgggttctcctccagttccaggaccgtctggcagccctaacaacaatgcagctcnttcttccaagcaaaatccttcaagacaagaggtttaccaaantcccgcagccggttnaaaacaatggg

SEQ ID NO: 194 - DNA, 443 bp, Homo sapiens
  misc_feature (4)..(4): n equals a,t,g, or c
  misc_feature (355)..(355): n equals a,t,g, or c
  misc_feature (360)..(360): n equals a,t,g, or c
  misc_feature (434)..(434): n equals a,t,g, or c
  misc_feature (439)..(439): n equals a,t,g, or c
tgcnttgttgcatgcacttaatgaagttgatcctggtgactggcagaaattcgtgaagaagggactcaaatttcggtaccaggaccacacatttttaaagatgctcctcaccgccgtacagctcctgtacagcccagaaagctccgtgcgcacgaagctcatccagctcccggtggtctacgtgatgctcatgcagcactcgctgtttctgccgactctactgacgtctgacggagaggagagcccggacagccaagtaaaagaagcgctggtggacctgatgctgacggtggtggagatgtgcccctctgtctgtgagagcagccactttgcagtgcttctcgggggctatggngccantctcagcgtcctagatcagaagatttacttctgcttcgagcgtatgagcagaaaagtcagcctcatcaattcanggtgntgct

SEQ ID NO: 195 - DNA, 481 bp, Homo sapiens
  misc_feature (394)..(394): n equals a,t,g, or c
ccagcggggcagcgcggggtcgccatggctgwgytgcagcagctccgggtgcaggaggcggtggagtccatggtgaagagtctggaaagagagaacatccggaagatgcaggtgagcggcccgaggcccagcagaggcgctgccaacgtgaaagaccagaaaggcgaggacttccggcctccccgttggccaggtcatgcctgcttctcttgcgcccaacctcgcttcacacagcgcgggtttctacactgttcttctctgagccccgcaatgcctctgtgtgtttcggtcctgcttctctcacggagtatgcgtttcccagatagtgccccttgagtcattgattagtgggtcggctgccctctggtggaattgtattgctargttgctgacntctggaaccccatgggaagaggctccgggtttttcagaatttgggttcgtcagaccaacctaaccctcaaccattgggggggaaact

SEQ ID NO: 196 - DNA, 704 bp, Homo sapiens
  misc_feature (58)..(58): n equals a,t,g, or c
  misc_feature (694)..(694): n equals a,t,g, or c
  misc_feature (701)..(702): n equals a,t,g, or c
gcgtgacacgcacgcccagcctggtttattcataatctttgtcttcctaatgaaatgnggaaactgactctactctgtgatgccaagacagatgggagtttccttgtacaccactttctctccttctatctcaaagctaattgtaaagtctgctttgtggcactcatccagtccttcagccactacagtatcgtgggacagaagctgggtgtcagcctgaccatggcgcgggagctggggcagcttgtgttccttgagggactcaagtctgcagtggacgtcgtcttccaggctcaaaaggagccacaccccctgcagtttctcagggaggctaatgctgggaacttgaaaccattgtttgagtttgtacgggaggccctgaagccagtagacagtggagaggctcggtggacgtacccggtgctgttggtggacgacctcagtgtgytcctgagcctgggcatgggggcggtggctgtgctagacttcattcactactgcagagccaccgtgtgctgggaactaaagggaaacatggtggtccttgtgcacgacagtggaagatgcggaggatgaggagaatgacatcctgctgaatggcctcagtcatcagagccatctgatactgcgggctgaaggcctgggccactggtttctgcaaggaatttgcacggggaactgaggatcttttggngagaccnntg

SEQ ID NO: 197 - DNA, 767 bp, Homo sapiens
  misc_feature (270)..(270): n equals a,t,g, or c
  misc_feature (660)..(660): n equals a,t,g, or c
  misc_feature (691)..(691): n equals a,t,g, or c
  misc_feature (735)..(735): n equals a,t,g, or c
  misc_feature (737)..(737): n equals a,t,g, or c
gcgtccgcgctgctggcgacatcacggctccggaggtckygtgcggccctcaatgtcactgtgtccccggggcccgtggttgactacctggagggggagaatgccactctcctctgccacgtctcccataaaaggcggaaggacagcttgctggcgtgcgctggttctttgcacactcctycgactcccaggaggccttgatggtgaagatgaccaagctccgggtggtgcagtactatgggaatttcagccgcagcgccaaacgggganggctgcgcctgctggaggagcagcggggggcgctctacaggctctccgtcttgacactgcagccctccgatcaagggcattacgtctgcagagtccaggaaatcagcaggcacaggaacaagtggacggcctggtccaatggctcctcagccacggaaatgagagtcatttccctcaaagcttctgaagagtcatcctttgagaaaacaaaagagacttgggcattttttgaagatctctatgtgtatgctgtcctcgtgtgctgcgtggggatcctcacattctgctcttcatgctggtcatcgtctggcagtctgtgtttaacaagcggaaatccagagtgagacattatttggtgaaatgccctcagaacagctcaggggagagctnactagcgtgaccagcttggccccactacaknccaagaagggcaagaggcagaaggagaagcctgacattcctcgncnagtccctgccaaagctccgatagcccccac

SEQ ID NO: 198 - DNA, 1322 bp, Homo sapiens
agagagagagagagatcctcagagtggaaggagggggaagcagcaggacacattggcaagtcaagcaggaaggagggagatggaaaggggatatcagattggtttcccccggtggagccttaggttagtgcccagtgcagtgccagactgtctcctctgctcctcccacctcatccctaggaggacccaccagtggagcacatgcagcctcagtggagatgcttggtgtggggatctgggtgaagggggttgagtagcgactgcctgggagatggctgttagtaggtctgygcctggtgtctgcctcgccatcctggggtaaggggcagagagaaggacttgtcttatgtagggtgtggtcagccttggggccttacctacccagttccatgatatttcttgccctgttccccctggaatgtgcagtgggccagctgagagtacgccttgaggaggggggatgaggccttaatctgggaggcctatccccctatcccaggcatcccagacgaggactggctgaggctaggcgctctcatgatccacctgccccgggaggcagcggggaagacagagaaaagcaaacgcattcctcctcagctccacccacctggagacgaatgtagccagagaggaggaaggagggaaactgaagacaccgtggcccctcggcttctctctgctagagttgccgctcagaggcttcagctgacttccagcggtcccaagaacacctactaattcctctgcactccttcatggctgggacagttactggttcatatgcaagtaaagatgacaatttactcaacaaatatttatccgagcaccttttatgtaccaggcactgttgtaggtgcttaggatattctcatgtttctgagggattacagcctgggaggattccaccgatcttcacttctagcaggttttttaaacgtgacccttggctgtatttcccatcttcacagttcaagcaccccaaacctgccctttctcccctgcagactggcaggtgggattggctcccaggtcatttcctctctctctctttctcccaagcctttctccctccacaggaaacagatttttcagggccttccatgcctgccactttgtccgtctctttttttttttttaaagtaatattttttagaaatacatgtaaaataccaagaaataatgtctgcgcctctgccacctctctctcatctcttatttcataaagctggctctttatgttgctttacatgccttaatatatgttttatggagattatacatattatagatctatatatgtaatatatttgtttgggtgt

SEQ ID NO: 199 - DNA, 610 bp, Homo sapiens
  misc_feature (6)..(6): n equals a,t,g, or c
  misc_feature (12)..(12): n equals a,t,g, or c
  misc_feature (593)..(594): n equals a,t,g, or c
ggacgntggggnccgtcgccttcggagcgaaggtaccgacccggcagaagctcggagctcttggggtatcgaggaggcaggcccgcgggcgcacgggcgaccgggccgggagccggagcggcggaggagccggcagcagcggcgcggcgggctccaggcgaggcgggctccaggcgaggcggtcgacgctcctgaaaacttgcgcgcgcgctcgcgccactgcgcccggagcgatgaagatggtcgcgccctggactcggttctactccaacagctgctgcttgtgctgccatgtccgcaccggcaccatcctgctcggcgtctggtatctgatcatcaatgctgtggtactgttgattttattgagtgccctggctgatccggatcagtataacttttcaagttctgaactgggaggtgamtttgagttcatggatgatgccaaaattctttttaatctttcggcagacatgtgcattgccattgcgatttctcttctcatgatcctgatatgtgctaggctacttaaggagcgtacaagcaacgcgcacctgggatcatcccatcttctgttaccagatctttgaatttgnnctgaacatgttggttg

SEQ ID NO: 200 - DNA, 531 bp, Homo sapiens
  misc_feature (398)..(398): n equals a,t,g, or c
  misc_feature (460)..(460): n equals a,t,g, or c
aggacatccaggcgcacctggctcagggccatgtggccatcgtgctggtgaactcgggggtgctgcactgtgacctgtgctccagccctgtcaagtactgctgcttcacccccagtggccaccactgcttctgccgcactcctgactaccagggccacttcatcgtgctgcgtggctacaaccgggccactggctgcatcttctacaacaacccagcctatgccgamcgaatgtgcagcaccagcatcagtaactttgargaggccagaaccagctwtggcacagatgaggacatcctctttgtctacttggacagctgacagcaggagcctggtgcgcctaggccctcggaccccatccccaccccagccgggcccgctcaggacgccctggcccangcttggggctgctggggttggaatgtggaactgcagcctcagcccatctggcagaatcccangaactcggaaactggcacagctgctttgtctgccaatgccgtgtgttgtcatgtcactcacccaagcacct

SEQ ID NO: 201 - DNA, 576 bp, Homo sapiens
agactttggattaacactgtacccactcttagcaaaaggggacttctctaacaagctagcattgtgttaacctgtcattaacccagcattagagacaggtcactgggatgttcattctggctctcagctgctgttatttccccactctcacctgtgctagttcgctttctccagaagaggagctgaggtggtcttatcctcagataggacatgagaaattggaatttggcaagcaagggcttcagcatcctttagtttctaaagcaagatcccttcagagaagtctagcaggaagaagccaggagaatgtagaatggaaaagagctcttactccaaattttagagaagtttcagctctacttctcatcttttctctcctggtcttacttgaatgcatgttggtaatctgtatacattactatgactgtgtctatcacaagtcctacaaaataaaaatggacttaaaagtactctctgctgaggctgtaagttttgttttgtgagaaataggtaaagacattagcatttaatctactggaataagctggttgctgtggcttatacctgtagtccaga

SEQ ID NO: 202 - DNA, 1321 bp, Homo sapiens
ggcacgagggtgaggcccaggtagcgtttgcaatccagccccaccgtcacctcttttcttggacttctagttttcctcacccctattgccttcatccttttacctccgatcctgtggagggatgagctggagccttgtggcacaatttgtgaggggctctttatctccatggcattcaaactcctcattctgctcatagggacctgggcactttttttccgcaagcggagagctgacatgccacgggtgtttgtgtttcgtgcccttttgttggtcctcatctttctctttgtggtttcctattggcttttttacggggtccgcattttggactctcgggaccggaattaccaagggattgtgcaatatgcagtctcccttgtggatgccctcctcttcatccattacctggccatcgtcctgctggagctcaggcagctgcagcccatgttcacgctgcaggtggtcccgctccaccgatggcgagtcccgcttctacagcctgggacacctgagtatccagcgagcagcattggtggtcctagaaaattactacaaagatttcaccatctataacccaaacctcctaacagcctccaaattccgagcagccaagcatatggccgggctgaaagtctacaatgtagatggccccagtaacaatgccactggccagtcccgggccatgattgctgcagctgctcggcgcagggactcaagccacaacgagttgtattatgaagaggccgaacatgaacggcgagtaaagaagcggaaagcaaggctggtggttgcagtggaagaggccttcatccacattcagcgtctccaggctgaggagcagcagaaagccccaggggaggtgatggaccctagggaggccgcccaggccattttcccctccatggccagggctctccagaagtacctgcgcatcacccggcagcagaactaccacagcatggagagcatcctgcagcacctggccttctgcatcaccaacggcatgacccccaaggccttcctagaacggtacctcagtgcgggccccaccctgcaatatgacaaggaccgctggctctctacacagtggaggcttgtcagtgatgaggctttgactaatggattacgggatggaattgtgttcgtccttaagtgcttggacttcagcctcgtagtcaatgtgaagaaaattccattcatcatactctctgaagagttcatagaccccaaatctcacaaatttgtccttcgcttacagtctgagacatccgtttaaaagttctatatttgtggctttattaaaaaaaaaaaaaaaaaa

SEQ ID NO: 203 - DNA, 904 bp, Homo sapiens
  misc_feature (836)..(836): n equals a,t,g, or c
  misc_feature (858)..(858): n equals a,t,g, or c
cccacgcgtccgcccacgcgtccgggccctagcagggcaggcgggaggtgagcgcggccatcccgctcccggagttccggatcctggagtccgtagttcgtggtccttcgccggtgtccccggagcccagcggctgtggatggcagaagcccagagtgggactggtcagctgcaggagcagaagaaaggtcttctgatagccgtcagcgtctccgttgataaaatcatctcgcatttcggggccgcccggaacttggtgcagaaggcccagttgggtgatagccggctgagcccggatgtggggcacctggtgctgaccaccctctgcccggccctccacgccctggtggcggacgggctgaagcctttccggaaggacctcatcaccgggcagcgcaggagcagcccctggagcgtggtggaggcgtcggtgaagccaggctccagcacccgctcccttggaaccctgtatagccaggtcagccgtctagccccgctgagcagcagccgtagccgcttccatgcctttatcctgggcctcctcaacaccaagcagttggagctgtggttttccagtctccaggaagatgcaggcctgctctccctcctgtacctgccaacaggatttttctccctggcccgcggtggttgtccctccctgtccacagagctgctgctcctgctgcagccattgtcggtgctcactttccacctggacctgctctttgagcaccaccaccacctgcccctgggcccacctcaggcccctgcccctccaggcccacctccagctctgcagcagactatgcaagccatgstgcamtttgggggccggntkggcmagagccttyggggganttccaaggaagttgyttcagaccctytgattttcaaaacttcccat

SEQ ID NO: 204 - DNA, 1151 bp, Homo sapiens
  misc_feature (15)..(15): n equals a,t,g, or c
  misc_feature (1092)..(1092): n equals a,t,g, or c
  misc_feature (1113)..(1113): n equals a,t,g, or c
  misc_feature (1136)..(1136): n equals a,t,g, or c
  misc_feature (1142)..(1142): n equals a,t,g, or c
gagggaatgtggaanccatttttgaccaccagaacccttgtgccaacatgcagaggaaaggcgtttttcagtaccatcccgatcggccatgctgtcaaagaagrgccaggcagaatcgtccttcccatamttcacaaaagcaacatagtggcttgtttytatgcagagaacagcaaataactccatattctggcaagggatgcagccgtgtctccagtcccagtcgggtaagtctttgggaagtgacactgggttatatttatgattcagcctcttcggatgaaggtggacttgagtgttgcaggttttacaaaactgcttgatttttccagctgagatgtccggatcrtcgtagcattctctacactcatacattgcaagccctccacatatccggcactgtctgggagtgtcttcaagtaaatctgttatatttaattccagagaaggaaaaatttttttaaatagtttaaagtcttttccaaatcgaggcatctgaataatcagacatgatggtgcctctgcaaatttcaggttactgttgataaaagaccattctaacaactgctgaattgtgggaacgccaactttctcatttttttccataaaaatttgatagaagtaacaatcttgtaccttttgacctgctgatcttatttttagcaaaggttctacccttaaaatatgatgaaacagaatattcaagaattcctcaggatctttttcttcagaggtaaatcctgatgcagcctccaccttttcaagtattttcctcagtttcataatttttgtggcacacacatatccatatattctcagaggattaacaatttctgtcctcagtagctcttgggtttcactataatattctacatcgttcttttctttgggtctaagtaacacagtgtccagaacagaactaaaagcaaataagcagaataaggttgagtctaagtaacaagaattgtaatgaccctggatgcctttcttcttccccaatcattatctccaagccttctttttcccatttttgggtgggagtattttcctccactacttcacttaagtaagcctcccaaatggctaaagagntacagcggctccaatctggantggaaccgggctgcaatgatgcnaccctngggtcaggc

SEQ ID NO: 205 - DNA, 1013 bp, Homo sapiens
  misc_feature (5)..(5): n equals a,t,g, or c
  misc_feature (9)..(9): n equals a,t,g, or c
  misc_feature (307)..(307): n equals a,t,g, or c
  misc_feature (948)..(948): n equals a,t,g, or c
  misc_feature (984)..(984): n equals a,t,g, or c
  misc_feature (1004)..(1004): n equals a,t,g, or c
ggcanaggnactcacaaccacaatccaaatcaaaaaatacatggtacattgatgaagttgcagaagaccctgcaaaatctcttacagagatatctacagactttgaccgttcttcaccaccactccagcctcctcctgtgaactcactgaccaccgagaacagattccactctttaccattcagtctcaccaagatgcccaataccaatggaagtattggccacagtccactttctctgtcagcccagtctgtaatggaagagctaaacactgcacccgtccaagagagtccacccttggccatgcntcctgggaactcacatggtctagaagtgggctcattggctgaagttaaggagaaccctcctttctatggggtaatccgttggatcggtcagccaccaggactgaatgaagtgctcgctggactggaactggaagatgagtgtgcaggctgtacggatggaaccttcagaggcactcggtatttcacctgtgccctgaagaargcgctgtttgtgaaactgaagagctgcaggcctgactctaggtttgcatcattgcagccggtttccaatcagattgagcgctgtaactctttagcatttggaggctacttaagtgaagtagtagaagaaaatactccaccaaaaatggaaaaagaaggcttggagataatgattgggaagaagaaaggcatccagggtcattacaattcttgttacttagactcaaccttattctgcttatttscttttagttctgttctrgacactgtgttacttagacccaaagaaaagaacgatgtagaatattatagtgaaacccaagagctactgaggacagaaattgttaatcctctgagaattaatkgatactgggaacaagacaggtcaaacccgaaactctaaggcatgttaacacctccttcctagaagagaggaagantaaacattctttgggatcctattgttcagccagttnaagatcatagttaatcacanttcctaacc

SEQ ID NO: 206 - DNA, 557 bp, Homo sapiens
  misc_feature (512)..(512): n equals a,t,g, or c
  misc_feature (528)..(528): n equals a,t,g, or c
  misc_feature (534)..(534): n equals a,t,g, or c
ggcagagtttttactcaacctctttgatgacacagcaaaaacagacgtgactatgctcttgtatatagcagacaatctagcctgttttccataccagacacaggaagagccgttgtttataatgcatcatatagacattacactctcagtttctggtagtaacctactgcagtcattcaaggagtctatggtaaaggacaaaaggaaagagagaaaatcatcacctagtaaggaaaatgagtcaagcgacagtgaagaagaagtttccaggcctcggaagtcacggaaacgtgtagattcagattcagattcagattcagaagacgrtataaattcagtgatgaaatgtttgccagaaaattcagctcctttaatcgaatttgcaaatgtgtcccagggtattttattacttctcatgttaaaacaacatttgaagaatctttgtggattttctgatagtaaaattcagaagtactctccatctgaatctgcaaaagtatatgataaagcgntaaccgaaaaccaggngtccantttcatcccaaaccaaacactgg

SEQ ID NO: 207 - DNA, 729 bp, Homo sapiens
  misc_feature (13)..(13): n equals a,t,g, or c
  misc_feature (42)..(42): n equals a,t,g, or c
  misc_feature (48)..(48): n equals a,t,g, or c
  misc_feature (727)..(727): n equals a,t,g, or c
  misc_feature (729)..(729): n equals a,t,g, or c
aagagatttcagntaacaactggagaaaggatcagagccaancaagantcccaagttaagaaggcaacttaggagacttttgtaatcytctgaatgagagttgacaatagcccaaacgagggtactggcagtaggggaagtagagaagtggaaagatttgcgagytytctgcaaggtatacctggcaggatttgggaatgactgtgggaggcaggggcaggaggtattaagaatgatgccagaacaccagtaggatgggggttccatttaccaagataggcaatatgggagaaggaacatgtctggaagggaacataactcatttttgctgagttttggggatctgggatatataaactgagatatccacacatctgaagctcaagagaagagrtcggattggcagttataaatctgagacttgctggcatataaatggttatcatagctgtggaagtagatgaggtcattcggcaagagtgcgttcaacaacttcaagagaagcagcccagtgacagaaccatgagaattatcagcagagacaggtggcggcaaggctgcaaaggtccacagaaaggtaggaccagagaggaagaaagcaaacgaggcaaatgtagagaagcacatcagcccactgctctctcttcccactcttacccaccagtccatcttgccaccacttctttcttggatgctgctccagcctcctaatcgctccctatatccntn

SEQ ID NO: 208 - DNA, 435 bp, Homo sapiens
gaccacttgggggactgattgcagggttgtgggaagtcctgagtggaagttggttacggggtaggagaggggtcctgagtggaaggaagctggtcagagtgggacggatggactgaatggaaattggaatagggagtgaggcggagttttacgcaagggtaccgtatccagttttgggctggaggatagttgcaagtattgtttggtcagtgctatttctacccatctgcaccacagtatttataattttcagcaggattgattwgtttcatcctatacagtggctgtctgattctttcagtgacctgtatagttcctatgtaatcttttacttcctgctgctgtcagtggtaataataataataagtattttcaatgtggagttctatgcagttgtgccttctattycttgctycagactarctctgataggga

SEQ ID NO: 209 - DNA, 2808 bp, Homo sapiens
  misc_feature (1164)..(1164): n equals a,t,g, or c
gatgatggtggaaaacatcatgaacaaggaagccttcatgaaccaggagattacgaaagcctttcacgtaaggaaagccaatcggataaaagagtgtctcagcaagggaacgttctcggacgtgacatttaaattggacgatggagccatcagtgcccacaagccgctgctgatctgtagctgtgagtggatggcagccatgttcggggggtcatttgtggaaagtgccaacagtgaggtgtatctcccgaacataaacaagatatcaatgcaagcagtattggattatctctataccaagcagttgtctcctaacttggatctggacccgctggaattaattgccttggcaaacagattttgcctgccacacttggttgcacttgcagaacagcatgccgttcaggagttgaccaaagccgccacgagtggcgtgggcattgacggagaagtgctctcttacttggaattggctcagtttcacaatgcccaccagttggccgcctggtgtttgcaccacatctgcaccaactacaacagtgtatgctccaagttccgtaaggaaatcaaatcaaaatctgcagacaaccaggaatacttcgagcggcaccgctggccccctgtgtggtacctgaaggaagaagatcactaccagcgtgtgaaaagggaacgagagaaggaagatattgcactaaataagcatcgctcaagacgaaagtggtgcttctggaattcatctccagcagtggcctgaagaggaagagaaaaaaaaacaaaaaacagaaaccaatcggyaatctgatccaccacttttcaaagcactactataaaattcgtcttgktagagatacgacatagttcargtttcgggcactgatcttcctccacttttgtgcatttatctttgttaggatcaaagcacaagctcaccatcaatgagcctggacaaaaagggaagctgactctcactgcattccttaaactgatatgtatattttttttgttaggaggcttaataaactttagtctgttattttgtttctttttatacaaagaaaaaaaattcagctttcatgtttctgattccagattggaaaatatttttatatggtctgttgtattttgttgaaatgaaaatactgtgtattactttattttacaggnccacaattgattatgaagtcaccctgtgattctctttgscccacatgaccaccgagcattattacgtaattagagggttatccttttgytgtgaaaggaaggaggggactgaaatctcccaaagtgcaaattggagagtgtttaatctttgttctgttgaataacatcggtgtaattacaaagtcaactccaagaatgtgtatttacaatatttgccatgttaagtgctggtaattatatggttatatgtgccatgtaaaatatagtgatatcaaatattctgttgtttccaatgtctagtttcaagaggacaatctttataatcattagaagggcttattaaatcccagcattatccagggcaaactcactggtggacctgaatacataagataccattagtgcgctggtgttcggattgctgtattagggtttacatctctcagtattccttgaacttgccatgcttctgcatgcagattcttcactgacttgaattgagatgggcaagggaaaaggtccctggactccctcctgccatctacaggcttgtcacatctcaccaccagaaacaggcttcctcaggcttctcacctgtggccaacttcactttgtaagacccatatttttaactcttcccrgggaaaattcatgttgctgcagaagtaggstaaggcagaccacccacttctgctgaaatgcattgggagcctgtgaaagcacaaagctggaggctgggcgcctgckttctcctacacggaaaggaatctaattccaagagtctaggaaatggtgctattgtgagttcgttctgactctttctcattctgagttttcagtgttaaactaggaagtgtgacagcaggggagctttcgtgaggcagtcagtcattgcttctctgtaaattaaaatgttacagcacacacatacacacacagagagcatttcaaggccacagctccacacctgccatgggatgttaatgtggcagggggtggggctcattctgttgggaggtcaaattaccaatgccaaggactgttgattttgtttttatttttattttttcttctagcttttcagaagatggaaatgagacagttgagtccaaaccccaatgctgacagccatatgcatttgaaaatctatctagattacagatgggcatttattactggcagtggaaacaccagatagaagatcttaggagaggcccagaaatgcatcaccttgtcatgacaaaagagaaggcagtagagtagggatagttacaaatgcatccatcttaattattttcaataggcttgtaaatcttatcgatggaaggagaaaggagacaagatgtggaagaattgacatgtatcccaccataaaatggtagaagatgagttttcaatgagtagtcatagttgaaattttacaaccaaagctcccatttgattgtaatcttgccaaaatataatggatgtataaatgaacttggggtataagcaataatatccactagtgttgttatcagctactgtaaccaagtggctggttcatttggttgatgctgattatggcctttaaccatggtggtttgttgtgtgttttttatttcacaaaaagccaataaaattgtttagctataaaaaaaaaaa

SEQ ID NO: 210 - DNA, 842 bp, Homo sapiens
  misc_feature (824)..(824): n equals a,t,g, or c
  misc_feature (827)..(827): n equals a,t,g, or c
aaatttgccaagccaagagttaccccaggaagattctctcttacatggccaattttcacaagcagtcactcccctagcccatcatcacacagattattcawagcccaccgatatctcatggagagacacactttctcagaagtttggatcctcagatcacytggagaaactatttaagatggatgaagcaagtgcccagctccttgcttataaggaaaaaggscattctcagagttcacaattttcctctgatcaagaaatagctcatctgctgcctgaaaatgtgagtgcgctcccagctacggtggcagttgcttctccacataccacctcggctactccaaagcccgccacccttctacccaccaatgcttcagtgacaccttctgggayttcccagccacagctggccaccacagctccacctgtaaccaytgtcacttytcagcytcccacgaccctcatttctacagtttttacacggggctgcggctacactccaagcaatggctacaacagagttctgactaccacctttcaggcacctacggactcgaaaggcagcttagaaaccataccgtttacagaaatctccaacytaactttgaacacagggaatgtgtataaccctactgcactttctatgtcaaatgtggagtcttccactatgaataaaactgcttcctgggaaggtagggaggccagtccaggcagttcctcccagggcagtgttccagaaaatcagtacggccttccatttgaaaaatggcttcttatcgggtccctgctctttggtgtcctgttcctggtgataggtctcgtgnctnctgggtaggattcct

SEQ ID NO: 211 - DNA, 1612 bp, Homo sapiens
  misc_feature (1612)..(1612): n equals a,t,g, or c
gaggggaacctcaggcttcagagagccgaaaagttgggaggcgtaaccacttacaggccggaagtgtccggggtggacgcattcgggtagccgaagaagtcccaggattgccgaagaagtcccaggatttccgaagcgagccgaagcatcgcgacagttttcagagacagctgatcggttggagctsttgcgccgagcagtcatggcggcggccagagctactacgccggccgatggcgaggagcccgccccggaggctgaggctctggccgcagcccgggagcggagcagccgcttcttgagcggcctggagctggtgaagcagggtgccgaggcgcgcgtgttccgtggccgcttccagggccgcgcggcggtgatcaagcaccgcttccccaagggctaccggcacccggcgctggaggcgcggcttggcagacggcggacggtgcaggaggcccgggcgctcctccgctgtcgccgcgctggaatatctgccccagttgtcttttttgtggactatgcttccaactgcttatatatggaagaaattgaaggctcagtgactgttcgagattatattcagtccactatggagactgaaaaaactccccagggtctctccaacttagccaagacaattgggcaggttttggctcgaatgcacgatgaagacctcattcatggtgatctcaccacctccaacatgctcctgaaaccccccctggaacagctgaacattgtgctcatagactttgggctgagtttcatttcagcacttccagaggataagggagtagacctctatgtcctggagaaggccttcctcagtacccatcccaacactgaaactgtgtttgaagcctttctgaagagctactccacctcctccaaaaaggccaggccagtgctaaaaaaattagatgaagtgcgcctgagaggaagaaagaggtccatggttgggtagaagaatgtgtatgacaaccacacacagtgaagctcttttttcaaagtaaatttgaagaaatgctacaagtatgagatgagatctaagtaaaggtgttaagatatttttaagtggtatgtgatcgtgtcattatcatctgcacttcactcaagagcttactatgtgtctaagtcatgttctaggcagaattgggtatttaaagtaaattgaggacaggcttctcccagattgtgacatgtatatctcagatacatgggtgtggcattgaaccacataatgagaacattattctctttttagtccttgtgagacaaggatgaagtctcagttgctgatactcgctgagcttactggccctcgtaacccagtgtttttttttgttgttgttgtgtacatgttatatttattttgaaaccagtttaatgggatacaaccagcattttaaaaaatgaaatagaatacagcatggaaaatatcagtgtattgttttatgaaactttcatgtgtatatatagaccaaggatatgtgctgagttttgatgtcaaatatatttctctttcagggtcatgatcaaaaaatgaaaagtctgcttaactccaattyctctttaaaaaagcagacttacagctttcaggcaactgaaatcn

SEQ ID NO: 212 - DNA, 540 bp, Homo sapiens
  misc_feature (516)..(516): n equals a,t,g, or c
ggcttgggaaaacagaatggccctagacatgatattagccaaaaaaggtggagtttgtgttatgatcaaaactcaatgttgtaccttcatcccaaacaatactgcccctagtgggagcataacaagggccttacaaggccttactgctttatccaatgaattagctaaaaattctggagtcaatgaccctttttcaggatggctagaaaggtggtttggtaaatggaaaggaatcatagcctcaattcttacttctcttgcagccgtaataggtgtagtcattctttttgggtgttgtgtcacaccatgtatccgtgggctagtacagaggcttatagaaacagtacttactaaaacctcccttagctctcctccaccttattcagataagcttttccttttagaggatcaagtcgaacagcaaagccaagacttgttaaaaaggtttgaagaggaaggaccataacaattgaaagggggaaattataagatacagtaaattcctcttcaaagatntagcctgttgacttccttattctt

SEQ ID NO: 213 - DNA, 803 bp, Homo sapiens
  misc_feature (90)..(90): n equals a,t,g, or c
ggcctctggaatcacccgggtcgctgttcctgaggtggtcaaggtggacagggggcggtggtgatggcgcagtttgacactgaataccancgcctagaggcctcctatagtgattcacccccaggggaggaggacctgttggtgcacgtcgccgaggggagcaagtcaccttggcaccatattgaaaaccttgacctcttcttctctcgagtttataatctgcaccagaagaatggcttcacatgtatgctcatcggggagatctttgctaccttcctggtcagctgcgtggactatgacatcctatttgccaacaagatggtgaaccacagtcttcaccctactgaacccgtcaaggtcactctgccagacgcctttttgcctgctcaagtctgtagtgccaggattcaggaaaatggctcccttatcaccatcctggtcattgctggtgtcttstgatccaccggcttatcaagttcatctataacatttgctgctactgggagatccactccttytacctgcacgctctggcatccctatgtctgcccttccgtattgcacgtggcaagaagtgcaggcccggatcgtgcagacgcagaaggagcaccagatctgcatccacaaacgtgagctgacagaactgggacatctaccaccgcatcctccgtttccagaactacatggtggcactggttaacaaatccctcctgcctctgcgsttccgcctgcctggcctcggggaagctgtcttcttcamccgtggtctcaagtacaactttgagctgatcctcttctgggga

SEQ ID NO: 214 - DNA, 460 bp, Homo sapiens
ggcacgagcctgagcgggccggggccatgagcgccgcccggccccagttcagcattgatgatgccttcgagctgtccctggaggacgggggccctgggcccgagtccagcggggtcgcgcgctttgggccgctgcacttcgagcgtcgggcccggttcgaggtggctgacgaggacaagcagtcccggctgcgctaccagaacctggagaacgatgaggatggagcccaggcctctccggagccggatgggggagtcggcaccagctcccagtggtccttcagcaccatcagcagcagcacccagcgctcctacaacamctgctgcagctggacccaacamcctttgatccagaagaaccgccgagtggtgctggcctccttcctgctcctgctgctggggytggtgctgatctggtcggcgttggacttgaagcgaccccctctccaggtgtctccagg

SEQ ID NO: 215 - DNA, 1659 bp, Homo sapiens
ggcagagccgtgctggggactggacgtccgctggctgctgcgcacgcaaaacctctcgcttccctgtaccaggtcctcgcggaggaaggggagggacgaggcgcggcttttcctgtgccgcctgcccggttcgacctgcgcggcctgcggcttcttgggaactctagggccgcggccgggcctggctctgccggcggcctgttgggagctggatcggagcggtttggaacgacaagcccgacaaagagacttttaaaaaaccatggcagatgtggacccagatacattgctggaatggctacagatgggacacggagatgaaaggacatgcaactaatagcccttgaacagctatgcatgctgcttttgatgtctgacaacgtggatcgttgttttgaaacatgtcctcctcgcactttcttaccagccctttgcaaaatttttcttgatgaaagtgctccagacaatgtattagaggtgacagcccgtgccataacatactacctggatgtatctgcggaatgtacccgaaggattgttggggtagatggagctataaaagcactttgtaatcgtttggttgtagttgaacttaacaacaggactagcagagacttagctgaacagtgtgtaaaggtattagaactgatatgtactcgtgagtcaggagcagtctttgaggctggtggtttgaattgtgtgcttaccttcattcgtgacagtggacatctagttcataaagacaccttgcactctgctatggctgtggtatcaagactctgtggcaaaatggagcctcaagattcttctttagaaatttgtgtagaatctctgtctagtttatgaaagcatgaagatcatcaggtttcagatggagctctgcgatgctttgcatcactggctgaccgatttacccgtcgtggtgttgacccagctccattagccaagcatggattaactgaggagctgttatctcgaatggctgctgctggtggtactgtttcaggaccatcatcagcatgcaaaccagttcgcagcaccacaggagctccatccaccactgcagattccaaattgagtaatcaggtgtcaacaattgtaagtctgctctcaacactttgcagaggctctccggtagtaacacatgatcttctgaggtcggagcttccagattcaattgaaagtgcattgcagggtgatgaaagatgtgtgcttgatactatgcgtttggttgactttctcttggtgctattatttgaaggacgaaaagctttgccaaagtctagtgctggatctacaggcagaatcccaggactccggagattagatagttctggggagcgctcacatcggcagcttatagattgtattcgaagtaaagataccgatgcacttatagatgcaattgacacaggagcctttgaagtaaattttatggatgatgtaggtcagactctattaaactgggcctctgcttttggaactcaggaaatggtagaatttctttgtgagagaggtgcagatgttaatagaggtcaaagtcatcatcattacattatgctgcatgttttggaagacctcaagtagcaaagactctgttacggcatggtgcaaatccagatctgagagatgaagatgggaaaactccattagataaag

SEQ ID NO: 216 - DNA, 1147 bp, Homo sapiens
ggcacgagctaggagcctcctaatgcagtcttctgcacagtcctggggactgactgactgaatcacacctctggggctgggggctgctgacatgtgtgcctttccttggctgcttcttctcctgctgctccaggagggcagccaaaggagactctggagatggtgtggatccgaggaagtggttgcggtccttcaggagtccatcagcctccccctggaaataccaccagatgaagaggttgagaacatcatctggtcctctcacaaaagtcttgccactgtggtgccagggaaagagggacatccagctaccatcatggtgaccaatccacactaccagggccaagtgagcttcctggaccccagctattccctgcatatcagcaatctgagctgggaggattcagggcttttaccaagctcaagtcaacctgagaacatcccagatctctaccatgcagcagtacaatctatgtgtctaccgatggctgtcagagccccagatcactgtgaactttgagagttctggggaaggtgcctgcagtatgtccctggtgtgctctgtggagaaggcaggcatggatatgacctacagctggctctcccggggggatagcacttatacattccatgaaggccctgtcctcagcacatcctggaggccgggggacagtgccctctcctacacctgcagagccaacaaccccatcagcaacgtcagttcttgccccatccctgatgggcccttctatgcagatcctaactatgcttctgagaagccttcaacagccttctgcctcctggccaagggattgctcatcttcttgctcttggtaattctggccatgggactctgggtcatccgagtccagaaaagacacaaaatgccaaggatgaagaaactcatgagaaacagaatgaaattgaggaaggaggcaaagcctggctccagccctgcctgactgctccttgggaaccccagtcctgagcttggtttcttcccagcacccagagaatccttcctcagctctcttctttccaggggaaggaggtgctcaggggtgggtatccagagagccatacttctgagggaagactggctggcaataaagtcaaattaagtgaccaccaaaaaaaaaaaaaaaaa

SEQ ID NO: 217 - DNA, 319 bp, Homo sapiens
  misc_feature (312)..(312): n equals a,t,g, or c
agatccccatgcctcgagccctggatctccaagctcagctgctggattctggatgtcaacaaacctcaccactggatcctgacaaccacaatgcctggatcctggggcccccatcactggatcccagatcccctcactccacccactggattcctgcattggtttttggttttttgtttttttttaacctckacactgggtctcaakatccttctgctgamtgccaagatccctgcatttcaagcactacgccttccaaccccaaggcactggaatccagatttccaaagcctttaccaacaagattctggntcctaaa

SEQ ID NO: 218 - DNA, 500 bp, Homo sapiens
  misc_feature (213)..(213): n equals a,t,g, or c
  misc_feature (409)..(409): n equals a,t,g, or c
  misc_feature (433)..(433): n equals a,t,g, or c
ggaaggtgcccagctgaactttgattatttcctatgcagcataaagttctgctcctcgggagtaaatctgcaaatcagagccttcctcaggaagatagctctacagatgacccaggggaacaagtacaagccgtgcgttccagcacccaggatttcttgyttcatgtcattttaaagaacacatggtttcgagtatactatggagtcctaggnttattcccagccttggcctcagttgtcaagctagctgttcctttttacttgggggattcagccccttcccattttacccaccaactcttaatcatctcccctgctctactcaaccatctttttctggacactcttcctgcttcctgcataacctagtttagagcartccccttatgctagtctctaaagcttctgntcttatcacaattttaatcaaagnatactctctctctttttttttttcttcctgagatggagcctcactctgttgccagggctaaaatgca

SEQ ID NO: 219 - DNA, 1391 bp, Homo sapiens
  misc_feature (721)..(721): n equals a,t,g, or c
  misc_feature (1384)..(1384): n equals a,t,g, or c
attccagaaaagagtactggaatacttggctgtcagacagctcaaaaataacctgaagggcccaatcctatgctttgttggccctcctggagttggtaaaacaagtgtgggaagatcagtggccaagactctaggtcgagagttccacaggattgcacttggaggagtatgtgatcagtctgacattcgaggacacaggcgcacctatgttggcagcatgcctggtcgcatcatcaacggcttgaagactgtgggagtgaacaacccagtgttcctattagatgaggttgacaaactgggaaaaagtctacagggtgatccagcagcagctctgcttgaggtgttggatcctgaacaaaaccataacttcacagatcattatctaaatgtggcctttgacctttctcaagttctttttatagctactgccaacaccactgctaccattccagctgccttgttggacagaatggagatcattcaggttccaggttatacacaggaggagaagatagagattgcccataggcacttgatccccaagcagctggaacaacatgggctgactccacagcagattcagataccccaggtcaccactcttgacatcatcaccaggtataccagagaggcaggggttcgttctctggatagaaaacttggggccatttgccgagctgtggccgtgaaggtggcagaaggacagcataaggaagccaanttggaccgttctgatgtgactgagagagaaggttgcagagaacacatcttagaagatgaaaaacctgaatctakcagtgacactactgacttggctctaccacctgaaatgccgattttgattgatttccatgctctgaaagacatccttgggcccccgatgtatgaaatggaggtatctcagcgtttgagtcagccaggagtagcaataggtttggcttggactcccttaggtggagaaatcatgttcgtggaggcgagtcgaatggatggcgagggccagttaactctgaccggccagctcggggacgtgatgaaggagtccgcccacctcgctatcagctggctccgcagcaacgcaaagaagtaccagctgaccaatgcttttggaagttttgatcttcttgacaacacagacatccatctgcacttcccagctggagctgtcacaaaagatggaccatctgctggagttaccatagtaacctgtctcgcctcactttttagtgggcggctggtacgttcagatgtagccatgactggagaaattacactgagaggtcttgttcttccagtgggtggaattaaagacaaagtgctggcggcacacagagcgggactgaagcaagtcattattcctcggagaaatgaaaaagaccttgangggatcc

SEQ ID NO: 220 - DNA, 1140 bp, Homo sapiens
  misc_feature (1039)..(1039): n equals a,t,g, or c
  misc_feature (1070)..(1070): n equals a,t,g, or c
  misc_feature (1091)..(1091): n equals a,t,g, or c
  misc_feature (1120)..(1120): n equals a,t,g, or c
  misc_feature (1136)..(1136): n equals a,t,g, or c
gcaccgtggagctgcaggagatgccccttgtccaggagttgccactgctgaagcttggggtgaattaccttccgtccatcttcatcgctggggtcaattttgtgctgccgccsgtgtttcaagctcattgctccactggagggctacactcggagtcgccagatcgtttttatcctgctcaggaccgtgtttcttcgcctcgcctccctggtggtcctgctcttctctctctggaatcagatcacttgtgggggcgactccgaggctgaggactgcaaaacctgtggctacaattacaaacaacttccgtgctgggagactgtcctgggccaggaaatgtacaaacttctgctctttgatctgctgactgtcttggcagtcgcgctgmtcatccagtttcctagaaagctcctctgtggcctctgtcctggggcgytgggtcgtctggcggggacccaggagttccaggtgcccgacgaggtgctggggctcatctacgcgcagacggtggtctgggtggggagttttttctgccctttactgcccctgcttaacacggtcaagttcctgctgcttttctacctgaagaagcttaccctcttctccacctgctccccggctgcccgcaccttccgggcctccgcggcgaatttctttttccccttggtccttctcctgggtctggccatctccagcgttcccctgctttacagcatctycctgatcccgccttctaagctttgtggtccattccgggggcagtcgtccatctgggcccagatccctgagtctatttccagcctccctgagaccacccagaatttcctcttcttcctggggacccaggcttttgctgtgccccttctgctgatctccagcatcctgatggcgtacactgtggctctggctaactcctacggacgcctcatctctgagstcaaacgtcagagacagacggaggcgcagaataaagtcttcctggcacggcgcgctgtggcgcttamcctccaccaaaccsggytytttgamcccccgcaancccacgttcccggcttttcaagaacccccanggcccattggtaagccctaanggtcaacaaacattctggtaaaacttaanggaagaacctgggagnaaat

SEQ ID NO: 221 - DNA, 801 bp, Homo sapiens
  misc_feature (796)..(796): n equals a,t,g, or c
  misc_feature (799)..(799): n equals a,t,g, or c
ccctcacttctgtgccaccaatgaatccagctactacattaccaggtctgatgcctttaccagcaggactgcccaacctccccaacctcaacctcaacctcccagcaccacacatcatgccaggggttggcttaccagaacttgtaaacccaggtctgccacctcttccttccatgcctccccgaaacttacctggcattgcaccaccgttgaggacagagtcggcgactccaccccagtcagcgagaagcctgtttctgcggctgtggatgccaatgcttctgagtcaccttaactttgaaccattctttggaattggcgtggtatatttaaccacgggagcgtgtctggaaacgcaaactatcattaatttcatactagtttgtaccgtatctgtaggcatcctgtaaataattccaaggggaaaactaaacgaggacgtgggttgtatcctgccaggttgagtggggctcacacgctagggtgagatgtcagaaagtgcttgtattttaaacaaccaaaaagaattgtaagggtggcttgctgccaggcttgcactgccgttcctgggggtgtgcatcttcgggaaaggtggtggcggggcgtccactaggtttcctgtcccctgctgctccttccgtaagaaaatgaaatattctatgcctaatactcacacgcaacatttcttgtactttgtaagtcgtttgcgagaatgcagaccacctcactaaactgtaaacggtaaagagatttttacttttggtcaaaaaaaaaaaaaaaaaaaaagggggggccnccnta

SEQ ID NO: 222 - DNA, 715 bp, Homo sapiens
  misc_feature (648)..(648): n equals a,t,g, or c
  misc_feature (651)..(651): n equals a,t,g, or c
  misc_feature (692)..(692): n equals a,t,g, or c
  misc_feature (708)..(708): n equals a,t,g, or c
ctagcccccagcatgtgtgtcaccttctgcccatctccaggcactccaggggtcagggctttgtgagctcttttccctatctatgaagtaggcaggatgtggtctgcctggcccagcactcagggtgttcctcagtgactgggggctctgtcaagcaccagcaagggtctacgagacagcagcaggacaaatgaccactgtatgcacagtcaagagaacatatagaaacataaatgaatgaacaaatgatgaacataggcaatgaggagcaaggccctgatagctcatcctggggtgataactacttgggctattctctgggcttagggagcagaagggcctggagtccctacggcctgtgcctctcacagccttctctctccttcttgcaggaaaccagccatgtcctttgggctctgtggagagctttagccttgcacsgcggcgctgggaggcattgcctgccatgcccactgcccgctgctcctgctctagtctgcaggctgggccccggctgtttgttattgggggtgtggcccagggccccagtcaagccgtggaggcactgtgtctgcgtgatggggtctgaaggcttggtgggagtgtccactggagcagctcattgccagagcagctattttctatggntcntttggtgctgaggacattcatgtggctctgtgggatgaganagcagggggtgagcantgaaaca

SEQ ID NO: 223 - DNA, 808 bp, Homo sapiens
  misc_feature (6)..(7): n equals a,t,g, or c
  misc_feature (724)..(724): n equals a,t,g, or c
  misc_feature (770)..(770): n equals a,t,g, or c
  misc_feature (807)..(807): n equals a,t,g, or c
gggcannagtcgtcccttcagcggggcgctgcagctgacggacctggatgacttcatcgggccgtctcaggagtgcatcaagcctgtcaaagtggaaaaaagggcgggaagtggcgtggccaagattcgcattgaagatgacgggagctacttccaaattaaccaagacggcgggacccggaggctggagaaggccaaggtctcgctaaacgactgcctggcgtgcagcggctgcatcacctccgcagagaccgtgcttatcacccagcagagccacgaggagctgaagaaggttctagatgctaacaagatggcggcacccagtcagcagaggctggttgtagkttcggtctcaccacagtctagagcatcgctggctgcacggtttcagctgaatcctacagatactgccaggaaattaacctcattctttaaaaaaataggggtgcacttcgtcttcgacaccgccttctcaaggcacttcagcctcctggagagccagcgagagtttgtgcggcgattccgaggacaggccgactgcagacaggcgctgcccctgctggcctctgcctgcccaggtgtgctcatggtgcgggtggtgggagagtcaagttcaagtgcagttgaaacgtgaggtgatatggacacaaatgacaaggcgggggcatggggggtggagacgcaagcaggttttgcggggacgggttggaaatgttggcacaantgggctttttctggagaagaggctgcccttcccgtgggagccacgngcattcaactcaggtccctaggcgttgtcgcctgcang

SEQ ID NO: 224 - DNA, 893 bp, Homo sapiens
  misc_feature (813)..(813): n equals a,t,g, or c
ctgcgcgccggggccgcctctccttccgccggtgccgcggcgcctcatggaagccccggagggcggcggaggggggcctgcagcgcggggcccggarggcagccggcgcccgaagccagggtgcacttccgagtggcgaggttcatcatggaggcaggtgtcaagctagggatgcggtccattcccattgccactgcttgcaccatttaccataagttcttttgcgagaccaacctggacgcctatgacccttacctgattgccatgtcttcaatttacttggccggcaaagtggaagagcagcacctgcggactcgtgacatcatcaatgtgtccaacaggtactttaacccaagcggtgagcccctggaattggactcccgcttctgggaactccgggacagcatcgtgcagtgtgagcttctcatgctgagagttctgcgcttccaggtctccttccagcatccacacaagtacctgctccactacctggtttccctccaraactggctgaaccgccacagctggcagcggacccctgttgccgtcaccgcctgggccctgctgcgggacagctaccatggggcgctgtgcctccgyttccaggcccagcacatcgccgtggcggtgctctacctggccctgcaggtctacggagttgaggtgcccgccgaggtcgaggctgagaagccgttgggtggcaggtgtttaatgacgaccttaccaagccaatcattgataatattgtgtctgatctcattcagatttataccatggacacagagatcccctaaggtcctggcccagggctgnccaaagagaagcccaggatggtcggctgcctggggacattgtcaacacgtcggcatgacgggctggtccccacaggacca

SEQ ID NO: 225 - DNA, 438 bp, Homo sapiens
  misc_feature (366)..(366): n equals a,t,g, or c
  misc_feature (421)..(421): n equals a,t,g, or c
gctccaaggtgcccacccctggcagagccgkcctactgaacacctctggtaccaaaggcttagaatgttctccttcaactcccaccatgaattcttacttttataagttcatgatcaamcttctcaagagattcagcagcgaacggaagctcctggargtcagaggccctttcatcatcaggtcagccttggcggcgcgctttctcctcttcctcccacggccccggcttttcactttcacgccattcaagtgtcaaagcagccaccttctctttcccttctctctcctccttttcctgacctttggatctgtgaagagaatggaagaaggttgccccttccatgactgggttggctggatgcttnctggacatggaaacaggacaggttcagtgttgaatgttttttgccgcacaactgnaattcaattttttgctt

SEQ ID NO: 226 - DNA, 1565 bp, Homo sapiens
  misc_feature (1466)..(1466): n equals a,t,g, or c
aatgttgaactttttaaagaactcagtataaatgtcatgaaacagctcattggttcatctaacttatttgtgatgcaagtggagatggatatatacactgctctaaaaaagtggatgttccttcaacttgtgccttcttggaatggatctttaaaacagcttttgacagaaacagatgtctggttttctaaacagaggaaagattttgaaggtatggcctttcttgaaactgaacaaggaaaaccatttgtgtcagtattcagacatttaaggttacawtatattatcagtgatctggsttctgcargaattattgaacaagatgctgtagtaccttcagaatggctctcttctgtgtataaacagcagtggtttgctatgctgcgggcagaacaggacagtgaggtggggcctcaagaaatcaataaagaagaactagagggaaacagcatgaggtgtggtagaaagcttgccaaagatggtgaatactgctggcgttggacaggttttaacttcggcttcgacctacttgtaacttacaccaatcgatacatcattttcaaacgcaatacactgaatcagccatgtagcggatctgtcagtttacagcctcgaaggagcatagcatttagattacgtttggcttcttttgatagtagtggaaaactaatatgtagtagaacaactggctatcaaatacttacacttgaaaaggatcaggaacaagtggtgatgaacttggacagcaggcttctgatcttccctttatatatctgctgtaacttcttgtatatatcaccagaaaaaaagaattgaaaataatcgtcacccagaaaatccagaaaactgaagatttcatcagttggaaacagtagcactttgaaaactttttaggccagctttaatttaatggccctactgatattcacatcgaaggtgactaacaatgacaaaggccttatgaacctgtacagacaatacagaagattattcttatcctcattgcatttctatgcatatgcgtaagaacattttaaagccaagaaaatatctgtcaaaccatttctgttagaacgatgtcaattcatgcttttaatttagcatcaatagaaaattgctgtaggtaaatctcacatttatctgcaacaaaatatagatttaatttttagcttaaactttgtttctaccttatgttagtggacctcagttatccatctgtaaatttctttttatttggctaaaataatctaaaagaataatttggttggccaattagaaatgcctttttcagttggtgtattgaaagctttcctttaacattttcacctgctcattgtgattcctccttttagtctaatatctttccaggtcatacttgtttttaatcattaaatattttcttcctggktttggagactargctgataaactttttttaaaacttaagcattgtcattgctattttntttaatttgactttcctaggagtttaagaacagtgaaagttagctttgcaccttcaaatgatcttgaatgagggaaaaatcagtttgatccaaggatat

SEQ ID NO: 227 - DNA, 1526 bp, Homo sapiens
aattcccgggtgtgtgtctgtgtctgtctgtgtctcgcatggcgcgcggccccggacaagcgctggggattyccgtttraggcgtcactactgtcactgccatcaccccacggagccmcttctagaggggagtagacccggcccttcgccgggcagagaagatgttgcccctgtccatcaaagacgatgaatacaaaccacccaakttcaatttgttcggcaagatctcgggctggtttaggtctatactgtccgacaagacttcccggaacctgtttttcttcctgtgcctgaacctctctttcgcttttgtggaactactctacggcatctggrgcaactgcttaggcttgatttccgactcttttcacatgtttttcgatagcactgccattttggctggactggcagcttctgttatttcaaaatggagagataatgatgctttctcctatgggtatgttagagcggaagttctggctggctttgtcaatggcctatttttgatcttcactgctttttttattttctcagaaggagttgagagagcattagcccctccagatgtccaccatgagagactgcttcttgtttccattcttgggkttgtggtaaacctaataggaatatttgttttcaaacatggaggtcatggacattctcatggctctggccacggacacagtcattccctctttaatggtgctctagatcaggcacatggccatgtcgatcattgccatagccatgaagtgaaacatggtgctgcacatagccatgatcatgctcatggacatggacactttcattctcatgatggcccgtccttaaaagaaacaacaggacccagcagacagattttacaaggtgtatttttacatatcctagcagatacacttggaagtattggtgtaattgcttctgccatcatgatgcaaaattttggtctgatgatagcagatcctatctgttcaattcttatagccattcttatagttgtaagtgttattcctcttttaagagaatctgtkggaatattaatgcagagaactcctcccctattagaaaatagtctgcctcagtgctatcagagggtacagcagttgcaaggagtttacagtttacaggaacagcacttctggactttatgttctgacgtttatgttgggaccttgaaattaatagtagcacctgatgctgatgctaggtggattttaagccaaacacataatatttttactcaggctggartgagacagctctacgtacagattgactttgcagccatgtagtgaatggaaagaaattatgcaccttttatggaccaaattttyctgccagtaagaatttcagttgtgggcctccagtcttctggaatgtcttcactgcagctgctggaaatcactgctttcattcccacaaaaccagtattacttttttttaaaaaaaaaaaaaaaaaaaaaaaaaaaaaaaaaaaaaaaaaaaaaaaaaaaaaaaaaaaaaaaaaaaaaaaaaaaagggcggcc

SEQ ID NO: 228 - DNA, 885 bp, Homo sapiens
  misc_feature (18)..(18): n equals a,t,g, or c
  misc_feature (20)..(20): n equals a,t,g, or c
  misc_feature (29)..(29): n equals a,t,g, or c
  misc_feature (63)..(63): n equals a,t,g, or c
gcacctgcgtggtgtgcngnggtggagcnggggctggagggagagttaatgatttgccacagntcatttcgcaacttaaccaatggacgctttcccgtgaccatgtaccagctgcgtcctctgggccacgctccacttgcccgcttccacccggaaagccccccaggctgagtgcggcatgatctccatcaccgaatggcagaagattggtgtggggatcaccggtttcggcatcttcttcatcctctttggaacactcctgtactttgattccgtgctcctggcctttggaaacctgctgttcctgacgggcctgtccctcatcattggcctgaggaagaccttttggttcttcttccaacggcacaaactcaagggaaccagcttcctcctggggggtgtggttatcgtgctcctacgctggcccctcctcggcatgttcctggaaacctacggattcttcagcctctttaagggctttttccctgtcgccttcggyttcctgggcaatgtctgcaacatccccttcctgggtgcgctgttccggagacttcaaggcactagctcgatggtctgaaaaacagagatgagctccttgaacttggatcattggttgagggggctagagggagaatgggaaccaccccctcagtcccctgcactgactcactccccgacatatccggacctccccaagtccagaaggaaggaatggagctgagcaactgacgtcaaatccccaagtcgactcaagaggctgccaggaagcagagatgcagaccccaaggagactgggctggggctggtatcacaccctcactctatatttatgggaggaaaagtgaagattaaattcccaagttgtgcgtgtgtctaaaaaaaaaa

SEQ ID NO: 229 - DNA, 456 bp, Homo sapiens
  misc_feature (101)..(101): n equals a,t,g, or c
  misc_feature (422)..(422): n equals a,t,g, or c
  misc_feature (424)..(424): n equals a,t,g, or c
  misc_feature (452)..(452): n equals a,t,g, or c
caaccacccaaagagcacccgggcgggaggacgccgagcagggggtgttgcgggctgggacaggggcagccacctcccgaagatgcaggatggcagcagancagcagccgtccagcctttcctaccgcaccacgggctccacctacctgcacccgctcagcgagctcctgggcatcccgctggaccaggtgaattttgtggtatgccagcttgttgctctgtttgctgctttctggtttcgcatctacttacgtcctggtacaaccagctctgatgtccggcatgcggttgccaccatttttggcatctattttgtcatcttttgtttcggctggtactctgtgcatctttttgtgctggtgttaatgtgctatgcaatcatggggcactgctagtgtatccaatattcacagatatgcctntntttgtagcaatgggatatcttacaatangcca

SEQ ID NO: 230 - DNA, 459 bp, Homo sapiens
ctactttttcttcagcaattccaacccctgaggccaattaacaaagctagtagattgctttctgtacttaagcaactctttgaaatcgaataaaccaaatttagaaatggggtaaatcagcttcttaaaaacattcaaatcctggatgcagacttcgacgctcttctttcaaattaaaattgcaagtctaatatcaattatatatttcaaattagaaccacagagtttctttaacttttcaaattgttttaattacaakgcacacrgtattgcaaagattacaaaatttaagtttgmagttaagtttatyctycaacttgtaaagctkgawattcygatttttttcccyctaccmcctctagtaataaacacactcaggccaacagaggttatcgtgttgaaggtttgtgactgtgatcttcaccagagatttgagcctaggaccaagaccgctctgcc

SEQ ID NO: 231 - DNA, 461 bp, Homo sapiens
  misc_feature (415)..(415): n equals a,t,g, or c
  misc_feature (448)..(448): n equals a,t,g, or c
  misc_feature (457)..(457): n equals a,t,g, or c
cggacgcgtgggcgattggatgcggcggcggcggcggatcccggagagccccggagtgagcggagtagcgagtcggcaacccggwggtagaaatatttctktcatggctcattcaaagactaggaccaatgatggaaaaattacatatccgcctggggtcaaggaaatatcagataaaatatctaaagaggagatggtgagacgattaaagatggttgtgaaaacttttatggatatggaccaggactctgaagaagaaaaggagctttatttaaacctagctttacatcttgcttcagatttttttctcaagcatcctgataaagatgttcgcttactggtagcctgctgccttgctgatattttcaggatttatgctcctgaagctccttacacatcccctgataaactaaangatatatttatgtttataacaagacagttgaangggctagangata

SEQ ID NO: 232 - DNA, 566 bp, Homo sapiens
  misc_feature (545)..(545): n equals a,t,g, or c
gtcgtcctccccgaccgcgtcctgcagcagctgccagtggagccgcctgacaaggactgccatccaccatggtgaagctgggctgcagcttctctgggaagccaggtaaagaccctggggaccaggatggggctgccakggacagtgtgcctctgatcagccccttggacatcagccagctccagccgccactccctgaccaggtggtcatcaagacacagacagaataccagctgtcctccccagaccagcagaatttccctgacctggagggccaraggctgraactgcarccacccaraggaagggcgcagctgcccaccgcacggatgatcgccttcgccatggcgctactgggctgcgtgctgatcatgtacaaggccatctggtacgaccagttcacctgccccgacggcttcctgctgcggcacaagatctgcacgccgctgaccctgggagatgtactacacggagatggaccccgagcgccaccgcagcatcctggcggccatcggggctacccgctgagccgcaagcacggcaangaagaagcccggcggcctggg

SEQ ID NO: 233 - DNA, 447 bp, Homo sapiens
aggggaattatatgttaaatgcattgactgccggtgcccccatttgttaaacaaagcaaagatcaactgctcattacactgtggctgacgggcgaagaccaccgcagcgcattatgctggtacagaacacgataacgargaaatgtcagtaccgatgcataagcagcgcagtcagccgcagcctggcgtcaccgcatggcgtgcggcgattgatctctccagcggacaaccccggcggcgttacagtttcaaactgctgtggcacgatcgccagcgttggtttacaccgcagggcttcagccgaatgccgccggcacgactggagcagtttgccgtcgatgtaccggatatcggcccacaatgggctgcggatcagattttttatcagatcttccctgatcgttttgcgcgtagtcttcctcgtgaagctgaacaggatcatgtcta

SEQ ID NO: 234 - DNA, 1292 bp, Homo sapiens
  misc_feature (507)..(507): n equals a,t,g, or c
ggaagggtacagtgattaatagcccaaattccagagttgaactgcctccatctggatccttactttactctgcatgtagtaggcaatcttaggtcaagaaagatttggaaacatgacgagggtctattaccgagaagctatgggtgcatttattgtcttcgatgtcaccaggccagccacatttgaagcagtggcaaagtggaaaaatgatttggactccaagttaagtctccctaatggcaaaccggtttcagtggttttgttggccaacaaatgtgaccaggggaaggatgtgctcatgaacaatggcctcaagatggaccagttctgcaaggagcacggtttcgtaggatggtttgaaacatcagcaaaggaaaatataaacattgatgaagcctccagatgcctggtgaaacacatacttgcaaatgagtgtgacctaatggagtctattgagccggacgtcgtgaagccccatctcacatcaaccaaggttgccagctgctnctggctgtgcmaaatcctagtaggcacctttgctggtgtctggtaggaatgacctcattgttccacaaattgtgcctcyatttttaccattttgggtaaacgtcaggatagagataccacatgtggcaagccaaagatctatgcctctkttttttcaatgagagagaaatagcaaatgttctttctatgctttcctcaccatcatcacagtgtttacaaacttttgaaaatatttagtctgktacaaacttctgtcatgtagctgaccaaaatcctgcagggccacagtcggcactgttatttgcttcttttaatcagcaaaggcctcaagtcttaaaataaaaggggagaagaacaaactagctgtcaagtcaaggactggctttcaccttgccctggtgtctttttccagatttcartatattctctgatggcctgacaggcctattaagtagatgtgatattttctcccaagatgacctccattctcggcagacctaagagttgcctctgagttagctctttggaatcgtgaacacaggtgtgctatattgtccttgtcctaactgtcacttgccatggcctgaatgttggcttaactgaatattgtatgaaaagacatgcctccatatgtgcctttctgttagctttctctgactcaagctgtggggctcctctatacatgctatacatgtaatatatattatatatatttttgcaagtgaacaataaaacattaaaagatgctgtttccctaaaaaaaaaaaaaaaaaaaaaaaaaaaaa

SEQ ID NO: 235 - DNA, 924 bp, Homo sapiens
aacaacgaggcatccacctcttggttttgtggcctctgtggatgacgtctctcaccttgaaccagttcagagttggagtagcgcaggatcctgtcttcagaggaggggccgaagcgggttcctctgttgtcaagctctttggaggtgcctggctgctactactgtcccagagaggctaaggtgtttcattgtaacctgaatggaccaagctggtgtgaccctgttggaaaactggcagtatctaccaaaagccgaacatacgtataaactgatccagcattccactcctggtttttccaggtttggactggatatcgktgaactcggtcaagctggtatatttgaacccaaagacatcactgctgaagaagaagaggaagaagtggaaatcttaaaagcattcggaagtacctgacctccaatgtggcttatgggtctacaggcattcgggacgtgcacctcgagctgaaggacctgactctgtgtggacgcaaaggcaatctgcactttatacgctttcccactcatgacatgcctgcttttattcaaatgggcagagataaaaacttctcgagtctccacactgtcttttgtgccactggaggtrgagcgtacaaatttgagcaggattttctcacaataggtgatcttcagctttgcaaactggatgaactagattgcttgatcaaaggaattttatacattgactcagtcggattcaatggacggtcacagtgctattactttgaaaaccctgctgattctgaaaagtgtcagaagttaccatttgatttgaaaaatccgtatcctctgcttctggtgaacattggctcaggggttagcatcytagcagtatattccmaakataattacmaacgggtcacaggkactagtcttggaggaggactttttttggtcctgctg

SEQ ID NO: 236 - DNA, 1256 bp, Homo sapiens
  misc_feature (1149)..(1149): n equals a,t,g, or c
  misc_feature (1235)..(1235): n equals a,t,g, or c
  misc_feature (1237)..(1237): n equals a,t,g, or c
aattcggcacagtactatattgaggttaaaaggtgcaatcttgagaatggcatttctggataccacaggctgcttaataccacctgcgtatgaaccctggagagagcacaatgttcctgaagaaaaagacgaaaaggagaaattgaaaaaacggcggcctgtctcagtatccccctcctcttctcaggaaattagtgaaaaccagtatgcagtgatatgttctgaaaagcaagcaaaagtaatctcactgccaacccagaactgtgcttataagcaaaatattacagagacctcgtttgtgcttcgtggagatattgtagcattgagtaacagtatctgccttgcctgtttctgtgccaatggacatataatgacttttagtttgccaagtttaagacctctgttggrtgtgtattacttgccccttaccaatatgcggrtagccagaacgttctgctttaccaacaatggacaagcattataccttgtttcacctacagaaatccagagacttacttatagtcaagagacctgtgaaaatcttcaggaaatgttgggtgaactcttcactcctgtagaaacacctgaagcaccaaacaggggattctttaaaggcttatttggaggtggtgcacaatctcttgacagagaagaactatttggagaatcgtcctcaggaaaggcttcaaggagccttgcacagcatattcctggccctggtggcattgaaggcgtaaaaggggcagcatctggagttgttggtgaattagcacgagccaggctggcactagatgaaagagggcagaaacttggcgatctggaagaaagaactgcggccatgttatcaagtgcagagtcattttctaaacatgctcatgagattatgttgaaatacaaagataagaagtggtaccagttctgacaaccagaatccaataagtccaacttcagccagaaggaaaaaagttttccatttttattacattctttaggaaagttaacgttaaagggatgttcgtcactgaatactgttctttcctagcacagtcatgcactgttttacctcagtcatgtggctttaactgaggagtgttcacacgcactcgaaatggagtatatggtgtgtgccagttatgagttgaccatttnggaattaaacaggtcacacgtgacagatgaagaaaccaaggggctgctgaagagacctggtgcaagggactaatcctggatccatncngtaattaaccttccatatg

SEQ ID NO: 237 - DNA, 848 bp, Homo sapiens
  misc_feature (784)..(784): n equals a,t,g, or c
  misc_feature (787)..(787): n equals a,t,g, or c
  misc_feature (835)..(835): n equals a,t,g, or c
gctcgtgccgaacgcgtcggccacgggcccgggagagacgcgctccagccggccccaggatgtaggcgatcggcggcagcgctcctgcaggcggccggctcatcatgaagaagcactcggcccgggtggccccgctcagcgcctgcaacagtccggtcctgacccttaccaaagtggaaggggaggagcgcccccgggactccccgggcccggcggaggcccaggcaccggccggggtggaggccggcgggagagcgagtcgccgctgctggacgtgctcccgggcgcaactcaagaagatcttctggggcgtggcggtcgtgctgtgcgtgtgctcctcgtgggcgggctccacgcagctcgccaagctgaccttcaggaagttcgacgcgcccttcaccctcacgtggtttgccaccaactggaactttttattcttcccgttgtactacgtggggcacgtctgcaartccacagagaagcagtctgtgaagcagcgatacaggtaggcgcgtcctgcatgaggaggcctcctgaccccgggctgctccatccagcgctgactccgcagagctgcccctggtggcaggcgctgggatgagccggtgggagcccgtggagagatgttgcagtgaatgcacctgctctcagtggggtcgggagcagaattctgtctaccctgggtagtgaacgcctccttcctctacctccttgcccctcagccctggggagccccttttatataaaagcaggcagcagcgtctttccagagacgggcaattantangttccccagaacgctttagaaatggggagaactgttgtagctccattnaatccctaagcaa

SEQ ID NO: 238 - DNA, 1206 bp, Homo sapiens
  misc_feature (717)..(717): n equals a,t,g, or c
tgattcgtagcacgcttgcttgcatcctggaatattctcaaccagaagactctgtacctacacctgatgaagtaagcatgctaacagcaattgcactcttcctgtggtctgctagtaatgaaataataggagtccagtcattacagaatggctgcatgaacagatttaaaaatgcattaaattcatgcgacccatgggttcaagccaaatgttaccagcttctcctctcagtcttccagcattccaatcgtgccctttcaactccttatattcattcattagctccaatagtggttgaaaagctaaaagctgttgaaagaaacagaccagccagtaacatagagcttttagcggttcaagaaggaataaaagttcttgaaacactggttgctcttggtgaagaacaaaacagagtccagctacttgctcttttagttcccactttgatatcttacctgctggatgaaaattcttttgcctcagcaagttcagcttccaaagatcttcatgagtttgcactccagaatttaatgcatattggacctctgtatccacatgctttcaagacagtaatgggggctgctcctgagttgaaagtgcgtctagaaactgccgttcgagcaagccaagcgagcaaagctaaagcggctgccagacaaccagcccccgccatacattctgcaccaacaatttaagctaaaaaacaagttttttttnaatttgtaatttcatttatttgtatttatgttgtcaactagcccctaattagtgatggccactgtatcattccaggctacctatgggttctgttttatttgtatattggtattatagtgcttccaagtaggttaagtgaaataatgctcacaccacttattgatttttaaggagtgattttttttatcatgtggtgaatatgttttcattttcctcctaataatgtttctcttttgttaacttatttatttttcaaacactgagccatagtcttaaatttaaatgctaaaaacaattgtatcatgtagtcgggcagcctattgatactgtcaggggaaaaaaatgggtcagaactcagcatctgtcatgaaaaaaatcaattgaaaaacaagcagattttaaattttgaagtaatcaaaataatggaaagtgtctgttttgtggtgtatatactatgaataaaatcacagcattttctaagcatttccc

SEQ ID NO: 239 - DNA, 449 bp, Homo sapiens
gcttccgctcccggcgcaggcgctgcagcttggccagagcggagggggctcgggagaggagtggacgccgctggccaggatggtgctggagagcgtggcccgtatcgtgaaggtgcagctccctgcatatctgaagcggctcccagtccctgaaagcattaccgggttcgctaggctcacagtttcagaatggcttcggttattgcctttccttggtgtactcgcacttcttggctaccttgcagttcgtccattcctcccgaagaagaaacaacagaaggatagcttgattaatcttaaaatacaaaaggaaaatccgaaagtagtgaatgaaataaacattgaagatttgtgtcttactaaagcagcttattgtargtgttggcgttctaaaacgtttcctgcctgcgatggttcacataataaacacatgaattgacaggagataa

SEQ ID NO: 240 - DNA, 1262 bp, Homo sapiens
  misc_feature (1261)..(1261): n equals a,t,g, or c
aaaactgatttgaaactttcacagatctcagcttttccaagtaagtccacagaccatttgataggctaagcccagttctttacacaatgtagcagccatcatgtctgagtactaattgttctcttcccactgggcttagcctatcaagtaagtccacagaccatttgataggctaagcccagttctttacacaatgtagcagccatcatgtctgagtactaattgttctcttcccactggtttttgtgaaattttctgttctgttaccttttaaagattcctagcaagtttttgactgtttcaattgcaaacttattgcttttcttcttggtaaaggactttctgtttggagcagatggtagcaatagggataccagcccccagggccgattacttgatatggaaggtcgatctgtatcttcctgttgtaaaatccaggcactttctcgggccaaatctacaaatttttgcagctggctttgacttacatttttgcttatgttgagagaagtttcaaatggattctgaatgtacagaggagaagaatcaggtttgttttgctcccttccctgtcgaatatttatggaatttttatcgaaagcaaaattgccaaaatactcaaaaaattccttcagtagtaattctaatgtttctgtgttctgtgaaggtttaattctactcaagtcacgaacaaatgtgcagttgttgccttctattacacatttatcttctgcatctgctagggtttttaaggaatctagtgttggaagaatagggggtgatcttctctggagaaaaaagatgaccatcattgtaagggagaaatttgtaatccatgcaccaggaatactacttgttagtgaatgtgctcgagcccagcaccgtacactgarcaccaaggctctcactcttgagtctagggcaccatatatataaaggagttcggaacttgtcaaggcaatcctattgttcgtagtcaaatcacactgaaatccggaggcctggtgtgagaacctcacgagcggacaccgggcatttaatattttttgcacacccacacagccagggccaaagtggtcaaggcactctcctaacacagacaggatcttctgagttgcaattctttctgaaggaacatttttcacttgaaattccatcagaaaatttcctgagatcttgtgagcgctgaggtttctggtttcatctagatccaaaaacatgtccaaatcacatcctaacttcccaaaagtgttgacctgang

SEQ ID NO: 241 - DNA, 1439 bp, Homo sapiens
  misc_feature (1384)..(1384): n equals a,t,g, or c
  misc_feature (1427)..(1427): n equals a,t,g, or c
cctggggcggagtttgggctgactggggctggaccgggcaagacgccgccgctgcccggatgttgcgatggctgatcgggggaggccgagaaccgcaggactggccgagaaatctcctttacagacaataggtgaagaacaaacccagaatccctacactgaactgctagtactgaaggctcatcatgatattgtacgatttctggtacagttagatgactacagatttgcatctgctggtgatgatggaattgtagttgtgtggaatgcccagacaggggaaaaacttttagaactgaatggacacactcaaaagataacagctattattacatttccttccttggaatcttgtgaagagaaaaatcaactcatcttgacagcctctgctgatagaacagttattgtgtgggatggtgatactaccagacaagttcagagaatatcatgcttccagtctactgtaaagtgtttaactgttcttcagagactagatgtttggctttctggtgggaatgacctgtgtgtgtggaaccgaaaattagatctcctgtgtaagactagccacctttctgatacaggtattagtgctttggttgaaatacctaagaactgtgttgtggcagcagttggcaaagaactgataattttcaggttggtagcacccacagaaggatcactagaatgggatattcttgaagttaagcgcctccttgatcaccaggataatattctctcattgattaatgtcaatgatttgagttttgtcaccggctcccacgtcggagagctgatcatctgggatgccctggactggaccatgcaggcctatgaacgcaacttctgggacccatctccacaactggacacccaacaagaaataaaactctgtcaaaaatcaaatgacatttctattcatcatttcacatgtgatgaagagaatgtatttgctgcagttggaaggggtttatacgtgtatagccttcaaatgaagcgtgtgattgcctgccagaaaactgcacatgactccaatgtcctgcacrttgccagacttccaaacaggcagttaatctcatgctcagaagatggcagtgtacgcatttgggagttaagagaaaaacagcagcttgcagctgagcctgtaccaacaggtttttttaacatgtggggatttggaagagtcagcaaacaagccagccaacctgttaaaaagcagcaagaaaatgctacttcatgttcactggagcttattggagatttgattggacactcatcatctgtggagatgtttctatactttgaagatcatggactagtgacgtgctccgctgatcatctcattattttgtggaaaaatggagagcgagaatctggattgccccantttaagattatttccaaaatttaggggggaatgggggccttanacctggcggcca

SEQ ID NO: 242 - DNA, 829 bp, Homo sapiens
  misc_feature (54)..(55): n equals a,t,g, or c
  misc_feature (800)..(800): n equals a,t,g, or c
ctcgcgcttgggctcgcgatggggaagaagtcccgggcggtacccggaccgtanncaatcctgcaactctctccgccgggtcctcggggcagcacgccgggccgggacccggagccggaacccgacactgagccggactcaaccgcggcggtccccagccagcccgccccgtcggcggcgacgaccaccgcggtgactgccgccgcggcctcggacgactcgccttcagaaggcaaggatgaacaggaagcggtgcaggaggttcctagagttgttcagaatcctccaaaaccagtcatgaccactagacccacagctgttaaagcaacaggtatgcttttgttttgttttttacattttttctcccacgtctttcattaaagtcaagttgggtttgtacatagaatgttttgctgaatgctttagtgttgctaacattatttctcccaaaaatatgatttaagattatttttgtttgtgagagaatgttgatgtatatacactttgaccagtgcaaaatttgttgtttttctttacccaaaacgttttttactgtttttttttcctgatgctattttataactagttttctggtcctcccactagcttggtgttcattaggcatgccaactcctattccttttctaacactctggcttgattggttacctaacaaacattggtggacctggaaattgrtcttrttaaawatttcaagtacaaaggaatgccatagtygcaacagtggttttgtagacaaaccgggttcaatycatcagctggcatcacacttagacttngcgcaataccaatgggtgaacctcattaa

SEQ ID NO: 243 - DNA, 1496 bp, Homo sapiens
  misc_feature (14)..(14): n equals a,t,g, or c
tagcctttgaaaanctgaacccctactcaaccccgtctccaccacacccactgtatcctggccgcarggtaatasagttctctgaggataaggttcggatcccccgcaacagccccctgcccaactgcacttacgctacccgccaggccatttccctgagcctggtagaggaggggagtgagcgggcccgcccagcccagtgcccagcacccctgcctcagcccaggcctcaccccaccaccagcccagcccagcacccctaacactcagtgccccagctagctctgccagctctgaagaggacctgctggtcagctggcagcgggcatttgtggaccgtactccaccacctgctgctgtggcccagcgcacagcctttggacgcgaatgccctccctgagctgcagcgccattttgcccatagccccgctgacagagatgaggtggtccaggcaccttctgcccgacccgaagagagtgagcttttgctacccacagaacctgactctggctttcccagggaggaagaagagctgaacctgcctatcagtcckgaggaagagcgccagagcctgctgcccattaacaggggcacagaggaggggccaggcacttcccacaccgagggcagggcctggccactccccagctccagtcgcccccagcgcagccccaagaggatgggggttcaccacctgcaccgcaaggacagcctgacccaggcccaggagcagggcaacctgctcaactagggcccctgctggccttcctgccattgctgcaccaggactgcaaggagtccccacaccttggcagctcagggtccccagtccaagcccttgacctctcctctatccagacccgcacagctgtttcctgtgtggatggggtcaggttgtgggccatgccaggcctgtcagctgcgttgactgactgcagcagcttgcctcatggttttccctttttcttagaatatttattcttcagaggtaacatgcagttgggtctcaagacctttcctccaatcagcccaacccagcccagactgggcttttctggggagctgaggagtttatcagtattcatcttccatcctttcatagtcacaagttttgttattttgtttttttttgggggtgatggtgtaattgttaacctcatttccgtttcctacctgtttgcttccccccccagtcctccgcatgagctgttgccctccaggggcctggcacagctggccttggggacgagggagaggactgattcagggccccctcagctgtctcctccctccctctggaaaggagggtggggctcaggggcctcaagctgggctctgtgtgaggcctggcccccactcccaaccttggctctagactgttactcttaagctttgagaaattttcacattgatgactattttaaaatcaaataaaactattttactggtaaaaaaaaaaaaaaaaaactcgaggggggcccgtacccaatcgcct

SEQ ID NO: 244 - DNA, 1158 bp, Homo sapiens
cgctctagaatatggatccccgggctgcagattcggcacgagcagagatccgagatgcattcaaaatcccaatgacattcagcttcaagaaaaagcttggaatgcggtgtgccctcttgttgtgaggctaaagagattttacgagttttccattagactagaaaaagctcttcagagtttattggaatctctgacttgtccaccctacacaccaacccaacacctggaaagggaacaggccctggcaaaggagtttgccgaaattttacattttacccttcgattcgatgagctgaagatgaggaacccggctattcagaatgacttcagctactacagaagaacaatcagtcgcaaccgcatcaacaacatgcacctagacattgagaatgaagtcaataatgagatggccaatcgaatgtccctcttctatgcagaagccacgccaatgctgaaaacccttagcaatgccacaatgcactttgtctctgaaaacaaaactctgccaatagagaacaccacagactgcctcagcacaatgacaagtgtctgtaaagtcatgctggaaactccggagtacagaagtaggtttacgagtgaagagaccctgatgttctgcatgagggtgatggtgggagtcatcatcctctatgaccatgtccaccctgtgggagctttctgcaagacatccaagatcgatatgaaaggctgcataaaagttttgaaggagcaggccccagacagtgtggaggggctgctaaatgccctcaggttcactacaaagcacttgaacgatgaatcaacttccaaacagattcgagcaatgcttcagtagagctctgctcaaagaagaggatctatgtgctgacctcagaagatgtatatgtttacataatttaatacagattgatgttaatacttgtgtatttacataaccgtttccttcttgtcactgaaatatatggaccttaatttgtatcctgactgactcaacccagcagagcataaattgacttgagagccttacctttgatgtctgaaatgaaacccccttctccaaaggcaaaattcggagactttgatctttgctactggagtcctttaacaacatctataacgataaaaaattcctaattgtttgtggtarwaaaaaaaaaa

SEQ ID NO: 245 - DNA, 791 bp, Homo sapiens
  misc_feature (630)..(630): n equals a,t,g, or c
  misc_feature (639)..(639): n equals a,t,g, or c
  misc_feature (648)..(648): n equals a,t,g, or c
  misc_feature (659)..(659): n equals a,t,g, or c
  misc_feature (731)..(731): n equals a,t,g, or c
gactcagtggacgacggcggcggcggcgaaacgggatgaagaccccggarccaacttgtttccggtgaggcgggacagtctggtctgctcgtgaatatttataaaccggctcccccgcagcgccacctgtcattatgcttactaacgttcgggacgtctcccgggctgcttgggcgaggagaggcaggggtgtgtgaccccggtggttactgtgctcgcgtagagcacytagggcctgctgaagccctccctcgcccgcgcctctccttagtccttgagatgagatggcaagttacagcggcttctccggcctgctggagattcgctacgggccaggacaccgcagctgccttccccaattcgctttctttccgcagccgccgctgccccgaccccggatctgcatgtkggtgctggctgagctgctggagctarggtgtcctgagcagagcctgarggacgccatcamcctggacctcttctgccacgcgctcattttctgccgccagcagggcttctcactggagcagacgtcagcggcttgtgccctgctccaggatcttcacaaggcttgtattggccacatccacgtcctccgagcctacatcaagacccaagtgaacaaagagntggagcagntccaagggntggtggaagancggctcaaggccagcgaagaaaggttcagcagcaattgaatgcataaaagcggccttccagtaactccggtnaaaggcaaagcagaccaatgaccccaaattttcccataaaagtttgggcaaatgggacat

SEQ ID NO: 246 - DNA, 1960 bp, Homo sapiens
  misc_feature (14)..(15): n equals a,t,g, or c
  misc_feature (17)..(17): n equals a,t,g, or c
  misc_feature (29)..(29): n equals a,t,g, or c
  misc_feature (60)..(60): n equals a,t,g, or c
  misc_feature (885)..(885): n equals a,t,g, or c
ctgcccccatagtnncncactccctaaantccagagccagttcggttcccttctaggtgnccaataaaagtgaccaaagtggtcattttcttaatttcattctgatcagtgtctagcaaggatgatgacctaacatgatctccagcttagactgtaagcccgatttctcctcctcattttctgatacctttactaggacctcaagtgcmcttctgggattgagtgacacgttaacacagaagaagcccagaagacgcccgacagaaccttctccctgagcgtcccctcccctctccctacttccgatcaactgttgcacggcaaactgcaaacgtagagcaaattccactaagatggtgtcaaaaagagataattaaagaaaatwaatgatggaaaacttgcctcttatctwagraattattctataaatatmtcccagttcaaagatttgacttttggttgtctggggaccattcctcgctagggacatttcaagaaaaactctccccatctggatgactttgttttcatttatgctattaaggataaccgtacgcagatccaaaataacagaggacgtcattttattggctgtccacgggaagtttcatcacacacggaggtgaagactgtgggggttgtggcacacaatatctcaacacgagacctcatcgagcggccaaacagaaggtgaagtgacacccgacacgacggaaccccagccgccctctgcagccccggtgccacctctccacagacgcctcagcccagtaagctgagtgatgacactgtccattagtctcagttcgttgcactgtcttccaacaaaacagcacttgaaaattcacaaaattaaaaaaagaaaaagaaagcagcacttccttnggaaatagcaacaccactgtaacacagacggcagcgtggcatgcagatccacacctggtcggttttttccctttaggattttttttttttttaattaacaaatggaatggcaggtctgtttcaaatattagtagcataacacataagtgcaattgcagtctggccacaagcgtcagaagccttccgtgtgtctgtcacaagggcgggcagacacactccgattccacccctggagggtcaccaaaagaaagcagccacttctctatttccattgttgtcaaagcactcaggttggggaagaaaattcaaatgaaaccaagctctcagcatccggggccagccaccctgtgccatcctaagtggtctctgtaccccagacctggggctgtcatctccaccgtggcattggctgggaaagtcgctgtgggacacacccctccgctcactcctgctgcccatggaggagcctctggtgtcccccggcctggggccatgtgggtcacacggagctgagcttcaccaggccgcgcacagagtcctcatgcagggagtccctggctggccaggcccagcacgtgcatggtgcggctgtgcgccagggggctgcccgccgccagtagcctgggggcgagggccctcatcgggcgtcaggaactggtggcccatgtgctcatctttccggggcatcacgtccgcgagcgtggcctcggcgaggttgggcatggaggcgggcggtgtgggcgggcccagtgtgaggctggcgcagggcgtgcccaggccaggcttcccgggcaggtgcagctcgtcgctggtgaggctgggctcgctctgcagcaggggcgtgctgcagccaccacttccagaccaccaaaggtaatcctctcagtgcaagcccaaattctcctttttcttttctcctaacgatgtagaatcctttctccggtgccagaacagtgatggcaacaccattccaagggaagtgggtagtcctggaccttacagatgaggaaactgaggtgcaaagcagtcagctgttttgcccaagatcttgaggccagtgagtgtcccaggcagg

SEQ ID NO: 247 - DNA, 383 bp, Homo sapiens
  misc_feature (96)..(96): n equals a,t,g, or c
  misc_feature (349)..(349): n equals a,t,g, or c
  misc_feature (366)..(366): n equals a,t,g, or c
gtaccatatatacacaaatacacatatgtgtgtgcatatatatatgtatatactgtgtgtgcatatatatatactgtatgcatgtatatatactgngtatacatacacactgtgtgtatacatatatacacactgtgtggtgktatacgtatatacactgtgtgtgtatacgtatatacactgtgtgtgtatatatatacatatactctgtgtgtgtgtatatatatacatatactctgtgtgtgtgtgtatatgtatatactgtgtgtgtatatatatagcaggttatatatatacgtgtatacatatatatgtgtgtgtggtatatatatatacacacacacacacnatgcacacacagtagcnggggtggcacttggaag

SEQ ID NO: 248 - DNA, 765 bp, Homo sapiens
  misc_feature (744)..(744): n equals a,t,g, or c
  misc_feature (749)..(749): n equals a,t,g, or c
  misc_feature (755)..(755): n equals a,t,g, or c
ctgatatgccaaagcctgcctttcatgaagcagaacctggatgagcttggaataggaacgtaccacaacattgccttcatacatccagacactcccatcatcaaagccttgaacatatttgtggaaagacgaatatcagctctgcctgttgtggatgagtcaggaaaagttgtagatatttattccaaatttgatgtaattaatcttgctgctgagaaaacatacaataacctagatatcacggtgacccaggcccttcagcaccgttcacagtattttgaaggtgttgtgaagtgcaataagctggaaatactggagaccatcgtggacagaatagtaagagctgaggtccatcggctggtggtggtaaatgaagcagatagtattgtgggtattatttccctgtcggacattctgcaagccctgatcctcacaccagcaggtgccaaacaaaaggagacagaaacggagtraccgccgtgaatgtagacgccctaggaggagaacttgaacaaagtctctgggtcacgttttgcctcatgaacactggctgcaagtggttaagaatgtatatcagggtttaacgataggtatttcttccagtgatgttgaaattaagcttaaaaaagaaagattttatgtgcttgaagattcaggcttgcattaaaagactgttttcagacctttgtctgaaggattttaaatgctgtatgtcattaaagtgcactgtgtcctgaagttttncttantttccnttcaagatcc

SEQ ID NO: 249 - DNA, 1419 bp, Homo sapiens
  misc_feature (10)..(10): n equals a,t,g, or c
  misc_feature (1406)..(1406): n equals a,t,g, or c
  misc_feature (1408)..(1408): n equals a,t,g, or c
  misc_feature (1413)..(1413): n equals a,t,g, or c
ggcacgaggnctggggcgggaggatgctccagaggggcctctggccgtggcgcacgcggctgctgccgacccctggcacctggcgcccagcgcgcccgtggccgctgccgcctccgccccaggttttgcgtgtgaagctgtgtggaaatgtgaaatactaccagtcacaccattatagtaccgtggtgccacctgatgaaataacagttatttatagacatggccttcccttggtaacacttaccttgccatctagaaaagaacgttgtcaattcgtagtcaaaccaatgttgtcaacagttggttcattccttcaggacctacaaaatgaagataagggtatcaaaactgcagccatcttcacagcagatggcaacatgatttcagcttctaccttgatggatattttgctaatgaatgattttaaacttgtcattaataaaatagcatatgatgtgcagtgtccaaagagagaaaaaccaagtaatgagcacactgctgagatggaacacatgaaatcyttggttcacagactatttacaatcttgcatttagaagagtctcagaaaaagagagagcaccatttactggagaaaattgaccacctgaaggaacagctgcagccccttgaacaggtgaaagctggaatagaagctcattcggaagccaaaaccagtggactcctgtgggctggattggcactgctgtccattcagggtggggcactggcctggctcacgtggtgggtgtactcctgggrtatcatggagccagttacatwcttcatcacatttgcaaattctatggtcttttttgcatactttatagtcactcgacaggattatacttactcagctgttaagagtaggcaatttcttcagttcttccacaagaaatcaaagcaacagcactttgatgtgcagcaatacaacaagttaaaagaagaccttgctaaggctaaagaatccctgaaacaggcgcgtcattctctctgtttgcaaatgcaagtagaagaactcaatgaaaagaattaatcttacagttttaaatgtcgtcagattttccattatgtattgattttgcaacttaggatgtttttgagtcccatggttcattttgattgtttaatctttgttattaaattcttgtaaaacagaagtattgtttgaagttctcaactgagatttttactttttggatttttatgacttgctaatgttagaaagggcttgtatgcgtctatcaaagcaacagtggctgctgttagctaaaaatccttgtcagcttgtcccacgtttattctctatgtggaggtgaaagggtctgtgcttggcatccacttccatcttagacttaattgggaaccatccttctaaaaaaatcagagaccagtctggccaatcaancnggggnccagca

SEQ ID NO: 250 - DNA, 987 bp, Homo sapiens
  misc_feature (350)..(350): n equals a,t,g, or c
  misc_feature (735)..(735): n equals a,t,g, or c
gtaaaaggggatcgagttatgccagaggaaatagctcgctactataaacattatgtaaaagtcatgggtcttcagaagaatttcagagagaatacttacataacttccgtatcaagactctacagagatcaagatgatgatgatattcaagacagagatatttcaacaaagcatttacagatagagaagtcaaactttatcaagagaaactgggaaattaggggttatcagcgaatagctgatggttctcatgttcccttctgcctctttgctgagaatgtagcgctggcaactggaacgctggattctcctgcccatctggaaattgaaggggaagattttccttttgngtttcattcaatgcctgaatttggagcwgctmyaaacaaaggaaagttgcgtggcaaagtggatccagtgttaattgtaggttctgggcttactgccgctgacgcagtactgtgtgcttacaacagtaatatccctgtgattcatgtgtttcgcagacgagtaactgatccaagcttaattttcaaacagcttcccaaaaagctgtatcctgaatatcataaagtctatcatatgatgtgtactcagtcatattctgtagactcaaatcttttatctgattataccagctttcccgagcaccgtgtgctttcctttaagtcggacatgaaatgkgttctccaaagcgtttctggattgaagaaaatatttaagctgtctgcagcngtcagtattgataggttctcatcctaatctgtcttttctgaaggatcaagggtgttacctaggccataagtcaagccagccaatcacatgtaagggtaatcctgtggaaatagatacatatacctatgagtgtattaaagaagccaacctttttgcattgggtcctttggttggagacaattttgttcgatttttaaagggaggggcgctgggtgttacacgctgtttagctacaagacagaaaaaaaaaaa

SEQ ID NO: 251 - DNA, 440 bp, Homo sapiens
cggaagcaagtgaaatgctcagtcttagacgactgcgtcgtgctatgaccggactttttcttgaaaggggatgacagcatgggaggcaatggctccacatgtaaacccgacactgaaagacaaggcactctctccacagcagccccaacaactagccctgcaccctgtctctctaaccaccacaacaaaaaacatttaatccttgccttttgtgctggggttctactgacactgctgctgatagcctttatcttcctcatcataaagagctacagaaaatatcactccaagccccaggccccagatcctcactcagatcctccagccaagctttcatccatcccaggggaatcayttacctatgccagcacaamtttcaaaytctcagragraaagagcaatcacttggctgagaaccattctggcagactttgacccca

SEQ ID NO: 252 - DNA, 1530 bp, Homo sapiens
  misc_feature (11)..(11): n equals a,t,g, or c
  misc_feature (97)..(98): n equals a,t,g, or c
  misc_feature (110)..(110): n equals a,t,g, or c
  misc_feature (1414)..(1414): n equals a,t,g, or c
  misc_feature (1444)..(1444): n equals a,t,g, or c
acgctggcggnacgcgtgggccggctaattaatccccactcatggatataggcacacaaactaaaggttcttgcatacactgagggacttcacgggnnaatggatgtgcngcgagatacgagctgtattttcaagacgttaccttctacaaaacactgctttggaagtatttatggcaaaccgaacctcagttatgtttaatttccctgatcaagcaacagtaaaaaaagttgtctatagcttgcctcgggttggagtagggaccagctatggtctgccacaagccaggaggatatcattggccactcctcgacagctttataaatcttccaatatgactcagcgctggcaaagaagggraatttcaaacttcgaatatttgatgktccytaatactattgcaggacggacatataatgatctgaaccaatatccagtgtttccgtgggtgttaaccaactatgaatcagaagagttggacctgactcttccaggaaacttcagggatctatcaaagccaattggtgctttgaaccccaagagagctgtgttttatgcagagcgttatgagacatgggaagatgatcaaagcccaccctaccattataatacccattattcaacagcaacatctactttatcctggcttgttcgaattgaacctttcacaaccttcttcctcaatgcaaatgatggaaaatttgatcatccagatcgaaccttctcatccgttgcaaggtcttggagaactagtcagagagatacttctgatgtaaaggaactaattccagagttctactacctaccagagatgtttgtcaacagtaatggatataatcttggagtcagagaagatgaagtagtggtaaatgatgttgatcttcccccttgggcaaaaaaacctgaagactttgtgcggatcaacaggatggccctagaaagtgaatttgtttcttgccaacttcatcagtggatcgaccttatatttggctataagcagcgaggaccagaagcagttcgtgctctgaatgtttttcactacttgacttatgaaggctctgtgaacctggatagtatcactgatcctgtgctcagggaggccatggaggcacagatacagaactttggacagacgccatctcagttgcttattgagccacatccgcctcggagctctgccatgcacctgtgtttccttccacagagtccgctcatgtttaaagatcagatgcaacaggatgtgataatggtgctgaagtttccttcaaattctccagtaacccatgtggcagccaacactctgccccacttgaccatccccgcagtggtgacagtgacttgcagccgactctttgcagtgaatagatggcacaacacagtaggcctcagaggagctccagggatactccttggntcaagcccaccatcttcccattgaaatggntccattaatagccaataattcaggtgtaaacaaaacgggcagatcacagacctcgttgaccagagtatacaaatcaatggcacatt

SEQ ID NO: 253 - DNA, 561 bp, Homo sapiens
  misc_feature (400)..(400): n equals a,t,g, or c
  misc_feature (521)..(521): n equals a,t,g, or c
  misc_feature (532)..(532): n equals a,t,g, or c
ggaactgggatttcagcaactgaatgcacgtgtgtgactacccacgagaagcaggacacttagcacctgctgagaagcccccacgcccatgttcccttctaggcactgcacatgcatgctggccggcctgacctcagtttccctcttgctgtggccgcttctgctccactctctgtgaggctcatccaccttgttgcctgtrgttgtggattgttcattctcaagtgctctgtatgccaagtactccattgtgtgaaaatcccacagcacgttcattctattatcaatgggcatttgggtagtttccacagtttggctgttaggaatagtgcagtgatgaacatgctggcacctgtcttctgttttttttttatttttagagacagggtcttgctctgtnacccaggctggagtgcagtggtgtgaaccttggcttcgctgggcctcctgggcttcaagcaatcctcccggctcggtctcctgagtagctgggaactgcaggtgtgtgcctgtgtgctggntaaatttttgnagtttttgtagagatggtgtcttgctctg

SEQ ID NO: 254 - DNA, 1305 bp, Homo sapiens
  misc_feature (36)..(36): n equals a,t,g, or c
  misc_feature (1288)..(1288): n equals a,t,g, or c
  misc_feature (1290)..(1290): n equals a,t,g, or c
aatcctcagtctggtctatattgttacttgcctgtntccactagaaggagtcaccaggcatttagtgaatgataatcctagaagttgagtstgagtacatcagagtttggcattatttgcaacatcccaggaatgagctataagactccattgctttctggactttagtgaccagctgatcttcccttggatcctccaataaaggggaaaaaatacttgtcttatgttgttttagcaagggagttcagccaagtgacaggaaagattccctggtctgcatctaaacattagtcaacagaaggaaaaggctcttttccttggagattttcaagttgaaaaagtacagctgcttggatggagtttctctcatcagaatagaaatatgctaggtggtcttcaagacctttttgaacctacagattctaaaccttagaggaagccagaatatgtgatcataccaggtgaggaaagttaggagatattcatcttaagagatatcctatttggcagtcacatgttacacttgagcaacaattgtctaggctagaaatatagaaccacaatatttatcatcattgggtcaatttctccccctctatcaagtgaggagattaaggcttaaagaaaggaaaggacttgccagccaccacagggctcatgaggggcttgaacccatgtcgtgtgtctctaccacagctgactctcagctggctaatggagaaaatgtgaggaattacctgtcaaattagattgagctcagagtaaatagatgagcacatttataactctaaattagactttctatcaaatgggaccaaacatatggaaggggctgctgtcctgcctcaatttagccaagacttgtcttgtctcaaagccaagactcagcagtacatggattctgagaagtccagggtctgaattgttgtctctgattactggaaggacaggttaactgaatgtctgtgatcactaacaggtgatgggctttgtgcccactccagagatattgtgggagacaaattcttttaacagcctgtcctcccggcatcaggagtcattgaacaatcatggattgttgtgtttgggattttttttttttttggctttgtttttggtttttgtgtgtgtgtgtgtgtgctgcatgcacatgcgtccaagacttacgggtggtttaggggaaagtgctagcaacagtgtcaatgtcattgttaactatatttcatatttgaggtctcattgttttcaaataaacagtgttttccatgaaaaaaaaaaaaaaaaaaantnctgcggccgtcaagg

SEQ ID NO: 255 - DNA, 538 bp, Homo sapiens
  misc_feature (346)..(346): n equals a,t,g, or c
  misc_feature (465)..(465): n equals a,t,g, or c
  misc_feature (478)..(478): n equals a,t,g, or c
  misc_feature (537)..(537): n equals a,t,g, or c
gtaaatccggctggactttcagcttctaagaacagtccgtttctcgaggatccaggcgcaggaggacagagcaatgggtgagagaactcttcacgctgcagtgcccacaccaggttatccagaatctgaatccatcatgatggcccccatttgtctagtggaaaaccaggaagagcagctgacagtgaattcaaaggcattagagattcttgacaagatttctcagcccgtggtggtggtggccattgtagggctataccgcacaggaaaatcctatctcatgaatcgtcttgcaggaaagcgcaatggcttccctctgggctccacggtgcartctgaaactaangggcatctggatgttgtgtgtgccccactctctaagccaaaccamaccctggtccttctggacaccgagggcctgggcgatgtagaaaagagtaaccctaagaatgactcgtggatctntgccctggctgtncttctaagcagcagctttgtctataacagcgtgggaccattaaccaccaggcctggagna

SEQ ID NO: 256 - DNA, 374 bp, Homo sapiens
cctgagcctgtgccgtaatgcccgcccctctccctcctccgtctgcatgcagtcatctggggacctggagaatgatgagcaggcagccagtgccatctctgagctggtcagcacagcctgcggtttccggctgcaccgcggcatgaatgtgcccttcaagcgcctgtctggtgagcccctgcccctgcccttggtggtggtactgggagcggggggctacttccaggggcttctcggcttccctctcctggggcgggggaagtgtgtctctcctccagtggtctttggagaacacacactgctggtgacggtgtcaggacagagggtgtttgtggtgaaaaagcagaaccgaggtcgggagcccattaatttct

SEQ ID NO: 257 - DNA, 321 bp, Homo sapiens
  misc_feature (283)..(283): n equals a,t,g, or c
catgtacggacatattgaaacgatggcacgcgcatcgctgagggtgcaagcaaagtggatggcgctgaagttgtcgttaagcgtgtaccggaaaccatgccgccgcaattatttgaaaaagcaggcggtaaaacgcaaactgcaccggttgcaaccccgcaagaactggccgattacgacgccattatttttggtacacctacccgctttggcaacatgtccggtcaaatgcgtaccttcctcgaccagacgggcggcctgtgggcttccggcgcactatacngaaaactggcgacgtctttagttccacggtactggcgg

SEQ ID NO: 258 - DNA, 720 bp, Homo sapiens
  misc_feature (3)..(3): n equals a,t,g, or c
  misc_feature (7)..(7): n equals a,t,g, or c
  misc_feature (31)..(31): n equals a,t,g, or c
  misc_feature (634)..(634): n equals a,t,g, or c
  misc_feature (667)..(667): n equals a,t,g, or c
  misc_feature (719)..(720): n equals a,t,g, or c
cgnaccncgaacggccgccagtgtgctgganttcggcttagcgtggtcgcggccgaggtacatttctatgaggtccatcggcactgagaagcactcgtttttctttcatcttgtagatgatgtgctgagcttcagctgtggcaggggtccttttcagatggtccttcactaaatcaattccaataaaaaggccaatgcccctaatatctcctatcaaagtgtgtttagccttctgttttttcagtaactcagtgagataattccctactctcttggcatttccttgaaggtcttcattttcaattatatccaggacagccaaaccaacagcacaagatactggatttcctccatacgtattaaaatattccatcccagagctgctgaaggcttctgcaatttctttggttgttaccacacatgccaccgggtggccgttgcccatcggttttcccattgtgacgatgtctrgaacaaagtcttcaccatacatctggaagctccagraatgtttcccaactctgccaaagcccacttgaacttcatcagctataaacacaccycstgcaccgtgtacctgcccgggcggccgctcgaaaagccgaattctgcagatatccatcacactggcggncgctcgagcatgcatctagagggcccaattcgncctatagtgagtcgtattacaattcatggccgcgtttacaacgtcggatggnn

SEQ ID NO: 259 - DNA, 1717 bp, Homo sapiens
  misc_feature (1072)..(1072): n equals a,t,g, or c
  misc_feature (1596)..(1596): n equals a,t,g, or c
  misc_feature (1634)..(1634): n equals a,t,g, or c
  misc_feature (1657)..(1657): n equals a,t,g, or c
  misc_feature (1702)..(1702): n equals a,t,g, or c
  misc_feature (1712)..(1712): n equals a,t,g, or c
gaggacgaggaggatgctcacgctggcatcattggccgcttcctaggcctgcagtcccatgatcaccatcctcccagggcaaactcaaggaccaaactactgtggcccaagagggaatcccttctccacgagggcctgccaawaaccacaaggcagccaaacagaacgttaggggccaggaagacaacaaggcctggaagcttaaggctgtggacgccttcaagtctgccccactgtatcagaggccaggctactacagtgccccacagacrcccctcagccccactcccatgttcttccccctagaaccatcagcgccgtcaaagcttcacagtgtcacaggcatagacaccaaagacaaaagcttaaagactgtgagttctggggccaagaaaagttttgaattgctctcagagagcgatggggccttgatggagcacccagaagtatctcaagtgaggaggaaaaccgtggagtttaacctgacggatatgccagagatccccgaaaatcacctcaaagaacctttggaacaatcaccaaccaacatacacactacactcaaagatcacatggatccttattgggccttggaaaacaggtctgtcctccacctgaaccaggggcactgcattgccctgtgccccaccccagcttcccttgctctgagcctacccttcctccacaatttcctagggttccatcactgccagagcacactggacctacgcccagcactggcttggggtatatacttggccaccttcacagggatcctagggaagtgtccgggaccttttctcacttcaccctggtatcacccggaagacttcttgggaccaggtgaaggaagatgaggttgtgctgaccagaatgctgctggagaactgccccagggctgacaggccaggcttagctgagcagatgttatcactggccccaacttactttgagcaagggtggctgacccaaaaccatgaggtggcagtcagctggatgacagatgaacacttcccccataactatttagggtagtacccaagcactacaggaaagggtggcaggaactctncactcctaggaactggtagatggtgaggttgagggtgtccagcgcccttaggtcattttctcactgcctgggaacctcaccaaaatacttcttgcttccttggggtcagcccaaagctgtcacaaaatcagatatttccctttattccagatttcctggacactttcacccaattataaacaccccacttcagccccaatcacgtgggaggaagtgtaacttcccttttctggattctcaagcagttactttcacggtcagaacacgcagctattatgattgaaaacttaaaagggcaacaatttcagtcttgcttctagggctagacaggracttggcaaacatctgtggcctgttcagcaaaggatgttaatatttaagaatcttgtcttgggctgggtgtggaggcaagtggatcacaggaggtcaggagtttgagaccaacctggccaacatgatgaaaccccatctctaccaaaaaaaatacaaatcagctgggcgtcgtggtgtgcctgtagtcccancgcaggaggttgaggggagaattgcttgaacccaggangtggtggttgcagtgagattgangcaactgcaatccagcctgggcgacgggagtgagactgtctcaanaaaagaaaanaaaaa

SEQ ID NO: 260 - DNA, 1469 bp, Homo sapiens
  misc_feature (30)..(30): n equals a,t,g, or c
  misc_feature (745)..(745): n equals a,t,g, or c
gctacagggaattggcttaaagggcaagtnggttagtacttagctgtgtttttattcaaagtctacattttatgtagtggttaatgtttgctgttcattaggatggtttcacagttaccatacaaatgtagaagcaacaggtccaaaaagtagggcatgattttctccatgtaatccagggagaaaacaagccatgaccattgttggttgggagactgaaggtgattgaaggttcaccatcatcctcaccaacttttgggscataattcacccaaccctttggtggagcctgaaaaaaatctgggcagaatgtaggacttctttattttgtttaaaggggtaacacagagtgcccttatgaaggagttggagatcctgcmaggaagagaaggagtgaaggagagatcaagagagagaaacaatgaggaacatttcatttgacccaacatcctttaggagcataaatgttgacactaagttatcccttttgtgctaaaatggacagtattggcaaaatgataccacaacttcttattctctggctctatattgctttggraacacttaaacatcaaatggagttaaatacatatttgaaatttaggttaggaaatattggtgaggaggcctcaaaaagggggaaacatcttttgtctgggaggatattttccattttgtggatttccctgatctttttctaccaccctgaggggtgttgggggaattatcattttgctacattttnagaggtcatccaggatttttgaaactttacattctttacggttaagcaagatgtacagctcagtcaaagacactaaattcttcttagaaaaatagtgctaaggagtatagcagatgacctatatgtgtgttggctgggagaatatcatcttaaagtgagagtratgttgtggagacagttgaaatgtcaatgctagagcctctgtggtgtgaatgggcacgttaggttgttgcattagaaagtgactgtttctgacagaaatttgtagctttgtgcaaactcacccaccatctacctcaataaaatatagagaaaagaaaaatagagcagtttgagttctatgaggtatgcaggcccagagagacataagtatgttcctttagtcttgcttcctgtgtgccacactgcccctccacaaccatagctgggggcaattgtttaaagtcattttgttcccgactagctgccttgcacattatcttcattttcctggaatttgatacagagagcaatttatagccaattgatagcttatgctgtttcaatgtaaattcgtggtaaataacttaggaactgcctcttctttttctttgaaaacctacttataactgttgctaataagaatgtgtattgttcaggacaacttgtctccatacagttgggttstaaccctcatgcttggcccaamyaaactctctacttataaaaaaaaaaaaaaaaaacc

SEQ ID NO: 261 - DNA, 734 bp, Homo sapiens
  misc_feature (67)..(67): n equals a,t,g, or c
  misc_feature (717)..(717): n equals a,t,g, or c
aagctggtcaatgtcaccatccacttccggctgaagaccattaacctccagagcctcatcaataatnagatcccggactgctataccttcagcgtcctgatcacgtttggacaacaaagcacacagtgggcgggatccccatcagcacggagaacaacagcttccggctcctgtttgacgtggtggtcatcctcacctgctccctgtccttcctcctctgcgcccgctcactccttcgcggcttcctgctgcagaacgagtttgtggggttcatgtggcggcagcggggacgggtcatcagcctgtgggagcggctggaatttgtcaatggctggtacatcctgctcgtcaccagcgatgtgctcaccatctcgggcaccatcatgaagatcggcatcgaggccaagaacttggcgagctacgacgtctgcagcatcctcctgggcacctcgacgctgctggtgtgggtgggcgtgatccgctacctgaccttcttccacaactacaatatcctcatcgccacactgcgggtggccctgcccagcgtcatgcgcttctgctgctgcgtggctgtcatctamctgggstactgcttctgtggctggatcgtgctggggscctatcatgtkaagcctcttcatctacatggtgctcarcctyttcatcgcgstcatcaccggsgsctacgacaccatcaagcatcccggcggcgcaggngcagaggagagcgagct

SEQ ID NO: 262 - DNA, 594 bp, Homo sapiens
  misc_feature (570)..(570): n equals a,t,g, or c
  misc_feature (572)..(572): n equals a,t,g, or c
  misc_feature (584)..(584): n equals a,t,g, or c
ggcacgagcaaattttctttttaatactggaaagtttatttttaattttattcatcacattaatgacacagacactatactgagtaccaataatagcaaccctgtgatttgtccaagtgccgggagtggaggccatcctgacaacagctctatgattttctatgccaatgacacaggagcccaacagtttgaaaagtggtgggataagtccaggacagtccccttttatcttgtagggctcctcctcccactgctcaatttcaagtctccttcatttttttcaaaatttawtatcctaggcacagtgtctgtccytkatttgattttccttgtcacctttaaggctgttcgcttgggatttcatttggaatttcattggtttataccaacagaattttttgtaccagagataagatttcagtttccacagctgactggagtgcttacccttgctttttttattcataattgtatcatcacactcttggaagaacaacaagaaacaaggaaaacaatgtggaggggacttgtggcattggcttatatgctggtggacattaacttaacccnanattgggagtccngggttttggc

SEQ ID NO: 263 - DNA, 715 bp, Homo sapiens
  misc_feature (627)..(627): n equals a,t,g, or c
ggcagagcgggtttcgttgtgtttcgcgccatgtcgtttgctgagagcgggtggcggtcggctctgcggcgccgcggtcccggcaccccgggccctgtggctcggccatcgtattcctcctttactcagggggacagctggggtgaaggcgaagtcgacgaggaggagggatgcgaccaagtggcccgcgacctgcgggcggagttctcggctggggcgtggtcagagcccagaaagcgctcggtgctcccgccggacgggaacgggtcgcccgttctgcccgataagcgcaatggtatctttcccgcggccgcgggcagcagagcccagcctcggcggtggccggtccaggtcctctctattctctgctcgctgctcttcgccattcttctcgccttcctcctcgcatcgctacttgatcgttaaaggtattgaagccgacgccttgaaagtctgtccagagtaaagttgagccagggtgtggctctcgtctccacccatctccctttccctcgcgctaagccctcaggctggcagctgctttcacccagagtcctcatttgcatcttactttgctctcccgccctttgccttttctaagtggagcgtcctgatccatgatcaggngacgtatttttaaaaaggatcgtttgattaaatgggtactcttgaagaaatatcttcaagtccttgaacactggggatgaaatattgt

SEQ ID NO: 264 - DNA, 2013 bp, Homo sapiens
  misc_feature (70)..(70): n equals a,t,g, or c
ggtcacgaggcacttttggtaagccagggatcgtgtgggtggtacggagttgccacatttcggcaaaggnaactatgtagctgatcttggagccatggtggtaacaggtctttgagggaatcctatggctgtggtcagcaaacaagtaaatatggaactggccaagatcaagcaaaaatgcccactttatgaagccaacggacaagctgttcctaaagagaaagatgaaatggtagagcaagagtttaaccggttgctagaagctacatcttaccttagtcatcaactagacttcaatgtcctcaataataagcctgtgtcccttggccaggcattggaagttgtcattcagttacaagagaagcatgtcaaagatgagcagattgaacattggaagaagatagtgaaaactcaggaagaattgaaagaacttcttaataagatggtaaatttgaaagagaaaattaaagaactccatcagcaatacaaagaagcatctgaagtaaagccacccagagatattactgccgagttcttagtgaaaagcaaacacagggatctgaccgccctatgcaaggaatatgatgaattagctgaaacacaaggaaagctagaagaaaaacttcaggagttggaagcgaatcccccaagtgatgtatatctctcatcaagagacagacaaatacttgattggcattttgcaaatcttgaatttgctaatgccacacctctctcaactctctcccttaagcactgggatcaggatgatgactttgagttcactggcagccacctgacagtaaggaatggctactcgtgtgtgcctgtggctttagcagaaggcctagacattaaactgaatacagcagtgcgacaggttcgctacacggcttcaggatgtgaagtgatagctgtgaatacccgctccacgagtcaaacctttatttataaatgcgacgcagttctctgtacccttcccctgggtgtgctgaagcagcagccaccagccgttcagtttgtgccacctctccctgagtggaaaacatctgcagtccaaaggatgggatttggcaaccttaacaaggtggtgttgtgttttgatcgggtgttctgggatccaagtgtcaatttgttcgggcatgttggcagtacgactgccagcaggggtgagctcttcctcttctggaacctctataaagctccaatactgttggcactagtggcaggagaagctgctggtatcatggaaaacataagtgacgatgtgattgttggccgatgcctggccattctcaaagggatttttggtagcagtgcagtacctcagcccaaagaaactgtggtgtctcgttggcgtgctgatccctgggctcggggctcttattcctatgttgctgcaggatcatctggaaatgactatgatttaatggctcagccaatcactcctggcccctcgattccaggtgccccacagccgattccacgactcttctttgcgggagaacatacgatccgtaactacccagccacagtgcatggtgctctgctgagtgggctgcgagaagcgggaagaattgcagaccagtttttgggggccatgtatacgctgcctcgccaggccacaccaggtgttcctgcacagcagtccccaagcatgtgagacagatgcattctaagggaagaggcccatgtgcctgtttctgccatgtaaggaaggctcttctagcaatactagatcccactgagaaaatccaccctggcatctgggctcctgatcagctgatggagctcctgatttgacaaaggagcttgcctcctttgaatgacctagagcacagggaggaacttgtccattagtttggaattgtgttcttcgtaaagactgaggcaagcaagtgctgtgaaataacatcatcttagtcccttggtgtgtggggtttgttttttttttttatattttgagaataaaacttcatataaaattgaaaaaaaaaaaaaaaaaaaaaaaaactc

SEQ ID NO: 265 - DNA, 947 bp, Homo sapiens
ggcagaggtttctggagtgcaccctgatcctcacctcggtcgtgcctcctgagctgcccatcgagctgtccctggccgtcaacacctccctcatcgccctggccaagctctacctggagggagtcaagttcagtgacttccaggccaccctacaggggctgctgctggccggctgcttcctcttcatctcccgttccaagcccctcaagaccctctcccgagaacggcccctgcccaacatcttcaacctgtacaccatcctcaccgtcatgctccagttctttgtgcacttcctgagccttgtctacctgtaccgtgaggcccaggcccggagccccgagaagcaggagcagttcgtggacttgtacaaggagtttgagccaagcctggtcaacagcaccgtctacatcatggccatggccatgcagatggccaccttcgccatcaattacaaaggcccgcccttcatggagagcctgcccgagaacaagcccctggtgtggagtctggcagtttcactcctggccatcattggcctgctcctcggctcctcgcccgacttcaacagccagtttggcctcgtggacatccctgtggagttcaagctggtcattgcccaggtcctgctcctggacttctgcctggcgctcctggccgaccgcgtcctgcagttcttcctggggaccccgaagctgaaagtgccttcctgagatggcagtgctggtacccactgcccaccctggctgccgctgggcgggaaccccaacagggccccgggagggaaccctgcccccaaccccccacagcaaggctgtacagtctcgcccttggaagactgagctgggacccccacagccatccgctggcttggccagcagaaccagccccaagccagcacctttggtaaataaagcagcatctgagattttaaaaaaaaaaaaaaaaaa

SEQ ID NO: 266 - DNA, 716 bp, Homo sapiens
  misc_feature (14)..(14): n equals a,t,g, or c
  misc_feature (20)..(20): n equals a,t,g, or c
  misc_feature (29)..(29): n equals a,t,g, or c
  misc_feature (89)..(89): n equals a,t,g, or c
ggggggaaaaaggnaagccnctgtcctgntcttacccagctctatgatcattagaatgacagctgtgaatacacaaagtgtaaaccttnttgtcagccctgactgtctgaagtatcaggttcctccacacacgtctgggccccagcagcaaaagaaggccactgggtagaagcgcacccgttggtccacaatgtgaatcactgcccactgttcactccccagaaagccagttgacttcacaaacttcttatacaatgtctgggctcggataagtaagacttgtggctctgactgaagttttggaaacattcactagtatttcccagacagaatacaggtgtcatcaatagcagaggtatcaggcttgagaaaacaaagsccatttgacmaactcgacaagtataatctatcaccagtggagatgtgctctgtccactctgggtgtgtttcatcctcagctctgtgtacaaataccagatgtaattgacggtgtagagaaatgaggaaatgtagaatatctctttcacttggcagaacattggtgtaattaaaatttcacaatcagtagccactgcagataacttgacaagatctagaattctgtttccagtatccagtaaaattattcagacaccagatctgctgattatcttaatcttggaccttccagcctccagaactgtccaactgcttgtaggttatagcagatgatgtcc

SEQ ID NO: 267 - DNA, 612 bp, Homo sapiens
gtgaccgcccagagcgcggtgaggagcgcgggggcgcggggcgggaggcccagctgagccggccgtcggagtgagaccctgcggcagagacgacggaggggaagaacccgatcccggagcggcggcggcggggggagccggagccgctgggatgttcagtcatgaaacgagtgcgtaccgagcagattcagatggcagtgtcctgctacctcaaacgccggcagtacgtggactcagatggtcccctgaagcaaggactgcggctgtcacagactgctgaagagatggcggccaatctaacagtgcaatcagaatctggttgtgccaacatagtgtctgcagccccttgccaggcagaaccccagcaatatgaagtacagtttggacgactgcggaattttctcactgattctgattcccagcatagccacgaagtgatgcctctcctctatcctctctttgtctacctccatctcaacctggtccaaaacagtccgaagagcacagtggaaagtttttacagccgcttccatggaatgtttctgcagaatgctagccagaaggatgtcattgagcagctacagacactcaaacatccagacatctatctat

SEQ ID NO: 268 - DNA, 631 bp, Homo sapiens
  misc_feature (526)..(526): n equals a,t,g, or c
  misc_feature (548)..(548): n equals a,t,g, or c
  misc_feature (586)..(586): n equals a,t,g, or c
  misc_feature (605)..(605): n equals a,t,g, or c
  misc_feature (612)..(612): n equals a,t,g, or c
ggcaacacagcatccggggctcctcacaaggtgaagaaacataagcagttaatgctagaatctatcatcagaggcctgtatcacctagctcgcactgaagtcgtctgtgaaagcttgaaggctctaaaaaaaatcctggagctgctgacagaccgagacgtgagcttctacttcaaggaaatagtgctgcaaacaaggaccttctttgaagatgagcaggatgatgtgagattgactgccatcttcttatttgaggacctggcacccctaacaggaagaaggtggaagattttttttgctgaagaaataaaaaagagcctgatttcattccttctgcacctttgggatcccaaccccaagattggagttgcttgccgtgatgtcttgatggtctgcattccctttttgggcctccaggagctctatggggtattagaccgtctccttgatcaggatctaccaagggccagggatttctataggcaattctgtgtgaaactggccaagaaaaaccaggaaattctgnggatcttcacacacacttcttnaccttcttcaccaagcaccctgggaaggggatcagganttgcaagttgtcaaaactncagaatnccgttgttcttaaatttga

SEQ ID NO: 269 - DNA, 807 bp, Homo sapiens
  misc_feature (738)..(738): n equals a,t,g, or c
  misc_feature (770)..(770): n equals a,t,g, or c
  misc_feature (778)..(778): n equals a,t,g, or c
  misc_feature (801)..(801): n equals a,t,g, or c
gcagagggatcttgccctcattctttgggtctgaaacactggcagtcgttggaaacaggactcagggataaaccagcgcaatggattgggggacgctgcacactttcatcgggggtgtcaacaaacactccaccagcatcgggaaggtgtggatcacagtcatctttattttccgagtcatgatcctcgtggtggctgcccaggaagtgtggggtgacgagcaagaggacttcgtctgcaacacactgcaaccgggatgcaaaaatgtgtgctatgaccactttttcccggtgtcccacatccggctgtgggccctccagctgatcttcgtctccaccccagcgctgctggtggccatgcatgtggcctactacaggcacgaaaccactcgcaagttcaggcgaggagagaagaggaatgatttcaaagacatagaggacataaaaagcagaaggttcggatagaggggtcgctgtggtggacgtacaccagcagcatctttttccgawtcatctttgaagcagcctttawgtatgtgttttacttcctttacaatgggtaccacctgccctgggtgttgaaatgtgggattgacccctgccccaaccttgttgactgctttatttctaggccaacagagaagaccgtgtttaccatttttatgatttctgcgtctgtgatttgcatgctgcttaacgtggcagagttgtgctacctgctgctgaaagtgtgttttangagatcaaagagagcacagacgcaaaaaaatnaccccatnatgccctaaaggagagtaagcanaatgaa

SEQ ID NO: 270 - DNA, 686 bp, Homo sapiens
  misc_feature (655)..(655): n equals a,t,g, or c
ggaggttctcaagcagttaccccccaagaaagatcgaattgagttgtgtgcartgtcggagaagcaggagcaactctatttgggtcttttcaacagattgaaaaaatctatcaataacttggtcacagaaaaaaacacagaaatgtgcaatgtcatgatgcagttgaggaaaatggccaatcatcctttattacatcgccaatattacacagctgaaaaactcaaggaaatgtctcagcttatgctaaaggaacctacacattgtgaggctaaccctgacctgatctttgaagatatggaagttatgacagacttcgaactacatgtactttgtaaacagtaccgacacattaataactttcagttagacatggacttgattttagattctggaaaatttcgagttttaggatgcatcttgtctgaattgaaacagaagggtgatagagttgtgttatttagccaatttaccatgrtgctggrtatcttagaggttctattaaaacatcatcagcataggtaccycagrttagatggraagactcagrtttctgaagggattcmtctaattgatgagtttaataccgatatrtatctttggtttctgctatcacaaaagctggtggattaggaattaaatctggacttcagcaangttgttatacttcacggtattggactgtaat

SEQ ID NO: 271 - DNA, 532 bp, Homo sapiens
  misc_feature (255)..(255): n equals a,t,g, or c
gggagatcacttcccgcctcctgattctggtgctcttctcagccactttgaaattgaaggctgtgcccttcctagtgctcaacttcctgatcatcctctttgagccctggattaagttctggagaagtggtgcccagatgcccaataacattgagaaaaacttcagccgggtcggcactctggtggtcctgatttcagtcaccatcctctatgctggcatcaacttctcttgctggtcagctttgcagttgaggntggcagacagagatctcgtcgacaaagggcagaactggggacatatgggcctgcactatagtgtgaagttggtagagaatgtgatcatggtcttggtttttaagttctwtggagtgaaagtgktactgaattactgtcatyccttgawtgccttgcagctcattattgcttatctgatttccattggcttcatgctccttttcttccagtacttgcatccattgcgctcactcttcacccataatgtagtagactacctccattgtgtctgctgtca

SEQ ID NO: 272 - DNA, 567 bp, Homo sapiens
  misc_feature (12)..(12): n equals a,t,g, or c
  misc_feature (273)..(273): n equals a,t,g, or c
  misc_feature (499)..(499): n equals a,t,g, or c
  misc_feature (551)..(551): n equals a,t,g, or c
gggagcccaccntagccgggcggctgggatgatgaaccggacgacccccgaccaggagctggtgccggcgtcggagcccgtgtgggagcggccgtggtcggtggakgagatccgcaggagcagccagagctggtcgctggcggccgacgcgggcctactacagtttctacaggaattctcacagcaaactatctctaggacccatgaaatcaagaaacaagtggacggactaatccgggaaaccaaagccacagattgtcgcctgcataatgncttcaatgacttccttatgctctctaatacccagttcatagagaatgtgagttatttaagttatattataattccttttttgggagtaggagatattgtaattttaaataacttactgttaggttccctcctaaattttggtggaagtgtggttcttggtaattgtagcttttttctctgggattaacgcctcttttttatttgtaaagttttaagtccttttttncaagcctctaaaaaagtctaatgataaaaattttcttatacttcagtgcttncatcttttgcggtttg

SEQ ID NO: 273 - DNA, 1219 bp, Homo sapiens
aattcggctttcgagcggccgcccgggcaggtacttgctttgccgtgccacataaccataggtcacccacctctagttctacaggaatccatcatctctgttggaataactcaaaatacaggctcttgatggtaggttaaaaacatggtcctgttatgtgatagataacacaatactgtgttttgaagttaagtcgaaaattgtaggggttatcagtaacctagaaaagaaaacagcttgtccatgtagaaagattagaggatctaaattaaattggaaattgtcctattgcatcaatcttctccctaactttatcaataaagacctgatttccctcactttattctggaaactgatattgtaacacatgaaatccataggttgtatagaatgagggtaacagaacttttatgttatctgtttgaaagaatgaaaggagcactgtaatcctgaattcaaattggagtcttgtaaacaactaaataatagtatgtgatactatggaaatataatatatgacccggaaggattaaagaagttgtcattagaatatgtgggatttatgttacacataaataagcagtcatctaagaggactaacatggagtttttcacaaaatgaaaaagaaagaaacaaagggttgaatagtacaatgaagactgtattacattcagacaataaggaattgtctttttatttgcagggcaaaacaaaatctttatctgtggtgatagaaagttcagggtaatatatatggaagcatgaaatgaaaaattgtggaacaaactatctaagaatataaatatagtctctcttttcataaatattcaatacgttatttgacacattggtttgagtsaagctccacaagtacaattttaagcatcttgatttgggctgaggtccagtaaattatatattcccaacaactatcagagctctcccactaaaaatacatgctcacgctctactttgaaaatattctaagataattatttccattttcatagtaactagtacagttatgactagcattctctcaggtttctaaggaaagaaaattattctgagatactgttaataagagaaaatgtggtaatagagaggggcattttcttaaaattgtgctaaagctgtcatttttatttttaatgactttaactgtgctagacaagattttattttcagccacagaaataaaactatccaacataactc

SEQ ID NO: 274 - DNA, 765 bp, Homo sapiens
  misc_feature (23)..(23): n equals a,t,g, or c
  misc_feature (448)..(448): n equals a,t,g, or c
  misc_feature (451)..(451): n equals a,t,g, or c
  misc_feature (586)..(586): n equals a,t,g, or c
  misc_feature (635)..(635): n equals a,t,g, or c
  misc_feature (733)..(733): n equals a,t,g, or c
ggaacaaaggccggacctccaangcggtggcggccgctctaaaactagtggatccccctttcaaccccatcgggtcctgagtaatataccgcccctgcaacggatcgtagtaccggtgacggttatagtacagccctgattcctcatcatgctgctgccctggcagacggtacggctgatacacatgatgcgggttctcctcattaagctggttgccccattcatcatattccgcgctccacgccgtattgccgtcttcgctgataagcgccagcggcagtccccggtggtcgcagtgataaagatgarcttttcgcgccggtgtgtattccggctccacctgtctggccagttgctccaccgtcagcccgcactgcgcaagccacgcccggctttcactgctcacgcggtctgcccggatttcttcctccagcctgtccagcagccncancagttcagccgggaacaccacgccgtggccgttctcactcccttcctgctggagcgtctctgccaagctgcgccgctgcgctttttcccgctcgccgttctctgtctcgaccggatgaacggcgtgaacttcccngctcgtataccgtctggatactgtggtgtcagtctgcaccgtcttcagnctgtctccgtccatccataccacgtcactccggtttaccgaaaacgaaatccaccccgtcaggtcacgctcccgccgccaaaaccgttttgccattcncctcccaaccgggtcttaaaaggttccggtct

SEQ ID NO: 275 - DNA, 522 bp, Homo sapiens
  misc_feature (514)..(514): n equals a,t,g, or c
caccacgtggctgtgaaaatgacaaagcatggtcgtgagccactatgcccggccggatttgcccttattaatggttatttcttgtgaaagtttctttttgcctttgcattccttttattctgtttattcccccatgcctcacccaaagagttgcacggtcaattggcccgtgaaggggacgcctactttcaaacaaggcagacaggacacgacaggacggcggctcatagcacagactttggattgcagtggatgggaccagatcctggctccacttctsgcyagctgtgtggccctgggcaagctgcttaacctctctgggcctcagtttctccccctgtaaactgggggatgtgaacagcgcctgcctccgagtcctaaggattgggagtagtcgtgtaaagtgctcaggtccacaggccatcaatactaatagttaaaaattattcttagaatcttgcttccctcagctccctgaaaggccactaaggcaccccagttgcagaggccaatnggtccggg

SEQ ID NO: 276 - DNA, 746 bp, Homo sapiens
cccaagcactcctttttctctgcatgatacttctgcttattgtccttcacactagctacatgatttatagtcttgctccccaatatgttatgtatggaagccaaaattacttaatagagactaatataacttctgataatcataaaggcaattcaaccctttctgtgccaaagagatgtgatgcagawgctcctgaagatcagtgtactgttacccggacatacctattccttcacaagttctggttcttcagtgctgcttactattttggtaactgggcctttcttggggtatttttgattggattaattgtatcctgttgtaaagggaagaaatcggttattgaaggagtagatgaagattcagacataagtgatgatgagccctctgtctattctgcttgacagccttctgtcttaaaggttttataatgctgactgaatatctgttatgcatttttaaagtattaaactaacattaggatttgctaactagctttcatcaaaaatgggagcatggctataagacaactatattttattatatgttttctgaagtaacattgtatcatagattaacattttaaattaccataatcatgctatgtaaatataagactactggctttgtgagggaatgtttgtgcaaaattttttcctctaatgtataatagtgttaaattgattaaaaatcttccagaattaaaaaaaaaaaaaaaaaaaaaaaaaaaaaaaaagggcggccgc

SEQ ID NO: 277 - DNA, 612 bp, Homo sapiens
  misc_feature (82)..(82): n equals a,t,g, or c
  misc_feature (539)..(539): n equals a,t,g, or c
ccgggaacctggcgccgccggaactgatcgcggcctagtcccgacgcgtgtgtgctagtgagccggagccggcgacggcggncagtggcggcccggcctgcaggagcccgacggggtctctgccatgggggagtgacgcgcctgcacccgctgttccgcggcagcggcgaagacatgaggagaccccgcgacaggggcagcggcggcggctcgtgagccccgggatggaggagaaatacggcggggacgtgctggccggccccggcggcggcggcggccttgggccggtggacgtacccagcgctcgattaacaaaatatattgtgttactatgtttcactaaatttttgaaggctgtgggacttttcgaatcatatgatctcctaaaagctgttcacattgttcagttcatttttatattaaaacttgggactgcattttttatggttttgtttcaaaagccattttcttctgggaaaactattaccaaacaccagataattggttcactaaaaattcctggtagaaaagaatttaangacaaaaagttaaatgatcctaggaaactagtgggaaactgagaaatcataaaattgtactctgaagaaaaag

SEQ ID NO: 278 - DNA, 903 bp, Homo sapiens
  misc_feature (839)..(839): n equals a,t,g, or c
ggaggtagcaaacagccttgccaaactgagtgtccatgctctgagtcgccttggagggtatttggctgaagaacaagcaactccagaaaatccaaccataaggaaaagcttagctggcatgctgacaccctatgttgctagaaaacttgctgtggctagtgtgactgagattttgaagatgcttaacagcaacacagaaagtccatatttgatatggaacaattctacaagagcagaattacttgaatttcttgaatcccaacaagaaaacatgattaaaaaaggtgattgtgacaaaacttatggatcagaatttgtctacagtgatcatgccaaagaacttattgtaggggagatttttgttagggtgtataatgaagttcctactttccaactggaggttccaaaagcatttgctgcaagtctcttggattatataggctcgcakgcccaatacttgcacacattcatggccatcacacacgcggcaaaagtggagtcagagcaacatggagatcgcttaccgagagtagaaatggctttggaggctctgagaaatgtcataaaatacaatccaggttctgagagtgaatgcattgggcactttaagttgatattttctcttctccgagttcatggagctggtcaagtgcagcagttggctttagaggttgtgaatatagtgacatctaaccaagactgtgtcaacaatattgctgaatcaatgggttttgtccagtttattggctcttctacattcattgccatcaagtcggtcagcttggttctgggaaactctttatgctttggacatccgagtacaaaaattaatcaaagangcaatggcaaagggtgctttgattccatttactggatatgttctgcaattcaacacatccacag

SEQ ID NO: 279 - DNA, 609 bp, Homo sapiens
  misc_feature (517)..(517): n equals a,t,g, or c
  misc_feature (522)..(522): n equals a,t,g, or c
  misc_feature (553)..(553): n equals a,t,g, or c
  misc_feature (562)..(562): n equals a,t,g, or c
gcggaaggagcccccasgaagccctgtagatgcccccaccccagcccatggagttgctatggttaagcagcctgagccgtacagttgaaaaggggcggtggggcccatctccaaatagcacagccagttcagccgtctgtcctcaacccaggagagctgggaaagccagtggactcctgcacctggttcttgtcactcctggcgtttgtgtacagatcaccacttctctttttggttcattgttgaggagtcgttttccggacggctccatcacagcattgagctatcaagctgctgttttccacagttggtggtcacagccagggaagttgctgtcttgatttgttacattgtcagtaatccccaaggaaccaatggatgtcagtaggagtttctgttaaatgtctccttgatggggactcagtactgtgtagagacgctgtgtttctcttctgggggtgtggcattcagaaaccactgggggcctttttaaaatctaacagatgccggcccgggncgccntgggcttcacgcctgggaaattcccaggcanttggggganggctgaagcgggcggattcaacaagcgcaaggaaatttgagaaccat

SEQ ID NO: 280 - DNA, 1099 bp, Homo sapiens
  misc_feature (1011)..(1011): n equals a,t,g, or c
  misc_feature (1086)..(1086): n equals a,t,g, or c
  misc_feature (1090)..(1090): n equals a,t,g, or c
cactattgtactggagcttatcggatttcacctgtagatgtaaatagtagaccttcctcctgccttactaattttcttctaaatggtcgttctgttttattggaacaaccacgaaagtcaggttctaaagtcattagtcatatgcttagtagccatggaggagagatttttttgcacgtccttagcagttctcgatccattctagaagatccaccatcaattagtgaaggatgtggaggaagagttacagactaccggattacaaccccagatataaaatcgatggaagtcttgaggtccctttggaacgagcaaaagatcagttagaaaaacatacccgttactggcctatgatcatttcacaaaccaccatttttaacatgcaagcggtagttccattagccagtgttattgtgaaagawtctctgacagaagaagatgtgttaaactgtcaaaaaacaatatacaacttagttgatatggaaagaaaaaatgatcctctacctatttccacagttggtacaagaggaaagggccctaaaagagatgaacaataccgtatcatgtggaatgaattagaaacccttgtcagagcccatatcaacaactcagagaaacatcaaagagtcttggaatgtctgatggcatgcaggagcaaacccccagaagaggaagaacgaaagaaacgaggaagaaagagggaagacaaagaggacaagtcagagaaagcagtgaaagattatgaacaggaaaagtcttggcaagactcagagagattaaaaggaatcttagagcgtggaaaagaagaattggctgaagctgagattataaaagattcgcctgattccccagaacctccaaacaaaaaaccccttgttgaaatggrtgaaactccacaagtggaaaaatcaaaagggccagtgtcgttattatccttgtggagtaatagatcaatactgccaattccagaaaacatcagggatttgctggacgttttgaactctgttaatnaacagrgcttgaactwtatccaacatctttaaagggggaaattggggtttggggaccaccggaaattgggaaagnccanccggcagtt

SEQ ID NO: 281 - DNA, 1013 bp, Homo sapiens
tgaatcagtcacctgtgcttgcttaaaaagtttcttgaagactgtcatcaccaatgctcaagaaacagatgttaatatggagtcagtttttgactatagtataaattctgtacatgatgagaaaatggaagagcaaactgaaattcttcaaaatggcttcaatcctgaagaagataaatgcaataactgtgatcaagagttaaataaaaagccccaggacgaaacaaaggagagcacttcatgccctgtggtacaaaaaagagcagctctacttaatgcaattcttcattcagcatatagcgagacatttcttctgcctcatttgaaagacatcccagcacagcatatcacgctgtttcttaagtatttgtatttcctgtacctgaagtgtagcgaaaatgctactatgactcttcctggaatacacccacctaccttgaaccagattatggattggatatgtctacttctggatgcaaattttactgttgttgtaatgatgccagaagcaaagaggctactgataaatctttacaagcttgtaaaatctcagatatctgtttattctgagctcaacaagattgaagtaagttttcgggagctacagaaattaaatcaagaaaagaataatagaggattatattcaattgaagtgctggagctcttctgatattatcaattctccttcatagacattttataaagctcttttatgtgaactcttgcttcatccaggcaagaacggtgttttgtttgcgaccatctcagtgtcaagagaaacgtgtcagtgagtacctggaccatcacttaactgatgctccggggtaggactgcaggtttcacatgaacctgttctaggctgtggacattggtgtggagaggttctgcaattttttaaaaatatgtaactgggttgattttaagtaaaattatttgtgtattgataaaagtctaatttcttatcatgtgttttgaattttttcttttaataaaaaatgaccattgaagcagtg

SEQ ID NO: 282 - DNA, 1197 bp, Homo sapiens
ggcacgagaggaagtccactagcagcttctaaggaatgcctctctgtatggaacataaaatttcaaacactacagacttcaaaagagttaccacaagggaccagtggtcaactctggtattatggagaacatttgtttatgctacatggaaaatctctaactgtgattccatacaagtgtgaagtgtcatcattagcaggtgctcttggaaaactcaagcatagtcaagatccaggaactcatgtcgtgtcccattttgtaaactgggagacacctcaaggatgtggacttgggttccagaactcagagcagtcaagaagaattttaaggagacgaaaaattgaagtgagtttacagccagaggttccaccatccaaacaacttttgtcaaccataatgaaagattcagaaaaacacattgaagtagaagtacggaaatttttggctctgaagcagacacctgactttcatactgtcattggggacacagtaacaggacttctggaaaggtgtaaagcagaaccatcattttatccccggaactgtctgatgcagcttatccraacgcatgtgctttcttacagtttgtgccccgacttaatggagattgccttaaaaaagaaagatgtacagttgttacaactctgtctacagcagttccctgacattcctgaatcagtcacctgtgcttgcttaaaaattttcttgagcattggtgatgacagtcttcaagaaacagatgttaatatggagtcagtttttgactatagtataaattctgtacatgatgagaaaatggaagagcaaactgaaattcttcaaaatggcttcaatcctgaagaagataaatgcaataactgtgatcaagagttaaataaaaagccccaggacgaaacaaaggagagcacttcatgccctgtggtacaaaaaagagcagctctacttaatgcaattcttcattcagcatatagcgagacatttcttctgcctcatttgaaagacatcccagcacagcatatcacgctgtttcttaagtatttgtatttcctgtacctgaagtcatccttgattcttcttttagcacccatatccaatccattagcaaatctggtagaccctaccttcacaatatatctaaagctgaccacctctttttgacctctactattaacggcctattccaaggcaccatcatct

SEQ ID NO: 283 - DNA, 555 bp, Homo sapiens
  misc_feature (458)..(458): n equals a,t,g, or c
agaccgtaaaacactggcacaccacatagggcacttgtggtgggcagcagatgaaaacaatttcagtcgttggaatagagctgtgcccccctggaaaacggttcatgattacgatggtggcgagcttcgtggccatggcgggccagttcctcatgcctgggctagccgccctgtgccgggattggcaggtgctgcaggccctcatcatctgccccttcctgctcatgctgctctactggtcgatattccccgagtccctccggtggctaatggccacccagcagtttgagtctgcaaagaggctgatcctccacttcacacagaagaatcgcatgaaccctgagggcgacatcaagggtgtgataccagagctggagaaagagctttcccggaggcccaagaagtctgcatcgtgaaggtggtggggacacggaamctgtggaagaacattgtggtcntgtgtgtgaactcgctgacggggtacgggatccaccactgctttgccaggagcatgatgggccacgaggtgaaagtgccgcttcctggagaacttct

SEQ ID NO: 284 - DNA, 1518 bp, Homo sapiens
agcggcgctggaggagcwcgaggctgaggctgccggggggctgtgggctaccgggccgccggcgcctcagcgatgttttactcagggctcctcactgagggcggccgcaaggagaccgacatgcgggaggcggcgtcactgcgacagcagcgccggatgaagcaggcggtgcagttcatccacaaggactccgccgacctgctgcccctggacggcctcaagaagctgggctcgtccaaggacatgcaacctcataatattctgcagaggcgcctcatggaaaccaacctgtctaagctccgaagcggtccccgtgtcccttgggcctctaagacgaacaaactcaatcaggctaagtctgaggggctaaagaagtctgaggaggatgacatgattttggtttcttgccagtgtgctggaaaggatgtgaaagccttggttgacacaggctgcctatataatctcatctctttggcctgtgtggacagattgggactcaaggrgcatgtcaaatcccacaagcatgaaggagaaaagctttctctaccccggcatctcaaagtagtgggccagattgagcacctagtgatcacactgggctccctccgcctggactgcccagcagctgtggttgatgacaatgagaaaaacttgtcccttggtctacagactctccgatctctgaagtgcatcataaacttggataagcaccggctgatcatggggaagacagacaaggaagaaatcccttttgtggagacagtctctttgaatgaagacaacacttcagaagcataactacagcctgcagcatgtctgcacgtgtgcatggcatacacaccgggttgacagattgwgaaaactgggtttgaaccaaatgccgtagtgacttgctgtggaccaagtccttccatctaatagaagctccaggggctccttcccattcagacctctctagactatagtctatgcttagagatcttgtctggttatggccattgttttttactactttgatcacttaacttatagaccttttttgacactgccagtctcacttgtggcctatttctctgcttcttccaggaatttgcttttattagtcaagtataggggctgccaggttctgtgtctccatrgatatatgtgcttcttttcctatagctaaatgtataataaacaggaacctgacctttacctcctttcagctgtttcaaacaggtgcccaggatacctatgtcttagaattagagtttcttcaaattgattcattgatttctcaagtatggattatgtgaaagagcccagggacattatccattacagtttaactctttcatttaaaggtccagagaggcaagtgaattgtctaagttcatatattaggtcagtgactgaagggaccaagaacgcagacctgatttccaagccaagactcccatgctgcctcatttgtattcaagcctttaacaggagggcaaagaggtgagaatgtgttaaaaaaaaaaaaaaaaaggg

SEQ ID NO: 285 - DNA, 707 bp, Homo sapiens
  misc_feature (499)..(499): n equals a,t,g, or c
  misc_feature (520)..(520): n equals a,t,g, or c
  misc_feature (626)..(626): n equals a,t,g, or c
  misc_feature (631)..(631): n equals a,t,g, or c
  misc_feature (649)..(649): n equals a,t,g, or c
  misc_feature (653)..(653): n equals a,t,g, or c
  misc_feature (671)..(671): n equals a,t,g, or c
gcaaatggagagcacctagggctcgcggatgcggctttccacgaggacagtcccgcgggtatccatcatatacaggcatctctcatcgatttgcacccccaaggtctcattcctagggtggcacgccgggaagttcatctgtagaagcaggcgcgtggtaaagtgtgcctgtggtcatgcaaatactagtttttgcttcacagggtcactcttaccacctaatggtggctttgacactgtaaccatttatcttgtttcatgttgtatttatgtargtgtatgtcatatctccctaactaaggtgtttgatataactagcctcgttatcctcagctktwaaatggggacactcaaggagtgtacctacgattataagagctgttgaatgtgaacagcctgacagggtaagcctacaacaaatattattttcacctttgtcatcttataaatcccagtattccacataaatgtcaggaacaaataatttttttacaattgnataagaatcacagcaaaggangctatcttgggacctcttaggaaagtggtattggtaccaaagtacccccattgcaaaagtagggaataagaggaaagaagaaaggttgcattaccattcccatggnaaagnttttgggggccaaaaccncttntttaaaaagggttttggnaaactggccattggggccattggggaaccccttcct

SEQ ID NO: 286 - DNA, 2029 bp, Homo sapiens
  misc_feature (30)..(30): n equals a,t,g, or c
  misc_feature (1669)..(1669): n equals a,t,g, or c
gaataattgtggacggtacagtggcttttnaaaactacagtctttaggtgtaaggtttggcgccgggagcaattttatgatcaaatatgatgaactcctaagtcactgaggtgtgattgggccaatgttggcatgaggttcttgctctacttccagtgttttgattccactgggagaatttggcctagtgtgtggctttggatgaatccgtgtagagagaggtgagcttgtcctgttacagatgctgtcagacatagcgatagtaggcacctagggaggaagtggccgttagttttacactgactttttaagaatggagaatgcacgtgggtttctgttgcggatgattcatagtaagcaagcggttgatgctgttaataccggccccacccgattgacattaagtttattcagcttttaaaaagatgaagaactaaggggaacaaatttaagtttgttgcaacttagccacacatgcttccctggtaccagctggaatcagcagctcacaggcatcttcaggacacttcagtgtatatgacacagtactttgttagcgtctgcgtgtgtatggaaagttgacaaaaaatggcatgaaaagatcatgattggattttcttttaaacctgcccttctgtaaaaaatagtttatatatttttaaattagtaggtatgtgtggcttccttttttcctaacattcccagcaaatttttgctgctaagactatcactgttaaagtgaaaattacagggaaaaatgtgatgaatataccgtaactcaaaatgtgatattttcttaaaatcactcttttatgctttaggaactggttggtctccactttgattattagtgtaaagagcctgagtatacgtggatttcattgtaaaatttaactccttgtcttttacttggggcacggggcccctggagggcttccctactttccccactatgttaacaggtaattctgatttatgcstttagtttgacttatttttaacaaaatattagaagttatgctttaaaatgtttaatgtggactgaaattttcatcttttgtttgagaatctatgaagtgtatcatatacgtggcctaaagcaaggtgtgtattttgttattctgaaattgttttgcatctggacaaatactaaatatcccagtggccttttttttttttttttaaacctgtgtatccatctcatccttttgcgcattcctagtaagcaaaaaaatttgttatgccatcttcattattcgaattacagactgaaaaaatatggccagtttttaaagaagtttagattatgttttccatggaaggacaagtctgactgttcataggctgattttctttaagaggattattctgttttacaatttcaattctagatcacattttatatatgctgcatgccaaaaaaaaaaaaagagaaaactgccttttctggtgtggaggggaagaaaaactaatattctaccttactagtagagttcaaaacaagttttcactgagagccttttcagtaaaagttaaacaagtttgttttttgagcatttgtcagttattctatttcagaagagtcaaaattcaagcacgatacattttgaaggctttgcaaactcctaaacccctgatgagtcctctcattctggaagtgggaatttgnagtagatactgatttgtcccgtagtatggcagatgacagggaggtcttttcccaagcaggcactcagaacacaggtcaccgtatgttctcagccagtaacaatcatactgaggacgaaggactctccgtttgatgcagacacaattgtaatggagatgtaaaacttcttagcaatcagatggataaattgtttgctttttactttaaataggaaattgttttctaaaactaaaatacttgaattgtcagacaatataatctcagcttgtattagtttttgaatgctcccatcgaggaagtgtaacaatccatgaaatgtgaataaatgaaaagtaaacaaaaaaaaaaaaaaaaaaaaaa

SEQ ID NO: 287 - DNA, 2469 bp, Homo sapiens
  misc_feature (1991)..(1991): n equals a,t,g, or c
ctcgcckcggcgcggagtcccggctgcgggatagaccgagggccatggccgcctctcccggacccgccggcgttggcggcgccggagcagtctacggctccggctcttcgggcttcgccctcgactcgggactggagatcaaaactcgctcggtggagcagacgctactcccgctggtttctcagatcaccacgcttattaatcataaagataataccaaaaagtctgataaaactctgcaagcaattcagcgtgtaggacaagctgtcaacttggcagttggaagatttgttaaagtaggagaagctatagccaatgaaaactgggatttgaaagaagaaataaatattgcttgtattgaagctaaacaagcaggagaaacaattgcagcacttacagacataaccaacttggaaccatctggaatctgatgggcagatcacaatttttacagacaaaacaggagtgataaaggctgcaagattacttctttcttcagtgacaaaagtgttgttgctggcagaccgagtagtcattaaacagataataacatcaagaaataaggttctcgcaactatggaaagactagagaaagtgaatagctttcaagagtttgtccaaatattcagtcaatttggaaatgaaatggtggagtttgcacatctgagtggagatagacaaaatgatttgaaagatgaaaagaaaaaggcaaaaatggcagcagctagggcagttcttgaaaagtgtacaatgatgcttctcacagcttcaaagacatgtctgaggcatcctaactgcgaatcagcccataaaaacaaagaaggagtatttgaccgtatgaaagtggcattggataaggtcattgaaattgtgactgactgtaaaccgaatggagagactgacatttcatctatcagtatttttactggaattaaggaattcaagatgaatattgaagctcttcgggagaatctttattttcagtccaaagagaacctttctgtgacattggaagtcatcttggagcgtatggaggactttactgattctgcctacaccagccatgagcacagagaacgcatcttggaactgtcaactcaggcgagaatggaactgcagcagttaatttctgtgtggattcaagctcaaagcaagaaaacaaaaagcatcgctgaagaactggaactcagtattttgaaaatcagtcacagtcttaatgaacttaagaaagaacttcatagtacagcgacacagctggcagcagatctattaaaataccatgctgatcatgtggttctaaaagcattaaaacttactggagtagaaggaaatttagaagctttggctgaatatgcctgtaaactctctgaacagaaagagcagcttgttgagacctgtcgattgttacgacacatatctgggacagaacctctggaaataacctgtatacatgcagaggagacatttcaggtgactggccaacagataatttctgctgctgaaacattgacattgcatccatctagtaaaattgctaaagaaaacctagatgtattttgtgaagcttgggaatcccaaattagtgacatgtcaacactgctgagagaaatcaatgacgtgtttgaaggaagacgaggagagaagtatggctacctttcacttccaaagccaatgaagaataatgcaaacctgaaatcattaaagccagacaagcctgactctgaggagcaagccaagatagcaaagcttggacttaagctgggtttgctcacctctgacgctgactgcgaaattgagaagtgggaagatcaggagaatgagattgttcaatatggacggaacatgtccagtatggcctattctctgtatttatttactagaggagaggggccactgaaaacttcccaggatttaattcatcaactagaggtttttgctgcagagggtttaaagcttacttccagtgttcaagctttttcaaaacagctganagacgatgacaagcttatgcttctcctggaaataaacaagctaattcctctatgccaccagctccagacagtaactaagacttctttgcagaataaagtatttctaaaggttgacaagtgtattacgaagacaagatccatgatggctctcttagtccaacttctttcactttgttataaactgctgaagaagcttcagatggaaaataacggatgggtctcagttacaaataaggacactatggatagtaaaacttgagaagcttttggggtcagatctctggaacatcatgtgatgaagctgacatttttaaaaatcaaatgatcctttatcttttcagaaattcatcaattttataaagaaaacaatattgaaattttgctctattttctgatcatgaaactgattgtaaagctttttgacaactaataaatgtcttggtaattgctagattctaaaaaaaaaaaaaaaaaaaat

SEQ ID NO: 288 - DNA, 573 bp, Homo sapiens
  misc_feature (543)..(543): n equals a,t,g, or c
tggtcgtcagtgagcgtttggcgaaactcgcccgggaactgggctggcaagacattaaggtcgccgataacgctgacaacgatgcgcttttacgggcattacaataactctcataacaggaagccataatgacggaacaagaaaaaacctccgccgtggttgaagagaccagggaggccgtggacaccacgtcacaacctgtcgcaacagaaaaaaagagtaagaacaataccgcattgattctcagcgcggtggctatcgctattgctctggcggcgggcatcggtttgtatggctggggtaaacaacaggccgtcaatcagaccgccaccagcgatgccctggctaaccaactgacggcattgcaaaaagcccaggagagccaaaaagccgagctggaaggcattattaagcaacaagctgcacaacttaagcaggcgaatcgtcagcaagaaacgctggcaaaacagttggatgaagtccaacaaaaggtcgccaccattttccggagcgatgctwaaacctgctgctggctyargccgnttttctggtgaaattcggccggacggaagc

SEQ ID NO: 289 - DNA, 433 bp, Homo sapiens
ggcacgagctcgaatgagggaggagaggtggagttgccggggctcaggcccgcctcgagcatgggcggatgagaggaktcgggagccgaggcctagggtccttcgggtgaggggagacggagccagcgaggagatggagcagaagcttgtggaggagattcttcaagcaatcactatgtcaacagacacaggtgtttcccttccttcatatgaggaagatcagggrtcaaaactcattcgaaaagctaaagaggcaccattcgtacccgttggaatagcgggttttgcagcaattgttgcatatggrttatataaactgaagagcaggggaaatactaaaatgtccattcatctgwtccacatgcgtgtggcagcccarggytttgttgtaggrgcatgrctttggtatgggytattccagtattcgggattt

SEQ ID NO: 290 - DNA, 466 bp, Homo sapiens
  misc_feature (110)..(110): n equals a,t,g, or c
  misc_feature (146)..(146): n equals a,t,g, or c
  misc_feature (466)..(466): n equals a,t,g, or c
caatccatatgaaatgtggtggtggattcagctgaaaccatggaatgaatgggggcgaggctggggatgtggaaactgtatcccagggatcagatctagacgactcagtngatgattgcatggggtgcaggtatccctcatgggcnttcctgttccttttgggcttatacatctcgtccctggcttcctgcatgggaggactttatggagctccccgcatcctgcagtgcattgcccaggwgaaagtgatccctgcacttgcctgtctgggacaagggaaggggccaaacaaaacacccgtggctgccatctgcctgaccagcttggtgaccatggcctttgtttttgtgggtcaagtgaacgttctggcccccatcgtcaccatcaacttcatgctgacatacgttgcagtggactactcttacttctccctgtccatgtgttcctgcagcctgaccccggtgcn

SEQ ID NO: 291 - DNA, 1285 bp, Homo sapiens
  misc_feature (7)..(7): n equals a,t,g, or c
  misc_feature (1256)..(1256): n equals a,t,g, or c
  misc_feature (1261)..(1261): n equals a,t,g, or c
cgctgtncagggttagtgctgggtctttgcaggaattggctctgctgacaggaattataagtaaagcagcacttcctggaatattaagtgaacttgacgttgatgtaaatgaagggtctctaatggagctacagggacatattggaagattccagcgccagtgcttaggactactaagtcgctttggtggctctgacagactgcgtcagtttaaatttcaagacgataatgtggagggagataaagtaagcaagaaagatgagattgaactggctatgcagcagatttgtgccaatgtaatggaatattgccagtcactcatgttacagagttcccctaccttccagcatgctgtgtgtctcttcactcctagcctttcagaaacagttaatagagatggaccgcggcaagatacccaagctccagtggttccatactggcgcctgcctggtttaggcattatcatctacctgctgaaacagagtgctaatgatttcttcagctattatgacagtcatcgacagagtgtcagcaagctacaaaatgtagagcagcttcccccagatgagataaaagagttgtgtcagtctgtgatgcctgctggtgttgataaaatctccactgcycagaaatatgttctagcaagacggcgcttggtgaaggtgatcaacaatcgagctaaactgctttccctttgttcttttatcatagagacctgcctatttattctttggcgccatctggagtactacttgttacattgcatgcccacggattctcaagattccttatttgcctcgagaaccttgtttaaaagcagaagactgcaagattccttcgcctcagaaaccaatctagattttagaagtgggctggctatagtgagccaacatgatttagaccagcttcaggctgatgcaatcaacgcttttggagaatcactacaaaagaaacttctggacattgaaggattatattcaaaagttcgatctcgatatagtttcatacaggctcttgtcagacgtatccgtggcctcttgaggatatcaaggaactgagagcccgtgcttatgctcttctatgagagagatgaattggggagaattgtctccattttatagattagtttctttctaaattatgaccaaaaatattttgctatttctttctttgtatatggacatcttttctgtaaacttcttcccctagttccatcctcactagtaaaaaataaatactttttaaaaaaacagagnagtgngagaagggaggaaaaaaaaagggg

SEQ ID NO: 292 - DNA, 1511 bp, Homo sapiens
cattatccatactcatttattaatgtaggggttacttagtgaaaccctgaactaaaataagacagaggacaagaatacgaagaaagaccaatagaaaacacggtaggatgttaggcacgctaaatggaaaatatgtgttataatttttatttcataagtgaacttgataatagaaaatgcatttttttataaataaaaagtaggtgtctgaataaaaatacctctacttgggtagaggtatttaaaattctataattttgttctgctatggctaattcttacagaaccctctttctggttccactgtatattattttaatgacacttctgcagtgggtattaagaatacagcttcacatttattcatcattgtccattcactcattagttcatgcaaccacaaaaaggtattataagaataatatttcatttctgaggtaaggaaattatcatctagtatgttyttatataacctactattcacaatgacatgtagaattctctctgttatwcaacatatgttcttgttcttcaaaatctgcaatatctgtagtctgattcttggagactggctcaccgcaattgtctagcagagctttagaccagggaagtgccacacagcaagtagtttccatcacagtcttagctagtttattcctgaatcctcccatatcttacagaaagagcaatgagtcttttgtaaaccactcccaggagggtgatggtgagcactattattccacacaccaggctgaatgcccatcgtggtccccagtgagcatacacttggctgatgaacataggcccaagaatccgggctccacttccagatgctgttaaccagcccatgtatacaccctgaggttttggtcctagaatttttgaatatagagtataggacataagattgcagactggatagcctaatcctattagcacagctgatgtaaggaactgggccagatgaatcaccggggtgtagaggcaccaggcttgttcaatcgagcaaccagttggtctttcattgtcatcttccattggagacttccaaagaccaataataatttccccaaatgtggtattagggattgaattattgtgcaaatcttcccactgtattttgggaaattgatttccccaaggtaacaagrtaaagaagccaacccatacaacgatgagtcctcccagtagaatagcacgctcgccaatctttttggaaagcaacttaactcctaagaaaataacaacggcttcaaccccaagagcagcaagtattatgccattatataacacagcttgttcttgagtccaggcatacatatccattgttaatggagtaatgatggtttcaaaaagggcaaagataaatagagtcacaaaaaacagaacattgatggccacaacagcaacctggtcaatatttccttggggaacctgagcttcatctgtacttgcttcttcaaaattaatacttttacactgtcttcctgagtccggacgcgtgggtcgac

SEQ ID NO: 293 - DNA, 541 bp, Homo sapiens
aagataaagtaagtgctgtttgggctaacaggatctcctcttgcagtctgcagcccaggacgctgattccagcagcgccttaccgcgcacccgaagattcactatggtgaaaatcgccttcaatacccctaccgccgtgcaaaaggaggaggcgcggcaagacgtggaggccctcctgagccgcacggtcagaactcagatactgaccggcaagagcaccatttaccgtggagagatgtgcttttttgattctgaggatcctgcaaattcccttcgtggaggagagcctaacttcctgcctgtgactgaggaggctgacattcgtgaggatgacaacattgcaatcattgatgtgcctgtccccatttctctgatagtgaccctgcagcaattattcatgactttgaaaagggaatgactgctttacctggacttgttgctggggaactgctatctgatgcccctcaatactctawtgktakgctccaaaaaatctgggtagagctctttggcaaamtggcgagtkggcagatatctgccc

SEQ ID NO: 294 - DNA, 464 bp, Homo sapiens
  misc_feature (75)..(75): n equals a,t,g, or c
ggcacgagctcacgtgcaggcgtcggtccgggccactccagtgacgagggtaggatccgcagccccttcgcgaanccgagcgagaccgggcgacaggcaggcagagaatatgttattccatccttggcccacagatttatggcagagatggtggatttctttattctcttctttataaaagcaaccattgtcttaagcattatgcacctcagtgggataaaggatatctctaagtttgctatgcattatataatagaagaaatagatgaagacacatcaatggaagacttgcagaaaatgatggttgtggcacttatatacagattattagtttgtttctatgagataatttgcatttggggagcaggtggagctaccccagggaagttcctgctggggcttcgagttgtgacatgtgatacatcagtgcttattgcaccaagtcgggtttttagtgattcctt

SEQ ID NO: 295 - DNA, 710 bp, Homo sapiens
ggttttttttttggtttgtttgatggacatcacggtgcctcagcggcagagttgacatcaatggaactcccagttttacttctccatcagctttccaaatttgatccttcttaccaaatgacaactgatgagcaacaaataatcaattccttttacactgtgtttagagaagaatacacagcaatagaagacctcttttctgccataaacaaaacagaagcagtgaggtgtgagtatgaggacacacacaaagcctttgcaaaagcattttggagaatggataggcttttaggtcttggaagaaaagaagtgtccagggttcaatggagtggctgctctgcagttacttgkatattggaaggcaaacctaaaagtccttatgctcataagaattggaaaagaaaaaatacccatgatgggttggcagagagctccccttyccaggagatgccaaaaataatttctggaatattacatgttgcaaacactgatgtgattctgggtgtcatctgtcacatttgtaaaatgagtatattatcacacaatccttcgcaactgtgccagcacttccctagcaaactgcaaacttgagtttttcaggaaaacagtttacatgagaaaaggcaagttctttcccattttgaatgaagtaccattaaactctgtcacctagtgaaaaataataaaaatacttgcaacttttaaaaaaa

SEQ ID NO: 296 - DNA, 1154 bp, Homo sapiens
  misc_feature (1154)..(1154): n equals a,t,g, or c
ggcacgagcacagactgccaagtgggacaactttctggcttttgaaaggctccttcttcagagcattggggagtcagcaatgtccgttgtgttaaatcagctgctgcccatgattaagcctgtaacccagagaaccaacgaggactacagccctgaggaactgctgatccttctcatatatatttattctgtcactggagagctcacggtagacaaagacctgtgtgaagcagaagaaaaagtcaagaaagcattggctcaggtcttctgtgaggaatctggatygtcacctttgctgcaaaaaattacggactgggactcttcaattaatctgacatttcacaaatccaaaattgccgtggatgaactctttacttcacttcgggatattgctggagctcggagtctcctggaaacagtttaagtctgtatatgttcctggaaatcatacccaccaggcatcttataagccattgttgaagcaagttgtggaggaaatatttcatcccgagaggccagattccgttgatattgaacacatgtcttcaggcctcactgatctccttaaaactggatttagcatgttcatgaaggtgagccggcctcatcctagtgactaccccctcctgatcctctttgtggtaggtggggtcacagtctctgaagtgaaaatggtcaaagatcttgtggcatcattgaagccaggaacccaggtaatcgtgctgtccacacgactcctgaagccacttaacattcctgagctgttatttgcaactgaccgactgcatccagaccttggcttctgagcatccgctaagaagataagacctactcaagctggaaatgccgatgcaattttctgccaccactccaaatactcctccacaaccagcgtccctgtcactaattgcgagaatgatggaattctgcctgaagggtcttgatacctactcagtgaggtactttgcttggattgctgtgattcttaaaaaaaaaaaaaaaaagtttttttattttcctgaaggcgacagtctgtcttttggcgagtccaattagtgatcgtttccatttatccttaaccctctgtttgtgatcttcctgattccacctacaagttcattagttctaaataaaagcctgttggcaagtgaaan

SEQ ID NO: 297 - DNA, 531 bp, Homo sapiens
  misc_feature (520)..(520): n equals a,t,g, or c
tgcaggaggcagaaagtaaatctgaacttagtcagaacatctctscccgggaacattttgtatttaccgatattgatggccaagtgtatcatctcactgttgaaggaaactcagtaaaagacagtgctcggattccaccagatggaagtatgggtagtattacctgcatcgcttggaaaggtgatacattagtgcttggagatatggatggaaatttaaatttctgggacttgaaaggcagagtatccaggtataagccaagaatgaatcttgttatttcattaaaaaaargaaatgaaatctttttgttttgttttgttttgttttgttttgttgagatggtgtcttgctctgtcgcccaagctggagtgcagtggtgcaatctcggctcactgcaagctctgactcccgggttcatgccattctcctgcttcagctacttgggaaactgaagcaggaaaatcgcttgaacctgggaattaaaagttgcaatgaactgaaatcacaccattgcgcttcnaccctgggcac

SEQ ID NO: 298 - DNA, 2025 bp, Homo sapiens
ctccaccaccgccgccacagtcttccagctccacatcctgagaggacgcctctggagccgcgactgcccggggttgtgccggccgccgctgccgcccaggccgcctcagctctcctctgcgccggcccgctcactccgcccggccccagccctagcgctggccgcgaccccggcggagatcatgaatcagacagataaaaatcaacaagaaatcccatcataccttaatgatgaaccaccagaaggttcaatgaaagatcacccacagcagcagccaggcatgttgtcccgtgtgactgggggtatcttcagtgttacaaagggagctgttggtgccaccattggtgktgtggcttggattggtggaaagagtctggaagtgaccaaaacagctgttacaactgtgccttccatgggaatagggctggtgaaagggggtgtctctgctgtggctggaggtgttacagctgttgggtctgctgttgtaaacaaagtgcccttaacaggaaagaagaaagacaaatctgactgaaatatagagatacacttgcgctccacagcactgtaatgccagtggcattgaattgctaaattatggactacaaccaagtcaactgttttggacgtttatcttctaaactgctgtgttgaaagtattgatgactggctttcatctaaaaagaagagaccaatacgagcacagtatatgaaggtttctcatacttaagttccaggtttttatctggtaaaatgttacacttactcggttgtaactgaagatatggtatgtttgaatatttactataagtctttcagtttgactaaaaatgtgaaagttgaatttagtagatgatcttcacagttccatatgtataatgtgccaggtaactcacctgccccttaagaagggaaccttgaattacataagccgtacctttgatgtgcctaatagtttcagatgtcttagttttttataaccatagttgattaggccaagaggcattcatttcttatttaagctggcaaaattagcaggaattagagaagtttaaaaagataaatggttttatgataatgttaaccatcttttgttagtaaatatgcgttctattattttaatcattgatgccttacaaaagaaaacatcttttctaataccctgaatatgtgctgttcttagaatcatctatggattcttttaaaggttgtttgtgaaattagttttccctttttagaatctcaggagtagtggggtaaagacatttcctgctgtcagtggataagacagagcttgttaactgttttggcagtagttaaaatcaaattgtacacttctcagcctgggttcatgcttcatcattaatacacctcacagtgcctaaggaacatttacttactggtcagaaggtattttggaagagtttcatattaaggaggaacaaataataattttaagttcttaaaaattacctaaaacaccccaaatataaaaagaagccttcacacctattctgtctttaggatgtcttaaattattagcagtactccttttttaaaaacactgtaaaagtaaccacaaatatgtgaggacttactattttaaatggaatggaatgagctccatagattagttttgaatataaagtatataaaagtgcatcagtggtttatataggctttaaaaacatgttatcttacagtcctttaaagcagccatagagtttgtatcatttttcaagccaatttcagtcagggatttgaattgtttgattatggatgataaatgtgtcatatcttattaatatgtctcatgtctcgttccttcttaatatgatttagctggaattcattttcttttcgtttcatgtttaatttcataaaacgtttaacaattggcatatatacttggcattcctgtccaccaaggattgtaatccaagcctgggaaaatcttaaatttctttttacttaaatctggaaatttgtctccattctgccaccttttttttttttttttaaaagggg

SEQ ID NO: 299 - DNA, 1343 bp, Homo sapiens
  misc_feature (4)..(4): n equals a,t,g, or c
  misc_feature (1317)..(1317): n equals a,t,g, or c
gcgnccgcctygaacggggagcaggcggcctgctcmggagaaagagcgtcaacaccaccgagtgcgtcccggtgcccagctccgagcacgtcgccgagatcgtcggcgccagggttgtaaaattaaagcactgagagccaagacaaacacgtatatcaagactcctgttcgtggtgaagagcccatttttgttgtcactggaaggaaagaagatgttgccatggccaaaagagagatcctctcagctgcagagcacttctccatgattcgtgcatctcgaaacaaaaatgggcctgccctgggaggattatcatgtagtcctaatctgcccggtcaaaccaccgtccaagtcagggtcccttatcgtgtggtaggattagtggttggacccaaaggagcaactattaaaagaattcagcagcagacccacacctacatagtaactccgagcagagataaggracctgtctttgaagtgacagggatgcctgaaaatgttgaccgagcacgggaagaaatagaaatgcatattgccatgcgtacaggaaactatatagagctcaatgaagagaatgatttccattacaatggtaccgatgtaagctttgaaggtggcactcttggctctgcgtggctctcctccaatcctgttcctcctagccgcgcaagaatgatatccaattatcgaaatgatagttccagttctctaggaagtggctctacagattcctactttggaagcaataggctggytgactttagtccaacaagcccatttagcacaggaaacttctggtttggagrtacactaccatctgtaggctcagaagacctagcagttgactctcctgcctttgactctttaccaacatctgctcaaactatctggactccatttgaaccagttaacccactctctggctttgggagtgatccttctkgtaacatgaagactcagcgcagaggaagtcagccatctactcctcgwctgtctcctacatttcctgagagcatagaacatccacttgctcggagggttaggagcgacccacctagtacaggcaaccatgttggccttccaatatatatccytgcttttctaatggtaccaatagttactcctcttccaatggtggttccactctagctcacctccagaatcaagacgaaagcacgactggtgmatttgctttragaaatgaggttattgctgccctagttccatgtgggccacaacctcttctgcatgggaatgtgccaacaargatctgtgaaaagagaacgccatcatgtccagtttgccagacagctgttgantcaggcaatccaaattcactcttgaa

SEQ ID NO: 300 - DNA, 580 bp, Homo sapiens
  misc_feature (10)..(10): n equals a,t,g, or c
  misc_feature (335)..(335): n equals a,t,g, or c
  misc_feature (497)..(497): n equals a,t,g, or c
  misc_feature (501)..(501): n equals a,t,g, or c
  misc_feature (542)..(542): n equals a,t,g, or c
  misc_feature (556)..(556): n equals a,t,g, or c
  misc_feature (563)..(563): n equals a,t,g, or c
cagccacatnaaccggcaggatgtcggaggtgcggctgccaccgctacgcgccctggacgactttgttctggggtcggcgcgtctggcggctccggatccatgcgacccgcagcgatggtgccaccgcgtcatcaacaacctcctctactaccaaaccaactaccttctctgcttcggcatcggcctcgctctcgccgggtacgtgcggccacttcatacgctcctgagcgcgctggtagtggcggtggccctcggcgtgctggtgtgggcagctgagacccgcgcactgtgcgccgctgccgccgcagccaccctgcagcctgcctggccgcantgcttgccgtcggcctcctggtgctctgggtcgcgggcggmgcttgcamcttcctgttcagcatcgccgggccggtgcttctgatcctggtgcamgcctcgttrcgcctgcgcaaccttaagaacaagattgagaacaagatcgagaacattggtctcaaanggangccaatgggcctgctactagaagcaatggggacaagagcangaagctggatctangcccctnggatctgtaacccagga

SEQ ID NO: 301 - DNA, 609 bp, Homo sapiens
  misc_feature (497)..(497): n equals a,t,g, or c
  misc_feature (499)..(499): n equals a,t,g, or c
  misc_feature (540)..(540): n equals a,t,g, or c
gcacctcagmcgcctcctagcggcgcggcgctcgctcctacgcctaaaatraccaatgtgtgatttcagtggaataaatggcgtccaaagtcacagatgctatagtctggtatcaaaagaagattggagcatatgatcaacaaatatgggaaaaatctgttgaacagagagaaatcaaggggctaaggaataaaccaaagaaaacagcacatgtgaaaccagacctcatagatgttgatcttgtaagagggtctgcatttgcaaaggcaaagcctgaaagtccttggacttctctgaccagaaagggaattgttcgagttgtatttttcccctttttcttccggtggtggttacaagtaacatcaaaggtcatctttttctggcttcttgtcctttatcttcttcaagttgctgcaatagtattattctgctccacttctagcccacacagcatacctctgacagaggtgattgggcccgatatggctggatgctgntnctggggaactggtgcattggccagaattggtttccacaagnaacaccccaaaaccctcctcttaagtaccaggggggggttaaaaaaggaaagaaagggaaaaattaaag

SEQ ID NO: 302 - DNA, 1307 bp, Homo sapiens
  misc_feature (31)..(31): n equals a,t,g, or c
  misc_feature (607)..(607): n equals a,t,g, or c
tccggaattcccggagtcgacccacgcgtcnggtaaagacaccaggagtttctcgggcccagctgtggctgctgccggggagccccaagccttggcgggtccttgcggcgaataggagtctggtcaggcgtcaggctagtccgacgaagagtggagaatttcaagattgtggagttggactgaatgctgcacagttcaaacagctgcttatttcggctgtgaaggacctgtttggggaggttgatgccgccttacctttggacatcctaacctatgaagagaagaccttgtcagccatcttgagaatatgtagcagtggtcttgtcaaattgtggagctctttgaccctgttaggatcctataaaggcaaaaaatgtgctttccgggtgattcaggtttctccatttcttcttgcattatctggtaatagtagggaactagtattggattgaatgaatagtcttccattttggaaacgttcatccactctcatatttattttttggtgcctgcatgtttgaagactgaagcaggctaaaagctcttgatgaaatttgagggtgctgaagatgttcccactaatttccagccatcacctttgggkggngtgggcttcggaggacagtctgtctgaacctgccagtgctgaccctgcagcayttcagcatatgcacatcaaagttggagaccgcgctgaacttaggagggccttcacacagactgatgtggctaccttctcagaattaacaggggatgtcaatcctttgcatttgaatgaagactttgcaaaacacaccaagtttggaaatacaattgtacatggagttttgatcaacggacttatctcagctctcctaggaactaaaatgccagggccaggctgtgtatttctttcccaggaaattagctttccagcccctttatatattggagaagttgttttagcttctgcagaagtgaaaaagctgaagcggttcattgctattattgcagtgtcatgttctgtaatagaaagtaaaaagactgttatggaaggctgggttaaagttatggttccagaagcttccaaatcctgaaatagatgttttaaagatgcaacctcaaacaccaatgctgttgttaaagagcctatggggaattgctgctctttaccaaagaatggttgataggcccagaagcccatcttagttaggggaagggagcaggaagagggttgttcaaatgcccactttccagtttggccttatgcttcatgcagacttgagtgtatgcaggatttcattatctgcctgggttttttgtttgtc

SEQ ID NO: 303 - DNA, 1246 bp, Homo sapiens
ggcacgagcagcagctggaagaggcatatagctctggaaaaggttgtaatgggagagttgttcctactgatgggggcagatatgatgttcatttgggggagaggatgcggtatgctgtatactgggatgaactggcatcggaagtgagacgatgtacgtggttttacaagggggacaaagacaataagtatgttccctactcggagagcttcagccaagttttagaggaaacttacatgcttgctgtaactttggatgaatggaaaaagaaactggaatctcccaacagagaaattattattttacacaatccaaagcttatggtgcattaccagccagttgcagggtctgatgattggggttcaacacccacggagcagggtcgaccaagaactgtgaagagaggagttgagaacatctctgttgacattcattgtggagaacctttacaaatagatcacttggtttttgtagtccatgggattggaccagcttgtgatctccgctttcgaagcattgtacagtgtgttaatgattttcgcagtgtttccttgaacttgctacagacacattttaagaaagcccaagaaaatcagcagattgggagggtagaatttcttccagtcaactggcacagtcctttgcattctactggtgtggatgtagatctgcagcgaataaccctgcccagcattaaccgcctcaggcacttcaccaatgacacaattctggatgtcttcttctacaatagtcccacctactgtcagactattgtggacacagttgcttctgaaatgaaccgaatatacacactttttctacagaggaaccctgatttcaaagggggtgtatccattgctggtcatagtttaggttcgcttatattgtttgatatcctaacaaatcagaaagattctttgggggatattgacagtgaaaaggattcgctaaatattgtaatggatcaaggagatacacctacactagaggaagatttgaagaaacttcagctctctgaattctttgatatctttgagaaggagaaagtagataaggaagctctggctttatgtacagaccgagatcttcaggaaataggaattcctttaggaccaagaaagaagatattaaactatttccarcacccagaaaaaactccaatgggtattaagagaccagcccgcagcctgcttccaggggcaaccatccccaaagaatcctgagttctggccagtagccagtaatg

SEQ ID NO: 304 - DNA, 1447 bp, Homo sapiens
  misc_feature (39)..(39): n equals a,t,g, or c
ggcacgaggccgcggtggtacgctccaggccgcgagccnaccgagcggacgccagtggatgacccgcggcgggggaggaggagatcttgctatcactgctattaccacgccagaaccgcctgagaattgagattgaagaagctctggacatggacttgctcaagcaggaggcagaacatggggccctgaaagtcctctatctctctaagtacgttctcaacatgatggctttgctgtgtgcaccagttcgagatgaagcagtgcagaaactagaaaacattacggatcctgtttggctactgagagggmtcttccaggttctgggccggatgaaaatggacatggtgaactacactatccagagccttcaaccccacctgcaggaacattccattcagtatgaacgggctaaattccaggaactcctcaataagcagcctagtctccttaatcacaccaccaaatggctgacccaagcagcaggagacctcaccatgtcacctccgacttgcccagacacttctgactcctccagtgtggctggcccctctcccaatgaggcagccaacaacccagagcccctcagccccacaatggtgctgtgtcagggcttcttgaacctccttctctgggaccttgaaaatgaagagttccctgagaccctgctgatggacagaacccggctgcaggagctgaagtcccagttgcaccagttaaccgtcatggsctcagtcttgctggtggccagtagtttctccggcagtgttttgtttggctcaccccaatttgtagataaactgaaacgcataaccaaatccttgttggaagactttcactccaggcctgaggaagctatactgactgtgagtgaacaggtatctcaggaaatccatcaaagcctcaagaatatgggccttgttgctctaagcagtgataatacagcatctctaatgggacagctccagaacattgccaagaaggagaactgtgtctgcagtgttattgatcagcggatccatttgtttctcaaatgctgtttggttcttggtgtgcagcggtctctattagaccttcctggaggccttactctcattgaagcagaactggcagaactgggccaaaagtttgtcaacttgacacatcacaatcagcaggtgtttggtccctactacactgagatcctaaaaaccctcatttccccagcccaggcactggaaacaaaagtggagtctgtttgatagcgtcggctcagarccctggtaccttggacccaagaggagcccatcatcttcctggagtaacatcaccagtgaccagcagacagtgagcttctatyccaggccctgcagccagtacaccaaggctgtagggatcaagcatgtaaacaccaactggtccatacccattcattaataaacttcttaagtgcaaaaaaaaaaaaaaacaa

SEQ ID NO: 305 - DNA, 1347 bp, Homo sapiens
gggctctggcaatgtgccatccacctcccctctggtcaggctggcggcactgacaaggcatccacaggggcagccatgctatggcccagacctccggatatgcaggaaccggggcctcccacagaagtccctgcgcacagccacaagattaaggtacaggtcaggccggytctgaagccagctgctgacaagctccgggtgccttgggtccacttctaagaagatactaccagagtctttcaggagccggggtgccaaggccagaatgtgggtaatgatgtccatgccytcctccccaccatccagggccgcggggtcttcatagctgcggatctcaggggccagctgctccatgtcctggtggaagacgtagggagggttgctgacaatcaggtccatggggccccagggcaggtgtgtccagctcctttctgaggtcatgtcgaggtggatgatccaaatcctgtcctgcaaccgaagcctctgagcattctcatgggtcagagagatagcagcttcccgcttatccacagcaatgactcggctctgggggagctggctcagcaggctgagggagatggctcctgatccgcagcccacctccagaatgagggggctgcctggggatcccacagcatgggacctctgggccacctcttccagcacccactcaaccagttcctctgtttctggccgcggaataaacactgggggcaccatccttaggctgagcccctggaagtcccactctccaaggatgtactgcaccggcatcctctgcaatcgacggctactcagctcccggatacactgtagttgctgagaggtcaagggctgggtccaaagtgccggcctcaggctctgaaatgttttggctccaaggacatgagccacgatgtactcactggattcccgggcctcagggatacccctcttctcaaagaccccagtccagtggctgaccagttctatggcactggataacccagccagaggtggttggggttgccatgagctgaaggcccagccccgggtacttcccctcctccctgggccagacaggagggcccacagcattcggccccaaagctccatgtctcagggaaaggttctccagagtgcttccaggttcccaagtctgctttatgatgtcagctgctgaggtgagtgctgagagtggcccctggacccagctgggtggagatggagaggtcacaagctctggtgccccaaaatggctctggtcctcagatatagttggttgccaccctgcctgaaaggctgccccacccacccaccagccggagaagctgccccgaactggacgcccggacgtgcgtggcccgt

SEQ ID NO: 306 - DNA, 622 bp, Homo sapiens
  misc_feature (597)..(597): n equals a,t,g, or c
  misc_feature (621)..(621): n equals a,t,g, or c
ggcacagcacatttattatcattatcaagtattgtgtactgtacagaatgatgtgtgctgtgctatccaggaacacatttattatcattatcaagtattgtgtactgtacaggatgatgtgcgctgtgctatccaggaacacatttattatcattatcaagtattgtgtactgtacagaatggtgtgcgctgtgctatccaggaacacatttattatcattatcamgtattgtgtaytgtacagaatggtgtgygctgtgctatccaggaacacatttattatcattatcaagtattgtgtactgtacagaatggtgtgcgctgtgcttttatgcaagtggcagcacagtagctttacacgagcatcactagacacatgagtagcattgcactcggcaacaggaattttttcaggcccattattataatcttatgggaccgcatcctatatgcagtttgtcattgaccaaaatgtccttatgcgatgcatgactatatttgcaaaggactagtatctagaatacatttaaaagtcttaaaatagtaacaaaacaaagaatgcaattagracmtgagcaaagrtacaagcactttcanggggaggtttcagttgcaatagcnc

SEQ ID NO: 307 - DNA, 1824 bp, Homo sapiens
tttccattacagtgcacatttattgactctgtgtatcttcacagtgtgatcttcaccacagcttgcaaagtgtaaccactcagcaccttctgcttccttctgttcagtttttccactgcaattcttccagcataattttctgatagccagtgtatgactttggctttgacttgtttctacacagtgggtccagtcatttatttctggaacttgatcagtctttttccaggtatataagcaaatctttccacactccaatcctactgcaaccacgtatcgttgagaagggtggagcactgggcagacgctgacagctgtcacagccccacccacgtccaggactgaggagcaggggccaatgttgtgctcaatacagtcatcagtggagtcacactcaccccagacaaccacctttttgtctcgactcccagtgaagaaatacttgctgtcaggactccaatcacaagaccaaataattctactgtgcacagaagtaattttgttggtgaaggcaaaaagactaaaaactggctcgaactcaggtgagattgtatcctgctttttccacaatgaccaggttcgatctctggaaacagctagtaagaacttctcattaggtgagaaggccatctgcgtgactgtcaaactgtggaaaactaaattctgcacctgtttccaagatgtagtgttccaaagaatgatagctgcatgctctttcttagctgccttacaagctgaggcaagcagagtctttgaactgttacaagtaacacaaaatatttcataaccgtgcccatatagtttttgaacttcaggccacaaagtattctgcagaagatgatcctcagtgggaggctcagtaagtatggagggctgaaaggccacctgctgatactcaaaaccagtactagttaacagctcctcttcatcagaaggctgagaagctatatctccctgaaagacagctttatttgataatcccaatgcagggacagtggctccttctggaagatcactatcttgattacagagcacatgattcagtgattgtcctgtaatggcacaaaaattttccacaaaattccgaggtgcagaaaaaacccgaagaactttttcatctgctccagatacaaactgaaaccgattaatcattgccaaacatttcaggtcatacccatgtatctgaggccttgcaatttcatgccaagtcacctgtgattggtcttttctcttccatggagcaaaaagtctagttgtctgatcagtaccaacagtgataataaattctccttctggatcccagactaggtcttggacaccatcaaagtgtcctgaaatgacaatctctggagtccactctcttgggttaactgtattctgtttccaaaggtgcaacgctccgtggaaagcatgagcaatgatcatggagccatcttcattgaactggcaatcataaaatcccaaagtattcccacctacttcacctactcgaacctgttctagccaaactcctgactcttcatctggagcccagagaatcatggttttatccatggaagcagataataatctcactggctgctgtaggacaccatctttgtaaaacacaggttgccagtgaactgcatttacccagttttcatgaccggctagcactgtctccagagtaacagcaaatgctattttaacacttttcattttctatggtaaaagtattttccttcagtcttatgttatcgtcatcctgagtttctaaagatgttgactttatatacagcttccatattcttatcaggcaatcttgtgaacagcttgctaggaact

SEQ ID NO: 308 - DNA, 1882 bp, Homo sapiens
  misc_feature (282)..(282): n equals a,t,g, or c
  misc_feature (1846)..(1846): n equals a,t,g, or c
  misc_feature (1882)..(1882): n equals a,t,g, or c
gcttgcgctccggagcgcttggctctgctggcgctgagaaatggaccaattttgacaagatatagtgctgcagcgtgcctgatgggatatattcagtcatggcgtccgaactttgtaagacgatctctgtggcaaggctagaaaagcacaagaatttgttcttaaattataggaatctgcaccattttccattggagttactgaargatgagggactgcagtacttggagagactctatatgaaaaggaactccctgacatccttgccagaaaaccttgctncagaagcttccaaaccttgtggractgtggmacttsaattgagatacctgcactcaaataacatagttgtggttccggaagccattgggtctcttgtaaaactccaatgtctggatcttagtgacaatgccttagaaattgtttgcccagaaattggtcgtctgagagctttacgtcatcttcgattagctaataaccaactgcaattcctacctccagaggttggcgatttgaaggagctgcagacactagacatttctaccaatcgtttgctaactttacccgagaggcttcacatgtgcctttctctgcagtacctcactgtggaccgaaatcgtctatggtatgtgccgcgccatctctgccagctgcccagcctcaatgagctctccatggctggaaaccgtcttgcatttttgccacttgatttaggtcgatctcgagaactacagtatgtatacgtggataacaacattcacctgaaaggcttgccatcttatctgtacaataaagtcatcgggtgcagtggctgtggtgctcccattcaagtttccgaggtgaagctgctttccttttcatcagggcagcgaaccgttttcctcccagctgaggtgaaggccatagggacggagcatgatcacgtcctccctctgcaggaattggctatgagagggctgtatcatacctaccacagcttgctgaaagatttgaactttctgtctccaatctcattacccagaagtctcctagagctgctgcactgccctctggggcactgtcatcggtgtagtgagcctatgtttaccatcgtctaccccaagctctttcccttgagagagacgccaatggcagggctgcaccagtggaagacaactgttagttttgtggcttactgctgctccacccagtgtctgcagacttttgacctgctgagttgataaacactcaagaacctcaggagcgctgccagcttgacactggggaatccagccagtccagcacactcttccatcctgtcctgtccaatgcgggggcactgcagaactctctagaaatgtcatgattgagcttcagagctaaaatgccttcacccttcccccaagttggaatatatcctcccccaaattaaggacccatttgtcttctgtgtttttcctttttatgtgagtgtgtcttttacagaaaccatttagattgatgggcctccccaaatctaatttaaagcaagtttccggtccttggagaacagtgacttgatcatctagccagattcccttttgaacacacataccttcagtgatgcttcctctcctctyccctcccttgctttccccagagagttatttccctgagaccatgttytccacaktgtctccagtggraacttgtcagtttttgaggrgtttcagcaaaccccgtggcctcaaatggtcttgaagtagcagggtggggcgcctgagttggcaagcaaagtgaggctcccatggaggctcagtgagggtcccagagcacacaccctctggaaagttccagccttgtttatacgttctacagtgtagcaacngactttttgtgaaggattttaaaaacaaaaatgtan

SEQ ID NO: 309 - DNA, 980 bp, Homo sapiens
  misc_feature (582)..(582): n equals a,t,g, or c
caaaagctggagctccaccgcggtggcggccgctctagaactagtggatcccccgggctgcaggaattcggcacgagcagggagacgggggcctggagccagccctgagccagaggcagaatggwtggacagacaggccatggaggcagcactgagccagcaccacacgtccatcctgggacaracgggcctrgacttcacggcaagacccccctctcttccccactgggttctgccaccaccaggaggatttcaagaaagcaccaaagaccagggagctcggatccatactcggggggcctcagcccttgggaggggacacctgaggcagccagcgccccctccccagtccccagaactgcctgcaggtgccttgttgctggcttgtyttcagaaagggactgttctgggtggctggatctccagggtaccctccaccccagctgccaagccctgggccagcagcacccccttgtggccatcctgtgccttgktcccggtggcctccctattggactactaggaggggctggcagggcctccatagcacagaattgccccaaagccttgtyaagatgagtnaggatccctcccccgcttcctcccttctttcccccttcctccctcccccttcataaaggcctcccttgtcaccttccctcccaccccgtctcagccctgtgctcctggaggccctgctcccaaaaccgctggaaggactggggcactttctgccacagtagaacacagacagggcttcagatcacccacgcctgttttcagctgtgggtggccatgcagacacgcgccctggcatgtggggcctgggtgggcaggcaggacctgggccctcccacccatcagagcccactcaggaccagcgttcggagctcccacctggacgcatccctcaccacgtccggatttccttctttggatggaatgtaacgcgatctctatttaataaaggcaggctttgc

SEQ ID NO: 310 - DNA, 513 bp, Homo sapiens
  misc_feature (492)..(492): n equals a,t,g, or c
  misc_feature (494)..(494): n equals a,t,g, or c
gagatgttcaagaacaccatggccctcatggacctggatgtgaagaagatgcccctgggaaagctgagcaagcaacagattgcacggggtttcgaggccttggaggcgctggaggaggccctgaaaggccccacggatggtggccaaagcctggaggagctgtcctcacacttttacaccgtcatcccgcacaacttcggccacagccagcccccgcccatcaattcccctgagcttctgcaggccaagaaggacatgctgctggtgctggcggacatcgagctggcccaggccctgcaggcagtctctgagcaggagaagacggtggaggaggtgccacaccccctggaccgagactaccagcttytcaagtgccagctgcagctgctagactctggagcacctgagtacaaggtgatacaagacctacttasaacagactggcagcaaccacaggtgccctacacttcaacacatctggaaagtaaaccnanaaggggaggaagacagatt

SEQ ID NO: 311 - DNA, 532 bp, Homo sapiens
  misc_feature (8)..(8): n equals a,t,g, or c
  misc_feature (484)..(484): n equals a,t,g, or c
  misc_feature (523)..(523): n equals a,t,g, or c
ctcgcagnttgaaatccaccagagaagatggctcttgatccttacactgaactccgaaaacagcctcttcgtaagtatgtcaccccatcagactttgatcaactcaagcaatttctcacctttgacaaacaggtccttcgattctatgcaatctgggatgatacagacagcatgtatggtgaatgtcggacctacatcattcattactatcttatggatgatacggtggaaattcgagaggtccacgaacggaatgatgggagagatcctttcccactcctaatgaaccgccagcgtgtgcccaaagttttggtggaaaatgcaaaggaacttccctcagtgtgtgctagaaatctctggaccaaggaagtgttgggaatgggtatactgcttaaagrcttcattgttggggaagtcactcactattccttgggagaactttcttccatttatggattgtggatccctttttactcggacgggnatttaccaaaggggaaggtttgggattcactggattttnccccgggtt

SEQ ID NO: 312 - DNA, 1051 bp, Homo sapiens
ccgcctcgcacatttagtcttgccgggagtggtgtgattcccgaccaagatggcggccgtggggcgagtcggctccttcggttcttctccgccgggattatcctcgacttacactggcggccccttgggcaacgagatagcgtcgggcaacggtggcgccgcggcaggcgacgacgaggacgggcagaacctttggtcctgcatcctcagcgaggtctccacccgctcgcgctccaagctccctgcggggaagaacgtgctactgctgggtgaagatggagctggaaaaacaagcttaataagaaaaattcagggaatagaggagtataagaaaggaagaggattggaatatttgtacttaaatgtgcatgatgaagacagggatgatcaaacaagatgtaatgtttggatcttagatggagacctatatcacaaaggcctccttaaattttcactggatgccgtatctctgaaggatactctagttatgctggttgttgacatgtcaaagccttggactgctttggattctttacagaaatgggcaagtgttgttagagaacatgttgacaaactgaaaatccctcctgaagaaatgaaacaaatggaacaaaagttgattagagacttccaagaatatgtagagccaggagaagacttcccggcttctccccagagaagaaatactgcgtcacaagaagacaaagatgacagtgtagttttacctctgggtgcggatacacttacacataacttgggcattccagtactagtagtttgcacaaagtgtgatgccattagtgtattggagaaagaacatgactacagagatgaacatttkgattttattcagtcacatatccggaagttttgtttacrgtatggtgcagcacttatttacacttcagtaaaagaaaacaaaaatatagacttagtatataaatacatcgttcagaaactatatggttttcccyataagattcctgctgttgttgtggaaaaggatgcagtatttattccagcagggtgggataatggtaagaaaataggg

SEQ ID NO: 313 - DNA, 916 bp, Homo sapiens
  misc_feature (85)..(85): n equals a,t,g, or c
  misc_feature (825)..(825): n equals a,t,g, or c
ggcacgagctgcacgagactcagctgcggcgtctccacaggccgtcctcatcgtcagcgggaacctcagcttcctgaactggctnactatggtgcccagcctggcctgstttgatgacgccaccctgggattcttgttsccctctgggccaggcagcctgaaggaccgagttctgcagatgcagagggacatccgaggggcccggcccgagcccagattcggctccgtggtgcggcgtgcagccaacgtctcgctgggcgtcctgctggcctggctcagcgtgcccgtggtcctcaacttgctgagctccaggcaggtcatgaacacccacttcaactctcttcacatcgtcaacacttacggggccttcggaagcatcaccaaggagcgggcggaggtgatcctgcagggcacagccagctccaacgccagcgcccccgatgccatgtgggaggactacgagttcaagtgcaagccaggtgaccccagcagacggccctgcctcatctccccgtaccactaccgcctggactggctgatgtggttcgcggccttccagacctacgagcacaacgactggwtcatccacctggctggcaagctcctggccagcgacgccgaggccttgtccctgctggcacacaaccccttcgcgggcaggcccccgcccaggtgggtccgaggaggagcactacaggtacaagttcagccgtcctgggggcaggcacgccgccgagggcaagtggtgggtgcggaagagggatcggagccttatttccctccgttcagcctgggaggagctgagggcccttatttcaaggaccntgggtgggccttttgcccggggcccttttagacgtggcaacagaattaaaggcgaggacccagccccttgggggtttcagcaaaaaaaaaa

SEQ ID NO: 314 - DNA, 446 bp, Homo sapiens
  misc_feature (380)..(380): n equals a,t,g, or c
  misc_feature (439)..(439): n equals a,t,g, or c
ccagttggttgccgcggagtctctccgagcagcgcatttgtcttctaggctgcttggttcgtgcctccgagaaaggggtctcctgctgccagctaagtgtgggagaacttgtgcacgtatctcccctccgaatcccaacgatgggtaacgccagctttggctccaaggaacagaagctgctgaagcggttgcggcttctgcccgccctgcttatcctccgcgccttcaagccccacaggaagatcagagattaccgcgtcgtggtagtcggcaccgctggtgtggggaaaagtacgctgctgcacaagtgggcgagcggcaacttccgtcatgagtacctgccgaccattgaaaatacctactgccagttgctggggctngcagccacggtgttgcttttccctggcacattcaccgaacaggcaagagtgggccgacnggcaaac

SEQ ID NO: 315 - DNA, 1733 bp, Homo sapiens
  misc_feature (1459)..(1459): n equals a,t,g, or c
  misc_feature (1509)..(1509): n equals a,t,g, or c
aaacattaccgttactctgcccagcccagtcatggaagactgtagtagattctcagcaagtacatgtttgatacgttccacgtttcccatttaatttcaatacatttaaaatattttgaaaattaggtgacagwatgttgactgctggtcctgtggccagagattgtggaatgattctacctcaggataaagtgattattgctgaagcattacctccaaaggatgggaaagttgccaaaataaattggcattatgcagactccctcacgcagtgcagtcatccatcagcaattgacccagaggctattccggttaaattggtccatgatagcttagaggatcttcaaatgactcgttatcattttgcaatgaatgggaaaatcattctcagtgatactggagcattttcaagaccttgttcctaagttgatgttgcatggcaccgtgtttgcccgtatggcacctgatcagaagacacagttgatagaagcattgcaaaatgttgattattttgttgggatgtgtggtgatggcgcaaatgattgtggtgctttgaagagggcacacgggaggcatttccttatcggagctcgaagcttcagtggcatctccctttacctctaagactcctagtatttcctgtgtgccaaaccttatcagggaaggccgtgctgctttaataacttccttctgtgtgtttaaattcatggcattgtacagcattatccagtacttcagtgttactctgctgtattctatcttaagtaacctaggagacttccagtttctcttcattgatctggcaatcattttggtagtggtatttacaatgagtttaaatcctgcctggaaagaacttgtggcacaaagaccaccttcgggtcttatatctggggcccttctcttctccgttttgtctcagattatcatctgcattggatttcaatctttgggttttttttgggtcaaacagcaaccttggtatgaagtgtggcatccaaaatcagatgcttgtaatacaacaggaagcgggttttggaattcttcacacgtagacaatgaaaccgaacttgatgaacataatatacaaaattatgaaaataccacagtgttttttatttccagttttcagtacctcatagtggcaattgccttttcaaaaggaaaacccttcaggcaaccttgctacaaaaattatttttttgttttttctgtgatttttttatatatttttatattattcatcatgttgtatccagttgcctctgttgaccaggttcttcagatagtgtgtgtaccatatcagtggcgtgtaactatgctcatcattgttcttgtcaatgcctttgtgtctatcacagtggagaacttcttccttgacatggtcctttggaaagttgtgttcaaccgagacaaacaaggagagtatcggttcagcaccacacagccaccgcaggantcagtggatcggtggggaaaatgctgcttaccctgggccctgggctgtanaaagaaracaccaaaggcaaagtacatgtatctggcgcaggarctcttggttgatccaraatggccaccaaaacctcagacaaccacagaagctaaagctttagttaakgaraatggatcatgtcaaatcwcaccataacatagcartgaatcagtctcagtggtattgctgawarcagtattcaggaatatgtgattttaggaatttctgatcctgtgtgtca

SEQ ID NO: 316 - DNA, 505 bp, Homo sapiens
  misc_feature (470)..(470): n equals a,t,g, or c
  misc_feature (495)..(495): n equals a,t,g, or c
gacctgcatcttgtatctgaataaccaggtgtttgtgtctctggccaatggagagcttgtggtctaccaaagggaagcaggccatttctgggacccccagaacttcaaatcagtgaccttgggcacccaggggagccccatcaccaagatggtatctgtgggtgggcggctgtggtgtggctgccagaaccgagtccttgtcctgagccctgacacgctgcagctggagcacatgttttacgtgggtcaggattcaagccgctgcgtggcttgcatggtggactccagcctgggtgtgtgggtgacattgaaaggtagtgcccacgtgtgtctctaccatccagacacctttgagcagctggcagaagtagacgtcactcctcccgtgcacaggatgctggcaagctcggatgccatcatccggcagcacaaagctgcctgtctgcgaatcacagcgctgctggtgtgtnaagaactgctgtgggtgggcaccantgctggtgtc

SEQ ID NO: 317 - DNA, 484 bp, Homo sapiens
  misc_feature (277)..(277): n equals a,t,g, or c
  misc_feature (474)..(474): n equals a,t,g, or c
cctcgaaaatactgaagttcctgttggctgtcttatggtctacaacaatgaagttgtagggaaggggagaaatgaagttaaccaaaccaaaaatgtatgtgagttgagcagtataattgcaaacatacagtagtgatgggtggactggagagaatttaccacagttggtgtgaaggctactcgacatgcagaaatggtggccatcgatcaggtcctcggattggtgtcgtcaaagtggcaagagtccctctgaagtatttgaacacactgtgttgtnatgtcactgtggagccctgcattatgtgtgcaactgctctccgcctgatgaaaatcccgctggttgtatatggctgtcagaatgaacgatttggtggttgtggctctgttctaaatattgcctctgctgacctaccaaacactgggagaccatttcagtgtatccctggatatcgggctgaggaagcagtggaaatnttaaagacct

SEQ ID NO: 318 - DNA, 1264 bp, Homo sapiens
  misc_feature (1262)..(1262): n equals a,t,g, or c
  misc_feature (1264)..(1264): n equals a,t,g, or c
caaacccaaggagagagcacgagcctgagtttagctttgagtttgggccaatccacagatagcttaggtacctatccagctgatccacaagcaggaggagataatccagaagttcatggtcaagtagaagtgaaaactgagaagagrccaaacttcgttgatcgacaggcatccacagttgagtatctcccaggcatgctacattcaaattgccctaaaggtctcctacccaaattctccagctggtctttggttaaactaggccctgctaagtcttataactttcatacaggtttggaccaacagggctttattccaggaacaaattatcttatgccttgggacattgtcatcaggactagagctgaagatgaaggagacttagacacaaactcttggcctgctccaaataaagctattcctggaaagagaagtgcggttgtaatgggaagaggaagacggcgagatgacatagctcgagcttttgtgggctttgaatatgaagactctcgaggtcggagattcatgtgctctgggcctgacaaagtaatgaaagtaatgggaagtgggccaaaggaatcagctttaaaagccctaaatagtgacatgcccttatatattctgtcatcctctcaaggtagagggctgaaacctcattatgctcaacttatgaggctttttgttgtggttcctgatgctcctttgcagataatactaatgcctcaggttcagccaggcccaccaccatgtccggtattctacccagaaaaacaagaaatcacccttccacctgatggcctttgggttttgagatttccttatgcatatgtgactgagagaggaccttgtttcccccctaaggaaaatgtgcagttaatgagctacaaggtgctccgtggggttcttaaggcagtaacacaataagtgttttccagccagttcaatcctatacttgagctggtttttgtttttggtatttgtggctgtgtttttggtatgtgtttactgtgttttcccaaatccaaaatgtgttttggttacaggagttcagtatttggaaactaatttgttctactttttcattatattgttgatatttattgtaaacgtgactacaactttctaataaagattggttgttctagaaaagaatataaaaaaaaaaaaaaaaaaaaaaaaaaaaaaaaaaaaaaaaaaaaaaaaaaaaaaaaaaaaaaaaaaaaaaaaaaaaaaaaaaaaaaaaaaaaaaaaagggggggccncn

SEQ ID NO: 319 - DNA, 677 bp, Homo sapiens
  misc_feature (571)..(571): n equals a,t,g, or c
  misc_feature (592)..(592): n equals a,t,g, or c
  misc_feature (600)..(600): n equals a,t,g, or c
gaatatctctaaataccgtcacattctgagtactgggtattgggtttcagcatataaattttcggaggctgataacagaattcaacccataacaccsgctctagtagtgttttaccttcctttttccatatgccttagttagtttaggcctgtggtgctgtgagcctgtgatgtgggaaaacttgattactcctccatgtagtaacctcaatgggaatggctcaggcaagcagatgccaccatgccacagggtcactgaggggcccagggtcatgctaagtcattccatcaacaacatcttccgtgtggtcaccactgggtccctgctggcaagaagaggaaagagactgtggaggagccgtgctcaatgtccaaagccccaggctggcattggacatcccattgtccccaggctggcatcaccgctgctcacatcctattgggagaactcagtcgcacctaagtgcaagggacgctgggaagtgcagtccacctgggggcccaggaagaagggcagagtgaatgggccacatacagcagtctttgccacatcctgccttttcctctcttncccagtccacttaggaatctncccactgnttcttggatttttaaactttctggctggtattttcagcagctgggtgacttttcatcttccttgcttcatgccttca

SEQ ID NO: 320 - DNA, 1917 bp, Homo sapiens
tcgacccacgcgtccggaacaatatggcggatggcgaggagccggagaagaaaagaaggagaatagaggagctgctggctgagaaaatggctgttgatggtgggtgtggggacactggagactgggaaggtcgctggaaccatgtaaagaagttcctcgagcgatctggacccttcacacaccctgatttcgaaccgagcactgaatctctccagttcttgttagatacatgtaaagttctagtcattggagctggcggcttaggatgtgagctcctgaaaaatctggccttgtctggttttagacagattcatgttatagatatggacactatagatgtttccaatctaaataggcagtttttatttaggcctaaagatattggaagacctaaggctgaagttgctgcagaatttctaaatgacagagttcctaattgcaatgtagttccacatttcaacaagattcaagattttaacgacactttctatcgacaatttcatattattgtatgtggactggactctatcatcgccagaagatggataaatggcatgctgatatctcttctaaattatgaagatggtgtcttagatccaagctccattgtccctttgatagatggggggacagaaggttttaaaggaaatgcccgggtgattctgcctggaatgactgcttgtatcgaatgcacgctggaactttatccaccacaggttaattttcccatgtgcaccattgcatctatgcccaggctaccagaacactgtattgagtatgtaaggatgttgcagtggcctaaggagcagccttttggagaaggggttccattagatggagatgatcctgaacatatacaatggattttccaaaaatccctagagagagcatcacaatataatattaggggtgttacgtataggctcactcaaggggtagtaaaaagaatcattcctgcagtagcttccacaaatgcagtcattgcagctgtgtgtgccactgaggtttttaaaatagccacaagtgcatacattcccttgaataattacttggtgtttaatgatgtagatgggctgtatacatacacatttgaagcagaaagaaaggaaaactgcccagcttgtagccagcttcctcaaaatattcagttttctccatcagctaaactacaggaggttttggattatctaaccaatagtgcttctctgcaaatgaaatctccagccatcacagccaccctagagggaaaaaatagaacactttacttacagtcggtaacctctattgaagaacgaacaaggccaaatctctccaaaacattgaaagaattggggcttgttgatggacaagaactggcggttgctgatgtcaccaccccacagactgtactattcaaacttcattttacttcttaaggaaaatctccacataatagaaaactcatggaaataatatactttgtggatgctaagaagttgaatcgatgtcatttttagcaatagtgttgccacgatttgtctttttttatataatgaaccactcttttttaactttgtaaccttcccttgaagacagaattttggtgttggtgcttgtaagcattttcattaataatatgagaaatgatacctggagagagagattatgagcaaatgtattgcttcttttagaggaggaagcatacaacctcttttgtgtgaattttgttattatggtcaaagaatgcattcctaagttttcatttgagtacccaaatacacaaaaggtgtccctttaaggaaaataaagaattaagttttaaataacattacattttacaatctgacatctggagtatattgaacataggctatttcttgatataacactcatttaattgtggccatccaaatgaatattattgcagaatttatcttg

SEQ ID NO: 321 - DNA, 575 bp, Homo sapiens
  misc_feature (537)..(537): n equals a,t,g, or c
  misc_feature (542)..(542): n equals a,t,g, or c
  misc_feature (553)..(553): n equals a,t,g, or c
  misc_feature (567)..(567): n equals a,t,g, or c
ggcasgrgctaccccagcagcaccaatgtggagaccgtcaacgatggtgctgagtcggccatgttcaagcagctgttccagaagtggtcagtaaaggaccagaccatgggcctggggaaaacgttcagcattggtaaaattgctaaagttttccaggataaatttgatgtgactctgctacacaccaagccagaggtagctgcccaggaaagaatggtcgatgatggcaacggaaaagttgaggtctggagaattgagaacctggagctggtccctgtggagtatcaatggtatggcttcttttatgggggagactgttatctggtcctctacacatacgaggtaaatgggaagccacatcacatcttgtacatctggcaggtaggcctggcacagcttyagctttggatcctgatgtgtcctctggccactgggctggggcggggagcatgggtccttcatggcctctcaccattgcagggccgccacgcctcacaggatgagctggcagcctcagcataccaggcagtggaagtngatcngcagtttgatngggctgctgttcangttcgagt

SEQ ID NO: 322 - DNA, 825 bp, Homo sapiens
aattccgaggaatacattcataaaccatgtgatactgtttcttcatgytmatattagtttccaaaaaaatgcagtctaatcctttatcttcaaacatctttaccaatgattttctgaacatctggatctcctycccagatgtcttcatcccaacaaagtagctgctctatggtgctgcaaagggactatcaggcagtgcccctcagtaagagaccgtacgttgggtaaacataaataaaccttaacacctattgcaacaataagatgcttgggaaattgagagctgtcaaaacaatacagacatttttccatttgtgcagcaagactccgatgctcagcaatagcttttttcctttggttctcttcctcttcaccaagacgttctctctcagctgctttggagacaaacatgtcatccagggtgtaatagtctccatctgtttttcccataaacttagatgccattctcataaagagcttgttttgattttctgctgttcccatcttttcatttttgactaaatcatttaggcttagattatcatcatcatgaaagtatctgaccctttctctttcctcatgggttgaaaccatctgtctctttcttcttcctccttgtgattccagagattttccgggtgtgttcacaggccatactcttccagactgatctgttctgacaaggawtacttcttgctggtcttcattctctaccccagatttttttggtatctgtgttatagtttctttgaatttatttgccttttcaagttgaactttaagttgttcagctaattccatattccccatcatctytgytttgac

SEQ ID NO: 323 - DNA, 861 bp, Homo sapiens
  misc_feature (802)..(802): n equals a,t,g, or c
  misc_feature (846)..(846): n equals a,t,g, or c
agagaggggacactgacctcaccttcttctccgaggactgttttcacttctcagaccgcgggcatgccgagatggccatcgcactctggaacaacatgctggaaccagtgggccgcaagactacctccaacaacttcacccacagccgagccaaactcaagtgcccctctcctgagagcccttacctctacaccctgcggaacagccgactgctcccagaccaggctgaagaagcccccgaggtgctctactgggctgtcccagtggcagcgggagtcggccttgtggtgggcatcatcgggacagtggtctggaggtgcaggagaggtggccggagggaagatcctccaatgagcctgcgcactggtgccctctaggcccgggggtgggtcctcaccctaaactccctatagccaccctcttcactgccctctgccccagccactcccggccaccaggacatgcttcaatgcctggtgccataggaagcccaggggacagtcacaacttcttggggcctgggcttcttccaggcctatgctcctggaatggatacatttaaataaagtccaaagctattttattcctgggtttgcctgcgtgaagcactcaccttccatctcttgtgcagcccaggtgtgggagctgccactttttgtggcctgcctccagcagggctgcccaagccacgaccaaccagagcccaaactgcctgccaccacgagcatatcctcaagtcaccaaacccactatttcaaaggcagaaaaaatgctggtcaccaggtggtggcttggaattttngagcttggttggttgccatttagtccaattcaacaaaatacctnttagggaattttttt

SEQ ID NO: 324 - DNA, 1396 bp, Homo sapiens
  misc_feature (1356)..(1356): n equals a,t,g, or c
  misc_feature (1360)..(1360): n equals a,t,g, or c
  misc_feature (1393)..(1393): n equals a,t,g, or c
ggcgggcgcggggacccgatgcgcgggagcggaggccgagatggcttcggcgggaggcgaagactgcgagagccccgcgccggaggccgaccgtccgcaccagcggcccttcctgataggggtgagcggcggcactgycagcgggaagtcgaccgtgtgtgagaagatcatggagttgctgggacagaacgaggtggaacagcggcagcggaaggtggtcatcctgagccaggacaggttctacaaggtcctgacggcagagcagaaggccaaggccttgaaaggacagtacaattttgaccatccagatgcctttgataatgatttgatgcacaggactctgaagaacatcgtggagggcaaaacggtggaggtgccgacctatgattttgtgacacactcaaggttaccagagaccacggtggtctaccctgcggacgtggttctgtttgagggcatcttggtgttctacagccaggagatccgggacatgttccacctgcgcctcttcgtggacaccgactccgacgtcaggctgtctcgaagakttctccgggacgtgcgccgagggagggacctggagcagattctgacgcatacaccaccttcgtgaagccggccttcgaggagttctgcctgccgacaaagaagtatgccgatgtgatcatcccacgaggagtggacaatatggttgccatcaacctgatcgtgcagcacatccaggacattctgaatggtgacatctgcaaatggcaccgaggagggtccaatgggcggagtacaagcggaccttttctragccaggggaccaccctgggatgctgacctctggcaaacggtcacatttggagtccagcagcagaccccactgaggggctgccgagcctcagggcaggtctcccgcccggsatgtgtgttcagggamtkaggcctggggacgcccacccacacccactgcttcctctcggcgcaccccaggggagtgttagcagcgaggccttcctcactcaggagtggaaactcagatgtgtcactcagactcaacttgctgggacactgacaggcgttcctgaggttttcagccacttaggctcgttgcggtttaaagatccctctaggtcactgagaaatgccacagaatgtgcaggaagcctgggaggcttctgtgaggaatgtgaggcacattattggggaaattgaggagacagcctagacactggctggcctgatgttttgttgacagtgaacccacagtgggagagagttttttccagtctgatctggttcttacacacacacataactcaaaagttttgtgaacaagtactttccttttttaacaggttaacaagtccnccangttttccggttttccggtttccataaacacaanggc

SEQ ID NO: 325 - DNA, 1140 bp, Homo sapiens
  misc_feature (575)..(575): n equals a,t,g, or c
tacggctgcgagaagacgacagaagggggggcagacccaagtgccggcggcggagactgcagtggagccagtaccggctgtagtggccggggccgtggcgggagagtcatgtcagagccgcagccgcggggcgcagagcgsgatctctaccgggacacgtgggtgcgatacctgggctatgccaatgaggtgggcgaggctttccgctctcttgtgccagcggcggtggtgtggctgagctatggcgtggccagctcctacgtgctggcggatgccattgacaaaggcaagaaggctggagaggtgcccagccctgaagcaggccgcagcgccagggtgacygtggctgtggtggacacctttgtatggcaggctctagcctctgtggccattccgggcttcaccatcaaccgcgtgtgtgctgcctctctctatgtcctgggcactgccacccgctggcccctggctgtccgcaagtggaccaccaccgcgcttgggctgttgaccatccccatcattatccaccccattgacaggtcggtggatttcctcctggactccagcctgcgcaastnctacccaacagtggggaagcccagctcctcctgatcatactctggtacctggcctgtgcatcggcctcctgcttcatgtcaacctcctactcctgccagggaatgtggacacctggctccctggtgtccaaagaccctggcacctgggtgggtttgagctggacagaagcttagagacaaaggcttcaagaagcagtggctgcagggagtcacagaagggcaggacctgaacgctgtctgcttccctggaatccaagatgctgagtggaagtggaccctgggtggcccggccctgtctttttcaggaaaattacatcctcccatggaggatgagagactgaggctcagggagggcaaggaataggcccaagatcacttggcaagctgggcacccaggacccccaggtgcttgacagagtcaccccatggtggtatggctgaacaaggagcggcagacaactcagggagaaactcaggagtgcagtaccagggacacctcaggacagattctctggccaggcccttccctgacccaataaatcctgaagaggtaaaaaaaaaaaaa

SEQ ID NO: 326 - DNA, 546 bp, Homo sapiens
  misc_feature (30)..(30): n equals a,t,g, or c
  misc_feature (314)..(314): n equals a,t,g, or c
gaaaacccgtaggggcaaggctcgccgtanagctgccaagctccagtcatcccaagaacctgaagcaccaccacctcgggatgtggcccttttgcaagggagggcaaatgatttggtgaagtaccttttggctaaagaccagacgaagattcccatcaagcgctcggacatgctgaaggacatcatcaaagaatacactgatgtgtaccccgaaatcattgaacgagcaggctattccttggagaaggtatttgggattcaattgaaggaaattgataagaatgaccacttgtacattcttctcagcaccttanagcccactgatgcaggcatactgggaacgactaaggactcacccaagctgggtctgctcatggtgcttcttaacatcatcttcatgaatggaaatcggtccagtgargctgtcatctgggaagtgctgcgcaakttggggcttgcgccctgggttatgattggggctctctcarcgcttggtgtccgtgttgtccytttgggcaaraaaagaasgtcctaggattgcatcag

SEQ ID NO: 327 - DNA, 1150 bp, Homo sapiens
ggcacgagcttggggcgtggcataccaagtgcaaggggagcaggtaagcaaggccctgaagtacctgaatgtgcgagaggcagtgcttggtggctacgataccaaggaggtcaccttctatccccaagatgctcctgaccaaccactgaaggcattggcctatgtggccaccccacagaaccctggttacctgggccctgcgcctgaagaggccattgccacgcagatcctggcctgccggggcttctccggccacaaccttgaatacttgctgcgtctggcagacttcatgcagctctgtgggcctcaggcgcaggacgagcacctggcagccatcgtggacgctgtgggcaccatgttgccctgcttctgccccaccgagcargctctggcgctggtgtgaggggctgagcccctgcggggagtgctcatgtggacatcagggccagacacccactccagtgcacaagacagattgcgaccgcttgagcccactgagcaratatggtgggtggctggaggcttctctttctcagtccctgcctgtctgccagcctgcagctctcctgcttgacactgacttactacttgaaactttatttattgcaccatgttggtgtggtgggcaggtggagggcctgccctggacacaggggccctgctgagcagtggcmccatcctggaacttgaccagattccccccagtgctgctgctaaccccacaccacccaggcctccacctccccagggagtctccaagagcctcgatcctctgctcactcagcccagccatccatagccctgggaattccacctgccaaggatcccagcaggctggatgagggatagtagggcatgaggagaaggagccctgtaaggactgaggccccggccagcccttctcctccaccagttccccagagcagagctggagctgatgcctggacacagctgctgagcctggcctgggcctcttamccacttggttgttttcttgtccctctgtctgtctgtctatctacttgtctgtctgggccactcctgcctgtgtgttggtctattcctgggaagctcatcactacaggccctggcaaccttcccartctgtcccatactgttacccataaaactatctctttatctgtaaaaa

SEQ ID NO: 328 - DNA, 1963 bp, Homo sapiens
  misc_feature (1956)..(1956): n equals a,t,g, or c
  misc_feature (1958)..(1958): n equals a,t,g, or c
aattcggcacgagcagctggagggcagaggaggcggcgcggggtgtcctgtcctcgccatgaggccgcagcaggcgccggtgtccggaaaggtgttcattcagcgagactacagcagtggcacacgctgccagttccagaccaagttccctgcggagctggagaaccggattgataggcagcagtttgaagaaacagttcgaactctaaataacctttatgcagaagcagagaagctcggcggccagtcatatctcgaaggttgtttggcttgtttaacagcatataccatcttcctatgcatggaaactcattatgagaaggttctgaagaaagtctccaaatacattcaagagcagaatgagaagatctatgctccacaaggcctcctcctgacagaccctattgagcgaggactgcgagttattgaaattaccatttatgaagacagaggcatgagcagtggaagataaaccgaagaattaaagatcccacttccagccgggcccctcatgtatccactggccgaccgcagagtgtccctacctcctctccagagcatcattcctttctatctgctgccagagccacggtgccatttactccaaggactcactttctaaaattccacacctggagtgacctctagtcgctcagcatccactttgtgtctccaaattgtgtaggactctgtaatcttttgattagtttctgagaaaacacaatgaagcacttcacttttttttattcaaagccatttaataaaacacagttggtcagcccagtgcaaagcttgttatctgccaccagtacataccattggttctcttcattccttgggccagcttctcaggtggctttagacctcaacaagccgtatcttcaccagtgttctatcttgttcccctaaattaataaaatgtttttctccaggattttggtgagggttggctgtggctgtcgttttgcacctcccagatttcaaagaattactggttttaccatgactcaaatcttaagatctgtttctactattcagttcctcaaactgaagcttattgaaaaaaaaatgtataatgttatttgttttattatagcaattattcctaattaaagcagtatttaatgcaatttccagttatttctttggagaattttatgtcattgttccattaccttgaatgttggaaagatatgatacgtgctgcttgttcatcacaaaaatcagtaagcacaataaagtggatgccaaaccatcagacacataaatgttcccgctgtgtccctggatatggaataagcaggtataaaaaatattttaattatagttttgttataaatataacttatgagaaaaaaatttgataggaataatactgtatattactaatttttaactatccctaaggcaaaccttatgacccacagaattttctcatatacagtattcagtgcacagaaatcttatgattggctcaagtacagtaagttacttctcagtaaaactctcaagtctgagtccatatttgtagctctgcttttggctgtacgttcctaggatcggggctgcttatgcctttcgtttatccttggggtttgagagcgctgtatttgggagagagtttaaaaatacattaggagagagaaaccattaaaagtttcactgtcagagatattgtaggtgctaatactggatttcgtctcagatttaatttcttttatgggtctgttagtcattcaacaaatcccataagtatgtgttaatattttaattgtgtaaaactcatttgttactttacagcctgtaatagtgtgtctgcattttcaacctgttgcaataactttgctgaaatattaacacattaataaaacttttcttaaacaaaaaaaaaaaaaaaaaaaaaaaaaaaaaaaaaaaataaaaaaaaaaaaaaaaaaaaaaaaaaaaaaaaaagangngttta

SEQ ID NO: 329 - DNA, 669 bp, Homo sapiens
  misc_feature (498)..(498): n equals a,t,g, or c
  misc_feature (522)..(522): n equals a,t,g, or c
  misc_feature (571)..(571): n equals a,t,g, or c
  misc_feature (595)..(595): n equals a,t,g, or c
  misc_feature (604)..(604): n equals a,t,g, or c
  misc_feature (659)..(659): n equals a,t,g, or c
aataccaccactggagagagagccacatgctgcttcccatcatatgtctacccggacccaacccaggaagaaacatacccgtccaacattttatcccatgagcaaagcaacttctgtagaactgctcatggagattttgtcttaacttcaaaacgtgcgtctcctaatttattttctgaggcacagtatcaagaagcacctgtggaaaaaaataatttaaaagaagaaaaccgtaaccatcctacaggtgagctacttatgtttctctcttctgtgcttatagtgttactaagttgtcctaagatgaagcctttccatgttttttctttaaaaattattttttcagagatggagtgttgccgtgttgctcaggctggactcaatctcctgggcacaagtaatcttcccccatcagcctctcaggtagctgggactataggcacgtgctaccctgccagctctttctgtatggttatttttttttgtcccctgtggcgngtttttttttttttgagacagtcncgctctgtcacccaggctggagagcagtggcacaatctcagctcactgnaacctctgcctctcgggttcaagngattcttgngtctcagctactgaggaggctgaagtgggaggattgcttgagcccaggaggcaanaggtttgcag

SEQ ID NO: 330 - DNA, 1144 bp, Homo sapiens
ccagaactaagccacccagacaccatcatcccgaaaaccccagcccttctcccatggcagattgatcagattttgattcaccagaaggctgagcgagtggaaaatggaagtacaggctccaccaggcaccaccattggccacgtgctacagacctggcatcccttcctccccaagttctccatccaggatgccgatcgccagacagtcttgcgagtggtggggccctgctggacctgtggctgtggcacagacaccaactttgaggtgaagactcgggatgaatcccgcagtgtgggccgcatcagcaagcagtgggggggcctggtccgagaagccctcacagatgcagatgactttggcctacagttcccgctggacctggatgtgagggtgaaggctgtgctgctgggagccacattcctcattgactacatgttctttgagaagcgaggaggcgctgggccctctgccatcaccagttagaggccaccatggtgtgaggagaccatcacctcgaccagaactccagatggtcacctgccctggcccctcctctgggcagcccctttcctccatgtacactgcaggggacagaaggggggccccatccctaccctactccctggccgcctgcccctgtggttcccaaggaggggtatgtatgagagccgctctcctgctacctcccaccactgtcccagcagtccctcggcacacaggcatatcagctttcacactttccccatgcactctctcccacccccttccagggcctctgctccaaaggaggcctctggaacccaggactctggggttttacaagagggctggggtgtggaagggcaagctgcaccaaagacggtggatatagccaccgcccccccgccgctgcctagcatctgcttggccaattagttcagcctcagaccatggcactttgagggggtctctacctccccatcaacagctgcagggggaccccagtgccaacttcctctcccactagggccctgccttcagctggtgcttgctgcgattcctgtgccttatgtaactgcccttccttcccttgccctaggaaaaaggctgcatctttatatgttacattcatataaactttgtaactttttggaaaaaaaaaaa

SEQ ID NO: 331 - DNA, 483 bp, Homo sapiens
  misc_feature (387)..(387): n equals a,t,g, or c
  misc_feature (482)..(482): n equals a,t,g, or c
ctctacaagggagtcccatttcagrtgtggggctgggtatggtcactcctgctggatgtctagaaggtgaaaaccaaggacctaggaaaataccagatacagcctttccaccgtcatccagagcaggacaaacacgccaggtggtgtcaggagcccaggtctccagctggagggaatgtcaaccctgcagtgggagcccatcatgcatcctaggcacagatgctaacgtaggcaycgcagtaagctgggtttggtaccccttcctggcttcagaaagaagccaaacaaggagctttctgcagaatgaaacctcttttccatccagaagcactgctgactgtttggtggttgctgttagggcagtgagccttttgtccattctgagantaggctggtttctcctcttgggcctggcctacagaccataaaaggaaaacagcaagaggtccccagcaaacatctacagatggccctggacatcnc

SEQ ID NO: 332 - DNA, 1383 bp, Homo sapiens
  misc_feature (346)..(346): n equals a,t,g, or c
ctggaccgaaaccggcgcggagcaactgaggcccgagccttctcgggacccgggggacgcctaaccccgcgagatgaggaaactgaggccgcgagagcgcgcatacagcagagaagcagcagaatcgggaatcaaacccagctctgtctgaccccagagcctgtgcctttaaccactggctaggctgaactgcctttgttcttcactgtccccatcacctctttcaaacctcagcctctccttcctcatcgttacatctctaggctgcacctgctctctaaacattcacacaaaccctgcaaattttcttcctcataattgggagaagactcactggccgaatggnagcagtagatgacttgcaatttgaagaatttggcaatgcagccacttctctgacagcaaacccagatgccaccacagtaaacattgaggatcctggtgaaaccccaaaacatcagccaggatccccaagaggctcaggaagagaagaagatgatgagttactgggaaatgatgactctgacaaaactgagttacttgctggacagaagaaaagctcccccttctggacatttgaatactaccaaacattctttgatgtggacacctaccaggtctttgacagaattaaaggatctcttttgccaatacccgggaaaaactttgtgaggttatatatccgcagcaatccagatctctatggccccttttggatatgtgccacgttggtctttgccatagcaattagtgggaatctttccaacttcttgatccatctggragagaagacgtaccattatgtgcccgaattccgaaaagtgtccatagcagctaccatcatctatgcctatgcctggctggttcctcttgcactctggggtttcctcatgtggagwaacagcaaagttatgaacatcgtctcctattcatttctggagattgtgtgtgtctatggatattccctcttcatttatatccccaccgcaatactgtggattatcccccagaaagctgttcgttggattctagtcatgattgccctgggcatctcaggatctctcttggcaatgacattttggccagctgttcgtgaggataaccgacgcgttgcattggccacaattgtgacaattgtgttgctccatatgctgctttctgtgggctgcttggcatacttttttgatgcaccagagatggaccatctcccaacaactacagctactccaaaccaaacagttgctgcagccaagtccagctaatgaggaaattctcttttgttttttggagcatggttctttgggaagtggcatccactgcaggaaagcagaatgagcagagccagcagaactgatggagtggcacaaattcccagtgtctgga

SEQ ID NO: 333 - DNA, 639 bp, Homo sapiens
atggaaaagctcgagctccaccgtggtggcggccgctctagaactagtggatcccccgggctgattgccgtcgcaggcgcaaggatatgggtacaaaaccgtgtcgatttaagccagaacggtaatttgattatggtcgcagtaaccttagtgctgggcgcgggtgattttgctctcacgctgggcggttttacgttgggagggattggtacagcaacctttggcgcgattttactcaatgcgttgttaagcagaaagttggttgacgttccaccgccagaagttgttcatcaggagccataaacagaaaaccgccggggttaccggcggtgcagattgttgacaacgtacgcattgttcatgccggatgcggcgtaaacgccttatccggcctacaaaacagtgcaaattcaatatattgcaatcttctggtaggcctgataagcatcgcgcatcaggcaagcttacatttgtcatcagtatcaaccaccgggtaaccggcggtgatggctttttgacgagctacagacaaaaatgcattcgtcattgattagcccggctagttgtcgcttttgccgtgactgctcttaccaccttttttacctgcttcagatgcgcgctgcgggcccgtacccaatc

SEQ ID NO: 334 - DNA, 1123 bp, Homo sapiens
  misc_feature (277)..(277): n equals a,t,g, or c
  misc_feature (1001)..(1001): n equals a,t,g, or c
  misc_feature (1119)..(1119): n equals a,t,g, or c
ttttttttttttttttaaaggggctgtaattatatttattagattaacaaggcagatgtgaattttctcttctataatccagtaagtctgtgtattcgttgactcagacagacaagaagccacaaggaaacaaagaagtaatcatttgttgagagacgttattaactatgatcttccctgaagctaccgggatgggaaaggtcagtgtcttcctttgaaccctgagacaattaggggctcttgaggcctgctgtgcccctgctgccaaggcagcctncaagttcaaggagcagctaatcacccactcctgcattcagtctgtcttgcctgatgagggctacgcaggctgcctcccattggtgtgcactgtttcctttttcagctgctaaatggctgaacaccatcggcctggggtatccctttttggggaatacgtctgtctgtctgaactcctttcccttcaaatggcactgtgataaaatctggtcataccatgctccagcatggaagtacatgaaagcacgcagtctgtgagtgcccatgaggactctcgtgctggcccccgtggccctggctagctgtcgtaccagtcgaggaagagcaaggagaaggagcacatcacgaggaagaagaggatccacacgcggaagccagcgttgtttttaatggcctctcttatgtcytcgttgccttccttgatattttyagttgcccccacaactaactggtgaatgctgtyaatctcagcttcctgttgcaaaaccttttccgtgaatatctcttggagtctggaaatctcaaccactctcccttcgatttgcctcacttcatcaaacaagctgttcatttcaccaattagtcgctgattttcctgttcaaacatttgtatttcttctggggataactcatcttcgcctttgccatctccccacgttcccaattcaggttgtgtttcagccaaaattttttctggacgttcttcagtggcagggttttcttcngagtcttttgaaggactctgtgaaactttctcagaagatgtggattctcttgtctttgtatttggttctggttccagcttagataatctttttccccacgcgtccgcggacgcgtggntcga

SEQ ID NO: 335 - DNA, 497 bp, Homo sapiens
  misc_feature (65)..(65): n equals a,t,g, or c
tcagcataagggggaggtgagagtgaaagtttcatcgcggcctcacttggcgatatgcgcaattntggcgatttccaccagcgcgtcaggttttaccagtccgcactgaatgcagaatcgcgccggtwtatcacccggaaaaaactcggcgtagatttcgttaatcgcggcgtaatttttccagtcggtaataaagatgctgttgaaggtcacatccgccatcgtgccacccgccgtctcgatcaccttgcggatagtttccagaacgtggcgggtttgcgcctttgggtcatcggcaaacagcacgttattatgttgatcaaaagccagcgtaccggagacatacaccacgccatcagccagcgtgccgggaacgaagggggccagcggtgcctgctgccagcgggaataattacggattttggcatcgttaaactccttaagcgatatgagcaaaggacgtgggagaaaagcgcgtcgcagaatgtttcgacgtc

SEQ ID NO: 336 - DNA, 996 bp, Homo sapiens
ggcacgagccaagtttgtccagtcacgaaatcagcaggaagtgatctataacacccagagcctcctcagcctcctggttcactgctgcagtgccccagggggcactgaatgtggggaatgctggggggcacccatcttgagtccagaggcagccaaagcagtggcagtgaccttggtggagagtgtgtgtcccgatgcagctggtgcagagctggcctggccccccgaggaacacgcccgggccaccgtggagcggggatctccgcattggccggcgcttccgcgaacagcccctgctctttgagctgttaaagctggtagcagctgcacccccagccctgtgctactgttccgtgctgcttcgggggctgctggccgccctcttgggccattgggaagcctctcgccaccctgacacgacccactccccctggcacctggaggcatcctgcaccttagtggctgtcatggctgagggaagcctcctgcctccggccctgggtaatatgcatgaagtatttagccaactggcacctttcgaggtgcgtctgctgctgctcagtgtctggggttttctccgggagcatgggcccttgcctcagaagttcatcttccaatcagagcggggtcgcttcattcgggacttctccagggagggtggaggtgagggtggaccccatctggctgtgctgcacagtgtcctccaccgcaacatcgaccgcctaggtcttttctctggccgtttccaggcaccttcaccgtccactctccttcgacaggggacgtagccttttcttgctctggaagcccagggaggttgagcagtgagagagggaagggactaacgtgctccggaagggtggaggtttctcttctaagtccttggtctaaagagcgctgtcacttttttctctcccacttttttttttctaaataaaatttgccaacttgaaaaaaaaaaaaaaaaaaaaaaaaaaaaaaaaaaaaaaaaaaaaa

SEQ ID NO: 337 - DNA, 2520 bp, Homo sapiens
acttttctttcttcattaggaaatcttattgcacaggaaccacccccacccccaccccccacaccttcccaaggcagcatcccagtgagatagagtgggaaaggtcccagagggctcactcacctctaggcccagagaggctttctcctcactttatacactgcaaaaacagaagaattgtgtcaataacaccctctgtagtggagaaacttaaaaagctggttaggaagctctcgtgtatatttagagacaattacaagaaagctggacttgccgctgtggtctcaggagaaatgagtgttcttgatgacaggcaaagggacatcttagttgtccagaagcggcactcttccctggaagccgccatgttaataggattactaagcctggctccagacagtgcctgctcatggctgccagttcttaccgatcacatctgtcactgccaccgtatatcatctgccagtgcatcagcttaaggggaggtcacgagtgcaaaagaacctgacccttgacaatgagggagaagggacatggaccacctgtctgggaattcctgggaatcactggcagggtggaggctgggctggggattagccgcggtgtgcgtgaatggctctgtctccagcaagtctctctccatcaaaccccaggtctgccccataagcaagatctttaacagatggatgtctccatgaggaaaacccaaggcgagaagcccaagccatggcggggttgcttgacgtcctcatggagtcactctgccccacatgctcaaatcttccctctggccccacatccctaggagggcctgacccctgtaaagatacaggaggcagctccctggcctccaaatggcccatggagatggcagtcgggagacagggttctgtgtttgctgcggtgaagggaggagaaggcaggaggaaaaaggatggcttctagccctgaagaggactccagcatcccaggcaccgggtgcttctggctgcagttttccctatggaggcccctcagcctccagccctaacataaatgtcggttaaattcagttttcaagcctctctcccttttcagtgtcagagcagtagatggtccagggcattggaggcctcgaccactctgcattgcagattacagtgacttcctcggggttgccccatcttggtctcctgtggtttcttcatcagctttttttttaccagcatctctcaaataacaatgaaagatagatatgcccattaatgtctgattaaggagcaaaggctggatttctggccacagcgcgctgcactctccctcctgcctcagccggggtccgtcttagcagtttggaaaggggaaaaagatgccggtcctcactgcttaagttttgtgtccaggcggccgctcagaactagtggatcccccgggactgcaggacattcggcacgacctcgtgccgcgccccactgcacagatgaggaaccagaggctcagaggagtgaagttgccttcctgaggtcacacagcatgaaagtgatgagctaggatttgaatctgggaagttgggctctagagccagactgtactgccttctgccacactgtactgccttctgtgactgggtggcacctccagggcacatttacacaaggccctgaatctgcagaggctgtttctcaagatgcccgtcatggtgtggcctgggccagctctggcttccacaggtccctgactgtcctcagagtggaacatgctcaacctcccgcccactgctctctcttctgcccagatttcaggggtgccggtccccaaggcctgccccctttctttaagactgaactcaagtctccttggaaggccccggtgaagctcccagagactggttttcttgggatgcaggcagaaggggaccctccctggccaacacccaggagcccagcagaagcacccacacgtagaaagaggctcactacagccagaagtgcagagtcagagtcctgggaccatcttgttctgcaaggtgaccccaggctccccaggacaggggagagggatcgtcctcattcagactctagctggggcctctgtactggcttctccctgggtggggttgcctgttacatagctgtgcctcagagaaagggtcctgcattttctggaatgttctctgtgcttacccctctgtgtgcccctccattgctcctctacaagcaattaggtgattcaaaagagcaacttaggctgggtgcagtgactcacacccgtaatcccggcactttgggaggccgaggcgggcagggacaggagttcaagaccagcctggccaacatggtgaaaccctgtctctacaaaaaatacaaaaattaaccagacattgtggcatgtgcctgtaatcccagctactcaggaggctgacacaggagaattgcttgaaccaggaggcggaggctgcagtgagctgagattgtgccactgcactccagcctgggcaacagaacgagactctgtctcaaaaaaaaaaaaaaaaaaaaaaaa

SEQ ID NO: 338 - DNA, 767 bp, Homo sapiens
  misc_feature (634)..(634): n equals a,t,g, or c
  misc_feature (679)..(679): n equals a,t,g, or c
  misc_feature (681)..(681): n equals a,t,g, or c
  misc_feature (697)..(697): n equals a,t,g, or c
  misc_feature (727)..(727): n equals a,t,g, or c
gacagattgtctctccctctctctctcacacacacacatagaaaatcactgcacatattctctttctctaaatagttaagttttatgtattcttgaagcataaaatgtgtccctttaaatggattctcccatttcttttaaatttcctaaaataaaaaagattcccactatgtatggacttctttgtcagttcctgccactgcactcccagctgtggctactgaagagctcccagcagattgctcagctttgcctaatgcctgaatcattaagattcaggcccggtggtatattggaaactaattctccaccagcaggaataagaaaattagtctgtagccccatgccaggtgtctcttctcccaaggactacatcagcttcaagctaagctttctttctctaaccaccctcccccttcttccctctgcatttctattccattcttctgagctgcctgccctcctgggccccttgtaataaacctcaaccacaaggtaagttttctagggctctcccctccttcctgctcccgcaggtctcttccttcagggtctagttcctactctttgcatcctcggctaccggctgcggctctgctttaatccccgtggaacttcctgacagcatgggttnagttccttacctaaggcagatactaaacccaatccctggttggancnttcttggcttttcttncctttaaggcagaaccttttgggaaaaccnggaatctaagccctggaaggaatttcactgggggttacca

SEQ ID NO: 339 - DNA, 1212 bp, Homo sapiens
  misc_feature (1148)..(1148): n equals a,t,g, or c
cggccatcttggaggctgaggcggcggcggcggcgctgcggcgggttcggtgggcccaatcccggggcggtgcggctgtttcgggcgcgggccccgcttttccgcaccctgctccggcctcgactacggcgagcctgagcgcggcggcggcccacgcgcagcacagggagagatgagcagcaccagcagtaagagggctccgaccacggcaacccagaggctgaagcaggactaccttcgcattaagaaagacccggtgccttacatctgtgccgagcccctcccttcgaatattctcgagtggcactatgtcgtccgaggcccagagatgaccccttatgaaggtggctattatcatggaaaactaatttttcccagagaatttcctttcaaacctcccagtatctatatgatcactcccaacgggaggtttaagtgcaacaccaggctgtgtctttctatcacggatttccacccggacacgtggaacccggcctggtctgtctccaccatcctgactgggctcctgagcttcatggtggagaagggccccaccctgggcagtatagagacgtcggacttcacgaaaagacaactggcagtgcagagtttagcatttaatttgaaagataaagtcttttgtgaattatttcctgaagtcgtggaggagattaaacaaaaacagaaagcacaagacgaactcagtagcagaccccagactctccccttgccagacgtggttccagacggggagacgcacctcgtccagaacgggattcagctgctcaacgggcatgcgccgggggccgtcccaaacctcgcagggctccagcaggccaaccggcaccacggactcctgggtggcgccctggcgaacttgtttgtgatagttgggtttgcagcctttgcttacacggtcaagtacgtgytgaggagcatcgcscaggagtgaggcccaggcgccgagacccaaggcgccactgagggcaccgcgcaccagagcgtgacctcggcaggctggacacactgcccagcacaggcagacccaccaggctcctaggtttagcttttaaaaacctgaaaggggaagcaaaaaccaaaatgtgtgactggctttggaggagactggagcctcacccttgtcctgncacggccgctggggctgtgtggtgggccttgggtgctggattggacttatttccgggtgctttg

SEQ ID NO: 340 - DNA, 820 bp, Homo sapiens
ggtctgcgccggaagtgcatgagctgccgatgtggtgcttagtgattgcggtttcggtcgctctcccgtgtttcccgggctgggtatttgcctcgcaccatggcgcccaagggcaaagcgggcacgagagggaagaagcagatatttgaagagaacagagagactctgaagttctacctgcggatcatactgggggccaatgccatttactgccttgtgacgttggtcttcttttactcatctgcctcattttgggcctggttggccctgggctttagtctggcagtgtatggggccagctaccactctatgagctcgatggcacgagcagcgttctctgaggatggggccctgatggatggtggcatggacctcaacatggagcagggcatggcagagcaccttaaggatgtgatcctactgacagccatcgtgcaggtgctcagctgcttctctctctatgtctggtccttctggcttctggctccaggccgggccctttacctcctgtgggtgaatgtgctgggcccctggttcactgcagacagtggcaccccagcaccagagcacaatgagaaacggcagcgccgacaggagcggcggcagatgaagcggttatagccattgacattgtggccacaggccactggccctgggtggctctgtcagggtgcacagcccctcatgcctggagcaatgagggtctagtccaggggccaaaagcagtctgaggtattgggtatacttatactctatagggtcgttgaataaatggcttagaatgtgaaaaaaaaaaaaaaaaaaaaaaaaaaaaaaaaaa

SEQ ID NO: 341 - DNA, 1984 bp, Homo sapiens
  misc_feature (103)..(103): n equals a,t,g, or c
  misc_feature (198)..(198): n equals a,t,g, or c
  misc_feature (253)..(253): n equals a,t,g, or c
  misc_feature (1962)..(1962): n equals a,t,g, or c
  misc_feature (1984)..(1984): n equals a,t,g, or c
ggtgaccgccatcaacagtcagaaagctgtgctcagcactgatgtgcagaacacaccagtcaacctccagacgtctagtaaggtcactgggcctggggcagangctgtccaaattgtggcaaaaaacacagtcactctgcaggttcaggcaacacctcctcagcccatcaaagtaccacagtttatcccccctcctanactcactccacgtccaaactttcttccacaggttcgacccaagcctgtggcccanaataacattcctattgccccagcatcacctcccatgctcgcagctcctcagcttatccagaagcccgtcatgctgaacaagttcaccccacaacccttcccacatcccagaattccatccaccccgtccgtgtcgtcaatgggcagactgcaaccatagccaaaacgttccccatggcccagctcaccagcattgtgatagctactccagggaccagactcgctggacctcaaactgtacagcttagcaagccaagtcttgaaaaacagacagttaaatctcacacagaaacagatgagaaacaaacagagagccgcaccatcaccccacctgctgcacccaaaccaaaacgggaggagaaccctcagaaacttgccttcatggtgtctctagggttggtaacacatgaccatctagaagaaatccaaagcaagaggcaagagcgaaaaagaagaacaacagcaaatccggtctacagtggagcagtctttgagccagagcgttaagaagagtgcagtgacatacctaaacagcacaatgcaccctgggacccggaagagaggtcgtcctccaaaatacaatgcagtgytggggtttggagcccttaccccaacatccccccaatccagtcatcctgactcccctgaaaatgaaaagacagrgaccacattcactttccctgcacctgttcagcctgtgtccctgcccagccccamctccacagacggtgrtattcatgaggmtttttgcagcgtttgcagaaaaagtggccagttactgatgtgcgacacatgttcccgtgtatatcatttggactgcttagacccccctctgaaaacaattcccaagggcatgtggatctgtcccagatgtcaggaccagatgctgaagaaggaagaagcaattccatggcctggaactttagcaattgttcattcctatattgcctacaaagcagcaaaagaagaagagaaacagaagttacttaaatggagttcagatttaaaacaagaacgagaacaactagagcaaaaggtgaaacagctcagcaattccataagtaaatgcatggaaatgaagaacaccatcctggcccggcagaaggagatgcacagctccctggagaaggtaaaacagctgattcgcctcatccacggcatcgacctctccaaacctgtagactctgaggccactgtggggccatctccaatggcccggactgcaccccccctgccaatgccgccacctccacgccggccccttccccctcctcccagagctgcacagcgaactgtaaccagggggaagagactaaataacagagcccctctaggagaagccacgggatcccggcggcaaggagaacagaacactgaagactctagaaaagcaaagccggatttctggaaagtgcagaattcttttggttctttggttccagagagagagaagatgcttgtgccaggtggcaccagagtttgccaattgatccttcttattctgtgtgtacatgcaaagattggaccatgttacatgaaatagtgccagctggaggttctttgccagcaccatgccaagtgaaataatatatttactctctctattatacaccagtgtgtgcctgcagcagcctccacagccacgatgggtttgtttctgttttcytgggtggggaaccaggggacgggccggaagggaaggagaagcanggtttcaagattccttaacttn

SEQ ID NO: 342 - DNA, 680 bp, Homo sapiens
  misc_feature (108)..(108): n equals a,t,g, or c
  misc_feature (607)..(607): n equals a,t,g, or c
  misc_feature (636)..(636): n equals a,t,g, or c
  misc_feature (643)..(643): n equals a,t,g, or c
  misc_feature (665)..(665): n equals a,t,g, or c
ggggggctttctcccaccgctttccgagcccgcttgcacctcggcgatccccgactcccttctttatggcgtcgctcctgtgctgtgggccgaagctggccgcctgcngcatcgtcctcagcgcctggggagtgatcatgttgtaatccacccaccgccacttcaagaagaaatgatatgaagaagtgccggttctccctcccctcttccgcactgtcccgtgaatgatgacgcctccagagaggacgataatctgggttcctgggagagatggcttggtcactattcccacccttgcctcgaccacttgtctcaatgtcaccacctcacgccctgttccagataatgctcggaatatttttcaatgtccattccgctgtgttgattgaggacgttcccttcacggagaaagattttgagaatggcccccagaacatatacaacctttacgagcaagtcagctacaactgtttcatcgctgcaggcctttacctcctcctcggaggcttctctttctgccaagttcggctcaataagcgcaagggaatacatgggtgcgctaggggccccggcggcgttttccccgctccagcccctcctttatttnaaaggaytccctggcaccgtgttcacccngggtcgngttcccaccctttgccgggcgnctttgtggggattgg

SEQ ID NO: 343 - DNA, 1322 bp, Homo sapiens
  misc_feature (1086)..(1086): n equals a,t,g, or c
gctgaagatggggtccctcgcacggcacggtccatgtccctcacgctgggaaagaatatgcctcgccggaggtcagcgttgctgtggttcctaagtttaatgccctgaatctgcctggccaaactcccagctcatcatccattccctccttaccagccttgtcggaatcacccaatgggaaaggcagcctacctgtcacttcagcactgcctgcacttttggaaaatggaaagacaaatggggacccagattgtgaagcctctgctcctgcgctgaccctgagctgcctggaggagcttagtcaggagaccaaggccaggatggaggaagaagcctacagcaagggattccaagaaggtctaaagaagaccaaagaacttcaagacctgaaggaggaggaggaagaacagaagagtgagagtcctgaggaacctgaagaggtagaagaaactgaggaagaggaaaagggcccaagaagcagcaaacttgaagaattggtccatttcttacaagtcatgtatcccaaactgtgtcagcactggcaagtgatctggatgatggctgcagtgatgctggtcttgactgttgtgctggggctctacaattcctataactcttgtgcagagcaggctgatgggccccttggaagatccacttgctcggcagccccagggactcctggtggagctcaggactccagcatgagcagcctacagagcagtaggaaacctcacacctagccagtgccctgctctgagacactcagactaccaccctttccccaagtataacgtcaggcccaagtgtggacacactgccgcccatcccatcaggtcatgaggaagggttcttttaacactcggcacttctgtgggagctattcatacacagtgacttgatgttcttggaggatcaacaaaactgccctgggaaagcatccagtggatgaagaagtcaccttcaccaaggaactctattggaagggaaggtctcctgcccctagctcaggtggctggggagaactaaaacaccttcactggtggttgggggtaaggagcggggcacgggggaggaggaggtaggggncagtaaaaaacttactctcttttttcctctctgtaattggttatcaggaagaatttgcttaatgactaacaccctaagcatcagacctggaatttggagttgcaaagtgactatcttcccatttcccatctcattttcaataacttcagcctcccattctttcctttggaatgagagtttctttttacagaagtaggaaaggcttctcagaaaaaaaaaaaaaaaaaaaaactcga

SEQ ID NO: 344 - DNA, 702 bp, Homo sapiens
  misc_feature (663)..(663): n equals a,t,g, or c
acctgttaaaatgcaaagcaaatttctttggggcagaaaaacaatctgacagtagcagtgtagaatttgttcattcaaatacatctgtgtaaatgcaaaaagtcataaaattcacctccgagctgcttgcttttgaacctgcagcaactagtcttagccggcccggtttgaacatcgttctttcagaagtgctgaaaatgctgcaaagttggataagtggaaatgtggctgcccctctcctcactacttcctctctgatcgtwctgaagcttgcattgggaatggctgctttctctaaccattttcagcttgagtgggtattgctgaagaaatccaacatcattccagcagttgaaaaaggaagccttcgggagaaagtgcttgcaaaattttgtctttgtgcttgkgtatgagtaagttgccatgaataagttattattttaacccataattggcgactgtttatatgaattctttctttggcaccaaataggtttcatcttcttaggcacaattagaaaaaatccacatagatggatattttacatttagttattgctttatccaaatacatgaatctaaagctgaatcaacccttacttccagttgtgcttattaagaagatcaatttccaagtagtaaagtttcaggggaactgactgngctgctattgggtttgaccaaattgggggggaaatccat

SEQ ID NO: 345 - DNA, 494 bp, Homo sapiens
  misc_feature (458)..(458): n equals a,t,g, or c
  misc_feature (493)..(494): n equals a,t,g, or c
gccacattgtcttccccagaagctcaaactggatgcccagccctcagtgtacaaactcaagtatgcaagaaatacatctttattcttttatgaatatacctaatttatatgttggaaggtgtcagcaatgaatttgatcactttggtatttctctacctttaaagatatgtttacatttggggtgggatgaaggtttggtggaggggaaggtggtcaggttgggccaaggtattgggaaatccatttgttcctcatgtcagctgtttgaggaggcaccaacccagatgtccacagttccttctggccttcctttaccgatactgatgcacctgtgcctccttcctgtgtgcatggcccatttgtgcccagcatctccctgctattttggggccactccagggtctgggaagttctgtaggcttataacatacagtcattcttctccccagcttgctgnctcctgagacacagaggtagagaagtaggaaaggnn

SEQ ID NO: 346 - DNA, 2230 bp, Homo sapiens
ttgtactctctctgataattttcctgaccacactattttatctattaagttccagtgatgagtactacaagccagtgaagtgggtgataagcctgactccactatctcagccaggtccttcttctaatattattggccagtctgtggaagaagctatcagaggggtgtttgatgcttccctcaaaatggctggcttctatggattgtatacctggctgactcatactatgtttggcatcaatattgtcttcataccatcagcattagcagcaatccttggagcagtgccattcctggggacatactgggcagcagtacctgcagttcttgacctgtggctgacacaagggttaggatgcaaggccattttactgttgatttttcatctcttgccaacatactttgtagatactgcaatctactctgacatatcaggaggtggccatccttacctgacaggcttggcagtggccggtggagcatactacctaggcctggaaggagcaatcatcggtcctattcttctctgcatacttgtggttgcttccaatatctatagtgccatgctagtgagtcccacgaattcagttcccacgccaaaccagaccccatggcctgctcagcctcagcggactttccgtgacatttctgaagatctgaaatcttcagtaggttgatgtggtttcctctgcagtgatttttctaggaagttcaaatttgacagcgagttcagctcagctgtggccytctgcccttccagctgtgcctagcaagcaaaacccaggaaagaagcagaagcctcctggccttacatacagaatgcctggacaagagagaacttgctgcgggctgctttgtattttaaaacacagcttgagagttcagmgttggtggtttgctcacttaactgttgttaagatggcttgaaaagtttcattttatacactggtaccctggcttgaaatttttccactttggttatctatgttactatattatatatttataaagttattttaagaactctaaactacctgctgttaaaagaatagatggtgtaattttttcctggtttaagaaatgtattgttaaacttttctaagacagtcacttttcaaggaagagggctttcacttttgagtgtgtagttgagtgagcaggaaaaatgaatcttctacccttctcccacaatgtattatacgctctttaagaaataataaatcataagtataagggtggggtggcttatttgatgttcagttttatattataaccctgggagatacaaagactgaagctcttcctcctcttccttttctcttcacgcttctttacactattgccaaattataaaacttggctgaccacgttgaagtgaaatacttattaagctgctatgaatggtaacagtatgataaaattcatgctgttattaggttttctccttccaggtggttgaagtgaaaaatctcaggtgtagcaatactctgatttgttaaatgtatccgtttcattatttggaactctgccaataagttagttttcagcagaattttgtatttatgtagtattttcccatctcttagcacagtgccttgcacatgactctaaatgaatgcttgttgaattgaattgcaactttaaaaatatctcagatatcacaataaccagcatagtgctttacattttacaaagtccttttgcacatactatttcacaagtacatcacatcagctttcatatagctttatattattttacatcagttttacactgatggagaagctaaggttcagaaaagtgaccaactcaaagtcgtaaagtgtagtaggatttggcctcagatctttgactccgttgtgtgcagattctgctgtattagtgttccttctaaatattgtatgcagttttcccagtgttacgagattggtgttgctatccatttgttgtgaatgaagacttgtcctatagtacatgacagggctgagagtggactgtagttcttagctgaaccctttctactgtttaaaacaatcatcaggcctatcctctgctcccaggggaatgtgggagagaaaagggttcttggccaggctgtaggtggtggctcacatctgtaatcccagcactttggaaggctgaggtgggtggattgcttgagcccagggatttgagatcagcctaggcacatggcaaaaccccatcttcttacaaaaaaaaaaaaaaaaac

SEQ ID NO: 347 - DNA, 586 bp, Homo sapiens
  misc_feature (492)..(492): n equals a,t,g, or c
  misc_feature (504)..(504): n equals a,t,g, or c
  misc_feature (533)..(533): n equals a,t,g, or c
  misc_feature (569)..(569): n equals a,t,g, or c
  misc_feature (574)..(574): n equals a,t,g, or c
gagacaggccgctggctgaggcccggctcgtgtccctgcagggcatggcgggtcagttccgcagctacgtgtgggacccgctgctgatcctgtcgcagatcgtcctcatgcagaccgtgtattacggctcgctgggcctgtggctggcgctggtggacgggctagtgcgaagcagcccctcgctggaccagatgttcgacgccgagatcctgggcttttccacccctccaggccggctctccatgatgtccttcatcctcaacgccctcacctgtgccctgggcttgctgtacttcatccggcgaggaaagcagtgtctggatttcactgtcactgtccatttctttcacctyctgggctgctggttctacagctyccgtttcccctcggcgctgacctggtggctggtccaagccgtgtgcattgactcatggctggcatcggggagtacctgtgcatgcggacggagctcaaggagataccccttaactnaagccctaaatncaatgtctagaatcagccctttggacatnctgctgacacttgggccccttaacaccttgggctgnttaanaccttcagatga

SEQ ID NO: 348 - DNA, 485 bp, Homo sapiens
  misc_feature (109)..(109): n equals a,t,g, or c
  misc_feature (401)..(401): n equals a,t,g, or c
ggcacgagcctgcttgaagcctaactgtccaccagaaaggactgctctttgggtgagttgaacttcttccattatagaaagaattgaaggctgagaaactcagctgctnatcatgtggaacagctctgacgccaacttctcctgctaccatgagtctgtgctgggctatcgttatgttgcagttagctggggggtggtggtggctgtgacaggcaccgtgggcaatgtgctcaccctactggccttggccatccagcccaagctccgtacccgattcaacctgctcatagccaacctcacactggctgatctcctctactgcacgctccttcagcccttctctgtggacacctacctccacctgcamtggcgcaccggtgccaccttctgcagggtatttnggctcctcctttttgcctccaattctgtctccatcctgaccctctgctcatcgcactgggacgctaactcctcattgcccaacc

SEQ ID NO: 349 - DNA, 1115 bp, Homo sapiens
  misc_feature (467)..(467): n equals a,t,g, or c
  misc_feature (1055)..(1055): n equals a,t,g, or c
  misc_feature (1090)..(1090): n equals a,t,g, or c
  misc_feature (1112)..(1112): n equals a,t,g, or c
taagatgcctggcctggatgtttattttgccgctgatgtttgttacgccgagaaagttgcgcaagaaaaaggttttttatatcgtttaacatcacgatatcgccattatgccgcatttgagcgagcgactttcgagcagggtaaatcgacgaaacttatgatgctgaccgataagcaaatcgccgatttccagaagcattatcaaactgaacctgaacgttttcaaattcttcctcccggtatttatccggacagaaaatacagtgagcaaatcccaaacagccgtgaaatttatcgccagaaaaatggcataaaagagcmacaaaacttattactgcaggttggatcagattttggccgtaaaggtgtagatcgctcaattgaagctttggcatcgttaccggaatcattacgtcacaatacgcttttatttgttgttggtcaggataagccgcgaaaatttgaancgctggcagaaaaactcggcgtgcggagcaatgtgcatttcttctccggtcgcaatgatgtgtcagaattaatggcagccgctgatttattactgcatcccgcttatcasgaagccgcgggtatcgttcttctagaagcgatcactgctgggttacctgttttaacaacagcggtatgtgggtacgcgcattatattgcggatgccaattgtggaacggtcatcgctgaacctttctctyaggaacaattaaatgaagttttacgtaaagcgttaactcagtcgccattgcgaatggcctgggcggagaatgctcgccattatgccgatactcaggatttgtatagcttgccagaaaaagccgcggatatcattacaggtggtttagatggttgaattaaaagagccgsttgccacactttggcgtggtaaagatgcttttgcagaggtcaaaaaactgaacggcgaggtctttcgtgaactggagactcggcggacattacgctttgaactgccgggaaaagctattttcttaaatggcacaaggggacgacattaaaagagattataaaaaatctactctcattgnggatgcccggtttgggccgcaagacagagagtggnacgctattcatcggcctggagngga

SEQ ID NO: 350 - DNA, 357 bp, Homo sapiens
  misc_feature (314)..(314): n equals a,t,g, or c
  misc_feature (331)..(331): n equals a,t,g, or c
  misc_feature (342)..(342): n equals a,t,g, or c
caggtctcgccgcccgcttgatccctgaggtgtttccatgctgcgggtggtgcttccaggcagagtgggtgggggcccaccgggcaccgccctttcttccttgtccctgcctcactctgagagccttgggggtctccaccagtgcagacaagggctacagtctccagggccgggtcttgtccctcttctccgctggtccacgctggcagctcttggcttcgggcctgccttctgcctccctttgggatctgtgtcttccagggatcagctgcttggctttgctggaggtgcctcctgtgggggcgcactgcctnctgctctaagttcttgncagagctgctncccttccttgcttgg

SEQ ID NO: 351 - DNA, 1488 bp, Homo sapiens
  misc_feature (22)..(22): n equals a,t,g, or c
  misc_feature (83)..(83): n equals a,t,g, or c
acatgtcccctggggaccccangtggctggacgtgattgagcgtgacctgcaccggcagttcccattccatgagatgtttgtntcccgggggggccacggccagcaggacctattccgtgtgctgaaggcctacacgctgtaccggcccgaggagggctactgccaggcccaggcgcccattgccgctgtyttgctcatgcatatgcctgctgagcaagccttctggtgcctggtacagatctgtgagaagtacctgcccggctactacagcgagaaactggaggcgatccagctggacggggagatccttttctcgctgttgcagaaggtgtcgccggtggcccacaagcacctcagccgtcagaagatcgacccgctcctytatatgacagaatggttcatgtgcgccttctcccgaaccttgccctggagctctgtgctgcgtgtctgggacatgttcttctgtgaaggggtcaagatcatcttccgggtggggctggtgctgctgaagcacgcgctgggctcccctgagaaggtcaaagcctgccagggccagtacgagaccatygagcgactgcggagcctcagccccaagatcatgcaggaggcctttctggtccaggaggtggtggagttgcccgtgacagagcgccagattgagcgcgaacacctcattcagctgcggcgctggcaggagacccggggtgagctgcagtgccgctccccgcccaggctgcatggtgccaaggctatcttggatgcagaacctggtccccggcctgccctacaaccttcaccatccatccgcctgcccctagatgcccccctccctggctccaaagccaagcccaagccacccaagcaggcccagaaggagcagcggaaacagatgaaggggagagggcagctggagaagcccccagccccaaatcaagccatggtggtggccgctgcaggagatgcatgtcccccacagcatgtgcccccgaaggactcagcccccaaggactcagcccctcaggatttggctccccaggtctcagcccaccaccgctcccaggagagyttgacgtcccaagagagtgaggacacctacttgtaamcctggcagctaaggcctccagggcggggtctccatataactacacggttcatgaactgacattccacatcctgcccaccctctgagggccaagctgcctggccactgggctgggctggagtctggctggtccaacacagattctgcctggtccaacacagattctgcctgagcctccttatttattttctttacagtggcactcaggctgcccagccagggcaggcagaagctagggcctggggggtggggcctccttcagccccctcctcctggggatgctccccagggttagggtgctggtgtgaggggaaagggtggggtgttctttgtgtaaaatagaaacatggttttgtacagaaataaacagccttgtataragaaa

SEQ ID NO: 352 - DNA, 781 bp, Homo sapiens
  misc_feature (13)..(13): n equals a,t,g, or c
  misc_feature (405)..(405): n equals a,t,g, or c
  misc_feature (727)..(727): n equals a,t,g, or c
  misc_feature (747)..(747): n equals a,t,g, or c
  misc_feature (767)..(767): n equals a,t,g, or c
cggacgcgtgggncggacgcgtgggcgaaacactgtccctgcgagttctttaagttccctgcaatctgtacacaagagaaagagggagagagagagggagagagacagagagagcagggatcaggtaaaggagtggggctgctgcagccattcagacctcaggagctggaaaattgccaaggatgcagaaggaaatgaagatgatcaaagacgaggatgtgcatttcgacttggctgtgaagaagaccccctcctttccccactgcctgcagccagtggcttctcggggaaaggctccccaaagacaccccttcccggaagctctccgagggccattttcccagtttcggtatgaacctcccccaggagacctagatgggttccccggggtcttcgaaggagcanggtctaggaaacggaagagcatgcccacaaagatgccctataaccaccctgcagaagaagtcaccctcgccctccactcagaggagaacaaaaaccacggccttcccaacctccctttgctgttcccgcagcccccgcgccccaagtatgactctcagatgatcgacctgtgcaagtgggcttccaattctaccgcagcctgggaacactttgggggcaagcccgtcaagcaggaacccattaagcccagcgccgtgtggccccagccaacgcccaytccattcctgcccacgccytamccctattamcccaaattccaccngggcttcatgtttccccttntttgtggccttgttcttggnctttccctttcaac

SEQ ID NO: 353 - DNA, 671 bp, Homo sapiens
gcctatctcagagtcgtggcccacaggtgaccagcctctcagggaaagagtatgatgtgctctacctggggacatgaggatggacacctccaccgagcagtgcggatcggagctcagctcagcgttcttgaagatctggccttattcccagagcacagccagttgagaacatgaaattgtaccacagctggctcctggttggctcccgtactgaggtgacacaagtgaatacaaccaactgtggccgtctccagagctgctcagagtgcatcctggcccaggacccagtctgtgcctggagcttccggctggatgagtgtgtggcccatgccggggagcaccgagggttggtccaagacatagagtcagcagatgtctcctctttgtgtcctaaagagcctggagaacgtccagtagtgtttgaagttcccgtggctacagctgcgcatgtggtcttgccatgttctccaagctcagcakgggcakcctgtgtgtggcaccagcccagtggagtgamtgcaytcamcccccggcgggatggactggargtggtggtgamcccaggggccatgggcgcttatgcctgtgaatgtcaggagggtggggcagcccatgtggtagcagcttacagcttggtatggggcagccagcgagatgctccgagccgggcg

SEQ ID NO: 354 - DNA, 577 bp, Homo sapiens
  misc_feature (408)..(408): n equals a,t,g, or c
ggcagaggcggcgtccggggctggcgttmccctggaggctgagggtctcacggatggccccgctgccaggagcagaactggttcggaggccactgcagctctaccgatacttgctgcgctgttgccagcagctgccgaccaagggcatccagcagcattacaagcatgctgtcaggcagagttttcgggttcattcagatgaagacaaccctgagagaatccagcagattattaaaagagccattgaagatgctgactggatcatgaacaaatataaaaaacaaactgagagctccgagggtgagccttcctggcctctggaagttgagaggcccctcttctggagctcagcagcagcagctggtttggaagatccattggccttgttggctgaaacacgagaatcanggggagaagctgaccttgctccagaggctcctcttgccgcggccatgttgctaagcatcctttatgtttgcacttccagccactttaccgatgtgaaatttggggagaattgtaagttatttttttgcttctttttgtgtgttttttattgggtgtgttttttgttcct

SEQ ID NO: 355 - DNA, 451 bp, Homo sapiens
ggcacgagggcgctggaacccatggacacggcgtatccccgcgaggacacccgggcccccacgcccagcaaggccggtgcccacacagccctcacactgggggccccgcaccccccgcctcgagaccacttgatctggtcggtgttcagcaccctctacctgaatctgtgttgcctcggcttcctggcgctggcctactccatcaaggcccgagatcagaaggtggttggtgacctggaagcggcccggcgttttggctccaaagccaagtgctacaacatcctggccgcgatgtggacgctggtgccgccactgctgctcctggggctggtggtkactggtgccctgcactgtgcccggctgccaaggactctgccgccttcttcagcaccaagtttgatgacgcggactatgactgacaggctgggtcctgatctggggcactagccag

SEQ ID NO: 356 - DNA, 873 bp, Homo sapiens
aaaacattcacccagaaaaccaggagctagtaagggtacttcgagaacagcttcaaacagaacaggatgcacctgctgccactcgacagcagttctacactgacatgtactgtcccatctgcctgcaccaagcctccttcccggtggagaccaactgtggacatcttttttgtggtaaccttactcctaacagtatttggtgaagatgatcagtctcaggatgttctgagattgcatcaggatattaatgattataaccggagattctcagggcaacccagatctattatggagagaattatggatctacccactttactgaggcatgcattcagggaaatgttttcagtcgggggccttttctggatgtttcgcatcaggataatactttgtttaatgggagcttttttctatcttatatcacctctagattttgtacctgaagccttgtttggaattctaggctttctagatgatttctttgtcatctttttattgcttatctacatctctattatgtatcgagaagtgataacccaaaggctaactagatgaaaaagaaaacaaaactgagtttactaggatatctgagctaatgtagaacatcaaacagaaggacccatggcagtataaagcaatgaagcaatggagtattatctcacaaatataaaaccactataagacaaacatttgattatcatttgacaaatacctaggtataactggaattttcatgtttgaagttctaatattaagtttagaattataatgatctacagttgtatcttgattctatgttgtctggaaaaaatatggaattatataaaaagggatgctttwatatattttccttttccccagratactagatta

SEQ ID NO: 357 - DNA, 1286 bp, Homo sapiens
  misc_feature (2)..(2): n equals a,t,g, or c
  misc_feature (4)..(4): n equals a,t,g, or c
  misc_feature (38)..(38): n equals a,t,g, or c
  misc_feature (40)..(40): n equals a,t,g, or c
cncngatttcaaaaggtccacccacgcgtccggggggncngggctgtgtccgcagtgtctacaccccctcctcacacgcacttcacctgggtcgggattctcaggtcatgaacggtcccagccacctccgggcagggcgggtgaggacggggacggggcgtgtccaactggctgtgggctcttgaaacccgagcatggcacagcacggggcgatgggcgcgtttcgggccctgtgcggcctggcgctgctgtgcgcgctcagcctgggtcagcgccccaccgggggtcccgggtgcggccctgggcgcctcctgcttgggacgggaacggacgcgcgctgctgccgggttcacacgacgcgctgctgccgcgattacccggcccagctgctggggggctggcctgtctcctgcccaggcgaggagtgctgttccgagtgggactgcatgtgtgtccagcctgaattccactgcggagacccttgctgcacgacctgccggcaccacccttgtcccccaggccagggggtacagtcccaggggaaattcagttttggcttccagtgtatcgactgtgcctcggggaccttctccgggggccacgaaggccactgcaaaccttggacagactgcacccagttcgggtttctcactgtgttccctgggaacaagacccacaacgctgtgtgcgtcccagggtccccgccggcagagccgcttgggtggctgaccgtcgtcctcctggccgtggccgcctgcgtcctcctcctgacctcggcccagcttggactgcacatctggcagctgaggaagacccagctgctgctggaggtgccgccgtcgaccgaagacgccagaagctgccagttccccgaggaagagcggggcgagcgatcggcagaggagaaggggcggctgggagacctgtgggtgtgagcctggccgtcctccggggccaccgaccgcagccagcccctccccaggagctccccaggccgcaggggctctgcgttctgctctgggccgggccctgctcccctggcagcagaagtgggtgcaggaaggtggcagtgaccagcgccctggaccatgcagttcggcggccgcggctgggccctgcaggagggagagagagacacagtcatggcccccttcctcccttgctggccctgatggggtggggtcttaggacgggaggctgtgtccgtgggtgtgcagtgcccagcacgggacccggctgcaggggaccttcaataaacacttgtccagtaaaaaaaaaaaaaaaaa

SEQ ID NO: 358 - DNA, 797 bp, Homo sapiens
  misc_feature (447)..(447): n equals a,t,g, or c
tccggaattcccgggtcgacccacgcgtccggcaagcttcggtagtcctctccgctgctgtcgccaggagtcacttcacgagaagccaggtcacaaccgtcggcccttgtctggaaaagtaaaagtggatcctgccacgttcggagctccctggcgcctcgcccggctggagctagagaactcgtcctgtggcggcccccggcgtggggcgggacagcggccccctggagggggcagtcccgggagaacctgcggcggccggagcggtaaaaataagtgactaaagaagcagacctgggaatcacctaacatgtcgaggaggagatttgattgccgaagtatttcargcctactaactacaactcctcaaattccaataaaaatggaaaactttaataatttctatatacttacatctaaagagctagggagaggaaaatttgctgnggttagacaatgkatatcaaaatctactggccaagaatatgctgcaaaatttctaaaaaagagaagaagaggacaggattgtcgrgcagaaattttacacgagattgctgtgcttgaattggcaaagtcttgtccccgtgttattaatcttcatgaggtctatgaaaatacaagtgaaatcattttgatattggaatatgctgcaggtggagaaattttcagcctgtgtttacctgagttggctgaaatggtttctgaaaatgatgttatcagactcattaaacaaatacttgaaggagtttattatctacatccagaataacattgtacaccttgatttaaagccacca

SEQ ID NO: 359 - DNA, 2794 bp, Homo sapiens
gtttaggttacaggcatatactagtgtctcaaaggcttcacttggccttgcagatcacagagaacttggaaagatgatgaatacaataatttttcatacaaaaatggtagattccttggtggaaatgttggtggaaacatcagatctctccatattttgtttttatagtcgtgcttttgagaagatgtttcaacagtgtttggagttaccctctcaatcaagatactcaattgcatttccactactttgcactcattttatgagttgcacgcatgaactatgtccagaagagcgacatcatattggagatcgcagtctttccttatgtaatatgttcctagatgaaatggccaaacaagctcgaaatctcatcactgatatwtgcamagaacagtgtacccttagtgaccagttgctacccaagcattgtgccaaaactatcagtcaagcagtgaataagaaatcaaaaaagcagactggtaagaaaggggaacctgaaagggagaaaccaggtgttgagagcatgaggaaaaacaggctggttgtgaccaaccttgataaattgcacactgcactttctgagttatgcttctctataaattatgtaccaaacatggtggtatgggaacatacctttaccccacgagaatatttgacttctcatctggaaatacgctttaccaagtcaattgttgggatgactatgtataatcaagccacacaggaaattgcaaaaccttcagaacttctaacaagtgtaagagcatacatgaccgtactccagtcaatagaaaactatgtgcagattgatattacaagagtatttaataatgtgcttcttcaacaaacacaacatttagacagtcatggagagccaaccattacaagtctatacacaaattggtatttggaaactttgttacgacaagtcagcaatggccatatagcatattttcctgcaatgaaagcgtttgtgaacttacctacagaaaatgaattaacattcaatgcagaggaatattctgacatatcagaaatgaggtcattatcagaactactaggcccatatggtatgaagtttctaagtgaaagccttatgtggcatatttcatcacaagttgctgaacttaagaaacttgtggtggagaatgttgatgtgttaacacaaatgaggaccagctttgacaaaccagaccagatggctgcactgtttaaaagattatcatctgttgacagtgtcttgaagaggatgacaataattggtgtaattttatccttccgatcattggcacaagaagcacttagagatgtsttatcctaccacattccttttcttgtaagttcaattgaagattttaaggatcacattccaagggaaactgatatgaaggttgcaatgaatgtgtatgagttatcatcagctgccggattaccttgtgagattgatcctgcattggtcgtagctctttcttcacaaaaatcggaaaacattagtccagaagaagagtataaaattgcctgccttctcatggtgtttgtggcagtttctttgccaacactggccagtaatgtgatgtctcagtacagccctgctatagaagggcattgcaacaacatacattgcttggccaaagccatcaaccagattgctgcagctttgtttacaattcacaaaggaagcattgaagaccgtcttaaagaatttctggcgcttgcatcctccagtctactgaaaattggccaggagacagataaaactacaacaagaaatagagaatctgtttatttactgctagatatgattgtacaagaatctccattccttacaatggatcttttggaatcttgttttccttatgtcttgctgagaaatgcataccatgctgtctacaaacaaagtgttacatcttctgcataaaattacctacttaatcaagataagcacgcatttttgttgccttggttttacctgtagactgtggaactattttaccttaagacctgaaaaagttttgtggattataaatttctttcatacggttgtattttctgatcattggtttcttaatatggttgtactacagtatacttggttgatttaggttgcacattcactgaattcactgagattattcctataattttaaagtatcatttatttgaaaaacatacattatcaacatgtttttgatatttgataatgaaaaaaatctttgcttgtttatttctgaaaaagaactgtatttagtgattattttagatagtgatattatagcattcatctgtgtgtaaattatttcatatagggaagagttctgatctgtacctatggttcttattgaaaacaacattggatgtgcatttctgtgatgttatgaatacatttctactttattttgaaacatttgccaaactaaatactgtaacactgtataacatttaaaaatgttaaagaactgcttagtattagaagcagatcatttcccaaaattctaagagcagcagcatatgttgttgcttgtataaagcctagcgataatttttagactaacttccatggtgccctgttggcattagcactaccattgtaccctgctgtataataaacaatcttagacatttatcaactgttgatacaaatgttagtccctaaccactttttatatatgttttaaatttttgaaattcaagtgtaccttccataacataaaataaacactagactgtatcacaaaaaaaaaaaaaaaaaaaaaaaaaaactcgagggggggcccgtaccctaatcgcctgtatt

SEQ ID NO: 360 - DNA, 1466 bp, Homo sapiens
acctgcaggtaccggtccggaattcccgggtcgacccacgcgtccgagccgtccgcgctccgaacggcgcctcccgccccaccatgggcaacagcgcgagccgcaacgacttcgagtgggtctacaccgaccagccgcacacgcagcggcgcgcgcggccccctgccaagtacccggccatcaaggccctgatgcggccagacccgcgcctcaagtgggcggtgctggtgctggtgctggtgcagatgctggcctgctggctggtgcgcgggctggcctggcgctggctgctgttctgggcctacgcctttggtggctgcgtgaaccactcgctgacgctggccatccacgacatctcgcacaacgcggccttcggcacgggccgtgcggcacgcaaccgctggctggccgtgttcgccaacctgcccgtgggtgtgccctacgccgcctccttcaagaagtaccacgtggaccaccaccgctacctgggcggcgacgggctggacgtggacgtgcccacgcgtctggagggctggttcttctgcacgcccgcccgcaagctgctctggctggtgctgcagcccttcttctactcactacggccgctctgcgtccaccccaaggccgtgacccgcatggaggtgctcaacacgctggtgcagctggcggccgacctggccatctttgccctttgggggctcaagcccgtggtctacctgctggccagctccttcctgggcctgggcctgcaccccatctcgggccacttcgtggccgagcactacatgttcctcaagggccacgagacctactcctactatgggcctctcaactggatcaccttcaatgtgggctaccacgtggagcaccacgacttccccagcatcccgggctacaacctgccgctggtgcggaagatcgcgcccgagtactacgaccacctgccgcagcaccactcctgggtgaaggtgctctgggattttgtgtttgaggactccctggggccctatgccagggtgaagcgggtgtacaggctggcaaaagatggtctgtgagcccgggctgcctcctggtggtggccattgtcccccatcggcccctcagccttgcaccccagcactgagaagctacatttccttcctgtgctctggactgctgcccttgtccccgaggagtgtcccgcgcagccacacctggcaacagcagtgtgggctgcagggctccgtctgcacgtggacttgccctggaccttgagtgtggccctccctttctgggcctccccaggtgaggcctggccctgccccaccatgacctgggtgctctgagcccacggttcccacggagctgacttctccggggtgcctgtgccctacattaaacccggcgtttgtttcacaaaaaaaaaaaaaaaaaaaaaaaaaaaaaaaaaaaaaaaaaaaaaaaaaaaaaaaaaaaaaaaaaaaaaa

SEQ ID NO: 361 - DNA, 937 bp, Homo sapiens
  misc_feature (918)..(918): n equals a,t,g, or c
  misc_feature (926)..(926): n equals a,t,g, or c
  misc_feature (937)..(937): n equals a,t,g, or c
ggacccacgcgtccgcccacgcgtccggtgcttgctatgacatctggtcaaatgtggaaccatataagaggaccaccatatgcccataagaatccccacacgggacatgtgaattatatccatggaagcagtcaagcccagtttgtagctgaaacacacattgttcttctgtttaatggtggagttaccttaggaatggtgcttttatgtgaagctgctacctctgacatggatattggaaagcgaaagataatgtgtgtggctggtattggacttgttgtattattcttcagttggatgctctctatttttagatctaaatatcatggctacccatacagctttctgatgagttaaaaaggtcccagagatatatagacactggagtactggaaattgaaaaacgaaaatcgtgtgtgtttgaaaagaagaatgcaacttgtatattttgtattacctctttttttcaagtgatttaaatagttaatcatttaaccaaagaagatgtgtagtgccttaacaagcaatcctctgtcaaaatctgaggtatttgaaaataattatcctcttaaccttctcttcccagtgaactttatggaacatttaatttaagtacaattaaagtataattataaaaattgtaaaactactactttgktttagttagaacaaagctcaaaactactttagttaacttggtcatctgawtttatattgccttatccaaagatggggaaagtaagtcctgaccaggtgttcccacatatgcctgttacagataactacattaggaattcatccttagcttcttcatctttgtgtggaatgttgttatactttacgcatctttccttttgagtagagaaatagtgtgtcaggtggtcttcctgaaaatggaacacatcttccaaaaaaagntctaaccnccaaaaaaagn

SEQ ID NO: 362 - DNA, 456 bp, Homo sapiens
  misc_feature (431)..(431): n equals a,t,g, or c
  misc_feature (438)..(438): n equals a,t,g, or c
  misc_feature (450)..(450): n equals a,t,g, or c
  misc_feature (456)..(456): n equals a,t,g, or c
gaattcggcacgaggcagtttatagcaaagtctgctgtgctgcagctggcactagctggcgcctttgggcagtttctgctaaaccttgagcaattgctttcactcttccacctcccatgttgtttcattcattcaatcttagatggaattggttagagaggagaaatagaacactatttaaaacaagagaaatggtatatccccctctggcagagaacacaggtaagacattacctcttgtacttgatgggagaacatctttttttttctttctttcttttttgtttgtttgtttgtttgggacaaagtctcactctgttgcccaggctggaggttgcagtgagctgagatctcaccactgcaactccagcctgagcaacaaagcaagactccatctcttaaaaaaaaaaaaaaaaaactcgaaggggggnccggtancccaattggccnaaaagn

SEQ ID NO: 363 - DNA, 461 bp, Homo sapiens
  misc_feature (361)..(361): n equals a,t,g, or c
  misc_feature (413)..(413): n equals a,t,g, or c
  misc_feature (421)..(421): n equals a,t,g, or c
gaaaggaccggccaaacaagagggttaagatttctgtttctcttgctgggcttttggcagtagggggctgtgttggtgggccctacgaagatgctcagtgctcgagatcgccgggaccggcaccctgaggagggggtagttgcagagctccagggcttcgcggtggacaaggccttcctcacctcccacaagggcatcctgctggaaaccgagctggccctgaccctcatcatcttcatctgcttcacggcctccatctctgcctacatggccgcggcgctactggagttcttcatcacacttgccttcctcttcctctatgccacccagtactaccagcgcttcgaccgaattaactggncctgtctggacttcctgcgctgtgtcagtgccatcatcatcttcctggtggnctcctttncaagctgtgacctcccgggatggagctgccattgctgcta

SEQ ID NO: 364 - DNA, 776 bp, Homo sapiens
  misc_feature (2)..(2): n equals a,t,g, or c
  misc_feature (4)..(5): n equals a,t,g, or c
  misc_feature (14)..(14): n equals a,t,g, or c
  misc_feature (16)..(16): n equals a,t,g, or c
cncnnctgaaatcncntcacttttgggaacaaaagccggagctccaccgcggtggcggccgctctagaactagtggatcccccgggctgcaggaattcggcacgaggaaaattttgagttacagtatcattcgaagagaatttatttctgcctttcatgttatagcccctaagggatccaggacccgaaaggccagyttctccctcattttgaaatcagttttctccacctgcaccactgcatagcacagatacagaaaccatcctatttcaggatttgaatgcaaaacttaccttcttactctaaagatgaatgatcagggagagatttattcaaccctgagatttttgcagtctccttcagagtcacagaatagattaaggcctgatgatactcaaaggcctgggaaaactgatgacaaagaattttcagtgccctggcacctcattgcagtgactcttgggatcctctgtttacttcttctgatgatagtcacagtgttggtgacaaatatctttcagtgtattcaagaaaaacatcaacggcaggaaattctaagaaactgtagtgaaaagtacatcatgcaaaatgacaactacttaaaagagcagattttgacaaataagactttaaaatatgacgttctcaaaaatagctttcagcagaaaaaggaactggattcacgccttatacaaaagaacagatgtcatagagaaawtgagatcrtttttaaagttttgcaaaatacaggcaattctctgaagaccacgggtcct

SEQ ID NO: 365 - DNA, 653 bp, Homo sapiens
  misc_feature (6)..(6): n equals a,t,g, or c
  misc_feature (559)..(559): n equals a,t,g, or c
  misc_feature (594)..(594): n equals a,t,g, or c
  misc_feature (639)..(639): n equals a,t,g, or c
  misc_feature (643)..(644): n equals a,t,g, or c
gccccnttgagcggatcccaatttcacacaggaaaacagctatgaccatgattacgccaagctcgaaattaaccctcactaaagggaacaaaagctggagctccaccgcggtggcggccgctctagaactagtggatcccccgggctgcaggaattcccttaaacaatacacattcattatctttcatttctggaggtcggaagtttgaaatgggtcttggtgggctaaaatctagacattggtagggctgtgttcatttatggaggttctagacaaaaatctatttttctttttttttttgagatggagtcttggtctgtcgcccaggttagagtgcagtggcaccatctcggctcactgcaacctccacctcctgggttcaagtgattctcctgcctcagcctcccgggtagctgggattgcaggtgctcgccactgcgcctggctaatttttttttttttttgtatttttggtagagatggggtgtcaccgtccttggccaggctggtctcggaactcctgaccttgcgatctaccccacctcggccttccaaagngcttgggattaaaggcttgagccaccgtgcccagntggcaataatctatttcttgccttttccatttctaagaggctacntaannggttcttgg

SEQ ID NO: 366 - DNA, 1531 bp, Homo sapiens
  misc_feature (1531)..(1531): n equals a,t,g, or c
gctcgtgcckcaagaatgacacagctgctgtgcakckcacttcgtctctggcaacaacgtcctggcccatcggtccctgcccctttctgaaggagggcccccactaaggatcgcccagaggatgcggctggaggcaacgcagctggaaggggttgcccgaaggatgacggtggagacagattactgtctgctgctggctctgccctgtggccgtgaccaagaggatgttgtgagccagaccgagtccctcaaggctgccttcatcacttacctgcaggccaagcaggcggcagggatcatcaacgttcccaaccctggctccaatcagcctgcctacgtgctgcagatcttcccgccctgtgagttctctgagagtcacctgtcccgcctggcccctgacctccttgccagcatctccaacatctctccccacctcatgattgtcattgcctccgtgtgagccactgagtggttatcacctcagtgaatcttcccagggctctgcagtaaaaacaaaggacaacccagccaagcagaggaagaagctgccgaaggggacagactccactgccagacggccagccgtttgctgtcctgccgcccggctcagtcggccagacttcctctaggagtggtgctgctaccttgtatgtttacataatgctttagcccaaggacacatcaccaacccatggactcgcagacaccggggctgggtttctctttcctctttttggagaaaaggaacagggcagtggaatgaaaattttttgtttgtttgtttttaagaaacaagaaaacagaactgcctttgcactaaattagtgacttggacttttgcccagtgaagacaggctgtgacactctggatgtcttggtgtgtgtagacacacattgcagactcttaacgcaggaaggacttcaaacttctgctgagaccttggggtcaaggaacatttcattggttttttttgtccacccccatctcccttgctcatttggatgcgtcaccttaattctcctgctgccaccgtctttgattcaccgggatgtacagtttacagttgaagagcaaacagaaaggttttctcttggtgggatatgcagaacttgggatgtgtgtatatataaatatataatatatataaatatatataatactgacttaaaaaatcaaatcccccgacatacgttttttttaatctgtgccaaaaatgtgttttcagaggaaatcttattttcatattcagactttgtattgcccactcatttgtataagtgcgcttcggtacagcacgggtcctstcccgcgatgtggaagtgtcacacggcacctgtacaaaaagactggctaacccctcttcctattaccttgatctcttcccccaacttcctaacacttattaatttatgaaactgtttttctcagcgcagttttgttttgtgtgtccattggattacaaactttattaaaaaatataaaacacaaaaaaaaaaaaaaaaaaaaaaaaaaaaaaaaaaaaaaaaaaan

SEQ ID NO: 367 - DNA, 3803 bp, Homo sapiens
  misc_feature (12)..(12): n equals a,t,g, or c
  misc_feature (26)..(26): n equals a,t,g, or c
  misc_feature (31)..(31): n equals a,t,g, or c
  misc_feature (3789)..(3789): n equals a,t,g, or c
  misc_feature (3796)..(3797): n equals a,t,g, or c
  misc_feature (3800)..(3800): n equals a,t,g, or c
gcaactctatanatcatataggaaanggtanctgcagtacggtcggaattcccgggtcgagtaacacagttagaaggaaattcatgtgaaattttatgggagacggtaccatcaatgaaaggtgaccctgttaactacattctgcaggtattggttggaagagaatctgagtacaaacaggtgtacaagggagaagaagccacattccaaatctcaggcctccagaccaacacagactacaggttccgcgtatgtgcgtgtcgtcgctgtttagacacctctcaggagctaagcggagccttcagcccctctgcggcttttgtattacaacgaagtgaggtcatgcttacaggggacatggggagcttagatgatcccaaaatgaagagcatgatgcctactgatgaacagtttgcagccatcattgtgcttggctttgcaactttgtccattttatttgcctttatattacagtacttcttaatgaagtaaacccaacaaaactagaggtatgaattaatgctacacattttaatacacacatttattcagatactcccctttttaaagcccttttgttttttgatttatatactctgttttacagatttagctagaaaaaaaatgtcagtgttttggtgcacctttttgaaatgcaaaactaggaaaaggttaaactggattttttttttwaaaaaaagaaaaaaaaagaagaaaagtataccagataccaaaagctagctttcttatgttttcctttaaattttcagatttaccttcattctgttttcactgatgtcttttgcaagcctttgattttttttttttgttacagtttagtaatttatattcaccagtcacttcttatgtcttgaacatctgtatctgtaaacatgaatcaccgtgtgtgtacttacagggctaggatttcagtgttgtcagagtattaccacacagcaacagcaacatacagaagatatgttcactcagataagactgccctaaacaaccattttgtcactcagttatttaactgtgtttagctcatttaaatcaaaatgtgtactttaatctaaaatgttttaataatctgtatttcttataattttaacactatgagctgcctatataagaaatcaagtaaccagaatgcacctataaattatgggagcattgtagattttaccacatcaattcatagcagtaactttaagagggcattgtgcaatagttagttgttttcttgttcagctattttaaaggctgctttaacttgtttgtttgtctttgtatataactacttctaatctaatcactagagttattatattctgttatgtttgaccagaattatatgacaagaactggtgacagtttagtgcctctgcccattgtccatgatttacactaattgtgagcagtcttcttatgtgtcagctcattatttttgaaacatttgcctttaggctgttctttgaggtatcaatgaagtgattgaatttcaataccttaattcagtgcacataatactaatgtaacagcagatgaaaattgataaaacccaaaagagagtcatctaaatttgtagttcctatttctgtgggtttgcctggccatggttggagagggaatggtgtttgatggtaaacacagggtgtttggggatcaaggagcctagattctctccctggatctgtcactaacttgctgcgtgacctgaacacgtcactttacctctctgtgcctcagttttcccatgcatgaaaaataaaataaaataaaacggggattctaatgtttgtaagtgctttgagatctttgaccaacaggtgctattggagtgcaaagtgttactcttacgtgtttattttgagtcatgagataatcaattttaacccaaagtcattggattatttatatgaagtccataatgttcgagtacctcagggacatttaagagttggaggtgcaaatatattccaaaagggtgcaacagacacagtgtatccccctgcttctgtttttgtatatttttgctacttggtttttcttgatcatagctattttgtgcytgatcyttattgkcyaagatgcagtatcctgtactagcytataatattcccataccaaagtcatggggaaacaaacattattttgtttttggtttatttatacctatattctgcatacagtactttaaatgccaattacagtgcaatctttatttattgtaaaattttttaagtgtacttatgtactaattttcccttgtagcatgttatatttttgtgttttatacttttgtaattttaggtcagtcttgttccttggcaacatctgtagtattattaatcttctgacattttcttatgtttttaaaaagataagagcatctagtgcattaaatgccaaaaaaaaaatacattatcagtgattgaaacgtttacatgtacccaaaaaccataatcatctcttggaagaaaatgctgagatcaatgaattattctgtgtgcctatattgacgtagtgagtactagagagttctgtattttattattgactataataattagtttaattagctttgcaaactgatggcatcaaggtaaatatatttttgccaaagttctggccttccaaaactcacccccttatttaaatgtgtgctatgacccactatgacacagcatctgcattttctaaaaaattccatgcaggtgttttggggagaggtattttttaagcaatgaaaattcaactgagtacaaagccccctcttggggggttggggaagtctcttttttgaaacacttcagaactgctgctataaagaaattctctaattggttgaatttttttttaagtaaatagtactttaggccaaaatttatatgaatatttgatcttcttgagattttcatactatcatttaaccaccaggaagctgaagtgtgtgaagtacaaagctgacagcactttattttattgctctccattatttggtattcattatattccttcagtcagaaaattattactctctatggcactgttttttatcacaaatatgtatatgtgatattgatatataactatatatattgccatcacacacgaacaataaaataaagtgttctattaacctgatctctttgcccttttgctatgtgaggagtgaatgagtggccttctgatgctctgactcttctctgtatgtcaaactcatccctggcacaagaaattccagtcatgtgaagcaaactgccctttgtcctcaaagaaattgttgaaaaagaaaactttttaaagagattttttgcatattctctgccttgttcttatcaacttgaaatgttggcattttctaaccttgttttgttggctacaataattcagtattcatgtcaaaattgagaagtgccctaattgaatgtgtttgaatgttatccttgcacaattctttaaattgaaagataaaatgttttacctcactgttggacatacattccaagcttttcaactctaggagaaaaagaaaatcatgttttcctgtattgtaaattttagactatttcatatacattgtattaaaactgccatatcaattttaatgtatagattttgcaaatattatgctatatgtaatacctaactgtatctgtagtgtatatgtaatatatttatgcccaataaatgttttaattctttctgacttaaaaaaaaaaaaaaaaaaaaaaaaaaaagggcggccgctctagaggatccaagctyacgtactgygtgcatgcnctgtcanntgncat

SEQ ID NO: 368 - DNA, 709 bp, Homo sapiens
  misc_feature (708)..(708): n equals a,t,g, or c
acccacgcgtccgagcaagatggcgccgcgggcatttcttccactgcccgtctgagggaacgctaagtagtgtgtccggcgccgtgttccagctccgcgttgttccgcgagaaagcgagaggccgagcccgggctggtgcgatggccgcggtggtggccaagcgggaagggccgccgttcatcagcgaggcggccgtgcggggcaacgccgccgtcctggattattgccggacctcggtgtcagcgctgtcgggggccacggccggcatcctcggcctcaccggcctctacggcttcatcttctacctgctcgcctccgtcctgctctccctgctcctcattctcaaggcgggaaggaggtggaacaaatatttcaaatcacggagacctctctttacaggaggcctcatcgggggcctcttcacctacgtcctgttctggacgttcctctacggcatggtgcacgtctactgaaatgggggcccgggggacttttttaaaaaaccagatcgggaggactgtggccagcaattaacaccatgtagacttccttagttcttaagtggttgaattcgctgcttgttctgtaacgttataaataatttatatctgaagacggagagcctgtaatattcttcagattaaatgaagcgtgagacamaaaaaaaaaaaaaaaaaaaaaaaaaaaaaaaccccggggggggcccng

SEQ ID NO: 369 - DNA, 1136 bp, Homo sapiens
  misc_feature (1124)..(1124): n equals a,t,g, or c
  misc_feature (1131)..(1131): n equals a,t,g, or c
ccgactcctccgacgccgatccggacagcggcacagaggagggagatttgggacttcccaggacagattgacttttttgaccctacatttgactatgagatgatcttccggggaacaggagcactgatatttgtcattgactcacaggatgattacatggaagccctggccaggctccacctcacggtgaccagggcctacaaagtgaatactgacatcaacttcgaggtgtttattcataaagtggatggtctgtcagatgaccacaaaattgaaacccaaagagatattcaccagagggcaaacgatgaccttgcagatgctggattagaaaaaattcacctcagcttttatctgacaagcatatatgatcattcaatatttgaagcttttagcaaagttgttcagaaactgattccacaactcccaactctggagaatttgctgaacatctttatctcaaattctggaattgaaaaggcatttctatttgatgtggtcagtaaaatttatattgcaactgatagtactccggtggatatgcaaacctatgagctctgctgtgatatgatagatgtggttattgacatctcttgtatttatggtctcaaagaagatggagcaggaaccccctatgacaaggaatccacagccatcataaagcttaataatacaaccgtgctttatttaaaagaggtgacaaagttcctggctctcgtttgctttgtcagagaggaaagctttgaaagaaaagggctaattgactataattttcattgcttccggaaggccattcatgaagtttttgaggtgagaatgaaagtagtaaaatctcgaaaggttcagaatcggctgcagaagaaaaagagagccacccctaatgggacccctagagtgctgctgtaggtgaggtttcaggaatgtcttttgaaatcagaccttatccatgaggctgctgcgccatgttgcactaaaggaagaggaagaaggagattgggacacataccattgatttgttgttaaaaaaaaaaaattcctgcaaccctcttgatcttctcttttataaataaagtaagcactttgaagcaaaaaaaaaaaaaaaaaaaaaaaaaaaaaaaaaaaanggggggnccccc

SEQ ID NO: 370 - DNA, 665 bp, Homo sapiens
  misc_feature (616)..(616): n equals a,t,g, or c
  misc_feature (656)..(656): n equals a,t,g, or c
  misc_feature (665)..(665): n equals a,t,g, or c
aaagagtgtccctagttgtaacagaaactgtcgatgcaggtttatttggagaaggaattgtggagagtttgattcatgcatgggagcatttacttttacagccaaagaccaaaggtgaaagtgctaattgtgaaaagtatgggaaagttataccagcaagtgctgttatatttgggatggcagtagaatgtgcagagataagaagacatcatagagtgggtattaaggacattgctggtatccatttgccaacaaatgtgaaatttcagagtccggcttattcttctgtagatactgaagaaacaattgaaccttatacaactgaaaagatgagtcgagttcctggmggrtatttggctttgacagagtgctttgaaattatgasagtagatttcaacaaycttcaggaattaaaaagtcttgcaactaaraarcctggtaaaattggtattcctgttattaaagaaggcatattagatgctgttgtggtttggtttgtactccagcttgatgatgaacatagtttatccacaagtcctaatgaggaaacatgttgggaacaagctgtctaccctgtacatgaccttgcagactaccggataaaacgtggggaccngtgatgatggaatgtcttgtccaagattgttacttaagantccagaatn

SEQ ID NO: 371 - DNA, 984 bp, Homo sapiens
  misc_feature (48)..(48): n equals a,t,g, or c
caagatatttacttccgctccaaacaaagatgggccagctaacgagcncgggggaaacatccgcccggaaggccacttgaaggcacttccgccctctcttaacatggagccggcggaaggggtggtgtagggccgggcgataatggcggcgtcgaggctggagctaaacctggtgcggctgctatmccgctgcgaggcgatggcagcggagaaacgggacccggacgagtggcgcctggagaagtacgtgggagccctagaggacatgttgcaggccctgaaggtccacgcgagcaaaccggcctctgaggtgatcaatgaatattcctggaaggtggattttctgaaggggatgctgcaagccgagaagctgacctcctcctcagagaaagcactggccaaccagttcctggcccctggccgtgtgccaaccacagccagagagcgagtgcccgccacaaagacggtgcatctgcagtcacgggcgcggtacaccagcgagatgcggagtgagctactaggcacggactctgcagagcctgaratggacgtaaggaagagaactggagtggcagggtcccagccagtgagtgagaagcagtcggcagctgagctagacctcgtcctgcagcgacatcagaacctccaggaaaagctggcggaagagatgctaggactggcccggagcctcaagaccaataccctggccgcccagagtgtcatcaagaaggacaaccagaccctgtcacactcactgaaaatggcggaccagaacctggagaaactgaagacggagtcagagcgtctggagcagcacacgcagaagtcagtcaactggctgctctgggccatgctcattatcgtctgcttcatcttcattagcatgatcctcttcattcgaatcatgcctaaactcaaataaagacccccgcccaaaaaaaaaaaaaaaaaaaaaaaaaaaaaaaaaaaaaaaaaaaaaaaaaa

SEQ ID NO: 372 - DNA, 2494 bp, Homo sapiens
  misc_feature (2471)..(2471): n equals a,t,g, or c
  misc_feature (2485)..(2485): n equals a,t,g, or c
caaagaaacattggaaacaatttctaatgaagaacaaacacctcttcttaaaaagattaacccaaccgaatctacttccaaagcagaagaaaatgaaaaagttgattcaaaagtgaaagctttcaagaaaccattgagtgtatttaaaggccccttactacacatcagcccagcagaagaactgtactttggaagtacagaatccggagagaagaaaaccttaatagtgttgacaaatgtaactaaaaatatagtggcatttaaggtgagaacaacagctccagaaaaatacagagtcaagccaagcaatagcagctgtgacccgggtgcatcagtggatatagttgtgtctccccatgggggtttaacagtctctgcccaagaccgttttctgataatggctgcagaaatggaacagtcatctggcacaggcccagcagaattaactcagttttggaaagaagttcccagaaacaaagtgatggaacataggttaagatgccatactgttgaaagcagtaaaccaaacactcttacgttaaaagacaatgctttcaatatgtcagataaaaccagtgaagatatatgtctacaactcagtcgtttactagaaagcaataggaagcttgaagaccaagttcagcgttgtatctggttccagcagctgctgctttccttaacaatgctcttgcttgcttttgtcacctctttcttctattwattgtacagttaaagaagtggtgccgggtaggaaccacggttccttcgtccattagttggaaaagtaacagacctaaaactctaccaagctactaaaamcattgcacatctgtgcttcctaaaaggaaatatgcagcacgtggaggggaacacatacatgtcttgaaaataaactgctagaataaagaaatgctggagaaattgattataagagactatagctatttagtaaagtaagtaaaggcatatccattgtgtaaattaatagtttaaatataatttattttttccttttgatctgaatacttttaaagcttaagttttatcgtgtaaatacattagctaaactgaaaagtataagtaacatgctttgttgcagccaaaaaatgtaatctgcttttttatgacagaattattatagctgagctgacttactagcttttctatactatgtatatagaagaacatgtatattgagaaagaaaacatacttatatagaggaatttatgtaaccatgactttgtaattttgagaattcctcccagtgatggtcagtattcttttggaatgtaaaccgatttaatgccaaaccaccttaacctttgtttctcagtgttccttaacagcctgccttttattaatctcaggcttttttatgaacactctcatttcagtagaatttggaaaactaagcgtggttggaatttctttgaattctgttagtaatgcccaaaagaaaagtctcaagcagtccccctatccagtcatttttatggagtttcatgttgtccactatagctggacactgaaccttttgcctaatttattataaaggcctgaccctctattgtcccatcttcacccccattccagagcagaggagtctctgtggaccatgaattgcactgtctccctcctcatttctaaatgaaaggtattagatataaatttttttgaaaggttagttgtttgagatgctaagcaggataataaatttagattttaaaatgttccctgtaaaagtcagcccatgacaaggaaatttacaaaatactagagtatctagaagggtgaaaacaaaaaaaaawaaaaaraaacacagacgcccaggtgtcagctctccgtttaaagaatgaaaaatgtaactcatgatgatctgtgaaaccttcaaactaggaccaattgacttacttgatattctgcctttgatatggtagtacccacccggtattcctaaaatcctaaaaagatacaccttgcagtagcagaggcaatgacatgagtttgttttctcattaatatgaccagtttgggtctatgttggttcacatgtacatctactttatatgaaagaaaaaacagttgtctgcctgtaaaatgttgagtttcgattgagccatgtttggagattttattactattctgaagggtagtgttgttggttttcatcttcaagaagttgattccaaaactgagttatgaagaatgatataacagttccttcaaaattggcctaggaaataaaaccttaaaaggacactggtgtgctactttgtcttaatttgggcttttctgtttcagtttgccacctccagctgtgaaatggactgcagtccaccctaagtactgtgcacagtatctccctgtgtgtgtgcacagtggcttccccttacatggtagatttttggccttaatataatctaatcccaaagtagttgtgtatgttttctgttccttggcaataaaatgnaggaataatttagnccaagattg

SEQ ID NO: 373 - DNA, 2438 bp, Homo sapiens
  misc_feature (71)..(71): n equals a,t,g, or c
  misc_feature (879)..(879): n equals a,t,g, or c
ggtgcagttccaacagtaacagcgaaaatcatcgggtgatgcaagtactcaaacagatgccctgaaactgncaccttccaaccttcaaggcttttgaagaacaaagctttattatgcaaacccatcacacagactaaagccacctcttgcaaaccacatacccaaaacaaagaatgccagacagaagacactccaagtcagcccagattattgkggkgccagttccgtaccagkgttkgtcccatacctcttacctttatactcaatatgctccagtcccatttggaattccagktccaatgcctgkccctatgcttattccatcttcaatggatagtgaagataaagtcacagagagtattgaagacattaaagaaaagcttcccacacatccatttgaagctgatctccttgaratggcagaaatgattgcagaagatgaagagaagaagactctatctcagggagagtcccaaacttctgaacacgaactctttctagacaccaagatatttgaaaaaraccaaggaagtacatacagtggtgatcttgaatcagaggcagtatctactccacatagctgggaggaagagctgaatcactatgccttaaagtcaaatgctgtgcaagaggctgattcagaattgaagcagttctcaaaaggggaaactgaacggacctggaagcagattttccatcagactcctttgacccacttaataaaggacgggaatccaggcacgttcccgaacagacgacgacacagagatggcttcccccaacccagacgaagaggacggaagaagtctatagtggctgtggagcccaggagtcttattcaaggagcctttcaaggctgctcagtgtccgggatgacantgaaatacatgtatggggtaaatgcttggaagaactgggttcagtggaaaaatgccaaggaagagcagggggatctaaaatgtggaggggttgaacaggcctcatctagcccacgttctgaccccttaggaagtactcaagaccatgcactctctcaagaatcctcagagccaggctgtagagtccgctctatcaagctgaaggaagacattctgtcctgcacttttgctgagttgagtttgggcttatgccagtttatccaagaggtgcggagaccaaatggtgaaaaatatgatccagacagtatcttatacttgtgccttggaattcaacagtacctgtttgaaaatggtagaatagataacatttttactgagccctattccagatttatgattgaacttaccaaactcttgaaaatatgggaacctacaatacttcctaatggttacatgttctctcgcattgaggaagagcatttgtgggagtgcaaacagctgggcgcttactcaccaatcgccttttaaacaccctycttttcttcaataccaaatacttycaactaaagaatgktactgagcacttgaagctttcctttgcccatgtgatgagacggaccaggactctgaagtacagtaccaagatgacatatctgaggttcttcccacctttacagaagcaggagtcagaaccagataaactgactgttggcaagaggaaacgaaatgaagatgatgaggttccagtgggggtggagatggcagagaatactgacaatccactaagatgcccagtccgactttatgagttttacctgtcaaaatgttctgaaagtgtgaagcaaaggaatgatgtgttttaccttcaacctgagcgctcctgtgtcccgaatagccccatgtggtactccacattcccgatagaccctggaaccctggacaccatgttaacacgtattctcatggtgagggaggtacatgaagaacttgccaaagccaaatctgaagactctgatgttgaattatcagattaaaacggaagtgaggttcttattttcatacatattggtatgcaccaaactgtgaatgcatccagctgttggaaaatgatgtataagtctaagtcctcttgacttgaccataagatcatggaaaacagatgacttgtgaaccccacagtgtggatgtgcaaatgaaaattgaaggaaagaatatgaactgagaaatgttctttggcagtgatatagttcttagacatcttcagaatgactaatttctccgagtggtgcataatcttattttgtttgggagtaacaaatcgtggaatatttttaaggaaaactgttgtataaaactttaccatagtaaccttagaccttagagaggtagctttggagtgaaactttggctgcaataggctactttgcaagccctccgtaaaagtcagaggagagatcagtacagagctaagagtgacatcaaatgaggactgtgggacccagatttgaagacccaataaaaatactcaactttttaaaaaaaaaaaaaaaaaaaaaaaat

SEQ ID NO: 374 - DNA, 584 bp, Homo sapiens
  misc_feature (582)..(583): n equals a,t,g, or c
tgggatatctccggagcatttrgataatgtgacagttggaatgcagtgatgtcgactctttgcccaccgccatctccagctgttgccaagacagagattgctttaagtggcaaatcacctttattagcagctacttttgcttactgggacaatattcttggtcctagagtaaggcacatttgggctccaaagacagaacaggtacttctcagtgatggagaaataacttttcttgccaaccacactctaaatggagaaatccttcgaaatgcagagagtggtgctatagatgtaaagttttttgtcttgtctgaaaagggagtgattattgtttcattaatctttgatggaaactggaatggggatcgcagcacatatggactatcaattatacttccacagacagaacttagtttctacctcccacttcatagagtgtgtgttgatagattaacacatataatccggaaaggaagaatatggatgcataaggaaagacmagaaatgtccagaagattatcttagaaggcacagagagaatggaagatcaggtcagagtattattccaatgcttactggagnng

SEQ ID NO: 375 - DNA, 2738 bp, Homo sapiens
  misc_feature (762)..(762): n equals a,t,g, or c
ggccggctgagggcacttgctcttgctgtttctgcccctgggttaacattcaagatggtacatgctgaagccttttctcgtcctttgagtcggaatgaagttgttggtttaattttccgtttgacaatatttggtgcagtgacatactttactatcaaatggatggtagatgcaattgatccaaccagaaagcaaaaagtagaagctcagaaacaggcagaaaaactaatgaagcaaattggagtgaaaaatgtgaagctctcagaatatgaaatgagtattgctgctcatcttgtagaccctcttaatatgcatgttacttggagtgatatagcaggtttagatgatgtcattacggatctgaaagacacagtcatcttacctatcaaaaagraacatttgtttgagaattccaggcttctgcagcctccaaaaggtgttcttctctatgggcctccaggctgtggtaaaacgttgattgccaaggccacagccaaagaagcaggctgtcgatttattaaccttcagccttcgacactgaccgataagtggtatggagaatctcagaaattggctgctgctgtcttctcccttgccataaagctacaaccatccatcatctttatagatgaaatagactcctttctacgaaaccgttcaagttctgaccatgaagctacagccatgatgaaagctcagtttatgagtctctgggatggattggatactgatcacagctgccaggtcatagtaatgggagcnrccaatcgtcctcaggaccttgactcggctataatgagaagaatgcctacaagatttcatatcaaccagcctgctttaaaacagagagaagcaatcctgaaactcatcttgaaaaatgaaaatgtggataggcatgtagacctgctagaagttgcccaggaaactgatgggttttcaggaagtgacctaaaagagatgtgtcgagatgctgccctcctctgtgttagagaatatgttaattctacatcagaagaaagccatgacgaagatgaaattcggcctgttcaacagcaggacctgcatcgggcaattgaaaagatgaagaaatcaaaggatgcagcatttcagaatgttttaacacatgtttgtttagattaagagtaaagatcatttgtacagttcagtgatctagtttggtgtgtcctcttatcagttagtggaaatagaacggaaagagtgctctttaaacaatgagggagctcagtgtttatggttttatactctgaattctaagttattgagatatagttgttacataggtggtattactgttggtcaaaaatcatgaggaggaacagttgaatccagcctgaacgtgggtgcttgtgtttgaccttttcagccatatattgtacagccttatagaatctaagctggtcttaaagtcataaatgattcattgggtcattagtgagaaacggggatgtggttaggtgctggttcctagacatgtgagtatgcgtttgtgtgtgtgcgtgtatgtatgtgtatattaaatgtatatatccacacattttatattgacattctgtagatatgtttgaatatagaaactttttttaccccaactactgaatccaggagtaccaaataatatatagtaaaactaagatttaaggttgtgtcaaaaaggtacagtgattcagccatttccatttgtcatttgtttcaaccttttttaagttgagtgtttttatttctgcagttattagttggatcctccacatcttgcatatatacatgggctcaattattatgtttgtcaggataatcaaatgaaaatactagttcagtgatcagcattgaatggttgttaggcagccatgtgctcaacactgatttcacctcttgagtataaactttttaaatttaaattggtttacatgaaagtggattaaaaggcctttcaaaagaatgggtttgaaaaacytcagtaccctttaatacatgtacatttctttccttttttcatttaatgtaacatgtctgttgtaactatgtttcttaaatattattttaaggttatgtgttctttaattatggtcaaatataatttggtcaccaaaaatgaaataatagtttaaaacaagtagctgttactaagtgtgctaaaaatactcattttataattaattttagttttcttagtatattattataaattgtgccctaagtcaggtacaaatgtacacatcaaaatgcccatattgtatctatctgtagtcgtttaatgtgaattatatgtgaatttttttcaaaattttactaaccagaattctgttataggcacctaaccacgcagcatgaggaaaacggcacaacacaatcttgaggtgccttctgaatcatcagattaaattatgcttcatatgtttttgcttttactgtatttctttaaaaactctaaatctttattcatgtgtcactggattaatttatctgataatgtgtctcacaagaatctgttagatcgtttattcttcagttgtactttgaatggtggggtggaagtttcaggtgaacaatggataacaaaaagcaagttatggaagattgtgaagaggatggaaaaactgaatacaagataccaaaaatgaaaaaaagtgtcccatttttaataactatattctattattttataaatgtgtaataaaggggtccctctttaaaaaaaaaaaaaaaaaaaaaaaaaaaaa

SEQ ID NO: 376 - DNA, 1111 bp, Homo sapiens
  misc_feature (115)..(115): n equals a,t,g, or c
  misc_feature (1095)..(1095): n equals a,t,g, or c
agcggcagtcgggtgggaagccgtgtctcgcagtcgtggactcgtgcagctggggcgtcygcakscgctcgtmacccgcgtratgctgtttctggcgttgggcagcccgtgggcngtcgaactgmctctctgcggaaggaggactgcattgtgtgcggccgccgcgctccgaggtccccgggcctctgtctcccgggcgtcctccagcagcgggccttcggggccggtagccggctggagtacggggccttcgggagccgcgcgccttctccggcgtccgggtcgagcgcagatccctgtttattgggaaggatatgttcgattcttaaatacgccatctgacaaatcagaagatggaaggctaatttatactggcaatatggcccgagcagtgtttggtgtgaaatgtttctcttattctacgagtctgattggccttacatttctgccatacatttttacacaaaataatgctatttctgaaagtgtgcctctgcctattcaaatcatattctatggcatcatgggaagctttacggtgatcaccccagtgctgcttcactttattacaaaaggctatgtcattcgattgtaccatgaggccacaacagacacttataaagccattacctacaatgctatgcttgcagaaacgagtacagtgtttcaccagaatgatgtgaagattccagatgctaaacatgtatttaccacattttatgctaaaacaaaatcactgttagttaatccagtgctctttccaaaccgtgaagactatatccatctaatgggttatgacaaagaagaatttattttgtatatggaagaarccagtgaagagaaacggcataaagatgasaaatgagcctatttgttagtgttcgtgctyaaatgtgatttacgttttaatgtataataataaaattgccttttgcattccgttagtgactgattgttaaaaataatttgaaattatcaaagcttttaatttccagagaatgatgtttgtttataataaaacaagctatgtttgaaaaccaaaatgtagtatctaccattcgtgttttagaaaggtatgtgaataaatatgttctntgaagatcggactggt

SEQ ID NO: 377 - DNA, 1506 bp, Homo sapiens
  misc_feature (43)..(43): n equals a,t,g, or c
  misc_feature (1492)..(1492): n equals a,t,g, or c
  misc_feature (1501)..(1501): n equals a,t,g, or c
  misc_feature (1506)..(1506): n equals a,t,g, or c
ctggaagaattcgcgtggcaggagaggcggggcaattttgctnagctttctcgcgggcttgcagctgcggcaagtgctggcggcggctgctcgcgcaagtcagctggcgtgggaactaccctttgtagctgagaacggcttgtttattgctacaaagactctattgacattggtagcttcagcggcagcagcttcttacggtataaagctgttgcttcctgaagaggctacaagcatccttccctaggactgctgtaagctttgagcctctagcaggagacatgcctcggggacgaaagagtcggcgccgccgtaatgcgagagccgcagaagagaaccgcaacaatcgcaaaatccaggcctcagaggcctccgagacccctatggccgcctctgtggtagcgagcacccccgaagacgacctgagcggccccgaggaagacccgagcactccagaggaggcctctaccacccctgaagaagcctcgagcactgcccaagcacaaaagccttcagtgccccggagcaattttcagggcaccaagaaaagtctcctgatgtctatattagcgctcatcttcatcatgggcaacagcgccaaggaagctctggtctggaaagtgctggggaagttaggaatgcagcctggacgtcagcacagcatctttggagatccgaagaagatcgtcacagaagagtttgtgcgcagagggtacctgatttataaaccggtgccccgtagcagtccggtggagtatgagttcttctgggggccccgagcacacgtggaatcgagcaaactgaaagtcatgcattttgtggcaagggttcgtaaccgatgctctaaagactggccttgtaattatgactgggattcggacgatgatgcagaggttgaggctatcctcaattcaggtgctaggggttattccgccccttaagtagatctgaggcagacccttgggggtgtaaaagagagtcacaggtaccccaaggagtagatgccagggtcctaagttgaaaatgatgtcgattgggggcgggggacactgtatttgatatttgtgatcagtgatcattgttcaactgcgaaatagagtgtttgcttttgataatggaaaattgtattcgttttaaaattccgtttgttgagaataacaatatgtttaaaaatataattgaacaaatttttttctttgtttcctgtcattgacatttagtataacagttttgctaacgttctaaaatgaagtcgttccatcataatctatgatcttgtacagcacttatagaaataagctgttcttttgaagttgaaatacccagtaaaatgttgaagaaggatggaggatttcttcatatctgacgtttctgaaaccctttgtgtctgctgttgtgtgaagattgacatttaccatgattttccttagttactgcagaacatagagaaaaataaaagcctaacgaatagtaaaaaaaaaaaaaaaacctnggggggggncccgn

SEQ ID NO: 378 - DNA, 457 bp, Homo sapiens
agccaagttagagatgactgctgtggctgacattttcgaccgagatggggatggttacattgattattatgaatttgtggctgctcttcatcccaacaaggatgcgtatcgaccaacaaccgatgcagataaaatcgaagagaggttacaagacaagtggctcagtgcaaatgtgcaaaaaggtttcaggtggagcagatcggagagaataaataccggtttggggattctcagcagttgcggctggtccgtattctgcgcaaccgtgatggttcgcgttggtggaggatggatggccttggatgaatttttagtgaaaaatgatccctgccgagcacgaggtagaactaacattgaacttagagagaaattcatcctaccagrgggagcatsccagggaatgacccccttccgytcamggggtcgaagtccaaaccatcttcccgggcagcttccc

SEQ ID NO: 379 - DNA, 922 bp, Homo sapiens
  misc_feature (249)..(249): n equals a,t,g, or c
gtttttttttttttttttttggaattaattactcttttattagcacaaaataacagcaacctagcagccgcacgscccgagaataagttaaggcacagagcaggcgacgggcggctttcccagggccaggcctgcatgccccgaacttcctgagcaaactccctaggggctggggtttcgagggtcctggagggcctcttcccttgagatgaggggaacggaacagggcaagaggggcgcccccatggncgcaaggggtccacgctgcgccgcgatcacttctcgaagtagggcaggtagaagaactggaagccccggtggcccttgaccgcgcagtagatgaagatcacgtgatagactccaggcaccaacaacaggaagcccggcacgaagaagatggcgctggagacacctggagagggggtcgcctccagtcccacgccgaccaggatcagcaccagccccagcagcaggagcaggaaggaggccagcaccactcggcggttcttctggatcaaagggtgttgggtccagctgcagcaggtgttgtaggagcgctgggtgctgctgctgatggtgctgaaggaccactgggagctgcggatggaagttcggctggaatccctggtgccgactcccccatccggctccggagaggcctgggctccatcctcatcgttctccaggttctggtagcgcagccgggactgcttgtcctcgtcagccacctcgaaccgggcccgacgctcgaagtgcagcggcccaaagcgcgcgaccccgctggactcgcccagggcccccgtcctccagggacagctcgaaggcatcatcaatgctgaactggggccgggcggcgctcatggccccggcccgctcaggccgtgcgccgccgccatctgcgcccaccggacgcgtgggtcga

SEQ ID NO: 380 - DNA, 2439 bp, Homo sapiens
cttttttttttttttttttttttttttttttttttggagtaaatacatttattgatacccatttcatatatagttcaatgaaataatctataaatataaaaagcatttttcttttggatatcaccatggtccatgtaaatactcaagtcagaatcatctgcaggaagcactccaagtcacactgttagctttacagacctgaatatacatattgcattaaacagtggcacttatgtactcaagtggtccagtggctttggaatatatgtctactgggcatgtggaatagaaataatgtgttaggtttaaatcaatggaaagggtatcaaccatcaacaaaagcaacaattatgaattcatatcctaggcaaagaaagtaccacagttgacacttggtgtcagaatactggagacaaagtatgtaaaacaatgcctgttgcagcaccacgtgctcactccaactcccagtggacagtcccccaatgccttagggtcactcgtggtcaaccaaatgcaatcaagaagctcgatagcttagaataaaaggtctgtagaggctgatatcaagattaaagtaagctaaacatttcagtgacacaatgagtttcctccctagaaggggactgtgggaaaacttttaattccctttgttacactgagcatgatcatttatctaatgcagaagaaagaacccagacatctggtactcagaacataggtgcaaaaattttcttccatttcaaagttttttcaatacttccgagggaactaatgcaaccaccgttgagccttgctctccacctgatgcagcataaaattttctctcatttcttcaatataggaatgtcttgctgcagactatgtgtcttccgagttagcaagcaaatgcgtttaaaaggtcttagttgtgcaatgtccaaaactgaaatctgagaggcagtgttagaacttaagcaaggcagaatttttagagtctactcaaatgaaagcctaagtgaagcatataaaaattcagtcttttctattattttcaactggaattgatggcaacattccctggtaaggatgggtaactggtgttatctccaggtccaaaatatcccaactacttaaaggggacccaaaagaggagaaacacacacttgagttctgtggtctccagaatttttttttttttttttttgccattttcaaaaaagatatagtagcttcagttgtacaccaccagttgaaggggttttcatccaaatgagaaactctaccccttgtctctagtggaacaggcaccagattcccacaagcagcagctcccatgtcctgtagcacgtggcatccgaccctggagtgaagagtaagctggcacagagccccgacgctgggattcagactagatggcgtttcgtggcgtgccattgtgtgtcagcgctttcagactggaggcactagtctggtgaccacagctcctgtgagaagtcacacccacctcaaaaacctcatgaatagcttttcggaaacagtggaagttgtagtctattaaaccttttctttcaaagctttcttcccttagaatgcagaccagtgccaaaaatttagtcacctcctttaaataaaggacagttgtattattcagcttgataattgccatagattctttgtcataagcacttccacttccatcttcctttaacccatatatacaagacacatcaattacaacatcgatcatgtcacagcaaagttcataagattgcatatccacaggggaactgtctgttgcaatgtagattttgctgacaacatcaaagagaaaagctttttcaatacctgaatttgatataaagatatttaataggttttccaaggtcggcagttgtggaatgagtttctgcaccaccttactaaaggcttcaaatattgaatggtcatagatactagtcagataaaagctaagatggagtttttctagcccagcatctgcaaggtcatcattggccctttgatgaatgtccctctgtgtttctattttgtgatcatcagacagaccatcaactttgtgaataaaaacctcaaaattcatgtctgggttaactttgtaggctttagaaacagtaatgtgaagtcttgttaaagcctccatgtagtcatcctgtgcgtcaatgacgtatatcaatgctcctgttcccctgaagatcatctcatagtcaaaggttgggtcaaaaaagtccatttgcccaggaaaatcccatatctggaaattcacaaaggagctattggaaatgtcatccttataaatcttgttggtactttccaaaaagagggtctcgttgggtgacatcttatgaaacaccaccttctggatggaggacttgccgctgcgccggagtcccatgagcagaatcctcggcttggagctgtcagcgccccccggacctcgtgccc

SEQ ID NO: 381 - DNA, 846 bp, Homo sapiens
  misc_feature (838)..(838): n equals a,t,g, or c
  misc_feature (841)..(841): n equals a,t,g, or c
  misc_feature (845)..(845): n equals a,t,g, or c
gacagtacggtmcggawtcccgggtcgacccacgcgtccgaagtcgcggtgcagcggtgggcggcatgtctgtggccggtggggagattcgtggggacacggggggagaggacactgctgctcccggccggttcagcttcagcccggagcccacgctcgaggacatccgccgcctccatgctgagtttgctgcggaacgagactgggaacagttccatcagcctcggaatctcctcctggccttggttggggaagtgggggagctggcagaactctttcagtggaaaaccgatggggaacctggcccccaaggctggtcccccagggaacgggcagcccttcaagaggagcttagtgacgtcctcatctacctggtggcattagcagcccgctgccgtgtggatctgccgctagcagtgctctccaaaatggacatcaaccggcgacgctacccagcccatctggcccgcagctcttcccgcaagtatacagaattgccccatggggccatctctgaagaccaggctgtggggcctgcggacattccctgtgactccacaggccagacctcaacctagaaagatggccacaggacttgcaactcagggtggtgtctgaagagcagagagtggcctggccctggagcctttttctagtcttttcagaatagatcatgggcctgaggcytccacttcttgaggtctgaggcccagcagcctctagaaggtagcctcctggtgtttgttctcccagtaaaatggttttgggcgataaaaaaaaaaaaaaaaaaaaaaaaaaaaaaaaaaaaaaaaaaaaaaaaaaaaaaaaaaaaaaaaantcnaggng

SEQ ID NO: 382 - DNA, 771 bp, Homo sapiens
  misc_feature (200)..(200): n equals a,t,g, or c
  misc_feature (205)..(205): n equals a,t,g, or c
gttcttctaaatcaggaatggattgaaatctaatgaaccgaaactttgggtacttcggccttcaaggggctcctttattgagaatcaatgtcttctcctaggtaattgatcaccctagacccagggacacccaattcatcgtaatcatcatgaataatcaaaaagtggtagctgtgctactgcaagagtgcaagcaagtnctggntcagctcttgttggaagcgccagatgtgtcggaagaggacaagagcgaggaccagcgctgcagagctttactccccagcgagttaaggaccctgatccaggaggcaaaggaaatgaagtggcccttcgtgcctgaaaagtggcagtacaaacaagccgtgggcccagaggacaaaacaaacctkaaggatgtgattggcgccgggttgcagcagttactggcgtccctgagggcctccatcctcgctcgggactgtgcggctgcggcggctattgtgttcttggtggaccggttcctgtatgggstcgacgtctctggaaaacttctgcaggtcgccaaaggtctccacaagttgcagccagccacgccaattgccccgcaggtggttattcgccaagcccgaatctccgtgaaytcaggaaaacttttaaaagcagagtatattctgagcagtctaataagcaacaatggagcaacgggtacctggctgtacagaaatgaaagtgacaaggtcctggtgcagtcggtctgtatacagatcagagggcagattctgcaaaagctgg

SEQ ID NO: 383 - DNA, 715 bp, Homo sapiens
  misc_feature (536)..(536): n equals a,t,g, or c
  misc_feature (573)..(573): n equals a,t,g, or c
  misc_feature (578)..(578): n equals a,t,g, or c
  misc_feature (625)..(625): n equals a,t,g, or c
  misc_feature (688)..(688): n equals a,t,g, or c
  misc_feature (695)..(695): n equals a,t,g, or c
  misc_feature (698)..(698): n equals a,t,g, or c
ggccatggggggaaagcagctggacgaggatgacgaggcctacgggaagccagtcaaatmcgacccctcctttcgaggccccatcaagaacagaagctgcacagatgtcatctgctgcgtcctcttcctgctcttcattctaggttacatcgtggtggggattgtggcctggttgtatggagacccccggcaagtcctctaccccaggaactctactggggcctactgtggcatgggggagaacaaagataagccgtatctcctgtacttyaacatcttcagctgcatcctgtccagcaacatcatctcagttgctgagaacggcctacagtgccccacaccccaggtgtgtgtgtcctcctgcccggaggacccatggactgtgggaaaaaacgagttctcacagactgttggggaagtcttctatacaaaaaacaggaacttttgtctgccaggggtaccctggaatatgacggtgatcacaagcctgcaacaggaactctgcccagtttcctcttccctctgctcagctctgngacgctgctttcatggaccaacattactccaccgggngctcncagggatcaccaatgaccacccaccatacagcaggggaatcagcggnctttattgacagcctcaatgcccgagacattaattgttaaagatctttgaagattttgcccgncctggtnatnggatcttggtgcccttg

SEQ ID NO: 384 - DNA, 549 bp, Homo sapiens
  misc_feature (359)..(359): n equals a,t,g, or c
  misc_feature (414)..(414): n equals a,t,g, or c
  misc_feature (468)..(468): n equals a,t,g, or c
  misc_feature (470)..(470): n equals a,t,g, or c
  misc_feature (532)..(532): n equals a,t,g, or c
gcaagagcagaacccggcattgagtattttgaagatggagccaatgtccctggtctgcccctgcctcggcatcccccaccacctctggcatccatacccgcggtgggtgctgtaacggcatctgggctttgtcatctcctttgcagaacatcgtagctgtgggagctgggttctgcgacggcctccgctgtggagacaacaccaaagcggccgtcatccgcctgggactcatggaaatgattgcttttgccaggatcttctgcaaaggccaagtgtctacagccaccttcctagagagctgckgggtggccgacctgatcaccacctgttacggagggcggaaccgcagggtggccgangccttcgccagaactgggaaaggtagcccctcactgctctccgcaccccctcttnctcacttgagactcctgcttggggtgaactggaacccatggagatttatgccancnttattgctgggatggtccgttgcctgctgtttttacttgactctttggtcttatctttgggntttaacttcttggttca

SEQ ID NO: 385 - DNA, 995 bp, Homo sapiens
cggggtgcctggggcagacgaggccggcttctccgcggacagctagggagagtgtcctgggtgtcagccagaacatgtctttcaacctgcaatcatcaaagaaactgttcattttcttaggaaaatcactgtttagtcttctggaggctatgatttttgccttactcccaaagccacggaagaacgttgctggtgaaatagtcctcatcacaggtgctggaagtggactcggaaggctcttagccttgcagtttgcccggctgggatctgttcttgttctctgggatatcaataaggaggggaatgaggaaacatgtaagatggctcgggaagctggagccacaagagtgcacgcctatacctgcgattgcagccaaaaggaaggagtgtatagagtasccgaccaggttaaaaaagaagtcggcgatgtttccatcctaatcaacaatgccggaatcgtaacaggcaaaaagttccttgactgtccagatgagcttatggaaaagtcatttgatgtgaatttcaaagcacatttatggacttataaagcctttctacctgctatgattgctaatgaccatggacatttggtttgcatttcaagttcagctggattaagtggagtaaatgggctggcagattactgtgcaagtaaatttgcagcctttgggtttgctgaatctgtatttgtagaaacatttgtccaaaaacaaaaggggatcaaaaccacgattgtgtgccccttttttataaaaactggaatgtktgaaggttgtactacaggctgtccttctctgttgccaattctggaaccaaaatatgcagttgaaaaaatagtagaagctattctacaagaaaaaatgtacttgtatatgccaaagttgttatacttcatgatgtttcttaaaaggtaattacatcagcttctattacttccctaacatgccagtctacagtttactccaaatcccmccaggaaaaaccacttttaaaaa

SEQ ID NO: 386 - DNA, 2032 bp, Homo sapiens
ggcacaggcggccgcccgcgcgccaagttcctcagcccttggctcctgcccagtgtttagggtgttggcggagaaaaggggaagagtcatcgcctgtcggggctaggatatgatgggtgagaggtgtcaaaccaaattctctcggtttggaaacggagaaaatctaaaaatgaggatgtgaggaaagagtccgctctcaaggcgcgttgtggtctatccgagccccgtcccctgggctccctcgggctggggtgaggcgggcagctacgcgtggggtaggaccatcttacgctgggaccccgccaaggagccccaggaagtaggtgaaagggcaggggcgtggctctcggggcgccacccacgctcttgaaatctgggtgattgcgagcggccgctcagcgtcccccacaccacagacccgcgccgccgacgacccagcagccgccatggctctgctccgaggtgtgtttgtagttgctgctaagcgaacgccctttggagcttacggaggccttctgaaagacttcactgctactgacttgtctgaatttgctgccaaggctgccttgtctgctggcaaagtctcacctgaaacagttgacagtgtgattatgggcaatgtcctgcagagttcttcagatgctatatatttggcaaggcatgttggtttgcgtgtgggaatcccaaaggagaccccagctctcacgattaataggctctgtggttctggttttcagtccattgtgaatggatgtcaggaaatttgtgttaaagaagctgaagttgttttatgtggaggaaccgaaagcatgagccaagctccctactgtgtcagaaatgtgcgttttggaaccaagcttggatcagatatcaagctggaagattctttatgggtatcattaacagatcagcatgtccagctccccatggcaatgactgcagagaatcttgctgtaaaacacaaaataagcagagaagaatgtgacaaatatgccctgcagtcacagcagagatggaaagctgctaatgatgctggctactttaatgatgaaatggcaccaattgaagtgaagacaaagaaaggaaaacagacaatgcaggtagacgagcatgctcggccccaaaccaccctggaacagttacagaaacttcctccagtattcaagaaagatggaactgttactgcagggaatgcatcgggtgtagctgatggtgctggagctgttatcatagctagtgaagatgctgttaagaaacataacttcacaccactggcaagaattgtgggctactttgtatctggatgtgatccctctatcatgggtattggtcctgtccctgctatcagtggggcactgaagaaagcaggactgagtcttaaggacatggatttggtagaggtgaatgaagcttttgctccccagtacttggctgttgagaggagtttggatcttgacataagtaaaaccaatgtgaatggaggagccattgctttgggtcacccactgggaggatctggatcaagaattactgcacacctggttcacgaattaaggcgtcgaggtggaaaatatgccgttggatcagcttgcattggaggtggccaaggtattgctgtcatcattcagagcacagcctgaagagaccagtgagctcactgtgacccatccttactctacttggccaggccacagtaaaacaagtgaccttcagagcagctgccacaactggccatgccctgccattgaaacagtgattaagtttgatcaagccatggtgacacaaaaatgcattgatcatgaataggagcccatgctagaagtacattctctcagatttgaaccagtgaaatatgatgtatttctgagctaaaactcaactatagaagacattaaaagaaatcgtattcttgccaagtaaccaccacttctgccttagataatatgattataaggaaatcaaataaatgttgccttaacttcaaaaaaaaaaaaaaaaaaaaaaaaaaaaaaaaaaaaaaaagggggagggg

SEQ ID NO: 387 - DNA, 499 bp, Homo sapiens
  misc_feature (447)..(447): n equals a,t,g, or c
  misc_feature (466)..(467): n equals a,t,g, or c
  misc_feature (469)..(469): n equals a,t,g, or c
ggcacgagtgaagctgaagtactgcttcacctgcaagatgttccggccaccccgaacctcacactgcagtgtctgcgacaactgtgtggaacgatttgaccatcactgcccctgggtgggcaactgtgtggggagacggaactatcgcttcttctacgcgtttattctctccctctcattcctgacggccttcatcttcgcctgtgtggtcacccacctgacgttgcgcgctcagggaagcaacttcctctccactctgaaggagacaccagcaagcgtgctgggagttggtgatctgcttcttctccatctggtccattctgggcctctcagggtttcacacgtacctcgtcgcctccaacctgactactaatgaagacatcaaaggttcgttggtccagcaagagggcggtgagcctcttgtcaaccctacagcataaagtattntcaccaatggcgggtgggnntngggccctaacttccagctattgacgggggg

SEQ ID NO: 388 - DNA, 1516 bp, Homo sapiens
cccaaagtgctgcagttacaggcgtgagcactgcacctggcctcatgttttttaaataattgccttttatatttaccctttttgtcatcactttagaatgaaaattcccatttaaatctgaaagttaccttaatagtcctcttgtgttattaggacagtattattatagtacttatttattttattttagatttaaagttatcttctctttttcttttttcttctgctgcttttagggacaattaaaactgggaaactatgaaacatggaacattttatcctacctgaaagtaaacgagtaattgtgaagcataagacactgaggctaatacaactctgtcttcatgtgttgactgcctggcacatagtattcattctcttccctttaacatagaagtgtccagctgcgtacagtctagtaaccagcaactgtaaacgaacctgtgcctctaacaagcgattctaaaccacctatgagtatttcttttagggctcacttaaatacatgtttgtatatactgtattctagccagaataattttagatctgatcaggtagtagctaaaattagaaaaaaacaaaatagatgcttaaagaatttgcatccatttttgagtctaaatcttttaaaatatactgagatccacatctagtgaaatgtcagtgtcaaaatattatagattatagctaaaatccagattaatactcatttggggttttttatagtggaacttcatagtaatacaaaaagcagattgtcttcctgtctccgctgctcccacagtaggtattgaaactggtaaaatcagttttttgatagtgtgtgtatataagaaaaaatagatacacacattcttttttctcagtcaacacattgattgaacactctggcaaagatgctgtggtggatgaggttggagttcgaaagaagaagcaagcgctggcctggccttgaaagaaccgaagtctttcccattcacttctctagaaagctgccaagacagaggcagaaagaaatggatgatagttctgtcaagcacacttctgttctcttagaacttagaagtgtttctaagagaacagaagtaataagagaaacagttacgtgtggaattcaacatctttggttggaacgcattggctttttttttcttgttttgatagaaatggaattaagcaaaagtagtttttgtcttttctgttgtcttcaaattttatgccttttatttttaatttaatcccgttcaattatttaattgttatacattgacattaactgctgtattttgactttgttcaataattttgttctttcagggctagaaataaactttttaaaaaaagtgtgcatttttccctttcctaaacttttattctttcttttgatcagcgtaaaagaatattttaatgtcttttgatagcataaaagaatatttaaatgtcttaataggttttcaaagaacatttagtatttttagtgataaatgttttaaaccttttaaaaaaaaaaaaaaaa

SEQ ID NO: 389 - DNA, 2127 bp, Homo sapiens
cacaggcagagatcaagtacaaaggtggtacaacatcttggccctgcaactgatttttataaraaacttgcattagattgctcgggacagcaaactgcagtggatttgttccttttaagttcacagtattctgatcttgcttctctagcttgcatgtccaagtattctgcagggygcatctattattatccatcattccactatactcacaatccttcacaagcagaaaagttacaaaaagacctaaaacggtatctcacaagaaaaattgggtttgaagctgttatgagaataaggtgtactaaaggtctttcaatgcacacttttcacggtaacttctttgtccgttctactgatttgttatcccttgccaacatcaatcctgatgctggatttgcggtgcagttgtcaattgaagaaagtttaacagatacttccttagtatgttttcaaacagccctattatatacatcaagcaaaggtgagcggagaattagagtacatacactttgtttgccagtggtaagttcactagcagatgtatatgcgggagtggatgtacaagctgccatctgccttctggcaaacatggctgtggatcggtccgtttcatcaagtctgtcagatgcaagagatgccttagtgaatgctgtagtggactcattgtctgcatatggctcaactgtctcaaatttacagcactctgcattgatggcgcccagctccctcaagttgtttcctctctatgttttggcccttctcaaacagaaagcatttagaacgggtacaagcacacggctggatgatcgtgtatatgccatgtgtcagataaagtctcagccacttgttcatctaatgaaaatgattcatcccaacttatacaggatagacagattgacagatgagggtgcagtacatgttaatgacaggattgtaccacagccacctcttcaaaaattgtctgcagagaagctgacaagagaaggtgctttccttatggactgtggctctgttttttacatttgggttgggaaaggctgtgacaataacttcatagaggatgtgcttggatatactaattttgcatcaataccacagaaaatgacacatcttccagagctagatacactttcatcagaaagagccagatccttcataacttggcttagagacagcagaccattaagtccaatccttcacatagtaaaagatgagagtcctgccaaagcagaattttttcagcatttgattgaagaccggacagaggctgcattttcttactatgaatttttgcttcatgttcagcagcagatttgtaagtgaagtagaataaaattgaataagaaaaagatctataacctaggtaaagcataatctgtcagagaagcgcgtgagaaatttgaaatgaaggcatttgttaatacaagatgcaacgcacagcactctgtctgaggctttggtaaaaagtaaaggggaagaaagaacttgacagatctttttcaactcaaattaatggtaacgatgatgctgtttcaccaagtatattttgaattggtttctacacatttccagtagtatggcagtacagtgctctgttcattgcaagctggcaaatttatgtagctatgtggaatgatatgtcataatgtaaaattagataaattcttttttcttataattaatataacatttctggacttgaactctggcaagagatgccaaaaggcattggtaccgtgttatttgtttatatgaattactttttaacaaggaatgtttcttattcattaaatgaattcaacattttctctgtaaaaacaatagagtttcagtacatgaactatagaaaaaaatctatatataatgtacataaatgttacatttgtaaagaaaatgtaaaaatgtaactatagcatatgaattgcttaaactgtgctgcattgttggatgacaactctttttgtcacagttagagaatgaggttgactaatgcatattatgaattgagtccacaaaggaacacaaaactctttgtaattctgttaaatcttttatgtagatttatttatgatcagcctactaattaaaactatttcgcttgacagtaaaaaaaaaaaaaaaaaaaaa

SEQ ID NO: 390 - DNA, 2375 bp, Homo sapiens
  misc_feature (9)..(9): n equals a,t,g, or c
  misc_feature (920)..(920): n equals a,t,g, or c
cggcagcgnaccaagatggcggcgccctgtgagggacaagcgtttgccgtagggttgaaaagaattggggtgcagtagttcgctccccagaagggaccccccagaaaatccggcagctgatagatgaggggattgccccggaagagggaggcgtggacgcgaaggacacgtctgccacatcccagtcagttaatggatcaccccaagcggaacaaccttcattggaatctacaagcaaagaagccttctttagcagagtggaaacattttcttctttgaaatgggcaggtaagccctttgagctgtctccactcgtctgtgcaaaatatggctgggtcacagtggaatgtgatatgctcaagtgctctagctgtcaagcttttctctgtgccagtttacaaccagcttttgactttgacagatataagcaacgatgtgctgagctgaagaaagccttgtgtactgcccatgagaagttctgtttctggccagacagcccatccccagaccgatttgggatgttgcccctggatgagcctgctattcttgttagtgaattcctagatcgttttcaaagcctttgtcacttggacctccagcttccttccctaaggccggaggacttgaaaactatgtgcttgacagaagacaagatcagtcttctcctacacttgcttgaagatgaacttgatcaccgaactgatgagagaaaaactacaatcaaattaggctcagacatccaagtccacgtcactgcctgtattctctctgtgtgtggctgggcgtgtagttcctctttggaatccatgcagctctccctgatarcatgttcgcaatgtatgargaargtggggctctggggcttccagcagattgaatcgtccatgactgacctggatgcatctttgcctgaccagctncccaatcccaggccttgaggggcgaccagagcgcttacctctggtgcctgaatctcctcggaggatgatgacccggagccaggatgccactttctccccaggctcagagcaggctgaaaagagccctggtcccattgtctcwcgaactcggagctgggactcttccagtcctgttgaccgtcctgagccagagctgctagccccaccaccagaactcgcccagtgacccgaagcatgggaacaggagacacccctggcctggaggtaccatctagccctctgcggaaagcaagcragctcgcctctgctcctccagcagttcggacacatcttcccgaagcttctttgatcccacctctcagcatagagactggtgcccttgggtgaatatcacacttggcaaagaaagcagggagaatggtggaactgaaccagatgccagcgccccagcagagccaggctggaaagcagtgctgaccatcctcttggcgcacaaacagtctagccagccagctgaaacggactccatgagtctctctgagaaatcaaggaaagtattccgaatatttcggcagtgggaatctctgtgctcatgctgaagatactccagcgccttcctggagatagctggaatgagagtgactttttgaaaaattaaggctgagttcctttcggtcagctgacactaagtttttcctgttctgggttaatcataaggagccccctgccatagcaaaggcagtgagtgtcaactatctgcatctggctgagagagacccgtttcctttcagggatgtggacagggtaagggcagcaagcatggttctgttaaaggagtgtggggttaacagactagaaggaagactaaggacctgaccacccatttcagcatcttcaatgtggagcagtgttctgaggactcttctatcctaggactatgacagtgtgtattaataaaatatttgctaagattctcattgttggagaactgttttcccccttgccctgtgggccggagaaacttcagtggaacattcaacttttgattttcagattggctgcaaagcctwaaatttgkgattccagtcaaggaggtataatctttcctwaaccaaaagcaagatgattttcattatgccaccaggaaatttcctggtgtgttatagtgaatggtcaactgataattttctccttgctttgataataacagaataaaacaacgtaatggggaggaaggcacttcagaagaracccctytccatgtgccattgaatgcatgagtcccccarttgggcttccccaagactcgttgcttttgggggatcatcagtttttgtggtagagaaggtggaccctgaactgcccactgataaagtaaccatgacctagcaaaggctagaaagtgattattctctgatatggccatgtttttcgtcactgagattgtttctcgtg

SEQ ID NO: 391 - DNA, 867 bp, Homo sapiens
  misc_feature (29)..(29): n equals a,t,g, or c
  misc_feature (40)..(40): n equals a,t,g, or c
  misc_feature (49)..(49): n equals a,t,g, or c
ccgcctcgttgtgggtggagtgcggcagncagaggctccnccagcaagntgaggcctgaggtcakctgatacctgcaccttctccccaagccagcgtggaccctggtgtctatggtgaagctgggccctcccaccctgagccttcctagacccttggactctcagatgcagggcccttggctctggcctctcacccccaaggctgtctctggccctgccgagcctatgggagtcccgggacagagtgcccactcccctctacttgctgctctgggcctccccacctttcctggggtctccacattcccactagtgggtcttatgtgtgtctgtgtcttctccttaaacactcgccctggagtctgttctcacacctgtgcgcaggtttgcacactcaagttctcatgggcaggctcaggtctgtcccgctgccctgggcacgaggtctcctgaggacctgggcctgttctgctcctaggagacctgagcccgttaccgcgtgactcccaccatccagctcgcgctcctcgtggattcagccatgcatggactggggtgttccctggcccatggtcacctgtgcccctcgtgtctcctcacatgggtgtctgtggttctctcctgtgtaaatgtcacgccccamccctgtttcatgtgggcactaacacgtgtgcgttcctggcgggcacactcaggaccgtgcctcacagggcccactccctgcctatgcctccctcttggggggccgaggagggcggctgctctgtcatgagaatgtacggcccgtggatgattaacgggcctttttcacttagaagctgcacattatggagcattaaacacttttgtcataraaaaaaaaaaaaa

SEQ ID NO: 392 - DNA, 1501 bp, Homo sapiens
  misc_feature (7)..(7): n equals a,t,g, or c
ggtcagntgagagacagggctacgtttcagggagggaaacagattcagcagcggcagcagctggagaaggtcgtggagcagcaccttgcctgcagggtgttctgagaatcagccatgtcatccctgtacccatctctagaggacctaaaagtggaccaagccattcaggcccaggtcagagcctcacccaagatgccagccctgccagtccaggcaacagccatttccccaccaccagttttgtacccaaacttggcagaactggaaaattatatgggtctttccctctccagccaagaagtccaggagagcctgcttcagattccagagggtgacagtacagcggtctcgggccccgggcccggccagatggtggcaccggtaaccgggtacagcctgggcgtgcggcgagctgagatcaagcccggggtgcgcgagatccacctgtgcaaggacgagcgcggcaagaccgggctgaggctgcggaaggtcgaccaggggctctttgtgcagttggtccaggccaacacccctgcatcccttgtggggctgcgctttggggaccagctcctgcagattgacgggcgtgactgtgctgggtggagctcgcacaaagcccatcaggtggtgaagaaggcatcaggcgataagattgtcgtggtggttcgggacaggccgttccagcggactgtcaccatgcacaaggacagcatgggccacgtcggcttcgtgatcaagaaggggaagattgtctctctggtcaaagggagttctgcggccygcaacgggctcctcaccaaccactacgtgtgtgaggtrgacgggcagaatgttatcgggctgaaggacaaaaagatcatggagattctggccacggctgggaacgttgtcaccctgaccatcatccccagtgtgatctacgagcacatggtcaaaaagttgcctccagtcctgctccaccacaccatggaccactccatcccagatgcctgaagccactggagggcagggcaggcagggggggcttcccgccctcctgcagcaaagggcaaccaccctyggatgatgggttgcagccggcctgctgcttaaggtgggggctgccatgaggggggcgtgtccaggagggtgaccatgggatggcttatacacacaggcctccttggagcctcagactccaagctaggctgaggctcaggcagggcccacaggcagccgattctcttgtgctgatttaaatgctggacacggaggcaggctgtttaaacgctgcttaaagtcgcaactgggcccctttcaagaaattttgctctaccaggaaaacagttacacattttaagagaacagagctacgttctttgtgagagctttttccttgscttgacttgctctttgtcacagactgcataagttgtcagccttgactatcttttgaataaagatttgattttaaacaaaaaaaaaaaaaaaaaaaaaaaaaaaaaaaaaaaaaaaaaaaaaa

SEQ ID NO: 393 - DNA, 1048 bp, Homo sapiens
  misc_feature (388)..(388): n equals a,t,g, or c
ggacccacgcgtccgcccacgcgtccgctatatcataaaagttatttcccaccccattttatcttgacaaccgtgtttgcatttctgtaaaacttctacaacttctggtgtcagaactgtccagaagatggtactgttaactgttatttcctttgatgttttgattttgaagtttagctctcatgcaaatgtttcaggcrtacatacataggcagaaagcaatttttaggtgatttgtctgtttcttggatgaaatataaagcaagctttaatgttctgacttgttcatttgaaatacaaaaaagtaagtgaattttaatgttttgcattaactaaagaaatctgaagattaatgttgaggaaattgtatggacatgcctttgtgaanccaggaagtattttaagttaaaaatgaaaaagcttttaattgctttgtgtgtgttttaatggagccccattttagaattattttttccgtctccctttaccaacaaaaggaacaatgccaccgtgaatggaatagtttggggaaagctttgccaaacacaaccctgatttcagagcaggaacatggtttggatagatcttcagttccgcttgaattattctgttactgcgctgtcattttcagaagatttccattcctttgcagatgctgttgggagttcgggattatgttcatttcttctgttttaatggcattcagtactaattttataagtgcatcttgtgtgaatctcaataaattcagttttgtaatcttttttaaaaaggtcactgaatttattttaatatttactattgtatttggtagagtgaatttcccactgtataataagtatttatttgtaattcacaagtgatagagctatcttaatttgaattattgctttggtcttaatggtggcaaaatgkttaattttgtctttggaaaaaataggctcggcttgattatagaccatttaawatttctcagcaaatgaaggtatttgcattttacaagtgktttgaatgtcacaccaaaatattttttcacaatctgggaagc

SEQ ID NO: 394 - DNA, 969 bp, Homo sapiens
  misc_feature (845)..(845): n equals a,t,g, or c
  misc_feature (871)..(871): n equals a,t,g, or c
  misc_feature (897)..(897): n equals a,t,g, or c
  misc_feature (899)..(899): n equals a,t,g, or c
aaattgtctatgaacacaggaaatgaggggttacctacttctggttcatttacactagatgatgatgtttttgcagaaactgaagaaccatctagtcctactggtgtcttagttaacagcaatttacctattgctagtatttcagattataggttactgtgtgatattaacaagtatgtctgcaataagattagtcttctacctaatgatgaggacagtttgcccccacttctggttgcatctggagaaaagggatcagtgcctgtagtagaagaacatccatctcatgagcagatcattttgcttcttgaaggtgaaggctttcatcctgttacatttgtcctaaatgctaatctactcgtgaatgtcaaattcatattttattcctcagacaaatatggtacttttcaaccaatggattgcaggctgggacagggcagaattattatctattgttatgtttgccaaatgaagatactattcctaaggacatcttcagactatttatcaccatatataaggatgctctaaaaggaaaatacatagaaaacttggacaatattacctttactgagagttttctcagtagcaaggatcacggaggattcctgtttattacacctacttttcagaaacttgatgatctctcattaccaagtaatccttttctttgtggaattcttatccagaagcttgagattccctgggcaaaggtttttcctatgcgtttaatgttgagattgggtgcagaatataaagcatatcctgctcctctaacaagcatcagaaggcgaaaacctctttttggagaaataggacacactattatgaacttacttgttganctycgaaattaccagtataccttgcnttaatataaatcaactgttgaatccntntggaaatgggaaaaaaccgccttaaaattccccggaaaagttcgggatttttgaaattctaatcccccca

SEQ ID NO: 395 - DNA, 2567 bp, Homo sapiens
  misc_feature (16)..(16): n equals a,t,g, or c
  misc_feature (55)..(55): n equals a,t,g, or c
  misc_feature (74)..(74): n equals a,t,g, or c
ggagaaggcggcggtnggcggcgtggacggcccgcagcgggacggccgcggcganggcggacagccgggcgcancggcggyacaggggcccccgccggcgcctcagctcacagagacgctgggcttctacgagagcgaccggcggcgggagaggcgscgggccgcacagagctttcattgttgaggttcctcagtgctgaactaacaagagggtacttccttgaacataatgaggccaagtatacagaaagaagagaaagagtatacacttgtttgcgaataccaagagaattggaaaagctgatggtttttggaatctttctgtgcctggatgcgtttttgtatgtgttcaccctgcttcctttaagagttttcctggcactattcaggctcctcactttgccttgctatggcttaagggacagacgtttgcttcagcctgcccaggtgtgtgacattttgaagggtgtcattttggtaatctgctattttatgatgcactatgttgactactccatgatgtaccacctgataagggggcagtccgtcatcaagctctacatcatctacaacatgctggaggtagctgatcgtctgttttcatcttttggacaagacatattagatgctctctattggacagcaacagagcctaaagaaagaaaaagagcccacattggggtgattcctcactttttcatggctgttctctatgtctttttgcatgcaattcttataatgsttcaagcaacaactctcaatgtagcttttaactcacacaacaagtctttgtctactatcatgatgtctaataatyttgttgaaattaaaggaagtgttttcaagaagtttgaaaagaacaatctctttcaaatgtcaaatagcgatattaaggaacgattcacaaaytatgtgctyttactgatagtgtgtctaagaaacatggaacagttttcttggaatccasatcatctctgggtgttgtttccagatgtctgtatggtaattgcatcagaaattgccgtggatattgtaaaacatgcctttattactaaattcaatgacattactgcagatgtctacagtgaatatagagccagtcttgcttttgaccttgttagcagccgacagaaaaatgcatacactgattacagtgactctgtagcacggaggatgggctttattcctctcccactagctgttttactcatcagagttgtaacaagctcaattaaagtgcaaggaatcctgtcttatgcctgtgtcatactcttctattttgggttgatatccctgaaagtacttaatagcatcgtgctgttggggaaatcgtgccagtatgtgaaggaagccaaaatggaagagaagctgtcgaatcctcccgcaacctgcactccaggcaagccgtccagtaaatcacagaacaaatgtaaaccctctcaaggcctttccacagaagaaaacctgtctgcctccatcaccaaacaacctattcatcaaaaggaaaatatcataccattacttgtgacaagcaattctgatcagtttttgacaactccagatggtgacgagaaggacataacgcaggacaattctgaattaaaacacagatcctcaaagaaagatttgttagagatagacaggttcacaatttgtggaaaccgaattgactgaatctgtggcttcatgcgctgaagaagctgggtcctggggcaacaagtgctgtgttgccaggacaaatagatgctaaacatggcacttaaatatttatttaaaaacttaaattattattggcaagcaaatcttagtatctttcttccagtaatatggcctggctgagggtcagaccacaggacaggagcgacctccggccttgactgtctgggaagcttgatggattataaaacttcctcctgcctggccaagcagcagcatcatttccaggacccaacaaaggcaacatcaaaatctgttttgctttgtcagtctgggcttccagaatgttgaatttgcctcaaggcctcttcagtataaggaaatacctggaaaactgtgaaacttttaccacgacgtaatctttccagtctcatactattttcacaaacagttttcaaacgttacttcatctgccaaagcattaaaaaaattaaacataagtcaagataaatgttcttaccaccagaataacccttaaagatgtatcttaattaatcagaataaaaggctaccttaaataagacatgatgaatagtagcattttgtagggttaaaaaaaaaatgctaaactagtttatttattaaaaaaataattaatgaaggctatgcattactgggaaaaatccttcataatttttcagtttactctttaaagcaaaatgtgagctgtatgtcatttaattggtggataaaacaaatttccttacaaaagggcactttttacaccaaggaagcagagcagtgttaactttaaggtatacttaactgattttgctttaaaactaattacytccmtaaattattacmgctaaagggttycgrtgttggarccgggcyggaaaattgtccat

SEQ ID NO: 396 - DNA, 1268 bp, Homo sapiens
  misc_feature (1040)..(1040): n equals a,t,g, or c
  misc_feature (1213)..(1213): n equals a,t,g, or c
  misc_feature (1268)..(1268): n equals a,t,g, or c
tggaagagtatgttccacgggagagaagtgaagccagtgggtccagacctggaactctcagaggctgagaatggtgtggaggagaaaaagaaagcctgcaggtcgccaacagcccaatcccctaccccatctgtggaggcggactccccagaccagaagaaaatcattagcctatggtcaaaatccagttttgatggtgcctctttagcaagtgataagaacgactgtaaaacagaaagcaaaaatgaccctaagactgaaagaaaaaagtcttcatcttccagccagtacaaggccaatatgcactttcacaagttgkttcttagtgtcccaacggaggaaccactgaagcaaagctttacctgtgctctacagaaagaaatactataccaaggaaagctstttgtatcagaaaactggatttgttttcattccaaagtctttggaaaagacacaaagatctctattccagctttctcggtaaccctaataaagaaaaccaaaactgctcttctagtgccaaacgccctgatcatagcaacagtcacagacaggtacatatttgtctccttactctccagagattcaacttacaaactactaaaatctgtgtgtggacacttagaaaatacaagtgttggtaacagtcccaatccatcttctgctgaaaacagtttccgagcagaccgcccttcatctctgcctctggatttcaatgatgaattctcagatctggatggagtggttcaacaaagaaggcaagacatggaaggatatagcagttctggttctcaaactcctgaatctgagaactctcgagatttccatgcgacagaatcccaaacagttctgaatgtctccaagggagaagcaaagccaactcgggcagatgcccatgtgaacagagtacctgaaggaaaagccaagagtctccctgtacagggtctgtcagaaactgttggaatcttacataaagtcaagtctcagaaatgtccgatgcttcaccatattcttatattctatgcaattgttgtctgtgncactaatcatctcgaccttctacatgagatacagaattaatactctggaggagcagctggggttactaacctccattgtggacacccataatactggaacaggcagcaccatctggcctgaggtcacaagtacaattccaatgtgggaggttctctgttcagggctttacagntaacatagtgaaatttagaaaaggttacaaaattaactttacaggagttgctttn

SEQ ID NO: 397 - DNA, 963 bp, Homo sapiens
gcgggagcccaccgtctccagcttctatgtgaagcgggcggagctgtgggacacctggaagttgctcacctgaaggagcacaggagggttttccaggccatgtggctcagcttcctcaagcacaagctgcccctcagcctytacaagaaggtgctgctgattgtgcatgacgccatcctgccgcagctggcgcagcccacgctcatgatcgacttcctcacccgcgcctgcgacctcgggggggccctcagcctcttggccttgaacgggctgttcatcttgattcacaaacacaacctggagtaccctgacttctaccggaagctctacggcctcttggacccctctgtctttcacgtcaagtaccgcgcccgcttcttccacctggctgacctcttcctgtcctcctcccacctccccgcctacctggtggccgccttcgccaagcggctggcccgcctggccctgacggctccccctgaggccctgctcatggtcctgcctttcatctgtaacctgctgcgccggcaccctgcctgccgggtcctcgtgcaccgtccacacggccctgagttggacgccgacccctacgaccctggagaggaggacccagcccagagccgggccttggagagctccctgtgggagcttcaggccctycagcgccactaccaccctgaggtgtccaaagccgccagcgtcatcaaccaggccctgtccatgcctgaggtcagcatcgcgccactgctggagctcacggcctacgagatctttgagcgggacctgaagaagaaggggcccgagccggtgccactggagtttatcccagcccagggcctgctgggacggccgggtgaactctgtgcccagcacttcacgctcagctgaccctggcccacctgtgaataaatctcagctgaccccagcccacctgtgaataaatgtttttgcaggaaaaaaaaa

SEQ ID NO: 398 - DNA, 833 bp, Homo sapiens
  misc_feature (65)..(65): n equals a,t,g, or c
  misc_feature (798)..(798): n equals a,t,g, or c
  misc_feature (803)..(803): n equals a,t,g, or c
  misc_feature (809)..(809): n equals a,t,g, or c
  misc_feature (812)..(812): n equals a,t,g, or c
tcgcagagattacaccactgcaacgagactcgggcccagacgagatctgcctgggcgacacagtnagactctgtctcaaaataaataaataagtaaatagaacctcctgagctaccctggcttataaggattcagattactttaggaaattaggcattagcactaggaggggggaagatggctggcaaaacttctagctagcaacctatgtctagcacatgggtaactaaccatagcgagatcctgaacacatatcctctaggtgcaggtggagggaacgatgtccaatacctgaagcagaatctcacatggacggaacgtctgtatttccctctcctgcacgaatcactcatcattcttggagggcttctctgcattcctccttttcttctctcccctcccctgccttttgtcttttctaaagagtctgaactccgatttccatgctctcctgctacattaataagcaaaacctgcttgtgtgtacggttctttactggaaacatgactttttgtttctgtattggttttactgtcatccagttttctagtttaatatctagcaaaactaaatctgaatgtactcgctttttccgttaagtatgccaagcacctcggttgaaaggcttgactcaaaccagaagtcttgctggaattcgtctctgaacacttgaaaaacagaaaccctgagccgcaacaaacatgcctctgtgtgtcgggattgcctttgtctctgcttccatgtggcttttccttttgtagctatgcttagtgacataatcttccctcttcaagcantctgngttggnccnttcccgttcccccccccgtgc

SEQ ID NO: 399 - DNA, 714 bp, Homo sapiens
  misc_feature (188)..(188): n equals a,t,g, or c
  misc_feature (639)..(639): n equals a,t,g, or c
  misc_feature (661)..(661): n equals a,t,g, or c
  misc_feature (690)..(690): n equals a,t,g, or c
  misc_feature (700)..(700): n equals a,t,g, or c
gctgcgagaagcgacagaagggtacggctgcgagaagacgacagaagggggagtcccactccttcgacctctgctgcagcccgtgccgccgccgcctcctgggaagagaggaagcgggagaggagcccacgtcgcctgtcacccaatatctccagccgcgcagtcccgtaagagtgtaagatgttcgnctgcgccaagctcgcctgcaccccctctctgatccgagctggatccagagttgcatacagaccaatttctgcatcagtgttatctcgaccagaggctagtaggactggagagggctctacggtatttaatggggcccagaatggtgtgtctcagctaatccaaagggagtttcagaccagtgcaatcagcagagacattgatactgctgccaaatttattggtgcaggtgctgcaacagtaggagtggctggttctggtgctggtattggaacagtctttggcagccttatcattggttatgccagggtaatcatttctatccctaaataagttaagagcatgcttgcagtagttgggaaacttaggctactgaaataataggctactttgcattaagtgcttactctgtgtcttgcattatatttaaaggggctttgtatggcattatcntcacttaattctcataacaccntttgggggtgttatggaggattaacctcnctggaagggnccaggaggacacag

SEQ ID NO: 400 - DNA, 471 bp, Homo sapiens
  misc_feature (370)..(370): n equals a,t,g, or c
  misc_feature (403)..(403): n equals a,t,g, or c
  misc_feature (413)..(413): n equals a,t,g, or c
  misc_feature (415)..(415): n equals a,t,g, or c
aggcacagatgcatcactacaatgctggggttaaacaaagtgctcttcttggacttaaagaccttttgtctcaatacccatttataattgatgcacacctttcaaacatattaagtgaagtgactgctgtgtttacagrtaaagatgctaatgtacgattagcagcagttcaacttcttcaattcctggcccccaaaatacgagctgaacaaatttctccatkttttcctttggtatctggtggaggactgagtggtgtggatgaaaggctggcatctactgaaaacctgaaaggatttattgagataataattccattgctaattgaatgctgggttgaagctgtacctccacaactagctactcctgntgggaatggtatagaacgagaacctctacaggntatgcagcangntcttaatattatttcccttctgtggaaactctctaacacaggatgaaacccataaa

SEQ ID NO: 401 - DNA, 1677 bp, Homo sapiens
aattcggcagaggaggaaccgagttgcgggagtgcggtctgtgccgttccgccaggagtttgccgactgcagacgtcctgcgaaaccgtggatcaatcttcctgtcctacaactgacaaaggatcccctaaagacccctggaaggctggaccatggcacaagaactgccttcatccatcaccgggagcaagtgtgggaagagatgcatcaacatttggcgtgatgtgggcctttttggggtgctaaatgaaattgcaaactcagaagaagaggtgtttgagtgggtgaagacggcatccggctgggccctggcactctgtcgatgggcctcttccctccatgggtccctgttcccccatctgtctctcaggagcgagatctgatcgctgaatttgcccaagtcacaaattggtccagctgctgcttgcgtgtctttgcatggcacccccacaccaacaagtttgcagtggccctgctagatgactcagtccgtgtgtataatgccagcagcaccatagtcccctccctgaagcaccggctgcagcgaaatgtggcgtctctggcctggaagccccttagtgcctctgtcttggctgtggcctgccagagctgcattcttatctggaccctggaccctacctccttgtctacccgaccctcttctggctgtgcccaagtgctgtctcaccctgggcatacacctgttaccagcttggcctgggcccccagtggggggcggctgctctcagcttcacccgtggatgctgctatccgggtatgggatgtctcaacagagacctgtgtcccccttccctggtttcgaggaggtggggtgaccaacctgctctggtccccagacggcagcaaaatcctggctaccactccttcagctgtctttcgagtctgggaggcccagatgtggacttgtgagaggtggcctactctatcagggcgctgtcagactggctgctggagcccagatggcagccgactgctgttcactgtattgggagagccactgatttactccctgtcttttccagaacgttgtggtgagggaaaggggtgcgttggaggtgcaaagtcagcaacgattgtggcagatctgtctgagacaacaatacagacaccagatggtgaggagaggcttgggggagaggctcactccatggtctgggaccccagtggggaacgtctggctgtgcttatgaaaggaaagccaagggtacaggatggtaaaccagtcatcctcctttttcgcactcgaaacagccctgtgtttgagctccttccctgtggcattatccagggggagccaggagcccagccccagctcatcactttccatccttccttcaacaaaggggccctgctcagtgtgggctggtccacaggccgaattgcccacatcccgctgtactttgtcaatgcccagtttccacgttttagcccagtgcttgggcgggcccaggaaccccctgctgggggtggaggctctattcatgacctgcccctctttactgagacatccccaacctctgccccttgggaccctctcccagggccaccacctgttctgccccactccccacattcccacctctaagaataaataagttttccttttgttttccaaaaaaaaaaaaaaaaaaaaaaaaaaaaaaaaaaaaaaaaaaa

SEQ ID NO: 402 - DNA, 2120 bp, Homo sapiens
ttttttttttttttttttttttaggacaatggtatatttatttacaatccgaccaaaaaaaggcatacaggcatttttttaattaaaaataataatgataatgatttaaaaagtcagaaaaattgatgatctttgaaccctttatgaggtgtccgtttcccattccccctaaaaagagaatctcttagggaaaaaaaaaaatccaagatttgaatgaacaaaagactccaatatcgctctctactgcttgggttcccttttctccaacttgatgcttggtggatgccgcttggcgctgcagtcactgtgaggcaagattgagaaattcactggtttgatgggtgaggctggtagagccactgggagaatgtggggcagtgaggggagggacatcttcctagcatcaccagcatcctgagctttgtcttgtgttgggagtcccacaagggctggtgcaagggttagcagctgctacttgaaccctaatccctgggtggatgtggtctcttgtaacttaagagcaaatgtttgtgatgacatgcacgggtgggcagaggttgaaaagaacaggggtctacggaggagccaggccagccacgtgagacccttctttctaagttggcttcttgtccattcctggggattggggaaagaacgacagaacttaccttccatcttccttctcacaagcagtgttttgggtgtccccaaaaggaggaggcaagaactcaggtgtggggtggaggggatggggctggctaaagaagtgagtatgaccccagaggccagagagggcagggagagaatgcctggccacttacaggaggggatctgtaatctctgggcctccctgttctgcctgaagttggcagggcccactgctagcacaccttggagagcggtacctcctgaggaaagggctggggagtgatcctgaggggtaaggaccctagcggccttggccatcccttcccagacacagacaagtggatgcttggcttgggaaatacttggccccaggtccagggtttcttggcacaaaaacagttcactgcaagtctcttctcttcttccttgtggtccagcaaactccggctgctctgaacaggggcaattcctgctgtctggggaacctggcccccagtacttccaggggattttcttgtagcaactaagacttgggtttgctcctggtgaaaagatgaccccgaggccctggctggaaaccctgccttgggcagccctggaggaggctggggagaagagggaaagagaggtctggcagaggctggctggcactgagggtgctgtccgagctggagctgtgctttgtcgtggcctcagtggtgaggatgggcagggagaggctcggaaacctcactgaagctctggcgtgtcctcttccagttagtcatagggtggccaacagccctgaggaactgaggtggagacagtgaccaaaacccttatctcggtggatttatccatcctggatccatttgttaaaacaaagaaggaaaaaaaaatccaaaccagaaatacacctgaataaacaggtcagagagttcctgttggagggaactttcttagcactgaagaaaaagcaacccacaaaaaaactcatcccccacagaactggaataagatgacgaaaaacgcaagattatctacaggccctcccgccccccacgcagctgagaaggtactggttgtgctttcattttctgcgtttcctcgcccccctcactcctccgtccagaggcagccttacttctccaaagaggacgctctgagtctgcgttcccctggcagcaagtcctgaggcaagatttggggacaagcagctcctgtgggaagtggctccaggaagccccaggagagacgcggggagtgagcccagcgggaaggacaggcagcgaggaccgctccaaaggtggtgcctcagcagcaattcttttctgctcggctgtcctcgagcagccccgcccgccccgggccctccggctccccagacggcacttagcatcccgctctcttccttcccctctgtgccaggccggtcgcccctccagaccctcgcggtctctacttgcccgtcgaccaccggacgcgtgggtcga

SEQ ID NO: 403 - DNA, 654 bp, Homo sapiens
  misc_feature (578)..(578): n equals a,t,g, or c
ggcacgagctggcactgcggccgctccgcagcagagaagccgggagcgggcgaggcggcggcggcascagcgatggcaggaatagagttggagcggtgccagcagcaggcgaacgaggtgacggaaattatgcgtaacaacttcggcaaggtcctggagcgtggtgtgaagctggccgaactgcagcagcgttcagaccaactcctggatatgagctcaaccttcaacaagactacacagaacctggcccagaagaagtgctgggagaacatccgttaccggatctgcgtggggctggtggtggttggtgtcctgctcatcatcctgattgtgctgctggtcgtctttctccctcagagcagtgacagcagtagtgccccacggacccaggatgcaggcattgcctcagggcctgggaactgacccagctggtcctgaaggagaagccaaatggctgcactggccgattctggtctccagaggaccttggtgtttgctctcccttgacccaccccagtgagtgccaaagggcagccccaacatgtgcacccctgcatttcctgtcatgccacagactngcccttgagggcagcctgctgtactggccatgctggccagccccacctggagctcagtaaaaactgctgtttgatt

SEQ ID NO: 404 - DNA, 1573 bp, Homo sapiens
tcgagtttttttttttttttttttgtccttttagtaagaaaaactttatcaaaaatttaaatatataaaataaggccagagstgcactggaggccacttcccagtggtgcactgctgcgctgggtgtccctatgcagctagatacatgttaactgcatagagtaccataaaggagcccactggtgagcttcactgtcacctggccctgctggctggggcttccattgtctactgggtctgtccacaccccagattgccttgtggtcctttcccctggccaagaagataacagttttttaaaaatccccttctgatatggatgtgagcaagcagtggggttcagtttgggaccaagyagtgccatttacaaagagcatgggaagcacctccttaggaggggagcagggccatctccacgttgtcaggggccgcgccgttgcctgccagaccctgggcccacttgtgcaggcggctgtagagtgggaggccctggttctcacggtacaagtagacgccggtgatggcattccactgtggccgtggctgcgtgccttccactgggaagttggcaatcagttcctcatcatccttgttgagcgccacaaagccaaagaagcggcgcacattgttggcagcgagcacccgagagtgcacctcggccgtgcgctggaacagctggtcctcattggcgcggtactgcgcccagtaggcctcctggcggtagctgagtggtgagcagtaatgcttgaggcacttggtcaggaacaccaggatggccaccacgccgatgagcagccatccaaagagctgggactcatacctgactgcggctgacctcctcccggaagtctgacaggttgtcagggttctccttgcaggggaacctggccaggatttcagtggcgtgggctgatgggaagtgctcttccctggccgtgagtgaggaagggtccacgaactcactgagagcacagacataagcctcaccacgcagcagggagatgacagaccaggtgacaggggccacagccgcacgtcccaggatggagcttagaaggaggaaggttggggccggcsgarcagttcttggtcctccggtgctggcactcggccacgaggttccaggtgtggttgttgaggatgatgccaatgatgaagagcaccagggcgggcacgccgatggccgccagcccktacaggtarttccgggccggcgarcmggggcagtggaaggccaccacagagaacagctcctggctgcccaccgtgcccagtgccaccaggccgttgaaaatcatcacatccttgctcttgaagaaaagtgacaggaagcggaagttctctgcgatcarggctgccatggcgataktcktggcggggtggattgcaggagaggaggcaggaggagacgggattgatggttgctggtggtactaggaaggggcacaggctgggaggcgctggacggcagggtgtggttgtgctattttatccccagctgtggttggcctggtgtttccttgccgtgtccatccacgggtgtcccgaagaacctcgtcttccgcagccgtga

SEQ ID NO: 405 - DNA, 813 bp, Homo sapiens
  misc_feature (16)..(16): n equals a,t,g, or c
gaatccccccgggctncaaggaatttcggcaacgagggactacagtgaggacgaaatctaccgcttcaacagccccctggacaagaccaacagccttatctggaccacgaggaccacaaggaccaccaaagactcagcctttcacatcatgtcccacgagagcccaggcatcgagtggctctgtctggagaatgccccatgctatgacaatgttccccaaggcatctttgcccctgaattcttcttcaaggtgttggtgagcaatagaggagtggacacgagcacctactgcaactaccagctcaccttcctgctgcacatccacgggctgccactcagtcccaagcgggcccttttcatcatcatggtgtcagctagcgtgtttgtgggcctggtgatcttctacatcgccttctgcctcctgtggcccctcgtggtgaagggctgcacgatgatccggtggaagataaacaacctcattgcctcagaatcctactacacctacgcctccatttccggaatctcgagcatgccatctctgagacattccaggatgggctccatgttcagctccaggatgacagaggacagggctgaacccaaggaagccgtggagagacagttgatgacctgagtgtcccacctgccccagcccccagttactgtcacgcctctcttatgaggcccatcttgaagatgcaacctgtcacccagcccaggcctctctttctgttttgcttgatgtttacttctcgttcagactcaaataaagccttttttcaggaccaaaaaaaaaaaaaaaaaaaactcgag

SEQ ID NO: 406 - DNA, 1348 bp, Homo sapiens
  misc_feature (1251)..(1251): n equals a,t,g, or c
  misc_feature (1306)..(1306): n equals a,t,g, or c
  misc_feature (1313)..(1313): n equals a,t,g, or c
  misc_feature (1316)..(1316): n equals a,t,g, or c
ggcctgttcaacccacccatgccccaggaacaacggcagctgcccacaataccacccgcacagctgcacctgcctccacggttcctgggcccacccttgcacctcagccatcgtcagtcaagactggaatttatcaggttctaaacggaagcagactctgtataaaagcagagatggggatacagctgattgttcaagacaaggagtcggttttttcacctcggagatacttcaacatcgaccccaacgcaacgcaagcctctgggaactgtggcacccgaaaatccaaccttctgttgaattttcagggcggatttgtgaatctcacatttaccaaggatgaagaatcatattatatcagtgaagtgggagcctatttgaccgtctcagatccagagacagtttaccaaggaatcaaacatgcggtggtgatgttccagacagcagtcgggcattccttcaagtgcgtgagtgaacagagcctccagttgtcagcccacctgcaggtgaaaacaaccgatgtccaacttcaagcctttgattttgaagatgaccactttggaaatgtggatgagtgctcgtctgactacacaattgtgcttcctgtgattggggccatcgtggttggtctctgccttatgggtatgggtgtctataaaatccgcctaaggtgtcaatcatctggataccagagaatctaattgttgcccggggggaatgaaaataatggaatttagagaactctttcatcccttccaggatggatgttgggaaattccctcagagtgtgggtccttcaaacaatgtaaaccaccatcttctattcaaatgaagtgagtcatgtgtgatttaagttcaggcagcacatcaatttctaaatactttttgtttattttatgaaagatatagtgagctgtttattttctagtttcctttagaatattttagccactcaaagtcaacatttgagatatgttgaattaacataatatatgtaaagtagaataagccttcaaattataaaccaagggtcaattgtaactaatactactgtgtgtgcattgaagattttattttacccttgatcttaacaaagcctttgctttttatcaaatggactttcagtgcttttactatctgtgttttatggtttcatgtaacatacatattcctggtgtagcacttaactccttttccactttaaaattggtttttggttttttggagacgggagtttcacctccttgtcancccaaggctgggaagtaccagtgggcaccgatcctcgggccttaagggcaacctncggcctnccngggttccaagtggaatctcccggcttcagctt

SEQ ID NO: 407 - DNA, 1596 bp, Homo sapiens
  misc_feature (130)..(130): n equals a,t,g, or c
  misc_feature (1567)..(1567): n equals a,t,g, or c
  misc_feature (1569)..(1569): n equals a,t,g, or c
  misc_feature (1592)..(1592): n equals a,t,g, or c
agcctggggccagactggtgctaacactgcaaactttgtccagagctctctccaacctgaaggcttgctgggggtgcaatgtcaccttcacacatgctgggccctttcagaaaagtgccagatcgtgtantggtgctatttttcatgctctggtacaatgtgtagcaccacgggggtctcagctttaccaaaatcaaaattccatttgtcagctaagtgcagaggcatttgttttttgctctcctyccacagaattgtcggccatttatttgcaggcyttttgcgggatttcttggctatttatttgcaggccttttttcccagccccaaattcttgggttggctctgtctgcttaaagagcctgtcttcacaaagctgcactcgggtgcctctgtgcgctgtcttagatcctactgccggcccttcaggactccgagccaggaaagaactctccaacctctggctcgagactctactttttttctcattcttttccttactctcctcctccttctacttccgactaattccatctcttttttttttttgttcctctccttttcctattcctccttcccaccatctctgagttgttgactttctcctataatccttctctattccctttctctttttgtccacctctcctttagtctctgtttctctgcccttcttattcctcttctgtcctttctcctctcctcaaatctctgatcatcttctcccgtacatccctgtattgatttttctgtcctctaaagggctcatggctgattcagacagcaagtccatgcactggactaatgacacaaatactttaggtcgccgtttcacctactcagcccagaaagtaaagctgagcgtgaggccctgacctggagcctgctccagcccgcctcccggagccagcctgcaccgttgccctggcagcgatgatgcatgtgctgtgggccctgccggcgcctgagtgcctctgcctgaacactgctcctaagcgagcccactcccagcactaccgcatggctctgaggacattttctttcaataaaggcagactctggccccaattattctgatagcaaacctcttcctcctcattgaagccatgccatcaccttggtttggagagagacatttttttcccattcataagctttctttttcccatttttatgtgaagccccctctgcttttcagctggtgattgctckggtgagactgaatggayttgctggtgaaatgaaatctcttctttcctgtcttggtcctgcctaaattcctacaaatatatttaagccaaggactcaggctaattcctaagttgatcacattartttgttactcctagagggaaaaagatcaattcccttgaagcatgtggagtacctcctgtgaacagctgacttgccaggggactccctacagaattctgtgatatacattttacttctgtgtatgtatggtatatatggtatgtataccatgttacacacgttacatgagtatgaatgactgtggttgggaaacccacacacacattcaagtccgtaaataatccttccccangnaaccgtgctttgggaatcatttntggt

SEQ ID NO: 408 - DNA, 1564 bp, Homo sapiens
  misc_feature (7)..(7): n equals a,t,g, or c
gcagtanccgacagtaccgtccgaattcccggtcgacccacgcgtccgggttttatgtgttagattcctctgaatataactttcacattttgtcctcttttgtgctaatagaacattctagtatgccagtagaaaaaaatatcactttagaaaggccttctaatgtaaatctcacatgccagttcmcaacatctggggatttgaatgcagtaaatgtgacttggaaaaaaratggtgaacaacttgagaataattatcttgtcagtgcaacaggaagcaccttgtatacccaatacaggttcaccatcattaatagcaaacaaatgggaagttattcttgtttctttcgagaggaaaaggaacaaaggggaacatttaatttcaaagtccctgaacttcatgggaaaaacaagccattgatctcttacgtaggggattctactgtcttgacatgtaaatgtcaaaattgttttcctttaaattggacctggtacagtagtaatgggagtgtaaaggttcctgttggtgttcaaatgaataaatatgtgatcaatggaacatatgctaacgaaacaaagctgaagataacacaacttttggaggaagatggggaatcttactggtgccgtgcactattccaattaggcgagagtgaagaacacattgagcttgtggtgctgagctatttggtgcccctcaaaccatttcttgtaatagtggctgaggtgattcttttagtggccaccattctgctttgtgaaaagtacacacaaaagaaaaagaagcactcagatgaggggaaagaatttgagcagattgaacagctgaaatcagatgatagcaatggtatagaaaataatgtccccaggcatagaaaaaatgagtctctgggccagtgaatacaaaacatcatgtcgagaatcattggaagatatacagagttcgtatttcagctttgtttatccttcctgttaagagcctctgagtttttagttttaaaaggatgaaaagcttatgcaacatgctcagcaggagcttcatcaacgatatatgtcagatctaaaggtatattttcattctgtaattatgttacataaaagcaatgtaaatcagaataaatatgttagaccagaataaaattaattatattctggtcttcaaaggacacacagaacagatatcagcagaatcacttaatacttcatagaacaaaaatcactcaaaacctgtttataaccaaagaattcatgaaaaagaaagcctttgccatttgtcttagaaagttattttttwaaaaaaaatcatacttactattagtatctatggaagtatatgtaacaatttttatgtaaaggtcatctttctgtgatagtgaaaaaatatgtctttactaagttgaaatgaatactttctgcctttgctaatgatagttattctacaatctccacaagaaaaatataccttttatccggaaatattggtttaaggcaaataaataaaactgtgcttgctctaaagctctgcactacaaaagcaaaaaaaaaaaaaaaaaaaaaaaaaaaaa

SEQ ID NO: 409 - DNA, 929 bp, Homo sapiens
  misc_feature (6)..(6): n equals a,t,g, or c
  misc_feature (17)..(17): n equals a,t,g, or c
  misc_feature (19)..(19): n equals a,t,g, or c
ttaagnttggccccttngngggatcttttggagcggcccccctttttttttttttttttttcattaaaaaatagtgctctttattataaattactgaaatgtttcttttctgaatataaatataaatatgtgcaaagtttgacttggattgggattttgttgagttcttcaagcatctcctaatagcctcaagggcctgagtaggggggaggagagaggactggaggtggaatctttataaaagacagagtgattgaggcagattgtaaacattattaaaaaacaagaaacaaacaaaaaaatagagaaaaaaaccaccccaacacacaactgccctgtccagcccaatacctgacacagaatactttgtgtttgtttagttgcccccccccacaaaaacaaaaacaaaaacaaaaacaaaaaactgttccaggtaattccatcgctgctacattcctgtaaattgtcactgatcagtgctatggcagagcgggagcacccggggtggcagcagtccagcctctccaatgacctccagcctcccccacccaggcaggagggagggctgtgcagggctcggggcagtgggacctggtggctctgctctgaccacgaggcgcctgactggccaatacttactgggctgacattcccagtgctcagctgggaggcatgggtttccgccccccctccccacttccctggctgtgggctggcttggtgccctccagtgagtccctcagcctctccacccatccaggctgagtatgtggctttcctatgctgggtccctctccatgggacagggagcatttaaggcgaatctcttagccagacatagtcaggaggcacagagtagaatcccctgtcttctctaccaggagcctgaggtgaaagatgtcccgtctcctccatcctcccgctccatc

SEQ ID NO: 410 - DNA, 2318 bp, Homo sapiens
gccagggtggcctttagcacagtatcagtaccatttatttgtctgccgcttttaaaaaatacccattggctatgcacttgaaaacaatttgagaagtttttttgaagtttttctcactaaaatatggggcaattgttagccttacatgttgtgtagacttactttaagtttgcacccttgaaatgtgtcatatcaatttctggattcataatagcaagattagcaaaggataaatgccgaaggtcacttcattctggacacagttggatcaatactgattaagtagaaaatccaagctttgcttgagaacttttgtaacgtggagagtaaaaagtatcggttttattctttgctgatgtcctttctgcttgaaataacagtcaccatacagctaaaggagaggagtttctttccttctaagtaggcagaaatggtatcattatgttgccgctctccaatctcccagagctcgctctctagagaatcaccttctttataaagcgtcagtcatgcttccagcaagaggcagcatcagtcatggctttataacagcttcatggtgcctcaaagactgttgaggttaatgagagcctagattagacagtttggctgtccttccctaaaacttgttttctcctattcactactccccaccgcacttaaaatctatgagtttttactttttactgggaatggaaagtgtggtgaagatcattcaacacttatgttgtcatttctcccattttctgaatttttttttaaatttccccccttttaaaattgttcgaaagcccacagttatggaaagaattactgtctagatggtctgcagaacgtgtttggggtgagtgggagtgaggggcaatgttactttttctccctgtagtttggagtccattatgagctgctgctttttcttctcatcttgtcatcttctggggatgtttgaaggctgagttccaacagaattcacaaagggaataaaacaggattgagattttgaggtgtgcacaaggtggtaagataaagggcatatgagcttcaaaactaatgctgttgcatacatgaagccttttgttttttgaggagctatttttgttattcttgtaacgctccaccttacatgccacgtctgtgtgagtcaacagggatcaggtttggtcaccacacatgtctgaagctgggcagcgtctgctctgtgttctgtgtggaatggagaaaaaaacgcctgccctgctgccttccatgttcataggcccagcccaagagagtgacacacagtgctggccctgagacatttccacaaagtggtcaactctgccttgcatcctaaaactttttgggcatctattttgaaaactataggagcctttggaaggcctcttatgtttggaggggaagggtgttgagattgtcaccatccttcaagctgagactcctggtgagcctttgccaccatgaaaaccacatagctgaccagggctgtgcttgaggtacagaggacacacatygtagacaggcctgtgtcatgtttccttacagtcgttttttacagagaaaaggggcattgttttttcactgctttctcaacagttcctgtgaataaatgaaacatttcggagctccctgagagcaagagccttcacttcttcttgcggtgccgggaccatgtgttggtgaagctggtgctgtgggggccactcactcgaatgacacctggaggcctgttcctcccttaccactcccttccccagcccgacttcttggcctcctgcccaaccagacacctcaaactctgtcagtgccctggcattctggcagagaatcctcaccagttctcaccaaccttccccccaggcaagggcagctgccagcatggtgctctgccaggacaggtttccctgaaggaagctgctcacactgagatgagcctctcagggcaggacctcttcccaagccctgcacacccacccctgcagcccttttggctccccttttccctgtgcctcagcactcctttcctggttgcagataacgaactaaggttgcctaaagggcagatctgccctctccatgtcttcgtcctggcaaacagggtcgtcttaaaattatgcgctaattctgtatgggagcactcaaaaggcattacttagagattgaaatttcaaactatctctagtttttcaatggaaatatatcagctagggaaaaaccatcaagctcattattattttttgatcttcagttgtatttttgtgaatattttaatacatctttttcaatttctgaaaaaaaaaaaaaaaaaaaaaaaaaaaatt

SEQ ID NO: 411 - DNA, 619 bp, Homo sapiens
  misc_feature (3)..(3): n equals a,t,g, or c
  misc_feature (72)..(72): n equals a,t,g, or c
  misc_feature (102)..(102): n equals a,t,g, or c
  misc_feature (121)..(121): n equals a,t,g, or c
ccnaaaagactcaaatatggtcctgagtaacagcaaccagctgctgctgaattcgttgactcaggcagacgntggcacctacacttgccgggccatcttgcntcgaatcggagtggctgancgggaggtgccgctctatgtgaacgggccccccatcatctccagtgaggcagtgcagtatgctgtgaggggtgacggtggcaaggtggagtgtttcattgggagcacaccacccccagaccgcatagcatgggcctggaaggagaacttcttggaggtggggaccctggaacgctatacagtggagaggaccaactcaggcagtggggtgctatccacgctcaccatcaacaatgtcatggaggccgactttcagactcactacaactgcaccgcctggaacagcttcgggccaggcacagccatcatccagctggaagagcgagaggtgttacctgtgggcatcatagctggggccaccatcggcgcgagcatcctgctcatcttcttcttcatcgccttggtattcttcctctaccggcgccgcaaaggcagtcgcaaagacgtgaccctgaggaagctggatatcaaggtggagacagtgaaccgagagccactt

SEQ ID NO: 412 - DNA, 1209 bp, Homo sapiens
  misc_feature (1203)..(1203): n equals a,t,g, or c
cttcgccgtcatccgcttcgaaagcatcatccacgagttcgacccgtggtttaactatagatcaacacatcatcttgcatctcatgggttctatgaatttttaaattggtttgatgaaagagcatggtatccactaggaagaatagtaggtggtactgtttacccagggttgatgataaccgctggccttattcattggattttaaatacattgaacataactgttcacataagagacgtatgtgtgttccttgcaccaacttttagcggccttacatctatatctactttcctgcttacaagagaactttggaaccaaggagcaggacttttagctgcttgttttattgctattgtaccaggctacatatctcggtcagtagctggatcctttgataatgaaggcattgctatttttgcacttcagttcacatactatttatgggtaaaatctgtaaaaactgggtcagttttttggacaatgtgctgctgcttatcctatttctatatggtctctgcttggggtggttatgtatttatcatcaatcttattccactgcatgtatttgtgttgttactgatgcagagatacagcaaaagagtctacatagcatatagcactttctacattgtgggtttaatattatcaatgcagataccttttgtgggattccagccaatcagaacaagtgaacacatggcagctgcaggtgtctttgcattgctgcaagcttatgctttcttgcagtatctgagagaccgattaacaaaacaagagttccagacccttttctttttgggtgtatcactagctgcaggtgctgtgttccttagtgtcatctatttgacttatacaggttacattgcaccatggagtggcaggttttattcattgtgggatactgggtatgcaaaaatacacattccaattattgcatcagtgtctgagcatcaacctacgacttgggtgtctttcttctttgatctacatattcttgtatgtaccttcccagcaggcctttggttctgcatcaaaaatatcaacgatgaaagartatttggtaagagaggtttttaatgactactttgatatggaatagttatttttctttttgagattatttactttaaatttttgtttttctatgtttgactctatatattcaagataaattttctcctttattttgcataggtgcttanccaaga

SEQ ID NO: 413 - DNA, 2294 bp, Homo sapiens
  misc_feature (2287)..(2287): n equals a,t,g, or c
ctgcactcagccctgatctactttctgggaacctttctgctatccatattgatcgcctggactgtgcagtatttccagtctgtctcagcaagcgatccccctccaagaccatcccttgccttagagctgatgaagaaagcagcttccaagggattgcatcaggcagtcaatggcctgggatggtattaccacaaattcaagaaaaattacgccaaagcagcaaagtactggttaaaagcagaagaaatggggaacccagatgcgtcatacaatcttggagtcctgcatttggatggcatcttccctggagttcctggaaggaatcaaactttagctggtgaatatttccataaggctgcgcaaggtggacacatggaagggaccttgtggtgttctctctactatatcacaggcaacctggagacattccctagagatcctgagaaagctgttgtatgggcaaaacatgtagctgagaaaaatggctacttgggccatgtcatccgcaaaggcctcaatgcctacctggaaggttcatggcatgaagctttgctgtattatgttttagcagcagaaactggaattgaagtgtcacagacaaatttagcacacatctgtgaggagaggccagacctggccaggagatacttgggtgttaactgtgtttggagatactataatttctctgtttttcaaatcgatgctccttcctttgcatatttgaagatgggagacctttactactatggccaccaaaaccagtcacaagacctggagttgtctgtgcagatgtacgcccaagccgccctggatggagactcccagggattttttaacctggccctgctaatcgaggaaggtacgataatcccacaccatatcttggatttcttggaaattgactcaactctccattctaataacatctccattctccaggaactgtacgaaaggtgctggagccacagtaacgaggagtccttcagcccctgctccttggcctggctttacctgcacttgcggcttctctggggtgctatcctgcactcagccctgatctactttctgggaacctttctgctatccatattgatcgcctggactgtgcagtatttccagtctgtctcagcaagcgatccccctccaagaccatcccaggcctccccagacactgccacgtccactgcaagtccagctgtgactccagctgcagatgcctctgaccaagaccagcccacagtaactaataacccggagccacgtgggtgaactgtgcactccagttctctccagatgagagagaatcttttcaacagctggtattgggaagctggggccagggcatgatcctgataaacaccttaaatgtcttgtcaactggatgcaaattttgcaattggtgtcattttttttaaagtcaaattacaaggaagtacccagatcaggcagtggtaataccaaaggtcatcaaacacatacaaggaacatcttgatcatagggcatgtggggaagtttactgggccatcacagacttttgttctagtgattgtatgtattaggagtcatagcatgccctacggcagatctggattcttatacactaagatgtgtcttaagaatcacagtgcgtgcttcatccctttattgaagaacagaaaattatgactactctacaaggtggataatattttggtacctgtgcttgccacagccctgttcctcaaagctgaattgatagatttctctttgacttccaagacctagcagttataaggcaccttgaaataaattgtttgtgcctggaaatgcagggagggcaatagctttgtaaattggtttacatttttctccttgaatttttctagggtcctagtgcttccgaatcatttaatggcattgtcggatatcttttacatttcaattgcaatccatgaaattacatttagaagattcttagtacttaactgtagtcttctccatgaattacacgttagaatagactggcagcaactgaatatgcagcaagtaagcctctagcttatagtttcatccctacccctcatgcctgcgtgagtctgtacagggatatgtgtgtgtgtgtgtgtgtgtgtgtgttagagaggaagaggaagagcagaatgtctgtatactacatgctgctaaggtagtgaataaatcagtaatgcaatattgtgggtccaaactactctttgcactactttatttacagtagtaaataaaattatttttatacaattgaaaaaaaaaaaaaaactcgaggggggncccgaaa

SEQ ID NO: 414 - DNA, 817 bp, Homo sapiens
gctgacggaagcggcggcagcgggcagcggctctcgggctgcaggctgggcagggtcccctcccacgctcctgccgctgtctcccacgtcccccaggtgcgcggccaccatggcgtccagcgacgaggacggcaccaacggcggcgcctcggaggccggcgaggaccgggaggctcccggcaagcggaggcgcctggggttcttggccaccgcctggctcaccttctacgacatcgccatgaccgcggggtggttggttctagctattgccatggtacgtttttatatggaaaaaggaacacacagaggtttatataaaagtattcagaagacacttaaatttttccagacatttgccttgcttgagatagttcactgtttaattggaattgtacctacttctgtgaattgtgaactggggtccaagtgagttcaagaatctttatggtgtggctcattactcacagtataaaaccaatccagaatgaagagagtgtggtgctttttctggtcgcgtggactgtgacagagatcactcgctattccttctacacattcagccttcttgaccacttgccatacttcattaaatgggccaggtggcgatatcttgcagtttagtttctccttgtcctgtgcatgcttattttgtgtgctaacgccagagaattaaaattcgtgtttcagccccacgatgccagaatgctgttataggaggtataactggtataactaataattatacaagttatgattkgtattctaaaagcttaatgatgagagaggaatcgtattaataaatattttgagtgaaatc

SEQ ID NO: 415 - DNA, 843 bp, Homo sapiens
  misc_feature (798)..(799): n equals a,t,g, or c
  misc_feature (832)..(832): n equals a,t,g, or c
  misc_feature (840)..(840): n equals a,t,g, or c
gccaatctgggctactttcagctgaaagccaacccaggagcttggatcctcagacttaggaagggacgctctgaagatatttatagaatttacagccacgatggcactgattctccccctgatgctgatgaggtggttatcgtcctcaacaacttcaaaagcaaaattattaaagtgaaggttcagaagaaggcagatatggtgaacgaagacttgctgagtgatggaacgagtgagaatgaatctggattttgggattccttcaaatggggctttacaggacagaagactgaggaagtgaagcaagataaagatgacataattaatattttctccgttgcatctggtcatctctacgaaagatttcttcgcataatgatgctatccgtgctgaagaataccaagactyctgtgaaattctggttcttgaagaattacttgtcccccacatttaaggagtttataccttacatggcaaatgaatacaatttccagtatgagcttgttcagtacaaatggccccggtggcttcatcaacaaactgaaaaacagcgtatcatctggggttacaagatcctcttcctggatgtacttttcccactagtkgttgacaagttcctgtttgtggatgctgatcagattgtacgaacagatctgaaagagttaagagatttcaatttggatggtgctccttatggttacactcctttctgtgacagccgagagaaatggacggtacaggtctggaagtcagggactggggccatcatttagccgggcgaagtatctaacagggcnnatatgtaggggtcggagaagttaggaaaaaacnccggtganaac

SEQ ID NO: 416 - DNA, 749 bp, Homo sapiens
  misc_feature (648)..(648): n equals a,t,g, or c
  misc_feature (680)..(680): n equals a,t,g, or c
  misc_feature (706)..(706): n equals a,t,g, or c
  misc_feature (735)..(735): n equals a,t,g, or c
aagggacagagggcagtgatcagcaatggaaggatcattgggccactggaggatagtgagctctttaatcaagacgatttccacctcctcgaaaatatcatcttaaaaacctcaggacagaaaataaaatctcatattcaacagcttcgggttagaagaaagatgtggcaagcgacttggtaatgaaggtggatgctcttctgtcagcgcaaccaaaaggagatccaagaatcgagtaccagttttttgaagacagacacagtgcaatcaaactgaggccgaaggaaggggagacatactttgatgttgtggctgtcgttgaccctgtcaccagagaagcacagagacttgctcctttgctcttggttttggctcagctgataaacatgaatctgagagtatttatgaactgccaatccaaactttctgacatgcctttaaaaagcttttaccgttatgtcttagaaccagagatttctttcacttcagacaatagttttgctaagggtccaatcgcaaaatttttggatatgcctcagtctycactgttcactctgaatttgaacacacctgagagctggatggtagaatctgtcagaacaccatatgatcttgataatatttatttagaaagargtggacagtgtnatggctgctgarttatgagctgggaatacctngttactggaarggycattgctacganattcaccacaggccagcctccacggggantaccgtttacctta

SEQ ID NO: 417 - DNA, 684 bp, Homo sapiens
  misc_feature (567)..(567): n equals a,t,g, or c
gcggccgcattcctgcaggggatgactgtgaatggcttcatcaacacagtcatcacctccctggagcgccgctatgacctgcacagctaccagagcgggctcatcgccagctcctacgacattgccgcctgcctctgcctcaccttcgtcagctacttcgggggctcagggcacaagccgcgctggctgggctggggcgtgctgcttatgggcacggggtcgctggtgttcgcgctgccccacttcacggctggccgctatgaggtggagttggacgcgggtgtcaggacgtgccctgccaaccccggcgcggtgtgtgcggacagcacctcgggcctgtcccgctaccagctggtcttcatgctgggccagttcctgcatggcgtgggtgccacacccctctacacgctgggcgtcacctacctggatgagaacgtcaagtccagctgctcgcccgtctacattgccatcttctacacagcggccatcctgggcccagctgccggctacctgaattgggaggtgccctgctgaatatctacacggaaatgggccgacggacggagntgaccaccgagaagcccactgtgggtcggcgcctggtgggtcggcttcctgggctctggggccgctgctttcttcaccgccgttcccatccttggttaaccttcggcagttgccagg

SEQ ID NO: 418 - DNA, 505 bp, Homo sapiens
gaacatgctcaagttgggagccagtgtgaacatgtacatgttccatggaggtaccaactttggatattggaatggtgccgataagaagggacgcttccttccgattactaccagctatgactatgatgcacctatatctgaagcaggggaccccacacctaagctttttgctcttcgagatgtcatcagcaagttccaggaagttcctttgggacctttacctcccccgagccccaagatgatgcttggacctgtgactctgcacctggttgggcatttactggctttcctagacttgctttgcccccgtggccccattcattcaatcttgccaatgacctttgaggctgtcaacaggaccatggcttcatgttgtaccgaacctatatgacccataccatttttgagccaacaccattctgggtgccaaataatggagtccatgaccgtgcctatgtgatggtggatggggtgttccagggtgttgtggagcgaaatatgagag

SEQ ID NO: 419 - DNA, 2663 bp, Homo sapiens
  misc_feature (660)..(660): n equals a,t,g, or c
  misc_feature (775)..(775): n equals a,t,g, or c
  misc_feature (1248)..(1248): n equals a,t,g, or c
  misc_feature (1824)..(1824): n equals a,t,g, or c
  misc_feature (2642)..(2642): n equals a,t,g, or c
  misc_feature (2648)..(2648): n equals a,t,g, or c
  misc_feature (2662)..(2662): n equals a,t,g, or c
aattcggcagagcgactgggggaagttcctgaaggatcacagttacaaggctgctcccgtcagctgtttcaagcacgtcccactctatgaccagtgggaggatgtgatgaaagggatgaaggtggaggtgctcaacagtgatgctgtgctccccagccgggtgtactggatcgcctctgtcatccagacagcagggtatcgggtgctgcttcggtatgaaggctttgaaaatgacgccagccatgacttctggtgcaactggggaacagtggatgtccaccccattggctggtgtgccatcaacagcaagatcctagtgcccccacggaccatccatgccaagttcaccgactggaagggctacctcatgaaacggctggtgggctccaggacgcttcccgtggatttccacatcaagatggtggagagcatgaagtacccctttaggcagggcatgcggctggaagtggtggacaagtcccaggtgtcacgcactcgcatggctgtggtggacacagtaatcgggggtcgcctacggctcctctacgaggatggtgacagtgacgacgacttctggtgccacatgtggagccccctgatccacccagtgggttggtcacgacgtgtgggccacggcatcaagatgtcagagaggcgaantgacatggcccatcaccccaccttccggaagatctactgtgatgccgttccttacctcttcaagaaggtacgagcagtctacacagaaggcggttggtttgaggaagggatgaanctggaggccattgaccccctgaatctgggcaacatctgcgtggcaactgtctgtaaggttctcctggatggatacctgatgatctgtgtggacggggggccctccacagatggcttggactggttctgctaccatgcctcttcccacgccatcttcccggccaccttctgtcagaagaatgacattgagctcacaccgccaaaaggttatgaggcacagactttcaactgggagaactacttggagaagaccaagtcgaaagccgtccatcgagactctttaacatggattgcccaaaccatggcttcaaggtgggcatgaagctggaggccgtggacctgatggagccccggctcatctgtgtggccacggtgaaacgagtggtgcatcggctcctcagcatccactttgacggctgggacagcgagtacgaccagtgggtggactgcgagtccccagacatctaccccgtncggctggtgtgagctcaccggctaccagctccagcctcctgtggccgcagaaccggccacaccgytgaaggccaaagaggccacaaagaagaaaaagaaacagtttgggaagaaaaggaaaagaatcccgcccactaagacgcgacccctcagacaggggtccaagaagcccctgctggaggacgaccctcagggtgccaggaagatctcgtcggagcctgttcctggcgagatcattgctgtgcgtgtgaaggaagagcatctagacgtggcctcgcccgacaaggcttcaagtccagagctgcctgtctccgtcgagaacatcaagcaggaaacagacgactgagccttcctgcctccagcctggcttctagctggaagccagcccagcgtttctctaccaccaccaccatgcctccacctgactttggcttggagactgatcctctctgtgtaaattctgcccggtgctgtgaaggctggacggtggaggacctgctggggtctcctgggacccgcctgttgcttctgccctcccctgtggaaaggtctatatgacgggccgcctgaggcccnagaactcgtctgtgaaccaccttttccagccagagttcccaaagctggaacgctagctgcctgctcttccttaagatggcctccccccgacccgccacggccctcagttgccagggatggggccaccactgtcacactgtggaatacaagacagtgaactctgtctgcctgaacgagtcatgtaaattaagttctagagcagctctctgagcaggataaggtcccctgacagtgagttgtgtggtgggggcagcctctgcctcaaaaattcaccaagcagaatgcctctcagcctcatgtgttggtcctctgctcctcctagctccccagggatgttggggacccagcttgtctcggcagctaagaagcagtgaccaggatgtggattttggcgacctgtgtggtggccttgagctgctttctgtgtttgtgaggactgactcccatttcctaaaggaaatgcccccggggaggacattgggaggaagatggcctgagtgtgcactttggctctgctacctgctcctgaagccccgctaaaaataattcatccaagattcctttgtagttaaagggtccagttctgactggagcctctagagagctgggcttgtatgttcttttggccttttgttcctacctaaatgaagaaaccatgcctggaggggccgtgaacacagaaccctcaagacaaggatgacagagctggaggacacatctagctgccattgcaacctcactgggctccccagactctgtgtgtgagaaattaaaccccctgcttgcttgagtcccgtttgttaaggattcttctattnccttgncagatttgtgttcng

SEQ ID NO: 420 - DNA, 479 bp, Homo sapiens
  misc_feature (393)..(393): n equals a,t,g, or c
  misc_feature (456)..(456): n equals a,t,g, or c
  misc_feature (465)..(465): n equals a,t,g, or c
ggcgagaccactaatctaccggcagacaccaattccagacacattattaaggtgctgcggatggcaatcctgctgtcytactgctctatcctgtgtaactacaaggccatcgaaatgccctcacaccagacctacggagggagctggaaattcctgacgttcattgatctggttatccaggctgtcttttttggcatctgtgtgctgactgatctttccagtcttctgactcgaggaagtgggaaccaggagcaagagaggcagctcaagaagctcatctctctccgggactggatgttagctgtgttggcctttcctgttggggtttttgttgtagcagtgttctgggatcattatgcctatgacagagagatgatatacccgaagctgctngataatttatcccagggggctgaatcacggatgcattcaaagcttaaagtttcttggcacgcntttcaaagnccactgacttttga

SEQ ID NO: 421 - DNA, 587 bp, Homo sapiens
  misc_feature (515)..(515): n equals a,t,g, or c
  misc_feature (517)..(517): n equals a,t,g, or c
  misc_feature (553)..(553): n equals a,t,g, or c
  misc_feature (586)..(586): n equals a,t,g, or c
ccagaagtaaccctaggctcaatggaggggtctggggaccatggtataaagaggaaaccaagaaaaagaagccaagcaaaaatcaggctgagaaaaagcaaaagaaaagcaaaaaaaagaagaagaaacagcagaaagcagtytcaggtaaaccagcaaatttggctcgataatatcgctrgcctaagcgtcargcttgktttcatgctgtgccactccagagacttctgccacctggccgccacactgaaaactgtcctgctcagtgccaaggtgctactcttgcaagccacacttagagagagtggrgatgkttatttctctygctcctttagaaaacgtggtgagtcctgagttccactgctgkgcttcagtcaactgaccaaacactgctttgaattataggaggagaacaataacctaccatccgcaagcatgctaattgatggaagttacaggtagcagattaaaactacctttgataaattacagtcaaagattgtgtcacctcaaangnctgaagaatatatttcctggtggaattttgtaaggnctgtcatatgacactggggtttttaataattcna

SEQ ID NO: 422 - DNA, 1901 bp, Homo sapiens
  misc_feature (1160)..(1160): n equals a,t,g, or c
  misc_feature (1892)..(1892): n equals a,t,g, or c
ggtttgataacagtgagagctattaattttagaaaagtcgagttactttgtaatgtagttaaagaacaagggagaatgcgtagtgtaaaaaatactgttgagttagctgctcactgtatttcacaactgatcaatattcgggccaatatggacttaaagggctatgttttgaacacagctagatgacaaattaaatatgaatggtgaaggaaatgtactaattatttattcatataatcttttcttggcattgagttaaagtctaagaagcaggtttcagagattaggatactatcagaatttaaacttaatggaatttaatctctagcatgtcctaatgcagacaacttgcaattccagggtttataaatcataccagggtattaaagcacagtaatcagatgtgtcagtggtaaatatgtgtgaaataatgaatcatatgactgctctgttaagtgtttggttctttattggggtgcatttatacccttttatgattaataagttagtatatatagttatcacagtaattatcttctccaaaatgtttctaaaaataattattgtgatcacttctgttattgcccagcgagagttggggatagattttattcagttaacactgtatgtaattagggttttttttatttcttcttcagttggcagttctgcaagtagtagtgccacaaggagagagtctctatctactagctctgacttgtacaaaagatctagtagcagcctagcacccatagggcaaccattttacaatagtctgggattttcctcctctccaagtccaataggcatgcctctgccaagccaaactccaggacattcacttacgccaccgscatcactttcatcacatggatcctcatccagtttgcatttaggtaaaaaaaaaccaaaaccctttttatttgtatgtatacatgtatgtgtgtttgtgtgtgtgtttataatatatgtaaaatatttaatgttggttaaaacatgccaaattgcttttgcttttagatattagtcttttgaaaaagttctactttcctgaaaattcaaagtgagggtctaatgtacaataaggtaaagacccccctattgtttcttatgttttttttatgaaatataatggtgtgttttttcttgtctgtgctttngatttgtgtgttttagagcatctgaaaagtcaactatataaacataatagtgaaagagaaattcactatcaaaagatttgcacaccataagaaaaacattagttacatagctactgaactaggttagtacactggtttttgctttggtctttctatgcctggccattttaccagataattatttcagtgaatttgaatttagtgtatttgtcacttaaggaagcttataggcttgggccatatacttcttttttggatatgttaaagaaaaaaaatgttttaggcttgttgtmcccctgaagttggagcattgagaactttgtttatatttgtatattaaaattgttcccacccccaaattattaaattggtgattaccttttttccctctccaggaagtatttatccatgtagataatacgttttgaagggctttggatatcaggggctgtgtatgaatccctatcttgtcaaagaaattatttttttaaaactttattttgaatttttataattctagttattcagctgaaactgagggattctattgccagcttttatgtaattggaaagatttaaatcagcttgtgttttaaaaagtaatgttgctactgtaagcagatgtactgtaagttagtgattatgtttgaccaccccctccaattacatgggtatagctatttaaaaaaaaaaaaaaaaactcgagggggggcccgtacccaatcgccctgngatgagtct

SEQ ID NO: 423 - DNA, 1498 bp, Homo sapiens
gttagctactgagtggcacatcttcagtacgcatgattcgtgggggactcaggcagaggtaaaagtgtgaaacttttcagcattacctaagaagcaaaggctcaattttggctgcttcattcttatctcttctgccacagttctaacgtgcctgatctactgagaccaaggatgaccaatgactcagaagggaaaatgggatttaaacacccaaagatcatggggaatttcagaggtcatgccctccctggaaccttcttttttattattggtctttggtggtgtacaaagagtattctgaagtatatctgcaaaaagcaaaagcgaacctgctatcttggttccaaaacattattctatcgattggaaattttggagggaattacaatagttggcatggctttaactggcatggctggggagcagtttattcctggagggccccatctgatgttatatgactataaacaaggtcactggaatcaactcctgggctggcatcatttcaccatgtatttcttctttgggctgttgggtgtggcagatatcttatgtttcaccatcagttcacttcctgtgtccttaaccaagttaatgttgtcaaatgccttatttgtggaggcctttatcttctacaaccacactcatggccgggaaatgctggacatctttgtgcaccagctgctggttttggtcgtctttctgacaggcctcgttgccttcctagagttccttgttcggaacaatgtacttctggagctattgcggtcaagtctcattctgcttcaggggagctggttctttcagattggatttgtcctgtatccccccagtggaggtcctgcatgggatctgatggatcatgaaaatattttgtttctcaccatatgcttttgttggcattatgcagtaaccattgtcatcgttggaatgaattatgctttcattacctggttggttaaatctagacttaagaggctctgctcctcagaagttggacttctgaaaaatgctgaacgagaacaagaatcagaagaagaaatgtgactttgatgagcttccagtttttctagataaaccttttcttttttacattgttcttggttttgtttctcgatcttttgtttggagaacagctggctaaggatgactctaagtgtactgtttgcatttccaatttggttaaagtatttgaatttaaatattttctttttagctttgaaaatattttgggtgatactttcattttgcacatcatgcacatcatggtattcaggggctagagtgatttttttccagattatctaaagttggatgcccacactatgaaagaaatatttgttttatttgccttatagatatgctcaaggttactgggcttgctactatttgtaactccttgaccatggaattatacttgtttatcttgttgctgcaatgagaaataaatgaatgtatgtattttggtgcagacaaaaaaaaaaaaaaaaaaaaaaaa

SEQ ID NO: 424 - DNA, 2348 bp, Homo sapiens
gagctccgggggccgctgcagccgcccaagcgcccgccatgcgcgctgcccgcgccgcgccgctgctccagctgctgctcctgctggggccgtggctggaggctgcgggcgttgcggagtcgccgctgcccgccgtggtccttgccatcctggcccgcaatgccgaacactcgctgccccactacctgggcgctctggagcggctggactacccccgggccaggatggccctctggtgtgccacggaccacaatgtggacaacaccacagagatgctgcaggagtggctggcggctgtgggcgatgactatgctgctgtggtctggaggcctgagggcgagcccagttctacccagatgaagagggtcccaagcactggaccaaagaaaggcaccagtttctgatggagctgaagcaggaagccctcacctttgccaggaactggggggccgactatatcctgtttgcagacacagacaacattctgaccaacaatcagactctgcggcttctcatggggcaggggcttccagtggtggcccaatgctggactcccagacctactactccaacttctggtgtgggatcaccccccagggctactaccgccgcacagccgagtacttccccaccaagaaccgccagcgccggggctgcttccgtgtccccatggtccactccaccttccttgcatccctgcgggctgaaggggcagaccagcttgctttctacccgccacatcccaactacacttggcctttcgacgacatcatcgtcttcgcctatgcctgccaggctgctggggtctccgtccacgtgtgcaatgagcaccgttatgggtacatgaatgtgccggtgaaatcccaccaggggctggaagacgagagggtcaacttcatccacctgatcttagaagcactagtggacggcccccgcatgcaggcctcagctcatgtgactcggccctctaagaggcccagcaagatagggtttgacgaggtctttgtcatcagcctggctcgcaggcctgaccgtcgggaacgcatgctcgcctcgctctgggagatggagatctctgggagggtggtggacgctgtggatggctggatgctcaacagcagtgccatcaggaacctcggcgtagacctgctcccgggctaccaggacccttactcgggccgcactctgaccaagggcgaggtgggctgcttcctcagccattactccatctgggaagaggtggttgccaggggcctggcccgggtcctggtgtttgaggatgacgtgcgctttgagagcaacttcagggggcggctggagcggctgatggaggatgtggaggcagagaaactgtcttgggacctgatctaccttggacggaaacaggtgaaccctgagaaggagacggccgtggaggggctgccgggcctggtggtggctgggtactcctactggacgctggcctatgccctgcgtctggcgggtgcccgcaagctgctggcctcacagcctctgcgccgcatgctgcccgtggacgagttcctgcccatcatgttcgaccagcaccccaacgagcagtacaaggcacacttctggccacgggacctggtggccttctccgcccagcccctgctcgctgcccctacccactatgccggggacgccgagtggctcagtgacacggagacatcctctccatgggatgatgacagcggccgcctcatcagctggagcggctcccaaaagaccctgcgcaccccgcctggacctgactggcagcagcgggcacagcctccaaccccagccccgagatgagctctaggtccaggtgatgactgcaaagcatggtccaggagcaggccactactgcccagagagcagaggaggaggttgttggcagggactcagatcctgtcagacctggccaccaccttgggcatggccactctgccctctggacctgtctttcatcgggagaaaccactcagagatggatcccattccctaaaaggtctcacagcaaaggagcaggactcccaggcccctgtaccctgcctggcctgattcagggccttgtggcccccagcttctgtttcaagctgggcagaccccaggatcccttccctccctaaggactcagctgaggggcccctctgcccccttctacctccacctcagcaccctcccccagcttgatgtttgggtctccccagcaccctcctccctggccggtgcaaagtacagggaggtaaagcaggacccttgcagacatgttgcccagcacacagtaggccctcaataaaagccatttgcactttaaaaaaaaaaaaaaaaaaaaaaaaaaaaaa

SEQ ID NO: 425 - DNA, 789 bp, Homo sapiens
  misc_feature (3)..(3): n equals a,t,g, or c
  misc_feature (788)..(788): n equals a,t,g, or c
agnctcgccgcgatgccccgccccactctccacccgctgaatgcagggcgcatgctgctacttggcggctcaagcccgcccgcaccgtccccattctctgaccgcccctctcccggtacactgcgcaggcacaacagagccgctcccctctcctcgccccgccaccgggacggagagcgcccgccgctgcatttccggcgacacctcgcagtcattcctgcggcttgcgcgcccttgtagacagccggggccttcgtgagaccggtgcaggcctggggtagtctcctgtctggacagagaagagaaaaatgcaggacactggctcagtagtgcctttgcattggtttggctttggctacgcagcactggttgcttctggtgggatcattggctatgtaaaagcaggcagcgtgccgtccctggctgcagggctgctctttggcagtctagccggcctgggtgcttaccagctgtctcaggatccaaggaacgtttgggttttcctagctacatctggtaccttggctggcattatgggaatgaggttctaccactctggaaaattcatgcctgcaggtttaattgcaggtgccagtttgctgatggtcgccaaagttggagttagtatgttcaacagaccccattagcagaagtcatgttccagcttagactgatgaagaattaaaaatctggmatcttccactattttcaatatattaagagraataagtgcascatttttgsatctgacattttacctaaaaaaaagacaccaacttggcagagang

SEQ ID NO: 426 - DNA, 1016 bp, Homo sapiens
  misc_feature (1010)..(1010): n equals a,t,g, or c
  misc_feature (1015)..(1015): n equals a,t,g, or c
ctgcaggaattcggcacgagatcatatttaggaattaaatttgatgttgtcaaaggaatcataagaaactcttctcacgtgactattaaccttcatagcagtatggaaatggtatcagaattgaaatttttgaggaccagtgttggtatttgtggtaatagagatctagagaccccatctggccaaaaatagtttcttatgtcatgttttttgttgttgttgtgtttttttgttttttttttgttttttttttttgagatggagtcttgctctgtcaccactgcactccagcctgggcaacagagtgagactcctgtctcaaaaaataaataaataaataaatcaaaagmcaagcgctttggtcacagtttattaaataaatgwatagawatattactgcagcccccaaaagttgtaaataactgttgtgttacatgagtggatttattttaaaattgtcttctccttgagttaaagctgcaaaactttctgttgktgttggctgggcacagtggcttatgcctataatcccagcactttggraggctgaggcaagttcaccaggcgtagtggcacatgcctgtagtcccagctacttggaaggctgaggtgggagggtcacttgagcctagaaggtcgaggctgcagtgaactgtgtatatgtatgtgtgtgtgcatatatatatttatattttcatcattaccatatttgtgaaattcattagtatcaatggagaactaggaaaactaaggaaatttgataggaatttgtcatcagtgattgtgctgcacaatctatttcctttctgctttgcgaatttgtcatcagtgatggtactgcacaatctatttcctttctgttttgcactgtgtttagtgagccttaatatatatgttactggttacattctggtcatattgttaaaaagtagacarctaatgagcaccatatttttcacaaactggattacaagagagatcataaaggagttttgcctttactccccttncccgna

SEQ ID NO: 427 - DNA, 1258 bp, Homo sapiens
  misc_feature (182)..(182): n equals a,t,g, or c
  misc_feature (1020)..(1020): n equals a,t,g, or c
  misc_feature (1181)..(1181): n equals a,t,g, or c
  misc_feature (1208)..(1208): n equals a,t,g, or c
  misc_feature (1210)..(1210): n equals a,t,g, or c
  misc_feature (1240)..(1240): n equals a,t,g, or c
ctcgcgctgctctggccctgcaggttgtgttyccgcctctaccccgcctccattccgttgctctctcagtctcagacccgggctctcggtccgccgcttcaggtcttggcgcmstcagagagttggcgcggctctgtgttgaccaaacctagtggatgcagttagcgccggagcccggcccngcccgtcaccagggttattcccgccttctaggtttgccaggactgccggccctgcagctgccttctgccccaggtttttggctactgatgttacaaacaataaaatattggagcatagagttgaagaacagactcaaaccaggtttttatttaattagttaaaaatatggatcctgagacaaggggacaagagattatcaaagtgacacctcttcaacaaatgcttgcctcatgtactggagctatactgacatcagtaatagtgacacccctggatgttgttaaaattagactccaagcccaaaacaacccactccccaaaggaaaatgttttgtatatagtaatggactcatggatcatctatgtgtctgtgaagagggaggcaacaaactatggtataagaagccaggaaatttccagggaacattggatgcattttttaaaatcattcgaaatgagggcattaaatctctatggagtggccttcctcctaccctagtgatggcagttcctgccacagttatttattttacctgctatgatcaattaagtgctcttctgagatctaagttaggagaaaatgaaacctgcataccaattgttgctggaattgtagccagatttggtgcagtaactgkgataagtccactagaattgattagaaccaagatgcagtccaagaagttttcttacgtggaactgcatcgatttgtcagcaagaaagtatctgaagatggttggatttccctttggargggctgggctcctactgktcttagagatgtacctttctcagtttctatgcctttgcatatgtcaacctggattataatgaanaacattgttgctaaaaatggattttccggattattttcaggcctaattcctcgcttaattaaaattgctcctgcttgtgccattatgatcagtacatatgaatttggaaaggcttttttccagaaacaaaatgttcgaaggcagcaatactaagtgatgcngtttcaacttgaaaccaactatagccnangaagatggagactcttaagccaagaatggntttcaccattattctctc

SEQ ID NO: 428 - DNA, 881 bp, Homo sapiens
tagtggatcccccgggctgcaggaattttttcctttagcaagcgccgccgggatgaccgtcggccttgccgtttgtgcattgattgtcgggctggcgctggcgatgttctttgcggtatgggagtcggcaaaatggcgtcctgtcgcgtgggcaggttcagcgctggtaaccattctgcgtggcctgccagaaattctggtggtgctgtttatctattttggctcctcgcagctgctgctgacgctttcggatggcttcactatcaatcttgggttcgtgcagatcccagtgcagatggacattgagaacttcgacgttagcccgttcctttgtggtgtcatcgctctgtcactgctgtatgccgcctatgcctcgcaaacgcttcggggcgcgttgaaagcggtgccggtgggtcagtgggagtctggtcaggcgctggggctgtcgaaatcggctatctttttccgtctggtgatgccgcagatgtggcgtcatgcgctgcctggcctcggtaaccagtggctggtgctgctgaaagataccgcgctggtcagtttgattagtgtgaatgatttaatgctgcaaacaaaaagcatcgctactcgtacccaggaaccatttacctggtacattgtggcggcggcgatttacctggtgatcaccctgctcagtcagtacattctcaaacgcattgacctgcgcgcgacacgttttgagcggaggcccagctaatgtttgagtatttacccgaactgatgaaagggctacacaccagcctgacgctaaccgttgcctcgctgattgtggcactgattctggcattgatttttaccatcatcctgacgctgaaaacgccggtgctggtgtggctggtgcgggg

SEQ ID NO: 429 - DNA, 874 bp, Homo sapiens
  misc_feature (730)..(730): n equals a,t,g, or c
  misc_feature (732)..(732): n equals a,t,g, or c
gcgtccggagctgctaggctccgacattctcacttgccagtgggacctgtcttggagcgccgcgccgcccgcctgccaaaagatcatgacttgtgctgaccctggcgagattgccaacgggcaccgcaccgcctcggacgccggcttccccgttggctcccacgtccagtaccgctgcctgccagggtacagcctcgagggggcagccatgctcacctgctacagccgggacacaggcacacccaagtggagcgatagggtccccaaatgcgccttgaagtacgagccgtgcctgaacccgggggttcccgagaatggctaccagacgctgtacaagcaccactaccaggcgggcgagtctctgcaaagttgcctatgaggagctcctggacaaccgaaaactggaagtgacccagaccacagatccatcacggcagctggaaggggggaacctggccctggccatcctgctgcctctaggcttggtcattgtcctcggcagtggcgtttacatctactacaccaagcttcagggaaagtcccttttcggcttctcgggctcccactcctacagccccatcaccgtggagtcggacttcagcaacccgctgtatgaagctggggatacgcgggagtatgaagtttccatttgaaccccaagactacagctgcaggacccaggacgcccctcccctcctcattcgggcagagggaaatacgggacccggtntntgcctcctggctgccctcctccctggctgtgtaaatagtctccctatcccacgagggggctttgatggccctggagatcctacagtaaataaaccagcatcctgccgcccaaaaaaaaaaaaaaaaaaaaaaaaaaaaaaaa

SEQ ID NO: 430 - DNA, 1600 bp, Homo sapiens
  misc_feature (1551)..(1551): n equals a,t,g, or c
  misc_feature (1563)..(1563): n equals a,t,g, or c
  misc_feature (1582)..(1582): n equals a,t,g, or c
tcggcgcaggtttccgcagctgagggggcagctccgcggcggcgtccggggtctccagtagggctgacgctccggtgctcgcacaatcccccgcctcggctggcaacgggcgtccctccactccccgagtccccggcagccgccgccaccccagcgcgccccgatctggccccctgccccgcgaagatggctgccgtacgccgggcccgcagttattgccgctgcctggtgcgcttctccgaccgagaactctgctaagctccgctgcagagacaggcaggagtagacacccggacacccagcacccctcctccggggggcggtgcagagggggcacggagagcccctcgagcgcagcaggccgccccgccagcatggcagaagctgaggaagattgtcattctgatactgtcagagcagatgatgatgaagaaaatgaaagtcctgctgaaacagatctgcaggcacaactccagatgttccgagctcagtggatgtttgaacttgctccaggtgtaagctctagcaatttagaaaatcgaccttgcagagcagcaagaggctctctccagaaaacatcggcagataccaaaggaaaacaagaacaggcaaaagaagaaaaggctcgagaactcttcctaaaagcagtagaagaagaacaaaatggagctctctatgaagccatcaagttttatcgtagggctatgcaacttgtacctgatatagagttcaagattacttatacccggtctccagatggtgatggcgttggaaacagctacattgaagataatgatgatgacagcaaaatggcagatctcttgtcctacttccagcagcaactcacatttcaggagtctgtgcttaaactgtgtcagcctgagcttgagagcagtcagattcacatatcagtgctgccaatggaggtcctgatgtacatcttccgatgggtggtgtctagtgacttggacctcagatcattggagcagttgtcgctggtgtgcagaggattctacatctgtgccagagaccctgaaatatggcgtctggcctgcttgaaagtttggggcagaagctgtattaaacttgttccgtacacgtcctggagagagatgtttttagaacggcctcgtgttcggtttgatggcgtgtatatcagtaaaaccacatatattcgtcaaggggaacagtctcttgatggtttctatagagcctggcaccaagtggaatattacaggtacataagattctttcctgatggccatgtgatgatgttgacaacccctgaagagcctcagtccattgttccacgtttaagaactaggaataccaggactgatgcaattctactgggtcactatcgcttgtcacaagacacagacaatcagaccaaagtatttgctgtaataactaagaaaaaagaagaaaaaccacttgactataaatacagatattttcgtcgtgtccctgtacaagraggcagatccakagttttcmtgtgggggctacagctatgttcccmgtggtcaccmgaggtttcaacmaactcantttggggtaccntcatttctttgttcaacanttactttacccaattcac

SEQ ID NO: 431 - DNA, 1470 bp, Homo sapiens
  misc_feature (1346)..(1347): n equals a,t,g, or c
  misc_feature (1357)..(1357): n equals a,t,g, or c
  misc_feature (1387)..(1387): n equals a,t,g, or c
  misc_feature (1415)..(1415): n equals a,t,g, or c
  misc_feature (1454)..(1454): n equals a,t,g, or c
  misc_feature (1462)..(1462): n equals a,t,g, or c
gtggacacggaagtggtcgtcgtcgcggcaccggtgggagctaggcgcgaggctcggagtgcggccagcgggcggaggcggtctcgcatcggcggcgacggagggctcaggcgtcgtcgtttgggtggggggccgctgaactgacaagcgacatttcagctcctttcacccgccggaaccccggagccggggcccgctcagccggcgttaccatgaccaaggccggtagcaagggcgggaacctccgcgacaagctggacggcaacgaactggacctgagcctcagcgacctgaatgaggtcccggtgaaggagctggctgcccttccaaaggccaccatcctggatctgtcttgtaataaactgactactctaccgtcggatttctgtggcctcacacacctggtgaagctagacctgagtaagaacaagctgcagcagctgccagcagactttggccgtctggtcaacctccagcacctggatctcctcaacaacaagctggtcaccttgcctgtcagctttgctcagctcaagaacctgaagtggttggacctgaaggataaccccctggatcctgtcctggccaaggtggcaggtgactgcttggatgagaagcagtgtaagcagtgtgcaaacaaggtgttacagcacatgaaggccgtgcaggcagatcaggagcgggagaggcagcggcggctggaagtagaacgtgaggcagagaagaagcgtgaggctaagcagcgagctaaggaagctcaggagcgggaactgcggaagcgggagaaggcggaagagaaggagcgccggagaaaggagtatgatgccctcaaagcagccaagcgggagcaggagaagaaacctaagaaggaagcaaatcaggccccgaaatctaagtctggctcccgtccccgcaagccaccaccccggaagcacactcgttcctgggctgtgctgaagctgctgctgctgctgctgctatttggtgtggcgggagggctggttgcttgtcgggtgacagagctgcagcagcagcccctctgcaccagcgtgaacaccatctatgacaatgcggtccagggtctacgccgccatgagatcctccagtgggtcctccagaccgactctcagcagtgagcttgtccccagcacctgctgcctcccagccttggagtttggattcctatggaattgggttctgctggacacaacctctttttagcatcagacctacctgccatcatcaaatggctgcagattggtacatgagaccttctctttgtaggacttcttcattccttagtcagggttccctgaaggaatgaggagaaatgggaggtggccggnngggccgtggnggcaagttacctgcatgcctaaaggagtangcttgggggtgggagagagaaaacatanctttttagtgtatataagttgggaaaggcaaggttggtntactaaanggcagttg

SEQ ID NO: 432 - DNA, 454 bp, Homo sapiens
  misc_feature (405)..(405): n equals a,t,g, or c
  misc_feature (439)..(439): n equals a,t,g, or c
  misc_feature (454)..(454): n equals a,t,g, or c
gaggggaagcagatctgaggacatctctgtgccaggccagaaaccgcccacctgcaggaatcccagccattcccgggatccgaggacccaaagggcagaagggagaacccggcttacccggccatcctgggaaaaatggccccatgggaccccctgggatgccaggggtgcccggccccatgggcatccctggagagccaggtgaggagggcagatacaagcagaaattccagtcagtgttcacggtcactcggcagacccaccagccccctgcacccaacagcctgatcagattcaacgcggtcctcaacaacccgcaggagattatgacacgagcactggcaagttcaactgcaaagtccccggctctaataatttgtctaacaagcgtcgcatacagccaantgtgcgtgtgctgtaccgcagcggcgtcaaagtngtcacttctgtgggn

SEQ ID NO: 433 - DNA, 1963 bp, Homo sapiens
ggagagagagagagagagagagctcgtgccgtttgtatacagcttgtgcaggaatacggcctgatagatgcctgccagtgtgtattgatgtgggaactgataatatcgcactcttaaaagacccattttacatgggcttgtaccagaaacgagatcgcacacaacagtatgatgacctgattgatgagtttatgaaagctattactgacagatatggccggaacacactcattcagttcgaagactttggaaatcataatgcattcaggttcttgagaaagtaccgagaaaaatattgtactttcaatgatgatattcaagggacagctgcagtagctctagcaggtcttcttgcagcacaaaaagttattagtaaaccaatctccgaacacaaaatcttattccttggagcaggagaggctgctcttggaattgcaaatcttatagttatgtctatggtagaaaatggcctgtcagaacaagaggcacaaaagaaaatctggatgtttgacaagtatggtttattagttaagggacggaaagcaaaaatagatagttatcaggaaccatttactcactcagccccagagagcatacctgatacttttgaagatgcagtgaatatactgaagccttcaactataattggagttgcaggtgctggccgtcttttcactcctgatgtaatcagagccatggcctctatcaatgaaaggcctgtaatatttgcattaagtaatcctacagcacaggcagagtgcacggctgaagaagcatatacacttacagagggcaggtgtttgtttgccagtggcagtccatttgggccagtgaaacttacagatgggcgagtctttacaccaggtcaaggaaacaatgtttatatttttccaggtgtggctttagctgttattctctgtaacacccggcatattagtgacagtgttttcctagaagctgcaaaggccctgacaagccaattgacagatgaagagctagcccaagggagactttacccaccgcttgctaatattcaggaagtttctattaacattgctattaaagttacagaatacctatatgctaataaaatggctttccgatacccagaacctgaagacaaggccaaatatgttaaagaaagaacatggcggagtgaatatgattccctgctgccagatgtgtatgaatggccagaatctgcatcaagccctcctgtgataacagaatagaagcactcccctgataaatactttctgtgctccagggaaccccttttttcagacaagaagagataatgtcttcagttttatggtgttttctgtgttttgttctccctgaccactttggttgatgtattttttccatgcgtctccacatctgttggggtagacgtgttgattgattgcattgcccaccagcaccctacartcagatagttgtgatgctttaattctaacatacagcccgtaccacatccaggagatgtaaaaagtgtgtttgtgaatgtcttcacttgtactctaattcagacttgccaaagtatttgctatttactattatgggtaatactcttctctggcctagttcttacagagctactaaaatagaaatttacttttatggatagaagtacagaattttgagaagaaactaaattttcaccaaattttaaggaaaaattgtcattatctaaaaatgttcttatatatctgcttcatcttaccttcatactctgaaattccctatagcagacagagctagggaaatattaaaaatttaccctatttattttctggaactaaatcaagccttaactataacattatgagagtaatgggaactactgctggctttaagtaaataaaagtcattgttttcaacagtgtataaaaatcatagtgtaacctttttatttaataaatatcttacatttaaaaaaaaaaaaaaaaaaaactcgtag

SEQ ID NO: 434 - DNA, 1382 bp, Homo sapiens
aattcggcacgagcggaggcgagggaaactragggcgaaagttgtgtgtcgtgttggcaggagggcctagaagggaaagactgtctagtgggacaatgtcatattataaatttggaatgctgaatagaaaattatagattttgatattgaaggaaatgaagcgaagcctaaatgaaaattcagctcgaagtacagcaggctgtttgcctgttccgttgttcaatcagaaaaagaggaacagacagccattaacttctaatccacttaaagatgattcaggtatcagtaccccttctgacaattatgattttcctcctctacctacagattgggcctgggaagctgtgaatccagagttggctcctgtaatgaaaacagtggacaccgggcaaataccacattcagtttctcgtcctctgagaagtcaagattctgtctttaactctattcaatcaaatactggaagaagccagggtggttggagctacagagatggtaacaaaaataccagcttgaaaacttggaataaaaatgattttaagcctcaatgtaaacgaacaaacttagtggcaaatgatggaaaaaattcttgtccaatgagttcgggagctcaacaacaaaaacaattaagaacacctgaacctcctaacttatctcgcaacaaagaaaccgagctactcagacaaacacattcatcaaaaatatctggctgcacaatgagagggctagacaaaaacagtgcactacagacacttaagcccaattttcaacaaaatcaatataagaaacaaatgttggatgatattccagaagacaacaccctgaaggaaacctcattgtatcagttacagtttaaggaaaaagctagttctttaagaattatttctgcagttattgaaagcatgaagtattggcgtgaacatgcacagaaaactgtacttctttttgaagtattagctgttcttgattcagctgttacacctggcccatattattcgaagacttttcttatgagggatgggaaaaatactctgccttgtgtcttttatgaaatcgatcgtgaacttccgagactgattagaggccgagttcatagatgtgttggcaactatgaccagaaaaagaacattttccaatgtgtttctgtcagaccggcgtctgtttctgaacaaaaaactttccaggcatttgtcaaaattgcagatgttgagatgcagtattatattaatgtgatgaatgaaacttaagtagtgataaaaggaagtttagcataaattatagcagttttctgttattgcttaatttaccatctccatagttttatagctactattgtatttcacttgttgaattaaagtatttgaattcttttaaaaaaaaaa

SEQ ID NO: 435 - DNA, 1120 bp, Homo sapiens
gcccagggctctcggatgcagggagcctgggcccaaacagcagcttccggagtcggaaggagctgaggaagaagacwgactgaaggagcttgcacttttccgcctcggcaaccggacccagcagcaagcaggacgggcggcgctctgctactggtcccgttaagccagagtagcccaagccctgaagtcactgctcatccggaatggaaatcccgccgaccaactacccagcctccagggcggccttggtggcacagaactacatcaactaccagcaggggaccccgcacagggtgtttgaggtgcagaaggtcaaacaagccagcatggaggatattccaggaagaggacataagtatcrccttaaatttgctgttgaagaaattatacaaaaacaagttaaggtgaactgcacagctgaagtactttacccttcaacgggacaagaaactgcaccagaagtcaacttcacatttgaaggagaaactggaaagaatccagatgaagaagacaacacattttatcaaagacttaagtccatgaaggaaccgctagaagcacaaaatattccagacaattttggaaatgtatctccagaaatgacgctcgttctacatttagcctgggttgcctgtggttatataatatggcaaaattctactgaagacacatggtataaaatggtaaaaattcaaactgtcaagcaagtgcaaagaaatgatgactttattgaattagactacaccattctacttcataatatagcatctcaggagattattccctggcaaatgcaagttctctggcatccacaatacggcactaaagtaaaacataatagccgtctgccaaaggaagtacaactggaataaacaaaaaccctaacactggaagtgtaaacatgtctattgatgtgtatgccaatttcactggcatctagcttatgaggccaaataatcccaaagtgtcactttatataaatgtcttgattacagtatagaactttatagagtccataatacaaagtatcactacataaaaatgtctttaaaacagtaatagtggtatgtatatccaaaataaaaagcttcaatttcagcctcaaaaaaaaaaaaaaaaa

SEQ ID NO: 436 - DNA, 1242 bp, Homo sapiens
gtctagtgggagctccgcgtsgtagctacgccggccgcctgsstttgagacaacgtgattctccgcagctggtcgcctacccgtgatgttctgcccacgtcgagacctgagctgaaatggcagacgatctcggagacgagtggtgggagaaccagccgactggagcaggcagcagcccagaagcatcagatggtgaaggagaaggagacacagaagtgatgcagcaggagacagttccagttcctgtaccttcagagaaaaccaaacagcctaaagaatgttttttgatacaaccaaaggaaagaaaagagaataccaccaagaccaggaaaagaagaaagaagaaaattactgatgttcttgcaaaatcagaaccaaaaccagggttacctgaagacctacagaagctgatgaaggactattatagcagcagacgcttggtgattgaattagaagaactgaacctgccagactcctgtttcctcaaggccaatgatttgactcacagtctttcctcatacctaaaagaaatttgtcctaagtgggtaaaacttaggaagaaccacagtgagaagaaatcggtcctgatgctgatcatctgcagctcggccgtccgagccctggagctcattaggtcgatgacagcattcagaggagacggcaaagttataaaattatttgcaaagcacataaaggtccaggcgcaggtaaagttgctggagaagcgtgtggtgcacctgggtgtaggaactccggggagaattaaagaacttgttaaacaaggtggccttaatttgagccccttaaaatttctggtttttgactggaactggagagatcagaagttgaggagaatgatggacattcccgagataagaaaggaggtattcgaacttctggaaatgggagtgctcagtctgtgcaagtcagaatccttgaaactgggccttttctaagtctgtgtcctaatgaagattccagttttcacagtagaagttgcatcttatttaatgactctgatacattgcaagcactcagtaaatatcagcaaatagtttatgttaattgtgtcaacagatggatcactggaatgtggggattctgaaacagaaatgaaactgtccttttgacaactctcttatataataaagtatcaccggcttgtgtatgaaaaaaaaaaaaaaaawaaaaaaaaaaaaaaaaaaaaaaaaaaaaaaaaaaaaaaaaaaaaaaaaaaaaaaa

SEQ ID NO: 437 - DNA, 1985 bp, Homo sapiens
  misc_feature (360)..(360): n equals a,t,g, or c
  misc_feature (1985)..(1985): n equals a,t,g, or c
ggcagaggaggagagagtgaaggattccagaggacatccggaacacggtggggcaacgtgcccttggagtggtacgatgacttcccccacgtgggctacgacctggatggcaggcgcatctacaagcccctgcggacccgggatgagctggaccagttcctggacaagatggacgatcctgactactggcgcaccgtgcaggacccgatgacagggcgggacctgagactgacggatgagcaggtggccctggtgcggcggctgcagagtggccagtttggggatgtgggcttcaacccctatgagccggctgtcgacttsttcagcggggacgtcatgatccacccggtgaccaaccgnccggccgacaagcgcarcttcatcccctccctggtggagaaggagaaggtctctcgcatggtgcacgccatcaagatgggctggatccarcctcgccggccccgagaccccacccccagcttctatgacctgtgggcccaggaggaccccaacgccgtgctcgggcgccacaagatgcacgtacctgctcccaagctggccctgccagccacgccgagtcgtacaacccaccccctgaatacctgctcagcgaggaggagcgcttggcgtgggaacagcaggagccaggcgagaggaagctgagctttttgccacgcaagttcccgagcctgcgggccgtgcctgcctacggacgcttcatccaggaacgcttcgagcgctgccttgacctgtacctgtgcccacggcagcgcaagatgagggtgaatgtagaccctgaggacctcatccccaagctgcctcggccgagggacctgcagcccttccccacgtgccaggccctggtctacaggggccacagtgaccttgtccggtgcctcagtgtctctcctgggggccagtggctggtttcaggctctgacgacggctccctgcggctctgggaggtggccactgcccgctgtgtgaggactgttcccgtggggggcgtggtgaagagtgtggcctggaaccccagccccgctgtctgcctggtggctgcagccgtggaggactcggtgctgctgctgaacccagctctgggggaccggctggtggcgggcagcacagatcagctgttgagcgccttcgtcccgcctgaggagccccccttgcagccggcccgctggctggaggcctcagaggaggagcgccaagtgggcctgcggctgcgcatctgccacgggaagccagtgacgcaggtgacctggcacgggcgtggggactacctggccgtggtgctggccacccaaggccacacccaggtgctgattcaccagctgagccgtcgccgcagccagagtccgttccgccgcagccacggacaggtgcagcgagtggccttccaccctgcccggcccttcctgttggtggcgtcccagcgcagcgtccgcctctaccacctgctgcgccaggagctcaccaagaagctgatgcccaactgcaagtgggtgtccagcctggcggtgcaccctgcaggtgacaacgtcatctgtgggagctacgatagcaagctggtgtggtttgacctggatctttccaccaagccatacaggatgctgagacaccacaagaaggctctgcgggctgtggccttccacccgcggtacccactctttgcgtcaggctcggacgacggcagtgtcatcgtctgccatggcatggtgtacaatgaccttctgcagaaccccttgctggtgcccgtcaaggtgctgaagggacacgtgctgacccgagatctgggagtgctggacgtcatcttccaccccacccagccgtgggtcttctcctcgggggcagacgggactgtccgcctcttcacctagctgttctgcctgcctggggctggggtggtcgtgctgaagtcaacagagcctttaccctgtrmaaaaaaaaaaaaaaaaaaaaatcaaggggggggccgggtn

SEQ ID NO: 438 - DNA, 527 bp, Homo sapiens
gaacgtgccggttggcatcactgaaggagatggctcaaggactgggagtctcccagcaagttctgtgcaacttttgcaagactagctccttgctggcccccacatgccccatgctaggccccaatgttcagagctgggacttgagctcacaaaactggggagctgagacatttgttctcttggatctcactctctctgtcccttgtgcctctgtagctggccttcttcctgccacaggccatgcctctaccaaggacacatggcctttccctgttagggctgatggcggttctttcctatctcattacccgctaggggcctgggagccctgtggctggatctgagtgctcctgagctggcttcactgcagaactctcagtccctcatcagatcgagactctatttcccccgtcagtctgggggcttcacaagggcaggagagccctccatcactgacttccagatcagaaaccctcagccaggcagcctttgcccagaaggaacgtgctggttgggatcactgaagg

SEQ ID NO: 439 - DNA, 629 bp, Homo sapiens
ccgagtgcgggggccgggtctgtgcctttgataaccgggccaccggccgggagcaggaagcccaggtggagcagctgctggggatggtcgagggcttggtgctggagcacaagggcgcccattactccaacgaggtgtatgagctggcgcaggtgctgcgctgggcaggccctgaggagcggctccggcgggtggcggagcgcgtggcagccagggtgcagaggaggccatggggcgcctggctgtcggcccggctgtggaagtggctgaagtcccccaggagctggaggctgggcctggccctgctgctggggggcgcgctcctgttctgggtgctgctccacaggcggtggtcggaggccgttgcggaggtcgggcctgactgacagcgcaggtcctaaaactgaaggcaacttggttaagggaggctgaattcttggagctgaagggaaaacttcattccaacggaaggaatcctgtartttcaggcatagttttaatgacacagaaaactttgctgcatcacctttgcaactttgccaaagctcagagttcactttttaagtttttaactcattttaaatgatgtgtatgcagagttttaaaataaattcgtctaacaataaaaa

SEQ ID NO: 440 - DNA, 1412 bp, Homo sapiens
  misc_feature (778)..(778): n equals a,t,g, or c
ggcggcggacgcaggaggcctcgtggaggacacagcagcatgggacagtcagggaggtcccggcaccagaagcgcgcccgcgcccaggcgcagctccgcaacctcgaggcctatgccgcgaacccgcactcgttcgtgttcacgcgaggctgcacgggtcgcaacatccggcagctcagcctggacgtgcggcgggtcatggagccgctcactgccagccgtctgcaggttcgtaagaagaactcgctgaaggactgcgtggcagtggctgggcccctcggggtcacacactttctgatcctgagcaaaacagagaccaatgtctactttaagctgatgcgcctcccaggaggccccaccttgaccttccaggtcaagaagtactcgctggtgcgtgatgtggtctcctcactgcgccggcaccgcatgcacgagcagcagtttgcccacccacccctcctggtactcaacagctttggcccccatggtatgcatgtgaagctcatggccaccatgttccagaacctgttcccctccatcaacgtgcacaaggtgaacctgaacaccatcaagcgctgcctcctcatcgactacaaccccgactcccaggagctggacttccgccactatagcatcaaagttgttcctgtgggcgcgagtcgcgggatgaagaagctgctycaggagaagttccccaacatgagccgctgcaggacatcagcgagctgctggccamgggmgcggggctgtcggagagcgaggcagagcygacggcganccacaacatcacagagctgcctcaggctgtcgctggccgtggcaamatgcgggcccagcagagtgcagtgcggctcaccgagatcggcccgcggatgacactgcagctcatcaaggtccaggagggcgtcggggagggcaaagtgatgttccacagttttgtgagcaagacggaggaggagctgcaggccatcctggaagccaaggagaagaagctgcggctgaaggcgcaaagggcaggcccagcaggcccagaatgtgcagcgcaagcaggagcagcgggaggcccacagaaagaagagcctggagggcatgaagaaggcacgggtcgggggtagtgatgaagaggcctctgggatcccttcaaggacggcgaagcctggagttgggtgaggacgatgatgaacaggaagatgatgmcatcgagtatttytgccaggcggtgggcgaggcgcccagtgaggacctgttccccgaggccaagcagaaacggcttgccaagccgcactggagcagcggctggattgaacgccccagattggggcccgagatgtggccctcggtttcctttcataaaggagttgtgtccccagcccttccactccagtaaaaaactgcattggcaaaaaaaaaaa

SEQ ID NO: 441 - DNA, 974 bp, Homo sapiens
  misc_feature (935)..(935): n equals a,t,g, or c
  misc_feature (971)..(971): n equals a,t,g, or c
gagcaggcagagagatgaggaaactgagacccagaaaggtggaagcacttgtytaaggtcacgcctccaggaagcagtgtgtccacgactccagtccaagtggtcaggctccagagcccacagtcccaggggtccatgatgccgagctgcaatcgttcctgcagctgcagccgcggccccagcgtggaggatggcaagtggtatggggtccgctcctacctgcacctcttctatgaggactgtgcaggcactgctstcagcgacgaccctgagggacctccggtcctgtgcccccgccggccctggccctcactgtgttggaagatcagcctgtcctcggggaccctgcttctgctgctgggtgtggcggctctgaccactggctatgcagtgccccccaagctggagggcatcggtgagggtgagttcctggtgttggatcagcgggcagccgactacaaccaggccctgggcacctgtcgcctggcaggcacagcgctctgtgtggcagctggagttctgctcgccatctgcctcttctgggccatgataggctggctgagccaggacaccaaggcagagcccttggaccccgaagccgacagccacktggaggtcttcggggatgagccagagcagcagttgtcacccattttccgcaatgccagtggccagtcatggttctcgccacccgcmagcccctttgggcaatcttctgtgcagactatccagcccaagagggactcctgagctgcccacatggcctaagatgtgggtcctggatccttcccccttctcaccataaccccctctcagtgtttccccaacttctcccttttagcagggtccctttagagcccaactccaggtcaaatctggagctcaaatcccagtgctccctaacccttaccttcagtctccaccagcctgaaggncttcctaggggatcctcaggcggcccccaccagggnaca

SEQ ID NO: 442 - DNA, 1723 bp, Homo sapiens
agcagcacttccggtacgaaaaactcgctgctgccccaacctggcttgacaggcttggtctctgcaagtggctctcagccccttcttctttcctgcctcaccttccaattcgtttgccgccgccgtcccgcagctgctgtttccggagttgccccttccccatgttccggggcaggagtccgcaaagcgaagatccgcccgccggttcctcatcatgtccgaactgactaaagagctgatggagctggtgtggggcaccaagagcagccccggtctctcggacaccattttctgccgctggacgcaagggtttgtgtttagtgaatcagagggatctgcattagaacagtttgaaggtggcccctgtgctgttattgcacctgttcaggcatttcttttgaagaagctcctgttttcttcggagaagtcttcttggcgggattgttcagaggaagagcagaaggaactcctttgtcataccttgtgtgatattttagaaagtgcttgttgtgaccactctggatcatactgcttggtttcatggttaagaggaaagacaactgaggaaactgctagtatttctgggagtcctgcagagtctagttgccaagtggaacattcttctgccttggctgtcgaagagcttggctttgagcgatttcatgcattaattcaaaaaagatcgttcagaagtttaccagaattaaaagatgctgtcttggaccagtattcaatgtggggaaataaatttggagtattgctttttctgtattctgtattactgacaaagggcattgaaaacataaaaaacgaaattgaagatgcaagtgaacccttgatagatcctgtatatggacatggcagccaaagtttaattaatctcctgctgacgggacatgctgtttctaatgtatgggatggtgatagagagtgctcaggaatgaaacttcttggtatacatgaacaagcagcagtaggatttttaacactaatggaagctttaagatactgtaaggttggttcttacttgaaatctccaaaattccctatttggattgttggcagtgagactcacctcaccgtattttttgccaaggatatggctttagttgcccctgaagctccttcagaacaagccagaagagtttttcaaacctacgacccagaagataatggattcatacccgattcacttctggaagatgtgatgaaagcattggaccttgtttcagatcctgaatatataaatctcatgaagaataaattagatccagaaggattaggaatcatattattgggcccatttcttcaagaattttttcctgatcagggctccagtggtccagaatcttttactgtctaccactacaatggattgaagcagtcaaattataatgaaaaggtcatgtacgtagaagggactgcagttgtgatgggttttgaagatcccatgctacagacagatgacactcctattaaacgctgtctgcaaaccaaatggccatacattgagttactctggaccacagatcgctctccttcactaaattaatttgtctaagtatttataaggaagatcttaataacagatgttgaaagaaggagtcaagactggcaattggctggattaagctaaacactggtatcactgattaactgtaaataacaattaaaaacacattttcagtgttaaaaaaaaaaaaaaaaaaaaaaaaaaaaaaaa

SEQ ID NO: 443 - DNA, 1258 bp, Homo sapiens
  misc_feature (36)..(36): n equals a,t,g, or c
  misc_feature (528)..(528): n equals a,t,g, or c
  misc_feature (726)..(726): n equals a,t,g, or c
gccaggtgctgggggcgactcggacagcgggacgtnggggtggagtaggatggagtctccctcccgagctgggggtgtgggcctaggaaaggctgcttcgccgctgtgttcggagagctctggatactgcggggcttttccgcggaggagcgcccgccggtaggttggccccgaaccgtgggggcggcgacggccgagtgccaatttgactctgtgcaccaaggtccccgcgccccggaacgggcgacgccgcgcccccatcagagccgcrggcatctgcatctgggaccgacctcctgggctggctgatcaaagaggaagcagcagcaatgtctgctgtggggrctgcaactccatacctgcatcatcctggtgatagtcacagtggccgagtgagtttcttgggggcccagcttcctccagaggtggcagcaatggcccggctactaggggacctagacakgagcacgttcagaaagttgctgaagtttgtggtcagcagcctgcagggggaggactgccgagagntgctgcagcgtcttggggtcagcgccaacctgccggaggagcagctgggtgccctgctggcaggcatgcacacactgctccagcaggccctccgtctgccccccaccagcctgaagcctgacaccttcagggaccagctccaggagctctgcatcccccaagacctggtcggggacttggccagcgtggtatttgggnagccagcggccctccttgattctgtggcccagcagcagggggcctggctgccgcatgttgctgactttcggtggcgggtggatgtagcaatctccaccagtgccctggctcgctccctgcagccgagcgtcctgatgcagctgaagctttcagatgggtcagcataccgctttgaggtccccacagccaagttccaggagctgcggtacagcgtggccctggtcctaaaggagatggcagatctggagaagaggtgtgagcgcagactgcaggactgacccctcacttgaccagtcccattcagatccggcttggacaggcacctgagatggtgccaaagtgcagctgactcttcccacgacagccctgcccttcccatgaggcaggctcttcagtgagtgtttgaacgtaattatgtagttttctgtttaattgaaaaagagagctatgcctttttttctttttggaagtaaagcagctaaaaacawraaaaaaaaaaaaaaaaaaaaaaaaaaaaaaaaaaaaaaaaaaa

SEQ ID NO: 444 - DNA, 1248 bp, Homo sapiens
gcagacttaatgtcaagaatgaaaaaaaaatagttcatcaggatgtaacctgagattcacctctgcatctttaccaaaagaatgcacgcttgaagaatgtggaattcctgcttgtaaaccgtatacactgtgggacgagacaccaatgtcttggttacatcaaaagaaggctagcaatgtgtgccagaagactcgggaggaccagggaagcagtgaaaatgatgagagatttaatgaaggagttcccccttctgagtatgttcaatatccatgaaaaccttttagaagcccttctggaactacaagcatatgctgatgttcaggcagtcttagcaaagtatgatgatataagcttaccaaagtcagcaacaatatgctacacagctgctttgctcaaagcaagagctgtctctgacaaattctctyctgaggctgcatctcggcgggggctgagcacagcagagatgaatgcagtagaggccattcatagagctgtggaattcaatcctcatgtgccaaaatacctactagaaatgaaaagcttaatcctacccccagaacatatyctgaagagaggrgacagkgaagcaatagcatatgcattctttcatcttgcacactggaagagagtggaaggggctttgaatcttttgcattgtacgtgggaaggcacttttcggatgatcccttatcccttggaaaaggggcacctattttatccttacccaatctgtacagaaacagcagaccgagagctgcttccatctttccatgaagtctcagtttacccaaagaaggagcttcccttctttattctctttactgctggattatgttccttcacagccatgctggccctcctgacacatcagttcccggaacttatgggggtcttcgcaaaagctttcctcagcactttgtttgcccccttaaactttgtcatggagaaagtggagagcatcctcccatccagtctgtggcaccagctaacacggatctgagagaagccctgtcctccactcacctcacccgccgctgccaccatctcctctgtgccaactccttgtggaccgcaagaaagcatgactttgaaaaagggaagccattccgagattttaaaatgttcatggactattccatattaaaagctgtttttgttgtacaaaattcactgatgttcagttctattttattttgccttcagaaaagaagaaagtcaaaaataaaacttttgtgtattacagcaaa

SEQ ID NO: 445 - DNA, 932 bp, Homo sapiens
  misc_feature (864)..(864): n equals a,t,g, or c
  misc_feature (880)..(880): n equals a,t,g, or c
  misc_feature (911)..(912): n equals a,t,g, or c
  misc_feature (921)..(921): n equals a,t,g, or c
ctggcaggtcccagaaggtggcgagtttcgcggccagaggcttacaggtccaggtggagaggccgggctggccagggcttcggcctccggcgtcgggaaatggcggcggggggcaggatggaggacggttccttggatatcacccagagtattgaagacgacccacttctggatgcccagcttctcccacaccactcattacaagctcactttagaccccgattccatcctcttcctacagtcatcatagtgaatcttctgtggtttattcatctcgtgtttgttgttttagcatttttaacaggtgtgctttgttcttatcctaatccaaatgaggacaagtgcccaggaaattacacaaacccattgaaagttcagacggttataatccttgggaaagttattttgtggattctccatttactccttgaatgctacatccagtatyaccacagsaaaatcagaaaccgaggstataacttgatctaccgatcaacaaggcatctcaagagacttgcgttgatgatacagtcctctggcaacacagtgcttctcctcatactgtgcatgcagcactccttcccagagcctggcagattgtatcttgacctcattctggccatcttggcactggaactcatctgttccctgatatgtctcctcatttacacagtgaaaatcccggagatttaataaagctaaaccagagcctgatatacttgaagaagaaaaaatctatgcttaccccagcaatattaccttcgggagactgggattcagaactattttcaagcctagaaagaaaattggtgaaaaagcaagggagacaccattgaataccttgaaggcgacacaatgcgctgntgaagtaagcgaatgntggctcttactttcctcagaccttgggctgnnaagccagtngaacgtgaaga

SEQ ID NO: 446 - DNA, 2143 bp, Homo sapiens
  misc_feature (1602)..(1602): n equals a,t,g, or c
  misc_feature (2086)..(2086): n equals a,t,g, or c
  misc_feature (2097)..(2097): n equals a,t,g, or c
  misc_feature (2140)..(2140): n equals a,t,g, or c
cgtccgcggacgcgtgggcggacgcgtgggcgagctgcagatgaagttttagcagaagcaaagaaaccacgaattgaggatgaagagtgtgtgcgccttgataaagagagattggctgcccgtttggagggtcacaaagaagggattgtacagactgaacagattaggtctttgtctgaagctatgtcagtggaaaaaattgctgcaatcaaagccaaaattatggctaagaaaagatctactatcaagactgatctagatgatgacataactgcccttaaacagaggagttttgtggatgctgaggtagatgtgacccgagatattgtcagcagagagagagtatggaggacacgaacaactatcttacaaagcacaggaaagaatttttccaagaacatttttgcaattyttcaatctgtaaaagccagagaagaagggcgtgcacctgaacagcgacctgccccaaatgcagcacctgtggatcccactttgcgcaccaaacagcctatcccagctgcctataacagatacgatcaggaaagattcaaaggaaaagaagaaacggaaggcttcaaaattgacactatggggaacytaccatggtatgacactgraatctgtaacggagggtgcatctgcccggaagactcagactcctgcagcccagccagtaccaagaccagtttctcaagcwagacctcccccaaatcagaagaaaggatctcgaacacccattatcataattcctgcagctaccacctctttaataaccatgcttaatgcaaaagaccttctacaggacctgaaatttgtcccatcagatgaaaagaagaaacaaggttgtcaacgagaaaatgaaactctaatacaaagaagaaaagaccagatgcaaccagggggcactgcaattagtgttacagtaccttatagagtagtagaccagccccttaaacttatgcctcaagactgggaccgcgttgtagccgtttttgtgcagggtcctgcatggcagttcaaaggttggccatggcttttgcctgatggatcaccagttgatatatttgctaaaattaaagccttccatctgaagtatgatgaagttcgtctggatccaaatgttcagaaatgggatgtaacagtattagaactcagctatcacaaacgtcatttggatagaccagtgttcttacggttttgggaaacattggacaggtacatggtaaagcataaatcgcacttgagattctgaattatttggctcctccatttctggaaattgagactcaagctttatgaatttatcaagaacttaaaaatgaagaaggtcacagattgatcttttataagaccttatttgatgctttgtgcttcaaggagatgatacctgtcatccatataagcaaactttttggcttacaactatttttttaatattagccttctagtctgtaatggaaattgtatattttgatagaagttttttctccattggttaaattagcattacttaaaatttgtttctttagaaaataaatgcaggttataaatgtgtgtatatttagagattataaggctctctgagccatcttctgatttttncattgctctataattctttttactgaaaatactatgttatgaatggtattaaattttagtctctggaacatccaaaaccaagcaaagggatgtgactattttgaatgaatcagaatgtcaacttgtatgtacactatatctacacttactcattatttaaaaagaataatgaaaaatctagatcaattcttcaatttgattgaactgttcagccttttcaagatttctttatttacaaatgattacatttaaatgaatgtacattcttctcactgactttggtgattttgaaacctagaatgatgtgtttctatctgtaatatctttccatttgaaaaaaatctcaaaacacagattaaaaccacaataggctgtagtattttttattttgggagccagagtatgatttgggggaagaatatgtatcagccctattgcagtataactttaagctccttttctctttagtccacttttgattggnaattttatggnataggatttgaatctcccatttaaggctggcagcctggagtcntac

SEQ ID NO: 447 - DNA, 2069 bp, Homo sapiens
  misc_feature (2046)..(2046): n equals a,t,g, or c
gcgccgactgagcctctaaagcgacttcagctctgccccaccaacaccaccgctccgggggaggggcttaatgctggggaagggatgtcttaaaagaggagaagctttaaattagacgatcggagaaggctgagggaattgctatgaargggcgggagctgaagtgtagaggactcctttagacagcagaaagggaaagccgttgagaagttcccttcaaactccacctgcctcctctccaattcaaactccactcccttctccaaaagttaaaaggaaagccaagtttgccacgctcccctgttcctactcaataaatacttcttctactccgccaccgggaaaacagaaaaaaaaaactaatttccttcccaatattaggacttagaaaagctctaggtcccgcaayttgaattttagcctaggggaatcaaaatagtaggagcattactcttgtttcctttttcaaaatcccacacctcatccttcctgcgacgccatgtctaccaacatttgtagtttcaaggacaggtgcgtgtccatcctgtgttgcaaattctgtaaacaagtgctcagctctaggggaatgaaggctgttttgctggctgatactgaaatagaccttttctctacagacatccctcctaccaacgcagtggacttcactggaagatgctatttcaccaaaatctgcaaatgtaaactgaaggacatcgcatgtttaaaatgtgggaacattgtagkttatcatgtgattgttccatgtagttcctgtcttctttcctgcaacaacrgacacttctggatgtttcacagccaggcagtttatgatattaacagactagactccacaggtgtaaacgtcctacttyggggcaacttgccagagatagaagagagtacagatgaagatgtgttaaatatctcagcagaggagtgtattagataaatggaattatgatatatatgatatacaaacttttttctatttaaaaatatattaatggatcaactttaaaattgttagttgccagtgatcttttttggaaaacaaaaatggggcatttgttgatttatttattttctgtctctaattagttacctcagtttgattgaagccagtggagttgtgcttttcctctacttctacttcctctcccccacctttttctgcccagtgtaggtgtattcttaaattcagacgggaagattctttcacatatcactcagttacctcccaatctgggggagtttttcttacaacttgataccagataccattaattttacattcctgaataaaggcctagtacccacgcatatttcaaccatgcatatatcaagttcaacygagttttaataggggattaaaaaaacaagctgttaggtttccatgggcactggttctcataggttctattggtgataactgctttaacatggagcaagagtttgtgaatcaggaaatagaataaattaaaatttaaaatatatagaggaatcctcttgattgctcagcatgatgttagataaatgagtttgtcagaaaatatcagtatacgctgtttaccaatgttatttatttacattcttctaaagccattatggatattgtattatgagagctaaacctaaataagttatcctgttccctaggaccttctctgtaaatagtgaattttagacgagtagtctgtcctaaatcttaaatagaaaaaaaaactaaagcgatttgcttaagccattgtacattataaagagctgttttgttttgctttgctttgctttgttttgtttttttaaagctgcattcagagccacaaaggaataggaaagtagggtagtgttggattctggttttatgtaactctaaaataaatgtatctctttaatatctcagttgtagggattttgtcaataccaaagcagactgagttgtggttttgtaaataaagttttttctaaaaatgaccattcttcctttaattttttgttatgcccacatattgtatgtaaaaatataaataaatagtacttaaagtatanaaaaaaaaaaaaaaaaaaaggtt

SEQ ID NO: 448 - DNA, 626 bp, Homo sapiens
  misc_feature (238)..(238): n equals a,t,g, or c
gcagagggcctgtagctgggggcatgctgcaggtgctggtgtggcatcaagccttagggacctcaacttgagtccccagcaacaataatgaggctgaatggggccagaaatcaaggtatgccatggctgagatgaaccaccatgtatgccctgtggagaactggtcctacaacgagtcctgccctcctgaccctgctgagcaagggggtcccaagacctgctgcaccctggacgatgnccccctcatcagcaagtgtggctcctatcccccagaaagctgcctcttcagcctcattggcaacatgggtgctttcatggaggccctgatctgcctcctgcgctacgggcagctcctggagcagagtcggcactcttgggttaacaccacggyactcatcacaggctgcaccaacgctgcgggcctcttggwggttggcaactttcagcctcgttttaggtggagtcttctttgtccatgagagttctcagctgcaacatggggcagccctgtgtgagtgggtgtgtgtcatcgatatcctcattttctatggcaccttcagctacgagtttggggcagtctcctcagacacactggtggctgcactgcacttagcccctgggccggg

SEQ ID NO: 449 - DNA, 1480 bp, Homo sapiens
  misc_feature (101)..(101): n equals a,t,g, or c
  misc_feature (103)..(103): n equals a,t,g, or c
ctgtttccatagtgtgaatggcacctgttcccatcaagcccaacaggagtaaggaacatgcaagttgtaactccacaataaaattaagaaacattttgttncnttatacaaggttttacttttacaaaagtatcccttttaaataagatgcatctgatgtacaaagtatcaaacgtgtttttttttttttttctcagcttgaaaagaggctggaaatgggatgcaggttaggttcaaagcttaaactttgtaacaactggacacaaggttcctcagaattgtcaaaagtctcttgtgacacatcctacaaccttttctcaataaacaacaatatatgaaataattaccaaaacatctcctaattcatataatttacatgatataagcttgcttgatagcagctggtgttcagtcgtgaaaaaacacacaaagtaaaatggttgctgactacaatgtacagctattgctgggtgtgatggaatgtacaaacggaggtcgatgtagacgagttttttccaccagagatattgcctttccatgcagcacttgtgctctcagctttaacttggcttttggttcttcctttatcttcagtatctgttctgatgctcataatgccaccgattaaaatctatattaaaagctacaatgctaccagaagccatgccagtgatcagagtcctctggtcatgggacaagtccattgctctaatgccagcatcacatccagggtaaatgtacagttgcttgaagtcacaggcctgccagacctctactaccccattgtcccctccggtgaccaggttctggccgtcactgctcaggagaatggcccgtgttgaatcattgatctccatttgagccaaaagtttcccattaatgctgaaattactgaatcgccctcgttcatagtatatgatacagtggccttcgctggagacagatatcaagcgtgggaataagcagttttctggtccttcaagggctctcagcaaatctccagtgatggtgtggacaaggcaagggccctctttagcaccactgataacaagcccaagttctgcacagacagaaacacagacaacttcatggtcatggcctgtgaggacggctcttggtgccggatagtcactgctgttagggttgtctcctatgatatggtgccgcccactccagtaccagagcagcagggtggcatctcgagatccggacacgatgtagcagtccccaccaatgtatgactcggacctggccaagcaagtgaccacatcccaatggccaaatacaatctgagtcaatttccctgtttctgtagaataaactctgaagctcttatcccagaatccacagataagaatatagcgattatctgctgttaccacaaaacaatgtgcattgatttgtatactctggtcaacgaggtctgtgatctgccgtttgtttacacctgaattattggctattaatggatccatttcaa

SEQ ID NO: 450 - DNA, 1417 bp, Homo sapiens
  misc_feature (551)..(551): n equals a,t,g, or c
ggcagagctcggcatcactcgcccagtgccaaccaacacttgtgtcatcttgggcttggctggaggtgttatcatttatatcatgaagcactcgttgagcgtgggggaggtgatcgaagtcctggaagtccttctgatcttcgtttatctcaacatgatcctgctgtacctgctgccccgctgcttcacccctggtgaggcactgctggtattgggtggcattagctttgtcctcaaccagctcatcaagcgctctctgacactggtggaaagtcagggggacccagtggacttcttcctgctggtggtggtagtagggatggtactcatgggcattttcttcagcactctgtttgtcttcatggactcaggcacctgggcctcctccatcttcttccacctcatgacctgtgtgctgagccttggtgtggtcctaccctggctgcaccggstcatccgcagaatcccctgctctggcttcttcagtttctcttccagacagacacccgcatctacctcctagcctattggtctctgctggccaccttggnctgcctggtggtgctgtaccagaatgccaagcggtcatcttccgagtccaagaagcaccaggcccccaccatcgcccgaaagtatttccacctcattgtggtagccacctacatcccaggtatcatctttgaccggccactgctctatgtagccgccactgtatgcctggcggtcttcatcttcctggagtatgtgcgctacttccgcatcaagcctttgggtcacactytacggagcttcctgtccctttttctggatgaacgagacagtggaccactcattctgacacacatctacctgctcctgggcatgtctcttcccatctggctgatccccagaccctgcacacagaagggtagcctgggaggagccagggccctcgtcccctatgccggtgtcctggctgtgggtgtgggtgatactgtggcctccatcttcggtagcaccatgggggagatccgctggcctggaaccmaaaagacttttgaggggaccatgacatctatatttgcgcagatcatttctgtagctctgatcttaatctttgacagtggagtggacctaaactacagttatgcttggattttggggtccatcagcactgtgtccctcctggaagcatacactacacagatagacaatctccttctgcctctctacctcctgatattgctgatggcctagctgttacagtgcagcagcagtgacggaggaaacagacatggggagggtgaacagtccccacagcagacagctacttgggcatgaagagccaaggtgtgaaaagcagatttgatttttcagttgattcagatttaaaataaaaagcaaagctctcctaaaaaaaaaaaaaaaaaaaactcga

SEQ ID NO: 451 - DNA, 2062 bp, Homo sapiens
cccgactctaggccggaagcgcgcggagaccatgtagtgagaccctcgcgaggtctgagagtcactggagctaccagaagcatcatggggccctggggagagccagagctcctggtgtggcgccccgaggcggtagcttcagagcctccagtgcctgtggggctggaggtgaagttgggggccctggtgctgctgctggtgctcaccctcctctgcagcctggtgcccatctgtgtgctgcgccggccaggagctaaccatgaaggctcagcttcccgccagaaagccctgagcctagtaagctgtttcgcggggggcgtctttttggccacttgtctcctggacctgctgcctgactacctggctgccatagatgaggccctggcagccttgcacgtgacgctccagttcccactgcaagagttcatcctggccatgggcttcttcctggtcctggtgatggagcagatcacactggcttacaaggagcagtcagggccgtcacctctggaggaaacaagggctctgctgggaacagtgaatggtgggccgcagcattggcatgattgggccaggggtcccacaggcgagtggagccccagcaaccccctcagccttgcgtgccctgtgtactggtgttctccctggccctccactccgtgttcgaggggctggcggtagggctgcagcgagaccgggctcgggccatggagctgtgcctggctttgctgctccacaagggcatcctggctgtcagcctgtccctgcggctgttgcagagccaccttagggcacaggtggtggctggctgtgggatcctcttctcatgcatgacacctctaggcatcgggctgggtgcagctctggcagagtcggcaggacctctgcaccagctggcccagtctgtgctagagggcatggcagctggcacctttctctatatcacctttctggaaatcctgccccaggagctggccagttctgagcaaaggatcctcaaggtcattctgctcctagcaggctttgccctgctcactggcctgctcttcatccaaatctagggggcttcaagagaggggcaggggagattgatgatcaggtgcccctgttctcccttccctcccccagttggggggaataggaaggaaaggggaagggaaatactgaggaccaaaaagttctctgggagctaaagatagagcctttggggctatctgactaatgagagggaagtgggcagacaagaggctggccccagtcccaaggaacaagagatggtcaagtcgctagagacatatcaggggacattaggattggggaagacacttgactgctagaatcagaggttggacactatacataaggacaggctcacatgggaggctggaggtgggtacccagctgctgtggaacgggtatggagaggtcataaacctacaatcagtgtcctgttggtcctagcccatttcagcaccctgccacttggagtggaccctcctactcttcttagcgcctaccctcatacctatctccctcctcccatctcctaggggactggcgccaaatggtctctccctgccaattttggtatcttctctggcctctccagtcctgcttactcctctattttaaagtgccaaacaaatccccttcctctttctcaaagcacagtaatgtggcactgagccctacccagcacctcagtgaagggggcctgcttgctctttattttggtcccggatcctggggtggggcagaaatattttctgggctggggtaggaggaaggttgttgcagccatctactgctgctgtaccctaggaatatggggacatggacatggtgtcccatgcccagatgataaacactgagctgccaaaacatttttttaaatacacccgaggagcccaagggggaagggcaatgcctacccccagcgttatttttggggagggagggctgtgcatagggacatattctttagaatctattttattaactgacctgttttgggacctgttacccaaataaaagatgtttctagaaaaaaaaaaaaaaaaaa

SEQ ID NO: 452 - DNA, 1527 bp, Homo sapiens
gtttgtttttttcctttgtggtgttttttcgtaaacagaagttgttgattttaatgcagttcctcattaatgctataccttatatttactctgtcttaaagccacgtttagatggatagccatctcattcttgtagccaagcatgtttattgtaatttttcttccatctctgaaataatttgcttgtcagactctatagggattattcctctgtatgtggtactttaaaaaaaaaactttaaacatgtcaaataatggaaaagattggagaaaatatcataaggtgattcatacttaaggccatgwcttatagatagaatacatacttaaatttgattggtgaaatattctgcagctcttctaratggcaggtgatagtaaatacacaaaaattgtggttctaccaatagcatattcattccttcyataacaaagcttatattaatgwgagaacagaagatgaaattaaaacagactttattatctcttaaaaagccatgagacttaacagaagttaaaagcgtgtttttttaattcaggaagaggatcacctagcccgggtaggaagaggcaatcacccgtatgcttgtktgtgccctgaaaactgcagagaatccacaaaataccagagcctggttaaaccccactgaggttgaggaaacgtcccatgcagtcaactgttgctacttaaatgcagctgtttctgcattttttgatcgctgcagaacatctgaggtagtrgaaatccaagcactgagaacagatggagagcacatgaaaaaggaagaattaaatgtgtgcaaccacatggaggtgggccaaacaggtagccagaacttgaccacaggaacagacaaaccggagcagcaagtccctttggccctgatctggtccctgtagcacagaggtccgaagaaccgccttcagaaagaggaggcatatttggaagtgatgggaaagactttgtggacaaggatggagaacactttggaaaattgcattgtgccaagagacaacaaataatgagcaacagtgaaaatgcaattgaggaacagattgcctcaaatactactacgactcctcaaacattcatttctacggatgacttgctggactgcttggtgaatccacaagtaaccaggatagtggcacaacttttgatacaaggaagaagtttatgattcaagtggaagatgacttttaaaataatattttttaaatatatatttttaagtagtatgactaaaataaagatgaaccagcaaaaggtcagtttgcacatttgtaaatgtatttatccttaccgaattacatgtcagtctgttgccaccttctttcatgcacattcctctttggcaaactggctgctctttgtttgtaagsttttgttcctctctcatcccatacttttagcctgtgtcaaatgtaagtcccaagtatttccagcaggaagtaatgtcttcctcagcctcaaccagggaccaaccggctgcttacttttgcaaataaaattttactagaacacga

SEQ ID NO: 453 - DNA, 763 bp, Homo sapiens
  misc_feature (632)..(632): n equals a,t,g, or c
  misc_feature (654)..(654): n equals a,t,g, or c
  misc_feature (659)..(659): n equals a,t,g, or c
  misc_feature (669)..(669): n equals a,t,g, or c
  misc_feature (677)..(677): n equals a,t,g, or c
  misc_feature (695)..(695): n equals a,t,g, or c
  misc_feature (750)..(750): n equals a,t,g, or c
gcagcaataggatactgatacatcctcataactcattccgagtctaaacattaaagataaaagggaaatatgccactggcaatatcttttctttcttattcagacatttgattcttccagtcttaatcctcgtcccacatgcctctggcacatctacttgagcacatttattctttatctgattatcctactccaatttccataagcaccatcctattcttggcattacacctcctctccaatattttacccagttcttttttgttgttgatgtttaaatacttcctcaaattctcctgcttattttgtcagtgtgaaaccagagtagtaatctctaaaagcctcttgggctgctcttacttttttgacttatgttactcattgagcaagtattttcckgcttctcttttatctgttgttttgtttactagtttgtcagcatcaaatgttttctgtcttaaatccaaagctcactggtaccacatacaaagttcaataatgtattctgcaaacctaacatattatcatgctcatgtacaattctgttgctttcaatcatcagtccttatatatctgtctagaaaacttcattcacatccacttccattggaatgactgaatcccaagtccgnaactctcgctttctatcctggncttcnttaatcctgnaaaggggntacagacatggataaagncaccattggcacctcaagaaggtttacaaattggtaaggaaatgtaggaggatanggacccaaggcag

SEQ ID NO: 454 - DNA, 817 bp, Homo sapiens
  misc_feature (780)..(780): n equals a,t,g, or c
gcggacggtgggcgcgccgctcctgcgggtcggactggggctgtggcgggagagaagatgccgcagcccgagtcccagaaggcggcgatcctgggctgcgggcaaggcggaaattgacaatggcccttcagctatgctaggtctataatgggaagtgtcacagttcggtatttctgttatgggtgcctttttacatctgcgacctggacagttttgctttttgtttatttcaacttcagtgaagtgactcagccacttaagaatgtgcccgtcaaggggtctgggccccacggaccatctccaaaaaaattctatccccgtttcactcgaggcccaagtcgagtgctcgagccacagttcaaagcaaacaaaattgacgatgtgatagacagtcgtgttgaagatccagaagaaggccacttgaaattctcttctgaattagatgtaaagaaaagttctacccacctgacctgccagctgctagtgttgttatctgtttctataatgaagcgttttctgccttgcttcggacagtgcacagtgtcatagaccgcacgccagcacacctgcttcatgarawcatccttgtggatgatgatagtgactttgatgatttgaaaggagaactagatgaatatgtccaaaaatacctccctggaaaaattaaagtcataagraatacaaagcgtgaggggttgattcgaggggagaatgattggcaatatcagtgagcgtgtggaactgagaaagaagttgggctgtaaatcatttaaatggtangtgggtaatgtatacccagagatgcagaaatctgggt

SEQ ID NO: 455 - DNA, 539 bp, Homo sapiens
  misc_feature (501)..(501): n equals a,t,g, or c
  misc_feature (504)..(504): n equals a,t,g, or c
  misc_feature (537)..(537): n equals a,t,g, or c
  misc_feature (539)..(539): n equals a,t,g, or c
ctcaaggccatggattccaacgggttgagcgatccctacgtgaagttccggcttgggcatcagaagtacaagagcaagattatgccaaaaacgttgaatcctcagtggagggaacaatttgattttcacctttatgaagaaagaggaggagtcattgatatcactgcatgggacaaagatgctgggaaaagggatgatttcattggcaggtgccaggtcgacctgtcagccctcagtagggaacagacgcacaagctggagttgcagctggaagagggtgagggacacctggtgctgctggtcactctgacagcatcagccacagtcagcatctctgacctgtctgtcaactccctggaggaccagaaggaacgagaggagatattaaagagatatagcccattgaggatatttcacaacctgaaagatgtgggatttctccagtgaaagtcatcagagcggaagggttaatggctgccgacgtcactggtaagagatgangcnaatctcctaatgctccagatcaagcagcacacnan

SEQ ID NO: 456 - DNA, 661 bp, Homo sapiens
  misc_feature (601)..(601): n equals a,t,g, or c
  misc_feature (626)..(626): n equals a,t,g, or c
  misc_feature (642)..(642): n equals a,t,g, or c
  misc_feature (657)..(657): n equals a,t,g, or c
ggccgccgccgggactagaagtgagccgcccgggtcccaaacgccagccagccagtcagtgggtcccgcagtcgcccgcaaccggggcgaatcatggcggccgccaaggtggctttaaccaagagagcagatccagctgagcttagaacaatatttttgaagtatgcaagcattgagaaaaacggtgaatttttcatgtcccccaatgactttgtcactcgatacttgaacatttttggagaaagccagcctaatccaaagactgtggaacttttaagtggagtggtggatcagaccaaagatggattaatatcttttcaagaatttgttgcctttgaatctgtcctgtgtgcccctgatgctttgtttatggtagcctttcagctgtttgacaaagctggcaaaggagaagtaacttttgaggatgttaagcaagtttttggacagaccacaattcatcaacatattccatttaactgggattcagaatttgtgcaactacattttggaaaagaaagaaaaagacacctgacatatgcggaatttactcagtttttatttggaaatccactggagcacgccaagcaagcctttgtgcacngggccatgctaggactgggagggtncagccatcgattccgngcatctggcacatcngccc

SEQ ID NO: 457 - DNA, 1689 bp, Homo sapiens
ttttttttttgaaatgaaatgaaaacgtaagcatttaatagtggttttaaaaatcagtaacttttgttcatctgtgttttctttttagaatgaagtgatggaggctggtctctgtctgaaagcagtgctctaccaagtcctggagatgaagggaattcactctgttttgcagaaaagattctgtggattaatacagaagcaccagcaacaccagaggggtggagactcctttctctcccgattctacagtctggctctaagcccagtaaaacagctcccgagcactgcttcagctgggtccagtcttgacaaaggcaggaagccagctagggtgggggcgatagggtcagcgggtatgtcccactgttggaggtcactggtattctgtttgtttttgttttgtttcgttttgttttttgagacagggtctcgttctgtcgcttagctggagtgcggtggcgtgatcatggcactgctattcttgaagcactccacccacctgggctactttttctttagtgcagaggtgcactgtcttcttttaagtgggatcgcgtaacatgagctggtagagcacggagaggcaggcagccaggttacgaagactaagccaattattcactgaagtcatcctcctctcccccaccattcgatttgatctacctctaagccaggctgtgaagaaaaggaaggcactttagaagacctcagcagtgtggttctgtgtctacttccatgacctgtacctgagtatcttagccagccagccttaggaacaccaccaaggttactttgaaatctatgtatatagctagttacagacgggagctatgtgtttcttcattattttgcagctcctcgttgttcctgtgattcctgaacacctttttggaaatatgggtctctgtgagttttgagcacactactatcactttggatagtcactccatttatatttttataaacttccattagagaatcattaaggctgtttaatatctgctctggatattacgcattggctttttgttgcctagtgctacaaaccttcctgtgggactcagtgtcttcaggcaatgattgtgtatcctgttacagatggttgtgatacaagaagaaccactcttctttgaaaataaactcttggaagcttttgccagctatctggggggtaggaggaatattagcaactgtattggttgtctacagatacagaattgcctgttgtgagggaactgattgttttgttgggaaaagaaatttaccaggagaaagagttttgtgctgtattgtgagagatctcgcctctcagttaaatgagccctgggttaaagtcagtgtgaagggcagctgtgtgcgggcacgagccagagtgtctgcctcagactagatttgacttgagttctttatgacccaggactctggataatgtgaatttgctttcctatttaactagaagatacatgtactatagatcattgtctcattttagtgattgttccttaaactagtgaaactagtggatttctcttcttcctctttattttttgcatgttaaatgtgaaccttagtgtatttgtattttgtagaaaataatgaaaaattttaatggagaatgatttaaaaacatttacaatacattatttttgcatctgtaaaaaaaaaaaaaaaaaaaaaaagggcggccgc

SEQ ID NO: 458 - DNA, 1279 bp, Homo sapiens
cataagtgatttactagttggcatattctgcatgcctataacactgctggacaatattatagcaggatggccatttggaaacacgatgtgcaagatcagtggattggtccagggaatatctgtcgcagcttcagtctttacgttagttgcaattgctgtagataggttccagtgtgtggtctacccttttaaaccaaagctcactatcaagacagcgtttgtcattattatgatcatctgggtcctagccatcaccattatgtctccatctgcagtaatgttacatgtgcaagaagaaaaatattaccgagtgagactcaactcccagaataaaaccagtccagtctactggtgccgggaagactggccaaatcaggaaatgaggaagatctacaccactgtgctgtttgccaacatctacctggctcccctctccctcattgtcatcatgtatggaaggattggaatttcactcttcagggctgcagttcctcacacaggcaggaagaaccaggagcagtggcacgtggtgtccaggaagaagcagaagatcattaagatgctcctgattgtggccctgctttttattctctcatggctgcccctgtggactctaatgatgctctcagactacgctgacctttctccaaatgaactgcagatcatcaacatctacatctacccttttgcacactggctggcattcggcaacagcagtgtcaatcccatcatttatggtttcttcaacgagaatttccgccgtggtttccaagaagctttccagctccagctctgccaaaaaagagcaaagcctatggaagcttatgccctaaaagctaaaagccatgtgctcataaacacatctaatcagcttgtccaggaatctacatttcaaaaccctcatggggaaaccttgctttataggaaaagtgctgaaaaaccccaacaggaattagtgatggaagaattaaaagaaactactaacagcagtgagatttaaaaagagctagtgtgataatcctaactctactacgcattatatatttaaatccattgctttttgtggctttgcacttcaaatttttcaaagaatgttctaaataaaacatttactgaaagccctctctggcaaaaaaattaaaaataaacaaaaatggtcataagatcataaacaatcttatgttgtataaaaatacgtagagtgacttagacatgtttgcatgaataaatatatttctagagaacagttaaaaaaaaaaaaaaaaaaaaaaaaaaaaaa

SEQ ID NO: 459 - DNA, 2046 bp, Homo sapiens
tgatttggaaaccagaggaaaggcgctgttttcaccgaattagaatcgcgggaaaatagagaagagtttgtttgaaggtctcgcgagatcgagtgagtacggctcgccaagttggagcgctctcggattagacacagcaactattcagctgcgaggggacgggagaggtggtgagcactctcgcgagatttgaaggagcggcggaggccagagggaggagaggtttgtaaactaggaggctccgggtttccgggcacttttattaggtcgtcttctgggccaccagtgccccttccatctccacaggcagtccctccatcgctaacctttttttaaccggccttttaggaccggaagtccttcatctcaagcatccaatgctgaaagcggcctgattttctctaccggaagcccttttccagaggctgggaacacggcccacctagcaggaagtcccacctccttgagctccgccacccttcccgaagtttttctgtcacctgtgttaggctccgtcccctttccgcgttttatccccgtaccagaaaaggatacatttagtgcctcccacccagctccactaaacgggttggatatctcattctttgagttggtgttccttccccggcgcccccatgtagctgggaagtgggacctgggggtggttggacccctgggatcctaaaggaggggcagggagggcgcagaactccgcttctgctccttgctaccaggacgcgcggcctcctcagcctctttcctcccgctgccatgcaccctgcagccttcccgcttcctgtggttgtggccgctgtgctgtggggagcggccccgacccgggggctcattcgagcgacctcggaccacaatgccagcatggactttgcagaccttccagctctgtttggggctaccttgagccaggagggcctccaggggttccttgtggaggctcacccagacaatgcctgcagccccattgccccaccacccccagccccggtcaatgggtcagtctttattgcgctgcttcgaagattcgactgcaactttgacctcaaagtcctaaatgcccagaagctggatatggtgccgctgtagtacacaatgtgaattccaatgaacttctgaacatggtgtggaatagtgaggaaatccagcagcagatctggatcccgtctgtatttattggggagagaagctccgagtacctgcgtgccctctttgtctacgagaagggggctcgggtgcttctggttccagacaataccttccccttgggctattacctcatccctttcacagggattgtgggactgctggttttggccatgggagcagtaatgatagctcgttgtatccagcaccggaaacggctccagcggaatcgacttaccaaagagcaactgaaacagattcctacacatgactatcagaagggagaccagtatgatgtctgtgccatttgcctggatgaatatgaggatggggacaagctgcgggtactcccctgtgctcatgcctaccacagccgctgcgtggacccctggctcactcagacccggaagacctgccccatttgcaagcagcctgttcatcggggtcctggggacgaagaccaagaggaagaaactcaagggcaagaggagggtgatgaaggggagccaagggaccaccctgcctcagaaaggaccccacttttgggttctagccccactcttcccacctcctttggttccttagccccagctccccttgtttttcctgggccttcaacagatcccccactgtcccctccctcttcccctgttatcctggtctaataaccccccacacatacacctctggtgacctatttgcacagaccgtcgtcttccctccagtcttctgagggataggggacattccatcccaagcttctcccttacccacacctatccttttgaggggctttggggtggagctggggcaagcagagggactgggtcttcacttcttgggctaataaaattgtttctttgtggactaaaaaaaaaaaaaaaaaaa

SEQ ID NO: 460 - DNA, 716 bp, Homo sapiens
ggcacgagcgctgtcctggctgccgccacccgaacagcctgtcctggtgccccggctccctgccccgcgcccagtcatgaccctgcgcccctcactcctcccgctccatctgctgctgctgctgctgctcagtgcggcggtgtgccgggctgaggctgggctcgaaaccgaaagtcccgtccggaccctccaagtggagaccctggtggagcccccagaaccatgtgccgagcccgctgcttttggagacacgcttcacatacactacacgggaagcttggtagatggacgtattattgacacctccctgaccagagaccctctggttatagaacttggccaaaagcaggtgattccaggtctggagcagagtcttctcgacatgtgtgtgggagagaagcgaagggcaatcattccttctcacttggcctatggaaaacggggatttccaccatctgtcccagcggatgcagtggtgcagtatgacgtggagctgattgcactaatccgagccaactactggctaaagctggtgaagggcattttgcctctggtagggatggccatggtgccagccctcctgggcctcattgggtatcacctatacagaaaggccaatagacccaaagtctccaaaaagaagctcaaggaagagaaacgaaacaagagcaaaaagaaataataaataataaattttaaaaaaaaaaaaaaaaaaa

SEQ ID NO: 461 - DNA, 911 bp, Homo sapiens
  misc_feature (782)..(782): n equals a,t,g, or c
  misc_feature (851)..(851): n equals a,t,g, or c
  misc_feature (869)..(869): n equals a,t,g, or c
gtgatcagcataccggtcaagtcctacccccagctgctggtggacgaggcactgaacccctactatgggttccaggccttcagcatcgcgctgtggctggctgaccactactactggtacgccctgtgcatcttcctcatttcctccatctccatctgcctgtcgctgtacaagaccagaaagcaaagccagactctaagggacatggtcaagttgtccatgcgggtgtgcgtgtgccggccarggggagaggaagagtgggtggactccagtgagctagtgcccggagactgcctggtgctgccccaggagggtgggctgatgcctgtgatgccgccctggtggcyggcgagtgcatggtgaatgagagctctctgacaggagagagcattccagtgctgaagacggcactgccggaggggctggggccctactgtgcagagacacaccggcggcacacactcttctgcgggaccctcatcttgcaggcccgggcctatgtgggaccgcacgtcctggcagtggtgacccgcacagggttctgcacggcaaaagggggcctggtgarctccatcttgcamccccggcccatcaacttcaagttctataaacacagcatgaagtttgtggctgccctctctgtcctggctctcctcggsaccatctacagcatyttmatcctctaccgaaamcgggtgcctctgaaatgagaattgtaatccgggctctcgacctggtgaccgtggtggtgccacctgccctgcctgctgccatggactgtntgcacgctctacgcccagagccgactgcggtagacaggggcattttctgcatccacccactgcgcattnacctggggggcaagttgnagttggtgtgtttcgacaagtggggccgcatgggggttggtg

SEQ ID NO: 462 - DNA, 1063 bp, Homo sapiens
  misc_feature (84)..(84): n equals a,t,g, or c
  misc_feature (1017)..(1019): n equals a,t,g, or c
cttgatgccaaaaaggcggggggagctctccaccctgtttgacgtgggcggaatctttggtgggatcctggcaggtgatctcanaccgactgggagaaaagggcctccacctgcggcctgatgctgctgctcgcggcccccacgctctacatcttctccaccatcagcaagatggggcttgaggccaccatcgccatgctgctgctcagcggagccctggtcagtgggccctacacactcatcaccaccgccgtctccgccgacctggggactcataaaagtctgaaaggcaacgcgcacgccctctccaccgtgacggccatcattgacgggacgggctctgtaggagcagccctgggccccctgctggctgggctcctctccccgtccggctggagcaatgtgttttacatgctgatgtttgcagatgcctgtgccttactgttcctgatccgcctcatacacaaggagctgagctgcccagggtcagctacgggggaccaagttccatttaaggaacagtgacaccccaccccagtcccgtggagggggtctgggcccacccttcacaactgcctttcaaggacagttcagacaaagggccctgcatggaaagagtgacctccctttgccttttgcacacgcacctggaaaagacacagaagccaacctgagaacccctggtgctattttaaaggagacatattgctgaacagcagtgagaaaagtctgcaggaactgctgcctgagccaagccagagaaccgaagacccggccggccctggctcacaggcgtgtgcccatgcagccacccaaatgcacgcgtgacaacaaggccgggagggtggggggggtgcacaggtagccccgaccctctcaggcattycagccacagaacatcaaagtgagcgagtactgcgctggctgtggcttcagagaacctgtatgtgccacgtggaaaaacaggacaccagagcccaccagacagtgccggccagcagagaagcagaaagccannnccacacaacatcaagaaggccgacaaccaggttggaagccaagt

SEQ ID NO: 463 - DNA, 726 bp, Homo sapiens
  misc_feature (613)..(613): n equals a,t,g, or c
  misc_feature (669)..(669): n equals a,t,g, or c
  misc_feature (698)..(698): n equals a,t,g, or c
  misc_feature (714)..(714): n equals a,t,g, or c
gcaaaaagctggaatgtttgagctcaaggacttggtttcaggagggggtacaaatattgccctgccttcagtgttgatattgaccaagaacagctcatccctgcctctcssyraaccaactctattaatctgctttaagtagtcacaaaataattcatgtgctatttaggaataaaataattccaaatgttgacacctcaccttttatcttrtaagatacactattgaatggccccagaacttaggatctgaagaataaatgattcttgtccagtcatcgttgactcgggccttggtttttttgtttgtttgttttttgttttgcttccttggactcaggaacttgtggttcaggtttttgcctgttggtgagtgacctgtggtctagctgacatgcagtggcccatgtgtacattcatgccccacagctgcctgggtagtacccagagccccatcccttcctgtgcacacgccatctgtgccctcctttctgcctccaagggcaggtggcagagtccaccattcagagccactggggctctctgtgtcggtggtagcctgggttgctgcttgtggtgcctccagaagccattcaggatgccctccggagcangcccatcaacgcggagagtgcttagcacagccgtggctcaagagccgtccctccantcccacgaaatgactcctcttcttttccntgcagaaggtgtgcangtttttagcaag

SEQ ID NO: 464 - DNA, 2062 bp, Homo sapiens
  misc_feature (1998)..(1998): n equals a,t,g, or c
cactagaggcagaggggtgaacaagatacccttctgcctggggggatgtccacttcccatgggtttggctatttccaggaaagcccctcagtcctccaccctgttctggctgtktgtgaaggatgtgtgtgagcaggcccaatcctttgcagcaagaatgagaggtcagagtattccattgcacacgcaccctggggctgacagacttgtgccccctagccttcatgcatgcccaagcactggcagctttgcagcccctgccccaccagccccttgacgstcttyttttgttctctcctcggggatgagctctgctgctgagtagggagcttttgcttgctgggaggctctatggcatggatttttttggtgaccatacagytagggctgaggatgggaacwgggacagagggcctggctatccctagaagcacttcatccatctttacccacccaaacgggatcccttcacatctcatacccagtaagatgcaagaaaggaatatctgagagcaagcagccctgctccaggggccccaggtatgtgtagaggcccagtgggggtggccacttggtgtttctaccaccccctgccatccagtctggccccagtacctacctgggaggttggtgtacttggcttaagtacttcatgctttattcaggctgcttccccacagcaccggcaggaaatgaaggtgcacttatatgcatccctgcaggaataaagagtgggtggcctgcccagcccagcaccacrgcctttccccagccagggagagaccacctaaggwtcaaggcagctcctgttttcttggttctgtgacactcgagtctgagccagcccytcaggaattgcctcaaaagagaaaaacaaaaaaaagtcctccttcccaaggcctgctactccaaggtttggctccatcccttgcctttgggtcctgcctatttccccactcctggtctcttatctttggggccaccagtggggagtcacccgggccccaatccctctaaggcgctaagttgaaggaggccttcccagagtgactattggtgccaaagtcccagttcctgttggacttggggtaaaaacaggagatggtgagtgggtgtaaggcccaaatgcccagagaagttaactcgaacccatgggacctgtcccagcctgtcagtccctgatgagtgtaacttccttcccctgggggcctggcccttctctccaacccagtggccatgctttctcacccagccttgtgcccggcctgcatttctgtatatattgctgtgtattgtgtgtatgtatgtattcctggacaagtgtgttcatctgcagcccttgcctgaggataaggtttaggattgggtaaagatcagaataccagggccagctaaggcaacgactccctccccaaacccttgggacctcagccagtcccaaggctgccctgacaatcaggcaggctccccaccgtgaggccaagcctcctctgccactgccagcatggcccaagggaggcttggccttgggcttgccagcctcagctctgccctgacaagggtcttgtatccagggcagaggcctgaggtgacccaggcttgctttgtggctgatgccagcaggcttggttctagtgggcaccactggtgggcaacctccataactggcccttaggccctaccttcctacacagctaggctataatgggcctgagtgagagggtagcttccccagccccaagcacaggcagaggggtggagagcaatttttggttttatttttgtttctgaagtggtgcctgtacctccagcccccagggggccttccctggccacacttctctgccccacccaggcatcgccatcccagcactttgctccatgtcacccgtaagatgccctttgctgaatgtacctgagtgtatgtatttaaaaggactcacatgggcatcagagaatttatggctctgtatccaataaaaaagatggtgaaactgnaaaaaaaaaaaaaaaaaaaaaaaaaaaaaaaaaaaaaaaaaaaaaaaaaaaaaaaaaactcgag

SEQ ID NO: 465 - DNA, 1459 bp, Homo sapiens
  misc_feature (307)..(307): n equals a,t,g, or c
  misc_feature (1393)..(1394): n equals a,t,g, or c
ttttttttttgggatttttaatctttaattttcaagatggttaaaatattgaaatgtttaagtggataactatattattcataaaatgactgagtgaaaactaatatactatgagatgaaaagtacttgtcagggattttcaagcttttgctcaagtaattaccatgaagtaacaatttctagaaatgaagaacaatctgtgaagataaattaccattggtgtggggaaaaaaagccaaacagaagtagaaaaaggtgtagctggcatacaaatgttatctacagtgtatttatatatatatatttntaaaacttttaactaaaaagtaaactttaatgtcgaaaatgcaaacttggggaagacagaaaagatcacacacaaggctgtcacttcacacgtggaaggttgcacagcggccgggcagaggcgcttgtcacacttcccagatggtcaggcggccaggcagaggcgctcctcacttcccagacggggcagcagctgggcagaggtgctcctcacttcccagacttttatattttttatacttgaccaggtctcttatgtcctttttctggaaaactacttttaactactaaagtgattataaatgaaaaagtggccaataaagtgactactatcctcagggctttaaaccagttgggataatgtggtaagagaaaaagttcaaggtggaatgctactcccatacccattattactgtgactatggcttcactaagtctttcagaaataaggaaggcaaaccatgaaaagaaaagaggagctgcactgctagctaaattaaggtagtctggtttggctggactaccttctggtagagcaaaaccccatctgatcccacccaagaaagataggaaactggctccataagccatctgagtaaaagctaatatgggaatataagtttttgtcatcagcatgaccagtggtggagcaacgaaggggattagtcctgccagagttacacataatgctggctttgggctgtcagttaggtaagtgatggtgcttgagggtctggctagaagtgcttgcttctgctgctttttaaagctgcagggggatgtatgatagcactgtgtcttgctcatatacgctggaaatgatgaggaaagccaaggccttggacatggggaaaagttttgctggagagacatcttgagagaaagtatatctgttctgctggttcttagtcccactgggaaagagtacttcagtatctttgaagatgcttgagaaaacttctggatgaagcgaagcatactggcccctattgaaagtcttgttcaggaagatgccaggtagttctgattaacatgttacagctaagcagaggcactgaatcaggggcatgtttcagcgttgcacggnnagaaggaaaacaaccgcaacaacagcccaggtccactggaaaggcacttccggcaagtggattca

SEQ ID NO: 466 - DNA, 608 bp, Homo sapiens
  misc_feature (577)..(577): n equals a,t,g, or c
ccggacgtattctgcgctcaatggcgatgggcggttccgcaccgagttttatggcgaaaatgagtcgtcagcatgtgccgtatgccgggattctggcgacactagttgtgtatgtcgtcggcgtattcctcaactatctggtgccgtcgcgcgtatttgagattgtgttgaacttcgcgtcgctgggaatcatcgcttcatgggcgtttatcatcgtgtgccagatgcgcctgcgtaaagcgattaaagaaggcaaagcagcggatgtcagttttaaactgcctggcgcgcccttcacttcctggctgacattactggttttactgagtgtccttgtgctgatggcgttcgattacccgaacgggacttatactatcgcggcgctgccgattatcggtattttgctggttataggctggtttggtgtgcgcaaacgcgttgctgaaattcacagcactgcgccagtcgtcgaggaagatgaagaaaaacaggaaattgtgkttaarcctgaaacggcgagttaattgcaaaattscccggctacgtgccsggcaaattcagawtactgacgaaagtnccggatacgccgtgataaaaggcaggcaagt

SEQ ID NO: 467 - DNA, 980 bp, Homo sapiens
  misc_feature (530)..(530): n equals a,t,g, or c
  misc_feature (599)..(599): n equals a,t,g, or c
  misc_feature (615)..(615): n equals a,t,g, or c
  misc_feature (750)..(750): n equals a,t,g, or c
  misc_feature (761)..(761): n equals a,t,g, or c
acggatgatgttgcgcgaggttgcaaactcctcacagagttccgcctcagccggaagcggcgagcctggcacgtatttgccgtgaacgatctgtttacccagcgtaatgacaatgcgatcggttttattgagagtcatggagagtccttgtgctctgtatgttcttctctactttaccccgatcgatgcataacgcggcaactttgtagtaccagcgtgatgacgttcgcgtttgccgtgcgtgtaatgtagtacaaacttatattgttgtactacaatttagatcacaaaaagaacaatgcataaaaaaatgacatgcgtcgggcagaaatctgaaaagggatatcaggcgctaaacaggagggaaagaagagtatgctttcaacggcttagctactcgtttaaaggattaatcatgaagttgaattttaagggattttttaaggctgccggtttattcccactggcgctgatgctttcaggctgtatctcgtatgctctggtttcccataccgcaaagggtagttcangaaagtatcaatcgcagtcagacaccatcactgggctatcgcaagcaaaagatagtaatggaacaaaangctatggtttttgtangggaatcgctggattaccttatcactgatggtgccsatgacatcgttaagatgctcaatgatccagcacttaaccggcgcaatattcaggttgccgatgacgcaagatttgttttaaatgcgggaaaaaaaattnaccggcacaanatcgctttactactactggaataacgaagaagaaaaggcactggcaacgcattatggttttgcctgtggtgttcaacactgtaccaggtcactggaaaacctaaaaggcacaatccatgagaaaaataaaaacatggattactcaaaggtgatggcgttctaccatccatttaaagtgcgattttatgaatactattcacccagaggcattccggatgg

SEQ ID NO: 468 - DNA, 1465 bp, Homo sapiens
ctcttttaacagtagctgacctattggatttaaactgagactgaaattgacatttgtggttaggttatctagctgaggcttttaacaatggagcagataatgtctgttcctgtagtggatccatttaatttcctatttgagtactctcacttaacaagtattatctattctgaacctttgtgttgggaatttaaggactattgtcaaaggctattaatggtaaacaagtatatgcaaaacaattcacatatgggtaaaaatttcaaattgtgggtttttgtttttgctttttagtttcaaagattagttatgtagcagcaatatcataaccaaagcaagtaggaagttgactggtttggagaatcttcaagtagttttaaatactgtaatgtatcagattgttaaccaggatttttttttcctgtattactgctaaatatattactatattaatgcacttttgtatatataactgtcttctgtacattctgtacttactacagtgtatataaagcctgttttccctgaagctgtgagggaataacaatagttgtatcataagtcgtttctattttgagttccttcttgtacttgaaagtagttcagtagtgaaatctaaatgagtgtgtatggttgtaattaaaactggcaatgtggcagagctgtcttttgaaactgaataccagaatgaaaagtgttgttttggttaagaacycttataatatattatttcttttgatgtaccctgagttgttacacagcccactcactgctgcttactactttatacttctgagtcagctcctttcatgctctatcccagaatatttaccaacagaaggagaactgctcccttttctgtttctcacagtttggttatggctttataaacttttatttggtgaaagccccagatacccaaatgtcattggcaaaacttatttttttttctggacagatcagatttctagagagagcagatttctagagagattagcattcatagtaagtgaaaattgtctaatttttttaatccatgctattactgggcagtaggtctaattttttttgacaaaaaatagatctattttccttatatattgatttagaatcttaagttagaattttatagaagaaatgtctgagcagttctatgtatggaggagcaattcagcttttcagcagcaactttatcttttgccactagagggagatctgtggttgctttctcctttggagaatagctgctttgcttttatttttaatttctaaggttggaatagaacttattctcaaaattcctttagtgttattaaatattttcatttattagtcaaaggtaagttaattaagcttgtttaatgatgccaatcttatgcttttctgtaatcttcaatttttaataaatgtgagttagatactaagtgaaaaaaaaaaaaaaaaaaaaaaaaaaaaaaaaaaaaaa

SEQ ID NO: 469 - DNA, 1143 bp, Homo sapiens
  misc_feature (112)..(112): n equals a,t,g, or c
  misc_feature (1071)..(1071): n equals a,t,g, or c
  misc_feature (1077)..(1077): n equals a,t,g, or c
gccgcatcatgtccaccaccaacgtgcgcaagttgatgaactgcggaggcttcggcatggaagccacgctgctgttggtggtcggctactcgcactccaagggcgtggcatnctccttcctggtcctagccgtggcttcagcggcttcgcatctctgggttcaacgtgaaccacctggacatagccccgcgctacgccagcatcctcatgggcatctccaacggcgtgggcacactgtcgggcatggtgtgcccatcatcgtgggggccatgactaagcacaagactcgggaggagtggcagtacgtgttcctaattgcctccctggtgcactatggaggtgtcatcttctacggggtctttgcttctggagagaagcagccgtgggcagagctgaggagatgagcgaggagaagtgtggcttcgttggccatgaccagctggctggcagtgacgacagcgaaatggaggatgaggctgagcccccgggggcacccctgcacccccgccctcctatggggccacacacagcacatttcagccccccaggcccccaccccctgtccgggactactgaccatgtgcctcccactgaatggcagtttccaggacctccattccactcatctctggcctgagtgacagtgtcaaggaaccctgctcctctctgtcctgcctcaggcctaagaagcactctcccttgttcccagtgctgtcaaatcctctttccttcccaattgcctctcaggggtagtgaagctgcagactgacagtttcaaggatacccaaattcccctaaaggttccctctccacccgttctgcctcagtggtttcaaatctctcctttcagggctttatttgaatggacagttcgacctcttactctctcttgtggttttgaggcacccacaccccccgctttcctttatctccagggactctcaggctaacctttgagatcactcagctcccatctcctttcagaaaaattcaaggtcctcctctagaagtttcaaatctctcccaactctgttctgcatcttccagattggtttaaccaattayttsgtnccccgncatttcagggattgrattctcacagcgttttgtggattgggaaaatggggggtttcaagttccccg

SEQ ID NO: 470 - DNA, 1183 bp, Homo sapiens
  misc_feature (212)..(212): n equals a,t,g, or c
  misc_feature (1134)..(1134): n equals a,t,g, or c
ggcacgagtgctgctgctgcggcggcggcagcggcgtctgtgcttgtggaggtgtcggcctctgggcggatgttgacattgtgttgttgttattgctgatggtaatggcggcggcggtggcggcgacggtccagaccccatcccctctgtagccggagccgagacagccgacagcgaactccgcggcctcggagccggcggcagcggcgacntcccctcagcctccgccgcctcgcccgccggtaccccggcgccaaccccgggagtcaggccctttgcaggggagctcggaggctcaggatggcggatttcgacgaaatctatgaggaagaggaggacgaggagcgggccctggaggagcagytgctcaagtaytcgccggacccggtggtcgtccgcggctccggtcamgtcaccgtatttggactgagcaacaaatttgaatctgaattcccttcttcattaactggaaaagtagctcctgaagaatttaaagccagcatcaacagagttaacagttgtcttaagaagaaccttcctgttaatgtacgttggctactttgtggctgcctttgttgctgctgcacattaggttgcagtatgtggccagttatttgcctcagtaaaagaacacgaagatcgattgagaagttattagaatgggaaaacaataggttataccacaagctgtgcttgcattggagactgagcaaaaggaaatgtgaaacgaataacatgatggaatatgtcatcctcatagaatttttaccaaagacaccgatttttcgaccagattagcatttactttatttatagagactttccaagtatgttgtctttccaatggtgccttgcttggtgctctcctggtggtgacataacattggttctacagaatcgtgtggtgttttttttgtttttgtttttttttttttttaaataaccgcatgttctaagtgtgcatttttgtcaatctttgcaacagttatttcatacagatgtttaatacttaagttattgtgctcttttctgttatgtattctgattttcaaggattacttttttgtattatcaaaaaaatacmtttgaacttagcataaaaagtggccagccttttttattttgcaccaaggnacacacaggcctttatttataaattccttaacagagaaaaacacctttg

SEQ ID NO: 471 - DNA, 458 bp, Homo sapiens
  misc_feature (416)..(416): n equals a,t,g, or c
gactaatgcagattttttttttttaagttttatagagattcatgggattttattctttttcccaaaggcagtggtggagctgacagagtagcatggagcctcgtcctgatgtattgtgcggaagtggcagcagttcacattcattcagtttgtcagcataggatcagttccttcttgactcaactctctgtgatcaaaataagctattggatgttccctttgggtactggaagcagcttggccccttggcaagagaacaggattgcaaatcacaagagcagagccctgactccagctctgatgctactgtgctttgtgaccttgtgcagacagctttatatccccatctcaggtcattctcccccatacaragggggagarggtcatcttgccctggycatgtctgcatggctgangtgaataactaaytgtgtaacttcctggawgagtggcacaga

SEQ ID NO: 472 - DNA, 433 bp, Homo sapiens
  misc_feature (5)..(5): n equals a,t,g, or c
ggggnggccatggtgtcaggcccgggtgggggcggccgtggtgtcaggcccgggtgggggcggccttggtgtcaggcccgggtgggggcggccgtgttgccaggcccgggtgggggcggccttggtgtcaggcccgggtgggggcggccttggtgtcaggcacgggtgggggcgagggcaagagggcaacggtgggaatcgccatgtgggctggaccagctaaaggctcgtatttgcatattaaaggttgccaagccgggtctaagagccagggctttcacgctagacaagaaacattttttggagctgcaaaaaatgcttccaaggaccctttttcctctctctctctctctttattttttcttttttggatatggagtttcactcttgttgcccagccyggaagttgcagtgagccgagatcgagccattg

SEQ ID NO: 473 - DNA, 950 bp, Homo sapiens
  misc_feature (926)..(926): n equals a,t,g, or c
  misc_feature (935)..(935): n equals a,t,g, or c
  misc_feature (949)..(949): n equals a,t,g, or c
cgcgggagaaggggagaccgcggcggcccccagtgagagcggctttccaggacggtgcgatgtgctgcgcacgaagaggcaggaggccggcttcctggggtagcggtacaggcgggcgcttactctgtgcgcttgcttccccaaccctgcaccggccatgcgcccggccttggcggtgggcctggtgttcgcaggctgctgcagtaacgtgatcttcctagagctcctggcccggaagcatccaggatgtgggaacattgtgacatttgcacartttttatttattgctgtggaaggctttctctttgaagcggatttgggaaggaagcggccggctatcccaataaggtactatgctgtgatggtgaccatgtwcttcacggtcagcgtggtgaacaactatgccttgaatctcaacatcgccatgcccctgcatatgatatttagatctggttctctcattgccaacatgatcctaggaattatcattttgaagaaaagatacagcattttcaaatatacctccattgccytggtgtctgtggggatatttatctgcactttcatgtcagcaaagcaggtgactttcccagtccagctcggagtgagaatgatggattccaggcatttttaaggtggctgctagggattggggcactgacgtttgcacttctgatgtcagcgcggatgggtattttccaggagaccttatacaaacaatttgggaaacattccaaggaggctttgttttataatcatgcccttccgcttcctggcttcattttcctggcttccgacatttatgaccatgcagttctgttcaataagtcagaactgtatcaagttccggtcattggtgtgacagtgcccatcatgtggttctacctcctcatgaatgtcatcactcaggaccagtgcatccggtngtcaacganctcaccacggaatnc

SEQ ID NO: 474 - DNA, 2678 bp, Homo sapiens
gcagagattggccattccgctactgcgcaaagatggtggaggaggagaacatccgcgtggttcgttgtggcggcagcgagttgaactttaggagagctgtgttctctgcagattctaagtatatcttctgtgtctctggagactttgttaaagtttacagcacagttacagaagagtgtgtacacatactgcatggacacagaaatctggtgactggaatccagcttaaccccaacaaccatctacagctgtattcttgttcccttgatggcacaattaaactgtgggactatatagatggcatcttaataaagactttcatagttggatgtaaacttcatgccctctttactcttgcccaagctgaggattctgtctttgttatagtgaataaagaaaaaccagatatatttcagctggtttcagtgaaactgccaaaatcctcaagccaggaagtagaagccaaggagctgtcctttgttttggattacataaaccagtcacccaagtgcattgcctttggaaacgagggagtatatgttgctgcagtacgggaattttacttgtctgtttattttttcaaaaagaaaacaacatcaaggtttactttatcatcatcaagaaataagaagcatgctaaaaacaattttacgtgtgtagcatgtcacccaacggaagactgcatcgcatctggtcacatggatggcaaaattcgtctttggaggaatttttatgatgataagaaatatacgtacacatgtttacattggcaccatgatatggttatggatttggctttttcagtgacaggcaccagtctgctgagtggcggtcgtgaatctgtacttgtagagtggcgcgatgcaacagagaagaataaggagtttctcccgcgtttaggagctactattgaacatatctcagtctcgcctgcaggagatttattctgcacttctcactctgataataagataataattattcaccgaaaccttgaagcatccgcagtaattcaaggcctagtgaaagataggagtatcttcactggtttgatgattgatccaagaactaaagctttggttttgaatggaaaacctggccacctgcagttttattctctccagagtgataaacagttatacaatttagatattatacagcaagaatatattaatgattatggtctgatccaaattgaactaacaaaggctgcatttggctgctttggtaactggcttgcaacagtggaacagcggcaagaaaaggaaactgagcttgaattgcaaatgaaactgtggatgtataataagaaaacacaagggtttattcttaacactaaaattaacatgccacacgaagactgcattacagctctctgtttctgtaatgcagaaaaatctgaacagcccaccttggttacagctagcaaagatggttacttcaaagtatggatattaacagatgactctgacatatacaaaaaagctgttggctggacctgtgactttgttggtagttatcacaagtatcaagcaactaactgttgtttctccgaagatggttctttactagcagttagttttgaggaaatagtcacaatatgggattctgtaacatgggaacttaaatgtacattttgccaacgagctgggaaaataaggcacctttgctttgggagattgacgtgttcaaagtatctacttggtgctactgaaaatggcattctttgctgttggaatctgctgagctgtgcattggagtggaatgcaaaattaaatgttagagttatggaacccgatcctaattcagagaatattgctgcaatctctcagtcttcagtgggttcagacttgtttgtatttaaacctagtgagccaaggccattgtatattcaaaagggtatctccagagagaaagtccagtggggagtgtttgttccacgagatgtccctgaatccttcacctcagaagcttaccagtggctaaatagatcccagttttacttcctaacaaaatcacagagtttattgacattcagtacaaagtctccagaagaaaaactcacaccaacaagcaaacagctgctagcagaagaaagtcttcccacaaccccattttatttcatattgggaaaacacaggcaacagcaggatgaaaaactaaacgaaactttagagaatgagctggtacaactacccttaacagaaaacatacccgcaattagtgagcttcttcacactccagcccatgtcctgccatctgctgctttcctgtgctccatgtttgtaaattcattgctgctgtctaaagagactaagagtgctaaggaaattcctgaagatgtagatatggaagaagaaaaagaaagtgaagattcagatgaagaaaatgattttaccgaaaaagtccaggatacaagtaacacaggtttaggagaagacattatacatcagttgtcaaaatctgaagaaaaagaactgagaaaatttaggaaaatagactacagctggatagctgccctttaagccttggagatggggaggatccttggactttgtgtttttgattgtatgttgatattctaaaaacatctattttaatgttatttctgttctaaaaataagataataaatattaacaaactttgcttttttaaaaaactgaaaaaaaaaaaaaaa

SEQ ID NO: 475 - DNA, 1047 bp, Homo sapiens
  misc_feature (1043)..(1044): n equals a,t,g, or c
gccgcgcccggccagcctgaggtggggtcggtgcccccggsggcacggcgctggggaggcgatggcgccggccgcgtccaggctgcgggccgaagccgggctcggggcgctgccgcggcgggcgctcgcccagtacttgctcttcctgcggctctacccggtgctcaccaaggcggccaccagtggcattttgtcagcacttgggaacwwcctggcccagatgattgagaagaagcggaaaaaagaaaactctagaagtctggatgtcggtgggcctctgagatatgccgtttacgggttcttcttcacagggccgctgagtcacttcttctacttcttcatggaacattggatccctcctgaggtccccctggcagggctcaggaggcttctcctggaccgcctcgtctttgcaccggccttcctcatgttgttcttcctcatcatgaactttctggaggggaaagacgcctcagccttcgccgccaagatgagggggggcttctggccggcgctgaggatgaactggcgggtgtggacgccactacagttcatcaacatcaactacgtccctctgaagttccgggtgctcttcgccaacctggcagctctgttctggtatgcctacctggcctccttggggaagtgacgaccgctgggagaacatcaggtgcactgtggacgtgggtctgggggtctcacccgcccagcgagagcagaaccaatccagtcaggatgtcactgactctaaatcaggtgattcaagatgcccaaaaatgatggatagagaaacagaaatctctgaatgtcagaaccctgtcttttaaaaaggcagtcrctgccttcaggtggtgctgccccagaaacttaaaatttagtcgaggcagtttcaattgttactgtggaccgaattaggatcacaataaacgataatgcaggttcttcaaaaaaaaaaaaaaaaaaaaaaaaaaaaaaaaaaaaaaaaaaaaaaaaaaaaaaactcgagggggggcccgtacccaatcgccctgatgatgatctgnncac

SEQ ID NO: 476 - DNA, 1568 bp, Homo sapiens
gctcggcggcccttgggctctgcgggctggggactcggggtgcccgckacacgcgcggaggcgcgggctgggttggccacgggcagggagcgcagccgcgctccttcctctctgcccgcgtcgcctccgcgcgcactggttctgcgcggcggggcttggcctgcgcgactgtctactccgtcccggcggcctcggagcccggccgagcggcgagcttgtcagaggacggtggtggaaacgctcccggcctccccaggggcrcgggctggaggctggcgccaggcgcggaggactcccggtatcttttgacaggctggcgcctcggctctggggacccgcaggaatyaagtttagacttgaaattcaagtttttcctgaaactgatcagaagttagtgacaccttgattggatccgtttttctgtcaggagctcattttgcagctctcaagcttttatagcatgctgtaaacaattgtcaaagttgtttatcaagaaacagatagagttgcaacttgkttctagtaatagaaacttttacactgcattcaatgcctaacgttgcagaaacagaaaggtcaaatgattctggaaatggtgagcacaaatctgagagaaagtcacctgaagagaatctacaaggtgctgtaaaatctttctgcacaagtgcctcaggagcacccttgggtcccaaaggagatggtcattatccatggagttgtccagtgactcatacacgggaaaaaatttatgccatctgttcggactatgcctttctcaaccaggcgacctcaatctataaaactccaaatccatcccgctctccttgcctccctgatagtacctctttatctgctggaaataattcatcaagatacattggtatcccgactagtacatcggaaattatctacaatgaagaaaatagcttggaaaacttatccaacagcctgggcaagctacctctcgcatgggraattgataaatctgaatttgatggggtgaccacaaattcgaaacacaaatcaggcaatgcaaagaaacaagtttccaagagaaaaacttcagataaaaagggaagatatcagaaggaatgtcctcagcattctcctcttgaagatattaaacagcggaaagtattagacctcagacgatggtactgcataagccgaccacagtataagacttcttgtggcatctcttcattaatttcttgttggaatttcttatacagcacaatggggagctgggaaaccttccacctattacccaagaagaagctttacatattctgggctttcaacctccatttgaagatattaggtttggtcctttcacggggaatacaacacttatgaggtggtttagacaaattaatgaccacttccatgtaaaaggatgctcttatgttctatataagcctcatgggaagaataaaacagcaggagaaactgcttcaggggccctgtcaaagttaacccgtggattgaaagatgaatcgctggcttatatctatcattgccaaaatcaytatttttgtccaattggcttcgaagcaacccctgttaaa

SEQ ID NO: 477 - DNA, 2552 bp, Homo sapiens
gcgaagagctactctgaaaagatcatttactcctgtatttttgggaagcgccttgaagaacaaaggagttcagcctcttttagatgctgttttagaatacctcccaaatccatctgaagtccagaactatgctattctcaataaagaggatgactcaaaagagaaaaccaaaatcctaatgaactccagtagagacaattcccacccatttgtaggcctggcttttaaactggaggtaggtcgatttggacaattaacttatgttcgcagttatcagggagagctaaagaagggtgacaccatctataacacaaggacaagaaagaaagtacggttgcaacggctggctcgcatgcatgccgacatgatggaggatgttgaggaagtatatgccggagacatctgtgcattgtttggcattgactgtgctagtggagacacattcacagacaaagccaacagcggcctttctatggagtcaattcatgttcctgatcctgtcatttcaatagcaatgaagccttctaacaagaacgatctggaaaaattttcaaaaggtattggcaggtttacaagagaagatcccacatttaaagtatactttgacactgagaacaaagagacagttatatctggaatgggagaattacacctggaaatctatgctcagaggctggaaagagagtatggctgtccttgtatcacaggaaagccaaaagttgcctttcgagagaccattactgcccctgtcccgtttgactttacacataaaaaacaatcaggtggtgcaggccagtatggaaaagtaataggtgtcctggagcctctggacccagaggactacactaaattggaattttcagatgaaacattcggatcaaatattccaaagcagtttgtgcctgctgtagaaaaggggtttttagatgcctgcgagaagggccctctttctggtcacaagctctctgggctccggtttgtcctgcaagatggagcacaccacatggttgattctaatgaaatctctttcatccgagcaggagaaggtgctcttaaacaagccttggcaaatgcaacattatgtattcttgaacctattatggctgtggaagttgtagctccaaatgaatttcagggacaagtaattgcaggaattaaccgacgccatggggtaatcactgggcaagatggagttgaggactattttacactgtatgcagatgtccctctaaatgatatgtttggttattccactgaacttaggtcatgcacagagggaaagggagaatacacaatggagtatagcaggtatcagccatgtttaccatccacacaagaagacgtcattaataagtatttggaagctacaggtcaacttcctgttaaaaaaggaaaagccaagaactaactttgcttactgtgagttgactgactctaattgaatctgcgtggttttgatactttgatggattccagtggaataaattcaggctgctgaaacaagaaattctgagcccaggaagcgggctcttctttcttcaaaagaagcccttcttgttcatattcaggagcttctgttatattcaaaggtaattctatgtctatctcaactctattgattggttttatagttyattgaaaatcctcaaataaaatataattattactgaaatatgtttaatatttaaggggaaaagagactaatttcagttatacttttaagcttagaatgtatgttcatttccaaattttgtatcataagagttttcaacatagagaaaagctgaaaaaatgcaaagaataaccacatactttccatctaccttcctttgttaacgggttgtttatcatataataatttgttttgtcatatttgctttcactgtctattatctgtttaagtctcataactctatttttagtttgctgaagacttgaaagtgaatcgcatatatcatgacacttcttggagtgtcattaatgggcaggcttttctgttgaagagtggattccgtatgttcttcatagagagtgtttttcagattcttcattgggatattaaaatattagccaaatttctctctgttttatatatgtcagtttatttcagtttgtggtttctgcaaatttgtaactgcctctgttttaggagtataagtattacttccttgtggtctattgtgaagtaaaaagtagacccttgcatatactattcttgtttgtgttcatcttaatgtttttgtacagctaaatcaaatgtaatttatagagttagtttcatcaacctaatgaatgctagttaaatttgaattccttggaatttatcgtatattgtattcactgagattatgaagggacaaatgttaatcttttgtttccagaaaaagttgggctttcccaagcagttctattacccggttcagaattgcttcatccaaaaatcatctgatggtatagatggatcctagtccttttcattacctgatggtagaaataaaataattgattttaaaaaaaaaaaaaaaaaaaaaaaaaaaaaaaaaaaaaaaaaa

SEQ ID NO: 478 - DNA, 1670 bp, Homo sapiens
  misc_feature (1639)..(1639): n equals a,t,g, or c
  misc_feature (1653)..(1653): n equals a,t,g, or c
  misc_feature (1663)..(1663): n equals a,t,g, or c
gctttctcatccggccggcttgctttcccctgcggtcgtccagactattgggcgctagcgagacgaactattggtacggggctagagaggaaggctttgggattgccggggagcagcgagcgaccgacttccgtttccagttaccaaggcacgaggatccggtgttccaacccagggggaaaaatgcggcctttgactgaagaggagacccgtgtcatgtttgagaagatagcgaaatacattggggagaatcttcaactgctggtggaccggcccgatggcacctactgtttccgtctgcacaacgaccgggtgtactatgtgagtgagaagattatgaagctggccgccaatatttccggggacaagctggtgtcgctggggacctgctttggaaaattcactaaaacccacaagtttcggttgcacgtcacagctctggattaccttgcaccttatgccaagtataaagtttggataaagcctggtgcagagcagtccttcctgtatgggaaccatgtgttgaaatctggtctgggtcgaatcactgaaaatacttctcagtaccagggcgtggtggtgtactccatggcagacatccctttgggttttggggtggcagccaaatctacacaagactgcagaaaagtagaccccatggcgattgtggtatttcatcaagcagacattggggaatatgtgcggcatgaagagacgttgacttaaaacgaagccattccaaggacagacggctgtatggaaaggccgagctttgtttcctgtgtttgtgtggactccaccatcatgttgaattttgtcaacactctggcctcttcagggacttcttatttactgtactctctatcactgacaaatgcaggctggattcttattatatacagagatggctcaaaaatggggtttcagatctttgtgacgaaatagaatactgtttcatatttgaatcagagggcttcttgttctgagaaataggttcaaaatcattggaaccaggaacaagaatagcttattgttatctgtgataacactgttttctaaacacaaggattttcttttttattaatatgcaacatagacattgccataacagaataataaaccacatgtggggttttaaaaatgaaatttggctaataggagcaattcagctatttttctatacagtaattggtgtgtggtatagaagaaaaacgggttcaaaccccacttctgccacctaccagctatatggccttgaatgagtcattcagctttaataaggttcattttcttctgtttaaaaagacacaaaacttgaaaatcagctttggccatctacctgagaattagaaagtctgatttttggaattagaaatcatgattgtaggctgggcacagtggctcgcgcctgtaatcccagcactttgggaggccaaggcggacggatcacttgaggttaggagtttgagaccagcctggccaacatggtgaaaccccatctctactaaaaaaaaaaaaaaaattaggtgtggtgacacatggctgtggtcctagttacttgggaggctgaggcaggagaatggcttgaactggggaagcagagcttgcagtgagccaagatggtgccattgcacttcancctgggcgtgacanaatgagactncatctga

SEQ ID NO: 479 - DNA, 741 bp, Homo sapiens
  misc_feature (628)..(628): n equals a,t,g, or c
  misc_feature (687)..(688): n equals a,t,g, or c
  misc_feature (706)..(706): n equals a,t,g, or c
  misc_feature (725)..(725): n equals a,t,g, or c
agcggggccagagcagcaatggcggcgggcggcggcggtagctgcgaccccctggcccctgctggggtcccttgcgccttctccccgcacagccaggcctacttcgctttggcctctaccgacggtcacttacgagtatgggagacggccaacaaccggctgcaccaggagtacgtgccttccgcgcacctcagtggtacctgcacctgtctggcctgggcgccagcgcggctgcaggccaaggaaagtccccagaggaaaaaaaggaaatcagaagctgtaggaatgagtaaccagactgacttattggctcttggcacagcagttggtagcattttattatacagcacagtaaaaggagagttacacagtaaattaataagtggtggacatgacaacagagtcaactgcatacagtggcatcaagacagtggctgtttatatakttgttcagatgataaacatattgtggaatggaacgtacagacatgcaaagtaaagtgcaaatggaaaggsgacaatagcaagtgtmagttcctatgtwtmacccagatggaaagatkttgctttcagctggtcgaacaatcaactatgggtttggagaccaaaaagttacaggcatttacangacattgcaacgccagttcgtactgaggttacttacatcagacttctaatgagagccanncctttgatggattcaggnttatttttatctgagcagncatgaccgttctaatg

SEQ ID NO: 480 - DNA, 2879 bp, Homo sapiens
gagactgggttggcagcsaggctggagaagctgtgaccagcctggaacgccaggcccaggcaggtggacttgaaacttactcacaagaagcaaagagccctgttggaaaggtttgacatctacaggaaggtgcccaaggaccttacgcagccaacgtacaccggggccattatctccatctgctgctgcctcttcatcctcttcctcttcctctcggagctcaccggatttataacgacagaagttgtgaacgagctctatgtcgatgacccagacaaggacagcggtggcaagatcgacgtcagtctgaacatcagtttacccaatctgcactgcgagttggttgggcttgacattcaggatgagatgggcaggcacgaagtgggccacatcgacaactccatgaagatcccgctgaacaatggggcaggctgccgcttcgaggggcagttcagcatcaacaaggtccccggcaacttccacgtgtccacacacagtgccacagcccagccacagaacccagacatgacgcatgtcatccacaagctctcctttggggacacgctacaggtccagaacatccacggagctttcaatgctctcgggggagcagacagactcacctccaaccccctggcctcccacgactacatcctgaagattgtgcccacggtttatgaggacaagagtggcaagcagcggtactcctaccagtacacggtggccaacaaggaatacgtcgcctacagccacacgggccgcatcatccctgcaatctggttccgctacgacctcagccccatcacggtcaagtacacagagagacggcagccgctgtacagattcatcaccacgatctgtgccatcattggcgggaccttcaccgtcgccggcatcctggactcatgcatcttcacagcctctgaggcctggaagaagatccagctgggcaagatgcattgacgccacacccagcctaatggccgaggaccctgggcatcgccagccttgcctccagtgccctgtctcctttggccctcaatctggtcccaaatctggctgtgtcccaaagggtgtgtgggaagtggggggaaagtagaggatggctcgatgttttgcagctacctcttttccccgtgtttctttttagacaaattacactgcctgaagttgcagttcccctttccctggggagccccaagaacagagtcaggcaaggggtggggagtccagggatcttggggacccctcctaggagagctgcagtctcttccctcaggggaacatcccagaatgcatatcgatcagctctcagccaggcttcgacaatctcgcagcccccactaggtggacacattaatgatttggtttctcccctgggcagccaacctgccccagaggcaccagacctgggctttcagctttgggaccaggctgcccaaaggtactcctttatacacccggcaccttccacgaaagatggtacttcccaagcaagcccctatgatttgtcactatagatggaaccctgacttctgccccatcccttcctgcccaacctagaacccaggcctcaagtctttaccccacccctttcttgttcttccaagaagcagatgcccagttgctcagcagcagcggtagagacttgaatctgcccaccagtcacaaggcgggtcacagattcctcttcctctcttctcctcgttcctctgaaccctccaccaatgtgcctcagcctgtgtgctgtgtggcaacagcattctggttcccactgccaagatctcccaccactctgctgggatctgcagtggcagggagtgggggttgtgtaaaggggaagtcatcttttgagatccagatagacatggtttgtgcacttacgtccagatgggaagcatccttcctgcaaccctaaaataatcatgcagcctctcagacggacgccatcggtcccaaggccttaggtggaggaagcaaagcaggccaggcctgtcctgtccgtggacctctaccttctggactccctacgggtgcagagcacttgggtttctctacagccatcgtggcccacttgacactgtgctcctccatcagctggtcacatgccaacacgttcccagcccctgaggcagctccagggtgccccacctgctcctgaggtgggtccctaccctgctgctcctcttcatcctttcccttttgtcctgaaagggaggagcaatggtccaggcattaattccacccagggaattttagctatgccctcatgtcccagggagagagccacacgcctgttttccatttatagcaagattgtttgcatacttttgtaatgaaggggagtgtccagtggaaggatttttaaaattatcttatggatagctcaagtctctgccatttgtaatttttggctctaagctccgattggagacgcttctccttgtgcatgtgagttgactgatgttgtgagtgtaaatgcatttggttatttctggtatcggtggccacttggatggatttttttacattctgttccccagttacaggaaggagtccctttggtgtgtgaatatgtgtgcctgtagagggtggggcagggtggggtggggatggaaatgtgtggcatgcacatgagttgaaattcttttatgcatttttttgaagaaaaaaaaaaaaaaacaactctgaggacataggggatgtcagtttcctatggaagagacacctctgacccgttattcttataatcaaaatctgaagggaaaaaaatgttttagttctttccccactcgttgggttcaactagattaaaaggctgattttcagaaaaaaaaaaaaaaaaaaaaaaaaaaaaaaaaaaaaaaaaaaaaaaaaaa

SEQ ID NO: 481 - DNA, 3301 bp, Homo sapiens
  misc_feature (142)..(142): n equals a,t,g, or c
aattcggcacgagaggccgcctctracgccaccggctgggctccgccatgagttcggcgccggcctcaggctccgtgcgcgcgcgctatcttgtgtacttccagtacgtgggcaccgactttaacggggtcgcggccgtcangggcactcagcgcgccgtcggggtccagaactacctggaggaggccgccgagcggctgaattccgtggagccggtcaggttcaccatctccagccgcacggacgccggggtccacgccctgagcaacgcggcgcacctggacgtccagcgccgctcaggccggccgcccttcccgcccgaggtcctggccgaggccctcaacacacacctgcggcacccggccatcagggtcctgcgggccttccgagtgcccagcgacttccacgctcgtcacgcagccacgtcccggacctacctgtaccgctggcactggytgtcaccggcgtgatgarctgccggtgtttgaacgcaacctatgctggactctcccggcagactgcctggatatggtcgccatgcaggaagccgcccagcacctcctcggcacacacgacttcagcgccttccagtccgctggcagcccggtgccgagccccgtgcgaacgctgcgccgggtctccgtttccccaggccaagccagccccttggtcacccccgaggagagcaggaagctgcggttctggaacctggagtttgagagccagtctttcctgtatagacaggtacggaggatgacggctgtgctggtggccgtggggctgggggctttggcacctgccaggtgaagacgattctggagagccaagatcccctgggcaagcaccagacacgtgtagccccagcccacggcttattcctcaagtcagtgctgtacgggaacctcggtgctgcctcctgcaccctgcagggkccacagttcgggagccacggatgaccctggacactcaagccaaagttaggccacaccaggcccaaccctgtgctggtcaagccagggcagtcacagctgcttggggcccacagcactgctgcctggtctccacagtagcctccctgcccgggtcccagcaccctggatgcccgtctctgtcccaggcgggatggggcacagtgcaggacacagccatgtacaccaagaagagagtaccaagtagtcttttgttcagcttttactggaaactgctgtctaggaccacctgccctaaccaggaataaaggcaagacagcctggagaccagtttgtttcttcagctgcaaacagctgcctgggcaggcaggtgacacaaggcctctgtccccagggatgggacctgcagggtctgttcacccagggcacccacagtcctgaagtgcaggcccagggtctgtccagctgggagagggcagaggtggcggctgggtgagttgccggcctcagctgggggcctgggggaggcccttcttcagcagagatgtgaggaagctccccagctcctcgtcctggtaggtccaggagaccagcagcaccttggtgcctgggtcctcagaaggggcggcggcctggaggaggacggactccacagtcacagagccgtcygggaggtgctgcacacagtggtccttcaggacgctcttgaggtggctgtagacgcgcaatgccgtctcctgctccttgcgtgtgtcatgcaggtgcacgcggcaggtgaagcgcagctggtgctcagccagacccagctctttgagggcttgctctgaggacaccagccggaagttgctgtccttcatgatcagggtgccgtgcaggagccgaggcttcttggcctcagggagcagcccctgcgccatctcccgcttcagcagccccagcgagatgcctacggggatgctggggcttgtgggcagcgtcaccgtctcgccattggccggcatgtagcagttgacccggagctcctgctcgatcttctgcttcaggaactccatcttcttggcctcgccatgcaccagcagcacgctctccggctctgcctggcccaccagctgcatgatgcccttggcgtccgcgtgtgcgctgaatgacatgtactccacctgcatcttgacctccagcacctgccgcccctccatctcgagcttccgctgcccgctgaggatcttgtggccgacggtgccctgcacgcagtagccgggcatgatgaccatgttcttttcgtttccggcccatttccggaagatctgcagggactgcccagcgtgcagcattcctggcgtggcaaacacaaccatcggtcctgggttgtcagcaaaagcccggtcgaaggccttgatgtgcttgaactcaaacatgttcctctgcacaaaagtcttgcggatcttctggttggtccaggggatgaacagcttgtagtagtggttggccttctcggtcagccccgtggagaagtagatgggcaccttcaggttcatgcgctcccagaaggtctccaggaggatgcagagctcctgggcgcggcccagcgcgaacacaggtatcagcaccttcccaccacgctccacggtctcgtggactttcttcaggaagtctcgctcccggcagcgcttggagtcacggatggtcgtggcgtacgtggactctgtgatgagcaggttggggcggcacttgtcaatccaggcagctcctaagtgtcggtctggggtcatgttataatcacccgtgtagaccacagactctgagcccactttaatctggaacatggctgcccccagcacgtggcctgcatagtaggccttgatctccagctcatcatctacctggaccgtctggtggaggtggacagccaccaccttcttcatgcagtctttgatcatctgggaggtgaagaagttggcctcgcccttcttgtctacggcgatcttgcggtagtcctccagcaagatggggcagatggcctgggtggggtgagtcatgtagatggggccgtcgtagcccaccatctcgctgaagtaggggagtgccccgcagtggtccaggtggaagtggctaatgatcacacagtccaggaagtctgttaggcggccgttctgggtgatgtaggagaagtcagggaagcgtcggtcgtcattgaagcccatgtgcattccacagtccagcatgacattcttgcccgcaatggagaccaggatgcagcttcggcccacgtcctggccggcccccaagggcgtgactctgatctcaggcatcgtctccgccgcgctcccggacccgcgaggcctcctgcggctcgagactagttctctctctct

SEQ ID NO: 482 - DNA, 477 bp, Homo sapiens
  misc_feature (452)..(452): n equals a,t,g, or c
  misc_feature (468)..(468): n equals a,t,g, or c
  misc_feature (470)..(470): n equals a,t,g, or c
cggactcctgcgtgtattacagaacccaatagtatttatggtcttcattggcatcgccttcaattttattcttgatcgaaaggtacctgtatatgtcgaaaattttcttgatggacttggaaattctttttctggatcagccctattttatcttggtctcacgatggtgggaaaaataaagagactgaagaagtcggcatttgtagtactaattcttctcatcacagctaaacttctggtgctgccacttctgtgcagagaaatggtggaactcttggacaagggcgacagtgtggtgaaccatacaagtttatcaaattatgcatttctgtatggtgtatttcctgtagcaccaggagkggcwactttgcaacacaattcaacatggaagtagaaattatraccccagggtgggtgatagcacattgtgtcggccccatcagtagttcgcnggtacgacttccatangnccaagcg

SEQ ID NO: 483 - DNA, 624 bp, Homo sapiens
  misc_feature (552)..(552): n equals a,t,g, or c
  misc_feature (572)..(572): n equals a,t,g, or c
  misc_feature (578)..(578): n equals a,t,g, or c
  misc_feature (580)..(580): n equals a,t,g, or c
  misc_feature (614)..(614): n equals a,t,g, or c
gcccacgcgtccgggcgaacgcggttaccgtggaaaccgcggccatggcggcaccgcggcaaatccccagccacatagtgcgcctcaagcccagctgctctacagactcgtcgttcacccggacgccggtgcccaccgtgtctctcgcgtcccgcgagctgcctgtctcgtcgtggcaggtcaccgagccgtcaagcaagaatctgtgggagcagatctgcaaggagtatgaagctgagcagcctccctttccagaaggatataaagtcaaacaggagcctgtgattacggttgcgccagtagaggaaatgctttttcatggcttcagtgcagagcactattttccggtttcccatttcaccatgatctcacgtacaccctgtcctcaagataaatcggaaacaatcaacccaaaaacatgttctcccaaagaatatttggaaactttcatctttcctgttctgcttcccggaatggctagcctgcttcaccaagcgaagaaagaaaaatgktttgagaggaaaagaaccaawttcattgsctgkgatttcngactgaatgggttatacaantaagtngntcgtgctgactattcagtgatcctaagaattcantcgggtaatt

SEQ ID NO: 484 - DNA, 833 bp, Homo sapiens
  misc_feature (708)..(708): n equals a,t,g, or c
  misc_feature (729)..(729): n equals a,t,g, or c
  misc_feature (741)..(741): n equals a,t,g, or c
  misc_feature (759)..(759): n equals a,t,g, or c
  misc_feature (828)..(828): n equals a,t,g, or c
ggcacgagggagcagggagccgaggaggggccaggggtgcctgcggccaccaccgaagaccacattcaggtggaagcgagggtcggacccacggacgggaccccagaaccccaagtggagctcaggccccgtgatacgaggcgcatcagtctacgttttagaagaaggaagaaggagggcccagcacggaaaggagcggcagccatcgctgaggacagggaggaagaagagggggaggaagagaaagaggcccccacggggagagagaagaggccaagccgctctggaggaagagtaagggcggccgggcggcggctgcagggcttctgcctgtccctggcccagggcacatatcggccgctacggcgcttcttccacgacatcctgcacaccaagtaccgcgcagccaccgacgtctatgccctcatgttcctggctgatgttgtcgacttcatcatcatcatttttggcttctgggcctttgggaagcactcggcggccacagacatcacgtcctccctatcagacgaccaggtacccgaggctttcctggtcatgctgctgatccagttcagtaccatggtggttgaccgcgccctctacctgcgcaagaccgtgctgggcaagctggccttccaggtggcgctggtgctggccatccacctatggatgttcttcatcctgcccgccgtcactgagaggatgttnaaccagaatgtggtggcccanctctggtacttngtgaagtgcatctacttngcctgtccgcctacagatccgctgcgggtaccccaccgcatccttggcaactttcttaccaagaagtcnatcat

SEQ ID NO: 485 - DNA, 979 bp, Homo sapiens
  misc_feature (923)..(923): n equals a,t,g, or c
  misc_feature (947)..(947): n equals a,t,g, or c
  misc_feature (957)..(957): n equals a,t,g, or c
  misc_feature (970)..(970): n equals a,t,g, or c
ggcacgagagctggagatgttcacccttcctcaaaaggacttcagggctcccaccacctgtctgggccccacctgcatgcaggacctgggcagtagccatggggaagatctggaaggagaatgctccagaaaactggaccagaagctgccagagctccgtggagtgggtgatcctgccatgatctcctctaatacctcctacctgtcctctaagaggaagaatgattaaatggttctggggattcagcttgaggagggctacaggacctaccacatggatgagtatgatgaggacaagaaccccagtggcatcattaayttgggcaccagtgagaacaaactctgctttgacctgctgtcctggcggctgagtcagcgcgacatgcagagggtggagccatccctgctgcagtatgctgactggaggggacatctgttcctccgggagaargtggccaagttcctgtctttctactgcaagagcccagtacccctcagaccagagaatgtggttgtcctgaatggtggtgcctcgctcttctctgctctggccacggtgctgtgtgaggccggggaggctttcctgatccccaccccttactatggcgctatcacacagcacgtgtgtctctatggcaacatccggctggcctatgtctacctggacagtgaggtaagagtcttgacttcctaggtggaacctgggcctgcctgtagtcaagagtttcctgagtctgaatttgagggtggtccatgctgagggctctggggttgtgatgagtagggaatggagccttctgttgctgcatggctgcctgtgcctgggttccccagtggctccaaagttccagtctctgagatccctggggttgatgtamaagccaagagccagacccagaaacagcaaggtaggaacagagcanggtagacctaacatgacacccaanaagtgatganggggctctgaagngatgggttg

SEQ ID NO: 486 - DNA, 805 bp, Homo sapiens
  misc_feature (734)..(734): n equals a,t,g, or c
  misc_feature (783)..(783): n equals a,t,g, or c
  misc_feature (799)..(799): n equals a,t,g, or c
acccctccatttctcgccatggcccctgcactgctcctgatccctgctgccctcgcctctttcatcctggcctttggcaccggagtggagttcgtgcgctttacctcccttcggccacttcttggagggatcccggagtctggtggtccggatgcccgccagggatggctggctgccctgcaggaccgcagcatccttgcccccctggcatgggatctggggctcctgcttctatttgttgggcagcacagcctcatggcagctgaaagagtgaaggcatggacatcccggtactttggggtccttcagaggtcactgtatgtggsctgcactgccctggccttgcagctggtgatgcggtactgggagcccatacccaaaggccctgtgttgtgggaggctcgggctgagcatggccamctgggtgccgctcctctgctttgtgctccatgtcatctcctgctcctcatctttagcatccttctcgctttgactatgmkgagctcatgggcctcaaacaggtatactaccatgtgctggggctgggcgagcctctggccctgaagtctccccgggctctcagactcttctcccacctgcgccacccagtgtgtgtggagctgctgacagtgctgtgggtggtgcmtaccctgggcacggaccgtctcctccttgctttcctccttaccctctacctgggcctggctcacgggcttgatcagcaagacctccgntacctccgggcccagctacaaaggaaaacttccacctgctttttggggncccaggatggggaggncagagt

SEQ ID NO: 487 - DNA, 1728 bp, Homo sapiens
gccgaaagcaagtcaagttttaagcaggctttggaagccctgccccagctttccagtggagcagataaaaagttactggaagagctcctgaacaagttcaagagtagcatgcacttgcagctcacctgtttccaagcagcttcttcaaccatgatgaaaacataaatatctgccacataaaagaagtccaggaaaataacacgtaataagactgttcactctctaagtaccctaaaggtatttggtgtattaaacattgggtttgccatttttctcttttttcttcctctgacttcgaaaattgttggtatacatttcaaccaaaatgacctcatttgaaatgcccaggaagtatttgttttgccattcttactagatcagatcctgtatgactttaaaatacattttaaaatatattttgcatctcagcagaaggttgagtgctgcaggaagagctgcttctgcagggagttttctggaatggcgtggcacatattgaagcatttctcagtgtcccgttcacggaagcgcaggcagctcccacgacacacggagagactgactgatacgagatttggaaagctatgtagacatctttggagctcttactgtcctaaactgtacagctgtgcttaaaaccctyatttcatataaatggccttaagttttctaattcaagcgggtttttggaaaaatttatggtctccattaaaatacatattacaactggggtagattatttgtggtccaggtgtctgtgatttaactttgcgttttgctatctgatttttatttttcacagggctaagcatgagctttcattctcactcactcttaatttgtcgtgcgtcactacacatgcacgtgttgcagtccctgaggccctgtgtgttatctgtgatggagtgtgaatgtgtaacgggcactgtgttacactctcaggtgttggcggggcggtcgcagayttcagggtcccctaacggaaaggccaggctccgcgtggacggccaactccctgcccgctccttcagcaggtgactgtctctgccacttcttacctgctgaaggatcttgctcagtagctggaacaatgctgctgtcacacagtctcttctctgaaacttcaggatgctccttggtcaccaggcaatgggagctgtagaccagccgcatgcacttgccccacattcactgctgactggcttcactggaataggttcaggtcaccgggacttctctcagagtcagcagcccacccaactccctcataccgtcgcatctgaaaattttcagagaggaattctctttgtagtcggcttgtcagggttttcaagtttttctatggttatttttaaatctctttttttaaatgctaaaattaatgtcctcattaatgcaagtaattttagagcacagtgtagccatgtacagtttccattatttaaaataaataaatgtgttggttcatttggtgtatggggggacatcatggtaactggaaatgaaagtttaatctttcacaaatgtgcttgataaagctgttaagaattgtctttcctaagtatgttaactgttgtatctaactcaactgtgagctaagtttaaaaactgcaatcatgaatgtttgtgatattttaaatatctactacagcacattcagccaataaagaatctgcctttaatgtaagttgtaatttaaaaaaaaaaaaaaaaaaaaaaaaaaaaaaa

SEQ ID NO: 488 - DNA, 562 bp, Homo sapiens
  misc_feature (34)..(34): n equals a,t,g, or c
  misc_feature (473)..(473): n equals a,t,g, or c
  misc_feature (480)..(480): n equals a,t,g, or c
tcaccctcctggccaattgtgttgcaccttgggnactgaatcacatgagccgtcgactaagccagatgcttctcatgttcctactggcaacctgccttctggccatcatatttgtgcctcaagaaatgcagaccctgcgtgtggttttggcaaccctgggtgtgggagctgcttctcttggcattacctgttctactgcccaagaaaatgaactaattccttccataatcaggggaagagctactgggaatcactgggaaactttgctaatattgggggagccctggsttccctcrtgratgatcctaagcatatattytcgacccctggccctgggatcatctatgggagtctttgccatcctctctggccttgttgtcctcctccttcctgaaaccagggaaccagcctcttcttgacagcatccaggatgtgggaaaatgaagggagtgaaatgagcctagctgcccctncagaggnagcttctgtggctattaggtctgtggctgaggaaagcaaaacaaccattttagggctaccatcccccaaaaagggttagatc

SEQ ID NO: 489 - DNA, 736 bp, Homo sapiens
ggcacaggtgcactatttaaaggaagagagatggtgctgtggtcgtaatgccagaatgtcagcatgtttggcattggagcgggttgcagctggccaagggctgcctactgaatcactcttctatcgtgcctgttcttcaggatattattaaagattgttatggcatcaccaaatgtgatcggcatgttggtaaaatttattccaaatgttcttcttttctggattatgtcagacggtctctaaagaagcttggattagatgagtccaagctgccagaaaaaattataatgaactactacgagaagtataagcctcgaatgaatgagctggaagcttttaatatgttgaaagttgtactggctccctgtatagagactttgattcttctggatcgactttgttacctgaaagagcaggaagatattgcatggtctgctcttgtgaagttgtttgatcccgtgaaatctcccagatgttatgctgttattgccctgaagaagcagcagtgatttccattgaagcaaattattagatgtatttctctatgagacctgttgctgagattgcttttctaaacatatatgtcctgttatacaaaaatttttaaatgactgttatgtattttaaataataaaataatggctaacaacagaaggttataatccatttttccattgtcaaagcatacattaataaaagaagaacctgtcataataatawaaaaaaaaaaaaaaaa

SEQ ID NO: 490 - DNA, 1142 bp, Homo sapiens
atgcaagttacttttctcagtaatttataatttttagctcttaattcccacagaagtcctttgagacactattattatccccagtttacatgtgaggaaactgaggttctgagaagttaaataacttgcctgaaatccacgtaactagcaaatgatggagccaggatttgaccttagtcattcctgctttggagtctgtcctcttaatacattatatggcgtctctaatttgtgagtgagtgaataagtgttttgagattttaagtatttataccacttgtactccacttttgctggaggtggattctaggcaggagtctgggatgcattgaggatgttaatgaatttagcaaatactcactgagcacctgctttatgtcagggatatgaaagtgcttgacagacaaggttcctgccttcaaagagcatatgttccaggggggaatctgacagtaaacaagtaaacagacatggtaatttcagattatcagtgctatggagaaagttaactgttacagtacattgcagagatgggttctgtaggcagtgtgtcacacaatgtttaatgtcatatagctttcatgatgttggatattatctccccctttttttttcttttcctttttttttttttttagacaggctctggctctgtcaaccaggctggagtgcagtggtgcaacctcagcttactacaaactctgcctctctggctcaaggtatccacttcagactccctagtagctgggactgcaggcacacaccaccacacctggttaatttttttccatattttgtagagacagggtctcactttgttgtccaggctggtcttgaattcctgagctcaagcaatctgcccaccttggcttcccaaagtgctggaattacaggtgtgagccactgtgcttggctcccaattttttttctaattaaccccacatctgctgaattaaaggagagtgttaaatacaaaaatgaatttattatgcaaatctgcagttatcgtgtatgttcttttggacttgtaataagggagtatgttctagtattgaagaaatagaaccagagaggaatactgctgtaaaawttaaaaaaaataatatagttgatcggccgtgaatttagtagtagtagtcggc

SEQ ID NO: 491 - DNA, 536 bp, Homo sapiens
actactgcatcattgttcagctatcattgcttgcacgtaatttcatttactgtgacacttgcttctttgcagattttgcattgacttgtgtgtacagagatgaaatgtgcattctgaatgttgcatattttaaatttttcatgtgcagtatggctcggaatatgtttggccttttgcatgtttctctacaaaagagaattgagttacctcacagagaacagatacatggaagtggactccttgcctgtagagcctgcatgcttttttgtttttttttgttgttgttgttttttcttaagttatatttgtttttactttttaaaaaagaagaggaaamaaagcccccttttagaaactacgtctgtcatactgggagctttatcactgcaaattggaaagccatcttatacaaaattattcacatttttcatctacgattcaactaatcgaagggattaaactaaagaaaaaactaagaagaacatgaaccttgactttgagaaattggtattcmcgacatattattggggtccatt

SEQ ID NO: 492 - DNA, 1248 bp, Homo sapiens
  misc_feature (1132)..(1132): n equals a,t,g, or c
  misc_feature (1158)..(1158): n equals a,t,g, or c
  misc_feature (1247)..(1247): n equals a,t,g, or c
aaatctttaccccgcaacccggctggatggcgtttctgttgcgtctggtggtggcggtactggtgatgtctggcgtgcttttaggtatgttacatatcatgccggagtggtcattgggtaccatgccctggcgtttactgcgtttaatggcggtcgtgctggcggggattgccgcgtacttcgctgcactggcggtactgggcttcaaagttaaagaatttgcccgccggacggtgtaacaatgcattccggcctgcagtgcaggccggagataatcttcagatcgaaatctttttaccgccgcgatgggttgttgaggtctgaccgttcgccccatatagcgtcggttcctgatgcggtttcaacatttccagcgcctgttgattgcgctcaatctgtccttccagtaaccagccgttatgttgattcatttggcgtagttgctgcgttttcacagtaatttcctgccagcgttgactaatatcaacgctatttgctgtattggttctttcctggtaactgttcgaggtaatccagcgtcgccagcagtgagcttttttgttctgtaatccattgcaackggctgccgttgatctgccccatagagagatgttgctgcycytgawccattaccgtttkgagatcgttaagcacasgggacatctggtcgaggawctctgcagacgtgtcatacgatcagttactctgcaagtcttgctgcgcttcgttgatcagcgcatcggcaattttgscgtgtccatttttagttcaccgttacgaatcgccagttttaacgcttcgacacgttcaagattgatatcactgctgccgggttgcatcagttttgcttgcgcgtcgcttaacgtcacactggtgctggtggaggcggttgtttttgccgcccggctgttcgttaccggcgcgtcagtggtttcgcgcggttgaacggtgcttacagcttcagaggcgaatgcgatcaatactcatggtttattcctcattgagggcgcttttatcatgtgttgcttatttatcggcaagggacgggtaatctttaacagcttacaggtttataagaatattcccatctgcatcaacaacgccgctgactacctgtcccgataccatgcgnacccgcgcattctgtgcgacggctgnattgttcagcgcctgaccttctgcgttggcgctaaacccatcaccgctggcgatcacattgacgcgttgtcccgcttttacccgcaagnc

SEQ ID NO: 493 - DNA, 922 bp, Homo sapiens
  misc_feature (915)..(915): n equals a,t,g, or c
aggaaggacctgctgatgaatattacatcatataccgaaatgtttttgataaggtaatagagcatatcactgcatacaaatccattcttacttcaatcaaaaaagaatatgatgcctttattgagacaataaagaaagaccgaagaactacattttgtcttcatggaaaacttaaaggtttggcagcagagcctacagctttggtatattacaggaaaagaacaatccaacttgaagcaaaaatgaggattatcgaaagtaattcctcgaagattcaatctcaaatagatcacatcaagcagtgtagggcagartatgacacaaaagaagtaaaatattggactttctscaaagatccttcaaaacctattycaggcatgactcttcaagaatycatgaatctagatgctctcactaaatacatgaaacatcttgaagataaatatgcagaaattaaacaagctatgttgataaaatatgtgccagctcagaggaaggctgatttagatgaagaaatgattgtgttattaaaacggcgagatgtagctgaaaatctgaacaaaaaattgcagttttggtttaatgagttaatctcacttggtgaatatgaaaaggcagcttgttatgcagcaaacagtcctagaagaattcttcgaaacattggtacaatgaatacatttaaggctgttggaaaaattagaggaaagcctcttccattactcttattttttgaggccctctttatcacaagtcatgcttttccatgtcctgttgatgcagctctaaccctggaaggaatcaaatgtggattatcagaaaaacggttagatttagttaccaattgggttacacaggaaagatgacctgttgcagctattaatgtcatgtccccaagtttgaattaattcaatgtcncactaaa

SEQ ID NO: 494 - DNA, 2225 bp, Homo sapiens
  misc_feature (2225)..(2225): n equals a,t,g, or c
gagagaagcactgaaaaatcccattggatttgtggaaaaactccagaagaaggctgatattgggcttccatatccacagagagttgttcaattgcctgagatcgtatgggaccaatatacccatagccttgggaattttgaaagagaatttaaaaatcgtaaaagacatactagaagagttaagctagtttttgataaagtaggtttacctgctagaccaaaaagtcctttagatcctaagaaggatggagagtccctttcatattctatgttgcctttgagtgatggtccagaaggctcaagcagtcgtcctcagatgataagaggacgcttgtgtggatgataccaaacctgaaacatttaaccagttgtggactgttgaagaacagaaaaagctggaacattactcatcaaatacccycctgaagaagtagaatcycgacgctggcagaagatagcagatgaattgggcaacaggacagccaaamagtcttcaacaagcagacgacagcaccctcttaataagcatctctttaagccttccactttcatgacttcacatgaaccgccagtgtatatggatgaagatgatgaccgatcttgttttcatagccacatgaacactgctgttgaagatgcatcagatgacgaaagtattcctatcatgtataggaatttacctgaatataaagaactattacagtttaaaaagttaaagaagcagaaacttcagcaaatgcaagctgaaagtggatttgtgcaacatgtgggctttaagtgtgataactgtggcatagaacccatccagggtgttcggtggcattgcaggattgtcctccagaaatgtctttggatttctgtgattcttgttcagactgtctacatgaaacagatattcacaaggaagatcaccaattagaacctatttataggtcagagacattcttagacagagactactgtgtgtctcagggcaccagttacaattaccttgacccaaactactttccagcaaacagatgacatggaagagaacatcatttactagtcctcttcaacacatagcaatggtatcattgttaattatgtgcacagtttggaaagattctctgctttcccagaaatgacactcacagcatgagagcttcctgagtgttctcgtcaagtacagctctgcaccgttgtggctctagatcactgttcagcagctgaacattcctggtgagcaaaggtttccctggtgaatttttcaccactgcgttttaggtggtgatcttaaatgggtgagatggaacgagagcacacattaaagagagagtaaattccaaaggtttcaaagaacttggtcataaatatgataatgagaagacaaagtatttatattaaaacagtttagtagccttcagttttgtgaaaatagttttcagcacagaaactgacttctttagacaaagttttaaccaatgatggtgtttgcttctaggatatacactttaaaagaactcactgtcccagtggtggtcattgatggcctttagtaaattggagctgcttaatcatattgatatctaatttcttttaaccacaatgaattgtccttaattaccaacagtgaagcactacaggaggcaactgtggcattgcttccttaaccagctcatggtgtgtgaatgktataaaattgtcactcagatatattttttaaatgtaatgttatataagatgatcatgtgatgtgtacaaactatggtgaaaagtgccagtggtagtaactgtgtaaagtttctaattcacaacattaattcctttaaaatacacagccttctgcctctgtatttggagttgtcagtacaactcatcaaagaaaactgcctaatataaaaatcatatatatggtaataatttccctcttttgtagtctgcacaagatccataaaagattgtatttttattactatttaaacaagtgattaaatttagtctgcacagtgagcaagggttcacatgcattcttttatactgctggattttgttgtgcatcatttaaaacattttgtatgtttcttcttatctgtgtatacagtatgttcttgaatgatgttcatttgtcaggagaactgtgagaaataaactatgtggatactgtctgtttatattaaaaaaaaaaaaaaaaaaaaaaaaaaaaaaaaaaaaaaaaaaaaaaaaaaaaaaaaaaaaaaaaaaan

SEQ ID NO: 495 - DNA, 1317 bp, Homo sapiens
gttcatttctcttggagtagaattgctgaatcctatggacgatttcctgttcagtgtctccattttaagtgggattctttgcagcatcctggccgtgttgaagttcatgctggggaaggttctgaccagtagagcactcataacagatgggtttaactccctcgtgggtggcgtgatgggcttctccattcttctgagcgcggaagtgttcaagcatgactcggcggtctggtacctggacggcagcataggcgttctgatcggcctcaccatatttgcctatggggtcaaactcctcatcgacatrgtgccgagggtgaggcagacacgtcactacgagatgtttgagtgaagggggccagcatccgcatgagaccatcgagatgaggagtttccacataggcaaagggtgccaatatttaactgaacatctggtttctttttggaagttttctttcacatggtttgtcattacaagacaaggtctgcccagccaggtggatctaccttgcccccatcacctgccgcccccatcaaacatgttgggacaatgcccataggaatggacctccttccccgtctccagctgggactggcgttttttagtctctggagtatgatkgttctcatgggtaggatgagatctttggcagaaaggtcttcggtggtgctctgagcctgcgctgcataggactgagcagacccacctcctccagcttgggtggccctgccactccyggttccaagtctctccyttccyggcaggtcttaagggaagattgtacccctcaccctttacatacccagaatcatcagtatgtcacttcctaatttctatcagtgtatctcattatttcatactgttttactaatcctragtctaaacagatttgctcaaaaggagaccattctattttttaaagtacttagtgatacaygtataagctttgcatggacgaattaaataagcacattgaccttttcttgtacattcagaacctgaacatccatgtgaaaactgggtccatttttgagagatgtgaaactacagtttatttgtaataaataaatataatctatccgtatatgcatatatctatatgctgtgttaagtggtaatgggtacattacagtctgtgagagatggatcgctccctctgtaaggaacaagacgttctcagctgatgtcacggtaggtttagattctgtagagtgttccccaacccgcaccgttctgtacctctcacaccactgcttgcccgggcagtagtggctgaccaataaagacctttacctgttttgtaaaaaaaaaaaaaa

SEQ ID NO: 496 - DNA, 2433 bp, Homo sapiens
agcctctttggctcaaaagggtgkgttatgaacgaacctccttcagtccaactatccagacgttcattctctctgccatttggcacggggtatacccaggatattatctaacgtttctaacaggggtgttaatgacattagcagcaagagctatgagaaataactttagacattatttcattgaaccttcccaactgaaattattttatgatgttataacatggatagtaactcaagtagcaataagttacacagttgtgccatttgtgcttctttctataaaaccatcactcacgttttacagctcctggtattattgcctgcacattcttggtatcttagtattattgttgttgccagtgaaaaaaactcaaagaagaaagaatacacatgaaaacattcagctctcacaatccaaaaagtttgatgaaggagaaaattctttgggacagaacagtttttctacaacaaacaatgtttgcaatcagaatcaagaaatagcctcgagacattcatcactaaagcagtgatcgggaaggctctgagggctgttttttttttttgatgttaacagaaaccaatcttagcaccttttcaaggggtttgagtttgttggaaaagcagttaactggggggaaatggacagttatagataaggaatttcctgtacaccagattggaaatggagtgaaacaagccctcccatgccatgtccccgtgggccacgccttatgtaagaatatttccatatttcagtgggcactcccaacctcagcacttgtccgtagggtcacacgcgtgccctgttgctgaatgtatgttgcgtatcccaaggcactgaagaggtggaaaaataatcgtgtcaatctggatgatagagagaaattaacttttccaaatgaatgtcttgccttaaaccctctatttcctaaaatattgttcctaaatggtattttcaagtgtaatattgtgagaacgctactgcagtagttgatgttgtgtgctgtaaaggattttaggaggaatttgaaacaggatatttaagagtgtggatatttttaaaatgcaataaacatctcagtatttgaagggttttcttaaagtatgtcaaatgactacaatccatagtgaaactgtaaacagtaatggacgccaaattataggtagctgattttgctggagagtttaattaccttgtgcagtcaaagagcgcttccagaaggaatctcttaaaacataatgagaggtttggtaatgtgatattttaagcttattctttttcttaaaagagagaggtgacgaaggaaggcaggaatgaagaagcactgcgtggcctccggtggaatgcacggggcacagccgcgactctgcaggcagcttcccccccatgccagggctctgcgccgtcatgtgagacttaaaaaaaaagttgaatgacttcgtgatactttggacttctaaattaaatttatcaggcataaattatgtagaattagaggctttgaaaataatactggtaggttgctcaaaggttttgaaagagaaatcgctaggtaggttactatctggctaatccatttcttatccttgacaatttaattcatatttgggaaacttttagggaaatgaaaaataaaagtcactgagtctgggtgacattttttaagaataatataaattcagtttcaaactcttctcacattaaaattttgctgtgaactcttactaaaatgagttttargttctgtaagtggaaaaatgtgcttttattttatgggccatttttaccacaactaatcttgccttggattactaagcatctcctgcgatcccacagaggactgtggtggccacaggagctgaaagcagaagagtgggatttratgccaggcagtggagtggcctcagccccagattgtacctcctgccctgtaggaggggagggggcaaagccttctgacttcacctttgtttgacctatgtatggaacttacttttactttttgccttaaatttttaatgaaatgcaaattttctgtgatggggttctctctctctttttttcggggggtggagtcactaataaatttgcaaatgaagttaaagacaaggcaaccatctggcttatgctatataatacttcatttaaagaagaaaggaaaagcaaatgcacttgcarcttttgaggtctcagcaaaaatgggcatgtgtcttttttgaagtttagaaatatcctaatctatttttatttatctaaaagtaagtgttttccggctgataaggctaaccctacccaggaaaggattgataactaaataaatttcctctgttttcccatgcattgaaattatgttggctgagccactgcacccagcttttgctggaagtttgattagcttgggttgaatctgtagaacaagttaagaagaactg

SEQ ID NO: 497 - DNA, 834 bp, Homo sapiens
ggcactcgggccgagccatgcaggcggcgcgcgtggactacatcgctccctggtgggtcgtgtggctgcacagcgtcccgcacgtcggcctgcgcctgcagcccgtgaacagcaccttcagccccggcgacgagagttaccaggagtcgctgctgttcctggggctggtggccgccgtctgcctgggcctgaacctcatcttccttgtggcttacctggtctgtgcatgccactgccggcgggacgatgcggtgcagaccaagcagcaccactcctgctgcatcamctggacggccgtggtggccgggctcatctgctgtgctgcggtgggcgttggtttctatggaaacagcgagaccaacgatggggcgtaccagctgatgtactccttggacgatgccaaccamaccttctctgggatcgatgctctggtttccggaactacccagaagatgaaggtggacctagagcagcacctggcccggctcagtgagatctttgctgcccggggcgattacctgcagaccctgaagttcatacagcagatggcgggcagcgttgttgttcagctctcaggactgcccgtgtggagggaggtcaccatggagctgaccaagctatccgaccagactggctacgtggagtactacaggtggctctcctacctcctgctctttatcctggacctggtcatctgcctcattgcctgcctgggactggccaagcgctccaagtgtctcctggsctcgatgctgtgctgtkgggcactgagcctgctcctcarttgggcatccctggccgctgatggcgctgcggcagtgggcaccagtgact

SEQ ID NO: 498 - DNA, 4209 bp, Homo sapiens
  misc_feature (2558)..(2558): n equals a,t,g, or c
  misc_feature (2617)..(2617): n equals a,t,g, or c
  misc_feature (2950)..(2950): n equals a,t,g, or c
tttttttttttttttttttttttttttttttttttkttaaaatgaaaatgtttatataaattaacccatccagtttaaagtagatttgctatgcttcacttacttaaggaagaatatatacttcctatattaataaatcacatcaaataagtaggaagtttcaataacaagcctgtagatacattgaaacccctttttatattaaaagttaaaatgaaagacaaatccagattgaacatagtgattgcaaaatataatgcaattttcaacaattaaaattatgaaaatatacaaaattgatgggcaacacaactaggcatttgtacattttccattatgtggagaacactacaagtttctctaccttttatctacatcagataaatgatttaaaccaaatgtttgctttggagagtcttaacttaggatctcagtagtataaaaagcaataatttttcagtctgtaaacagtagtcgtgatttttctcctttccttttttaaatatcagtttaccacacaaaaacaaacaaaacaaaaaaacccatacaaatcaaaaacagcagcagcagcaatgggttatttgggaattctcttcaaataccaatggcatacgattgctgggagagggtgctttttactcatgtaagaatatatatatatatatatttttttaactgtacacaatttatagtacatgagggtttccaaaagaacagattgataagagatattggccatttctgcataatttcattctttttacaattatctcaaaatgtgaaagctggatctaattgaaatgctacatttagtaggaaaatcagcaaataacaaaggaagcataacctcaacataacattatttgtcattaaagccagtagaggtcccagatatctttaggcaagagactggttaggaagaccactagagtcacacactgtccctgaggaccaaggctagcccactgaacatacatatgctagattgatcatggtcagtcgatagactttttcaaagagcatttctacagtacagtacttttttggatattcagagagacatcatttcaagaacacacgccatacacatgtaccccaccctccccagcagacacacacaaagttccatcttaaacaggccatagttttatgaaagaatatgttgtcattacatgaaattcagaattaaccacaattttccattcatcttgttcaagacagttcttccttttgggatagggtatatgaccagctgttgctactcatatcaaaaataaatttttgaaattagttgatggactaggatttccaacaagccttattttgaacaggtaatgtagtaattgtttaaaatttccttggaagtttaagcactgtatcaaattatgaatctaagaaagtcaaaatgaagggacaaaatgcaattactttgcgtacacagatattcccagctctcttggttgcttttaaaagaaaaaagtaccacatttcactggagcagtgcaggttggaaagcacctttaaggtcttcaagaccaatcctccattggatgcttaatttcctcatcaaattcatttctttgctcttacagaattaaacttgaactatatttaggtaacagaccaaaaacagaagcagggatttaaacagaaaaatattatcaaagaaactgcataaattgtaggacattttcaagagcaatttttacctcttctatcagaccaaccactgatagaagaagctagagtcttggggacatccaggtgaacaaagtaaacaccatcctgttataattctctaagtttgaagaaagtagtccaaacctcaaacccactgaataacatttcttttgccagcctaaaacttaaagcctaaggctaaatccataatattacattccttccttcccaaaccccccacacttaaaacattaaagtattaaatcttaattttcaagtcatatatatatgtgtatatatatatatgtatatatatgactcacaaaaccaatgaaataagtatcatacttgcctgcataaattatgtgcacctctcttctttgaaacagtcattcctatctttcccaaatgtatgaaagacagaaagctagtcctcagcgggcttaataagtggtctgcactgctttcccctctaaacagctataaattaacagagccttccttgccttcttacctgagatttttaactctcacagaagctaggatggggatgtcttaactatcagacaaaaactagccaaaaactaagtgcctgtggtcatccaagtggtgcccttctattgcgggtgcatatgccagatctcatctaaggtcctttgtgtacctgccttgggttctgtgggagccaagtagctgagaaagcctcaaaacaaacttactgctgtgaaaagggggtctgttcccaggcatggtctcccctccacttcttgtggctcaaggaccagaccaaaaactctcaatgttatttataatggaagggctattcagttgctatgaggttgatgctttatgcttaatttctattgctgtttttatanaccccccgctcccctgaaaagatgtttctggtgatgggaagaagaaaagtagggttctnttgttgctgccatatgcatatgracatgtataaaaagtggtcaaacccagatgagggtcccgcttctggtttatatacaataatttaatcagttgtatatatttaacacctaaaaaaattcacgatcaaagtccttcatgcattttatgaggaagttctggattaaaatcatggtcaaccagatgttgcttttgcctgggaagatggtgtcatattctgttgcagagtcatcagtgcccatgatagatacttccttaaatttttagtttctttgtggtctcaagtctttttttcagcagctcccccatttccagaagtgagtgcagataactntctgcaccttcccttgcacagtctttgaaaattttctctcttccggtgagagagaagtgtcttctaaaataagttcttcaagtttaagtgcaattagatgtgtttcaagccctttaatatgatccacaacattggaaattaaagtctgaagcccagtaacatagtcttggaaactggtaaagacaggtggcatgatgatgctggtttcttttttcttytttttytttttctgtaaatttagtttgtatggtcgtaggacactctcacagtaactggatacccaaaggataacagaaatagtctcaacaaagaaaactagattttctaaaagagtaggatgtgttttcaagttaccatctttaacttctaagaggtcacctttacatttactgaagacatcttttaactggtctagtaaagacttaaaactattttctattcgttcctgaatctccattgtatcctctaaaccactggtatccagctcataaatatcattgacaagataaaaagagcttatctggcactgagaacagccagaattaaagaatccacccattctggtaggtacaggaccaaggaaaggatactgaatatccttctcaataaatcgctttcctgtctccagggttgcctccagctgttgaaggagcaaacgaagaatatcaatccgggagataccccattctcggcagtcttctccgagttctttggctccacagggtggttgagacttggaagtccacttatcagcctcaatgttaaggatcggattcttaaccacaaggtctcctcctctaaggaaagtttcttatgttcttcagaaacgtccctgtcttttggatcccagctgaaaaaaacatttaagtctctgttgtctcgcaaatcttcccatggaatgtcatcttcttctggcctaaggttcattgactttatactttctgctaaactggttgatmtatttgcttcaagtagaaggtctaacagcatccgttcagtacggacttgtgcaaaatgaagagaattattcagcctgttcctaaaagcgataaactctgggatcttctcaaatgcaccatatttgtaagcttgaataatatattctgaggtmctctgatatacagccttgcagggttcatttcaggccgcgggattgcgccacgggcgctaattcaactgcattcgatgcggcttttaaacccccatgggacacctcggcgagctgtttgcctgcagtatctggagaaattaaagacgga

SEQ ID NO: 499 - DNA, 612 bp, Homo sapiens
  misc_feature (1)..(1): n equals a,t,g, or c
  misc_feature (5)..(5): n equals a,t,g, or c
  misc_feature (8)..(8): n equals a,t,g, or c
  misc_feature (12)..(12): n equals a,t,g, or c
  misc_feature (588)..(588): n equals a,t,g, or c
ngagnganatcnctctatyatttgktataaaggacaagacctgcctcaccccaagtccatgcttcaggccactgctgaagccaacaacttagcagctgcagcctctgccaaggacatttattataacaacatggaagaggtttgtgggggagagaaaccttatttgtctccagacattctagaggagaagcactgtgaattcaaacaacttgctctggaccattttaagaagaccaagaagatgggtgggaaggatttcagctttcgttaccagcaggagctggaggaggaaatcaaggaattatatgagaacttctgcaagcacaatggtagcaagaacgtcttcagcaccttccgaacccctgcagtgctgttcacgggcattgtagctttgtacatagcctcaggcctcactggcttcataggtcttgaggttgtagcccagttgttcaactgtatggttggactactgttaatagcactcctcacctggggctacatcaggtattctggtcaatatcgtgagctgggcggactattgattttggtgccgcatatgtgttggagcaggcttcttctcatatcggnaattccactcaggccactgtgagg

SEQ ID NO: 500 - DNA, 1149 bp, Homo sapiens
  misc_feature (99)..(99): n equals a,t,g, or c
  misc_feature (1133)..(1134): n equals a,t,g, or c
  misc_feature (1144)..(1144): n equals a,t,g, or c
  misc_feature (1149)..(1149): n equals a,t,g, or c
cttaagctcgctctccaaaactgctgcccccagctgtggcaacgacactcggccagagaccgtcaatgtgcccgcgtgctggccgacgagaggtctccnacagccaggggcttccccgcaagaggacatcgccaacttccaggtgctggtgaagatcttgcccgtcatggtgaccctggtgccctactggatggtctacttccagatgcagtccacctatgtcctgcagggtcttcacctccacatcccaaacattttcccagccaacccggccaacatctctgtggccctgagagcccagggcagcagctacacgatcccggaagcctggctcctcctggccaatgttgtggtggtgctgattctggtccctctgaaggaccgcttgatcgaccctttactgctgcggtgcaagctgcttccctctgctctgcagaagatggcgctggggatgttctttggttttacctccgtcattgtggcaggagtcctggagatggagcgcttacactacatccaccacaacgagaccgtgtcccagcagattggggaggtcctgtacaacgcggcaccactgtccatctggtggcagatccctcagtacctgctcattgggatcagtgagatctttgccagcatcccaggcctggagtttgcctactcagaggccccgcgctccatgcagggcgccatcatgggcatcttcttctgcctgtcgggggtgggctcactgttgggctccagcctagtggcactgctgtccttgcccgggggctggctgcactgccccaaggactttgggaacatcaacaattgccggatggacctctacttcttcctgctggctggcattcaggccgtcacggctctcctatttgtctggatcgctggacgctatgagagggcgtcccagggcccagcctcccacagccgtttcagcagggacaggggctgaacaggccctattccagcccccttgcttcactctaccggacagacggcagcagtcccagctctggtttccttctcggtttattctgttagaatgaaatggttcccataaataaggggcatgagcccttcctcamraaaaaaaaaaaaaaaaaaaaaaaaaaaaaaaaaaaaaaaaaaannaaaaaaaacnaaaan

SEQ ID NO: 501 - DNA, 579 bp, Homo sapiens
  misc_feature (459)..(459): n equals a,t,g, or c
  misc_feature (572)..(572): n equals a,t,g, or c
ctggaacaaggacctaagactgctctttgaccagtttatgaagaaatgtgaagatggctcctggaaacgtttgccttcatataaacgtacacctactgaatggattcaagacttcaaaacccattttcttgacccaaagcttatgaaagaagaacaaatgtcacaggcccagctcttcaccagaagctttgatgatggcctgggctttgaatacgtgatgttctacaatgacattgagaaaaggatggtttgcttatttcaaggaggcccttacctggaaggaccacctggattcattcatggaggtgccattgcaaccatgattgatgctactgttggtatgtgtgcaatgatggctgggggaatcgtcatgactgccaatctcaacatcaattataaaagacctatccctctttgttctgttgttatgataaatagccaacttgrtwaaagttgaanggaaggaaattttttggtttcctgtaatgttcagagtgttkgatgagaagaccctatactycagaggsgrcaagyttatttwtaaagscgaatcccggctaaaaagtctgacnataaagg

SEQ ID NO: 502 - DNA, 2292 bp, Homo sapiens
  misc_feature (2236)..(2236): n equals a,t,g, or c
  misc_feature (2247)..(2247): n equals a,t,g, or c
  misc_feature (2252)..(2252): n equals a,t,g, or c
gggtcgacccacgcgtccgcaatatctggagtacagaaagcagaaaatggaccaattgactggagtggagacatgcctgtttcttgcagtctttctcggggtcttcaggttctacttacccctgttcttgcaaacatccttgaagcagatcaggaaaagtgttggggttttgaccagttttttgcagaaactagtgatatacttyaccgaatggtaattcatgttttttcgctacaacaaatgacagctcataagatttatattcatagctataatactgctactatatttcatgaactggtatataaacaaaccaaaattatttcttcaaatcaagaacttatctacgaagggcgacgcttagtcttagaacctggaaggctggcacaacatttccctaaaactactgaggaaaaccctatatttgtagtaagccgggaacctctgaataccataggattaatatatgaaaaaatttccctccctaaagtacatccacgttatgatttagacggggatgctagcatggctaaggcaataacaggggttgtgtgttatgcctgcagaattgccagtaccttactgctttatcaggaattaatgcgaaaggggatacgatggctgattgaattaattaaagatgattacaatgaaactgttcacaaaaagacagaagttgtgatcacattggatttctgtatcagaaacattgaaaaaactgtgaaagtatatgaaaagttgatgaagatcaacctggaagcggcagagttaggtgaaatttcagacatacacaccaaattgttgagactttccagktctcagggaacaatagaaaccagtcttcaggatatcgacagcagattatctccaggtggatcactggcagacgcatgggcacatcaagaaggcactcatccgaaagacagaaatgtagaaaaactacaagtcctgttaaattgcatgacagagatttactatcagttcaaaaaagacaaagcagaacgtagattagcttataatgaagaacaaatccacaaatttgataagcaaaaactgtattaccatgccacaaaagctatgacgcactttacagatgaatgtgttaaaaagtatgaggcatttttgaataagtcagaagaatggataagaaagatgcttcatcttaggaaacagttattatcgctgactaatcagtgttttgatattgaagaagaagtatcaaaatatcaagaatatactaatgagttacaagaaactctgcctcagaaaatgtttacagcttccagtgggaatcaaacataccatggaccccaatttatccaagttctaacacattagtagaaatgactcttggtatgaagaaattaaaggaagagatggaaggggtggttaaagaacttgctgaaaataaccacattttagaaaggtttggctctttaaccatggatggtggccttcgcaacgttgactgtctttagctttctaatagaagtttaagaaaagtttccgtttgcacaagaaaataacgcttgggcattaaatgaatgcctttatagatagtcacttgtttctacaattcagtatttgatgtggtcgtgtaaatatgtacaatattgtaaatacataaaaaatatacaaatttttggctgctgtgaagatgtaattttatcttttaacatttataattatatgaggaaatttgacctcagtgatcacgagaagaaagccatgaccgaccaatatgttgacatactgatcctctactctgagtggggctaaataagttattttctctgaccgcctactggaaatatttttaagtggaaccaaaataggcatccttacaaatcaggaagactgacttgacacgtttgtaaatggtagaacggtggctactgtgagtggggagcagaaccgcaccactgttatactgggataacaatttttttgagaaggataaagtggcattattttattttacaaggtgcccagatcccagttatccttgtatccatgtaatttcagatgaattattaagcaaacattttaaagtgaattcattattaaaaactattcatttttttcctttggccataaatgtgtaattgtcattaaaattctaaggtcatttcaactgttttaagctgtatatttctttaattctgcttactatttcatggaaaaaaataaatttctcaattttaatgtaaaaaaaaaaaaaaccgaggggggccgnaccatcgccanaggancgatacatccggcgcgttacacgcggactggaacctgcta

SEQ ID NO: 503 - DNA, 809 bp, Homo sapiens
  misc_feature (780)..(780): n equals a,t,g, or c
tctggacttggtgcctctttctgttatatgctttcctatttagttgggagaccagttgtatacaaatacctaacagagaaagcagtaaaatggtcacagcaggttgaacgtcatagagaacatctcattaactacattatatttttgagaataacaccatttctgcctaattggtttattaatatcacatctcctgtgataaacgtgccattgaaagttttttttattggtacttttctaggtgtcgcacctccttcttttgtagccattaaggcaggaacaacactgtatcaacttacaacagcaggagaagctgtttcctggaactcaatatttattctgatgatcttggctgttctttctattctgccagccatcttccaaaaaaaactaaagcagaaatttgagtaaaaataatcatctgattttwagttttgctgtcatcaccatctcaggattaacagctgcgactttaggtggggtatattttcttctcctaagagaatagacagtttttccagattcatcatcattgactgtcaagaaaggacccttcagcaaggctgtaccctcaatgcagttgatggcctgtcttcacggatttacagacttggcctgatgcccatgtaaattcaagctttggcttgtggtaacaaccacaagaagacaagcatctgtggtgcggaggcaagcaggctaactaggagttgacaagctaagaaagtgaaactgttctttcttagttaactgtctttctctggagctctgttattttgagtntaatatttccacgacacttagtaaatgca

SEQ ID NO: 504 - DNA, 2683 bp, Homo sapiens
ccgaattcccgggtcgacccacgcgtccggagactgaaaatatgatggaccgaattgtgactggcttgtctgagtctagtgwcaaggtgcggttagctgccgtcagatgtttgcacagyttatccagatctgtgcagcagcttcgaaccagtttccaggatcatgctgtttggaaacctttaatgaaggttttacaaaatgcaccagatgaaatcctagtggtagcatcttccatgctgtgtaatcttcttcttgaattttctccaagcaaagagccaattttggaatcaggagccgtagagctactttgtggattaactcagagtgaaaatcctgctttacgagtgaatggaatttgggctttaatgaatatggcatttcaggctgaacaaaaaataaaagcagatattttacgaagcttgagtactgaacagctattccggttattatcagattcagatttgaatgtgctgatgaagacattgggacttcttagaaatctcctctccactcgtcctcatatagataaaataatgagtactcatggaaagcaaattatgcaagccgtcactcttattctagaaggggaacataacattgaggtcaaagagcagacactgtgcatcttagccaacatagcggatgggacaacagcaaaagatcttattatgaccaatgatgatatcctacagaaaatcaagtattacatgggccattcacatgttaaactgcagcttgcagccatgttttgtatatcaaacctcatatggaatgaagaggaaggttcacaagaacgccaggataaattacgagacatgggcatcgtagatattctacacaaactgagtcagtcaccagattcaaacctttgtgacaaggcaaagatggcactgcagcagtacctggcatgatgggagtgcccctgggcacctgcgagcatcccacctccttgtttaaggaagtacaggaaccagcctcatttgattccttctatttgcacaagtcaccttggactgcagggagctgttttgcaaaagcagtttagtaggcttagatctcaaattcatcttgagaacatttttttgaggtagtaatttcctcagaagactcttgtgttttgttttggtttttttttctgagctactcggactctttattagaacaatcaatcattttcctttggacctacaatttttgcctatgctgcagccactttgtgagtgagaatgaatatgtctgtgtgaacacacaggcatgcgtgtgtatgtgcacgtacatgggccagaatgaatggatgtgtgtgtgtgagggatacctcagatttttcttttcttattttgtgtgaaaatctcttttctacagattttccagggtttaagcattgcttgctgtataaaaaactttactgaattatatacagtttgaatgaaatgttattttaaaaacaaaacaattgttaagtgttccataaaggttatgttgaattttggtcagatgaatatttgtaagtaaaaaatatatgcatttctgaacctcaacttacatagattttctttatataaaaaaaaagaaaaaaaaagaaaaagttggctatagttggcctgattaacaggcactatacatggtgctgtgcaaaatagtaagctagcatcttactgccgtcaatattagcaggtacagagccttttttcatcctaattcagtaagttctcaggcttycaagtcaaatggagaagtaaagtgaggcaacagattcaccataggctttttgaagcatcaaagggaaatataactactgatagtgaaagcccagccatgacccagatgggcttacccttgacaggaactggggaccaagagcctcccaattgccctaactcctgtcattggtattagcaatatctggccagatttagaaccagtcatggaaacttgtgctcaaactaaaagtaggtcatcacttcccagaaacagaataccttgtgcttcctgaaacagcatatatcactgtgaaactaaagaatattctacagacacccctgtagaaagaaacaaagaacaggatagtttagaaagctttctgttagctgtattcagcaaatttcatactagttgctcaggactgctagttggtatgcttttgtaaaacgagattgaaatttaataaaagatgcaactaaaatctttcctgcatgaagctaaaagcactcaagttgagagaggggcaagggaatctccccaggatgactgaagatgacttctttttacagcaagtactgttagcctttctgcaccccttagcttggcccctgctccaacttctgggtcagcagcaaggtgaactcaacagaagttgctcttgactgtttgarggtagaagcagcctaccttttctctttgctaaaagaaggtcaaagcktcgcaaccaggatgcaaggtctgcggtccagaagcttgcggtgagtgtgtgccactgatggagctccaagcccacccaccagccactcctgatggggttgctcacactgcagctgccctatcaccaccctgcacgttccttggaagatttaaatgtttggttgcaaatgaatgttttaaaaatgtatttaatgcaatttttcctgctctcaacatgaccacccaagattcaaacacaaaaaaaaaaaaaaaaaaaaaaaaaaaa

SEQ ID NO: 505 - DNA, 809 bp, Homo sapiens
  misc_feature (14)..(14): n equals a,t,g, or c
cggggccccccccngggttttttttttttttttttttttttttttttttttccacacacacagcctttattgagcagctactgggcagtgacgctgccgaggcgggaatcccaccacagtcctgaccgcagctgggacccctttgcctcctctgacacccccacctcaatttgatacccacttcctgagcaaatgtgacccctagggcctgggattcccaagaccaccccgaaatgcagcggccccaccgtctcctgaggccggtgagcsagrggcagcagtgcrgctcagcaggtgcgaggcaggcttaggatttcggaatcaccacctggaacttacagacgggcagggctgccacggaggcggtgaccacgctctcaatgcccagggtatagagggcgccgcgcaggaggccgcaggtgaaggccaggaacttgggtgcttcctccagatactgcargccagagsccatcgggaggaggagggggaagctgttgtcttgcaggacgtaggtcccctggtgattggtgcgcaggctgtccatctgcttctggaacaccgccacccacaggtctttgcacaagaacttgaggacatccagctcctccctgaaggccagcgtctcccggggcagcctctcgcctagagcctggcccacacggaaccccataccctccaggaccgacaggctcatcttctgtccccccgggccggggtcggggtcgtgagcccacagctcagccaccatctccgtgtgaagaaactcaaacaacacagtatccgccatgccccctcctcgcacctgtgcc

SEQ ID NO: 506 - DNA, 590 bp, Homo sapiens
  misc_feature (583)..(583): n equals a,t,g, or c
  misc_feature (586)..(587): n equals a,t,g, or c
  misc_feature (589)..(590): n equals a,t,g, or c
gcccggcctattcccttgggcttttaaaaagcgtcttggatggaggtggtgcaggtgctcaccaagcccgcagtaacccaagttgcatgtatccccagggcacttttgtgattcccctgcttgtgactgcacaccgggaccccactcaattcaaagacccagactgcttcaaccctaccaacttcctggacaagggcaagttccagggcaatgatgctttcatgccctttgcctcaggtgcaggcagaggaggaaggggaccagcctggactggctctggggtacctggtgctcactgtgcacctgtgtacccggcaaagcagatgtgcctgggcacaggcctggcccactcgggtatcttcctattccttacggccaccttacagaggttctgcctgctccctgtggtacgccctggcaccatcaacctcacctgcagtgcactggcctgggcagtgtccccccagacttccagctccagccagtggcctgctgaggtcaggctccactatggtgggctcactggccctcaaacctccataccctcctcggtcaataaaggccctaaattgcaaaaaaaaanaannann

SEQ ID NO: 507 - DNA, 1698 bp, Homo sapiens
  misc_feature (13)..(13): n equals a,t,g, or c
cggacgcgtgggnggacgcgtgggcggacgcgtgggggccacgaaatacgagaggcaatccagcatccagcagatgagaagttgcaagagaaggcatggggtgcagttgttccactagtaggcaaattaaagaaattttacgaattttctcagaggttagaagcagcattaagaggtcttctgggagccttaacaagtaccccatattctcccacccagcatctagagcgagagcaggctcttgctaaacagtttgcagaaattcttcatttcacactccggtttgatgaactcaagatgacaaatcctgccatacagaatgatttcagctattatagaagaacattgagtcgtatgaggattaacaatgtaccggcagaaggagaaaatgaagtaaataatgaattggcaaatcgaatgtctttgttttatgctgaggcaactccaatgctgaaaaccttgagtgatgccacaacaaaatttgtatcagagaataaaaatttaccaatagaaaataccacagattgtttaagcacaatggctagtgtatgcagagtcatgctggaaacaccggaatacagaagcagatttacaaatgaagagacagtgtcattctgcttgagggtaatggtgggtgtcataatactctatgaccacgtacatccagtgggagcatttgctaaaacttccaaaattgatatgaaaggttgtatcaaagttcttaaggaccaacctcctaatagtgtggaaggtcttctaaatgctctcaggtacacaacaaaacatttgaatgatgagactacctccaagcaaattaaatccatgctgcaataacaattctggaataagcacctgctgtagacagaagacagtattctgcaatgactgagaatgcagttttttagtgattgcaattactatctcatttattcttgcttttatttctttcctctgttcctcttccctcttttttaatcatgttcttaagacttcttttctgtgccaaaatcagtaaagttacactctgaagggatatcatcctttcaaacgggccatctaaggcagctaattatgcattgcattggggtctctactgagaaaaattctgtgacttgaactaaatatttttaaatgtggattttttttgaaactaatatttaatattgcttctcctgcatggcaaaactgcctattctgctatttaaaaaccctcaatgactttattttctactgccgcctttttcatgtgcaaccaaaatgaaaatgtttaaattaactgtgttgtacaaatggtacccaacacaaactttttttaaattagtaatacttttgtttaaagttttaagtttgcattttgactttttttgtaaggatgtatgttgtgtgtttaacctttattaactaacgttaaaagctgtgatgtgtgcgtagaatattacgtatgcatgttcatgtctaaagaatggctgttgatgataaaataaaaatcagctttcatttttctaagtgtggcttggtttactgatgttttgtttttaggcttctgaagttttccccatgtatgtttttatggaatgcatatatacattacatgattttttcttcttttaggggagagccgggtcttttcattagaattttgatcatcgctccatgtatatacttttaattgcctttaaaattttgctaagtatcaaa

SEQ ID NO: 508 - DNA, 1582 bp, Homo sapiens
gttcaacttttgttttctacccttctagacattttgtgcgtatatgtacacatatgtgagtagtaaatgagcacttaattagaataatagacctttctcattagtatgagttcttttacttcctgtaaayaagcacactaaaaactttaattttttcagatggactgagctgtgtccaatgattgaagccaggaagaatcatgggctggtatttgtaaaagacaagatatttgctgtgggtggtcagaatggtttaggtggtctggacaatgtggaatattacgatattaagttgaacgaatggaagatggtctcaccaatgccatggaagggtgtaacagtgaaatgtgcagcagttggctctatagtttatgtcttggctggttttcagggtgttggtcgattaggacacattctcgaatataataccgaaacagacaaatgggttgccaactccaaagttcgtgcttttccagtcacaagttgtttaatttgtgttgtcgatacttgtggagcaaatgaagagacccttgaaacatgaaaaatgagtggacttcagactcatcagagactctaaaatatagccaccagtgctttgttccaggagtttggtgacaaagttttggtttggtgttttggtaaagaaagtttcaagtgaaatgaggttcctataaaatagatgtttcttttatatggrtttccttaattcaaagatcatattttagctggccacaaaaccaagaacatatctagcaagaaaacttgaaaaagtataagcatttgttaaaaatgtgaatttcttgaatgaatttcacatttgtaactatgattttggcagaatagaagattggctcatcagtgaagcgcagtatcttagctctagattctattttcatgcatcacagaagtgctatacggttaggtctgtttgtgctcagtcaagaactaagaaatagtatgaattgtaagtcaagatgggcaactcagatggagcagcttagtctcacagtttgcttgtctatttattttatttagtgccaaatgtattccattttaaaagtaagccagagtgagtcaaggcatatacacactttctcacaaaacttcctaaacagatttgggggtttaatatgtccaactcctcatgaaatatattcaatccacttaaatatattccatctttttaacataaaatgtaaagcttagcacccatcattaatttatgtctctgttttatccagtggttaaaaaaggattctgcctctttagtcctcactgttaaataaaacccaatcatagtaagtgattaactagcaaaaagtaaagctatttatagcaaatttctagatcattagaaaagcactggtagttgtacaatatcagtgttgactttgaacttctttaacgagatcatgaattcttttcccttagccaaaacatgaaatatttaacctagttgtctctaaaagttttgtaatcatgagttagatatatgtcatctcctattcattgcttttatgtgatcaataaatcttttacaaacccaaaaaaaaaaaaaaaaaaaaaaaaaaaaaaaaaaaaa

SEQ ID NO: 509 - DNA, 1324 bp, Homo sapiens
  misc_feature (111)..(111): n equals a,t,g, or c
  misc_feature (1284)..(1284): n equals a,t,g, or c
gacatgctgaaggacatgtgggtgtccctagcacccatgcccaccccgagatatgctgccacctccttcctccgaggctccaagatctacgtgctggggggacgacagcanagtacgcggtcaacgctttcgaggtctttgacatcgagactcgctcctggaccaagtttcccaacattccctataagcgggccttctccagctttgtgaccctggacaaccacttgtacagcctaggaggcctgcggcaaggtcgcctctaccggcagcccaagttcctgcggacgatggacgtgttcgacatggaacaggggggatggctgaagatggaacgatcgttcttcctcaagaagcggcgggcagattttgtggctggctctctgagtggacgggtcatagtggctgggggacttgggaatcaacccactgtcctggagacggcggaagcattccacccagggaagaacaaatgggagatcctccctgccatgcccacaccccgctgtgcctgctccagcatagtcgtcaagaactgcctcctcgccgtgggaggtgtcaaccagggtctgagtgacgcagtggaggccctgtgtgtctctgactcctagctgtctctgggctcagtacctttgccctggaccatatcacttcactcttaacatgaggaatgatcttgtccaagcagtcggggctacttccaagaatgtcagctcctgttagcaaccagtggagtctggccttgggctctaagttgacctctctatagctccaaatcctaccaatctcagaaaactgtaagaggcacagatgactccaccagctgcagagtgactctgaagagagtcttcacttactgcacaggcaaagaaaggcacaggaatatttcctacctctccctcctgtgagtcccacctccccccacccccatctccaggaggcaggtagagcagttctraccgagaggatagactgctgttgctgtctttccccagctctgaactagttttaaggtagcttaggatgaaaaatggagaatgattgggggttccaaaccactttyttctcccttggcttatatctcttcaccatttggtggtcaactgtgggsctaccctggacctcatctactcagcgagaattggacatgaagctagaggcagctgccttggaagggaarttcaggctcacttggacagscccaggcccatggsaggaagaatcccytccctccttkggggtccctgatgggcawgtttgatggrrraaggaaccaaatctccccancccctgggttctgctcccccacatctcttccctaattccc

SEQ ID NO: 510 - DNA, 954 bp, Homo sapiens
ttttttttttgtaaacatacacattactgaaatgacagcaacccacattgcagaggagaaaagtctattagctgtacagtttacatttcaatgcccaaacttatttatatatttacataaagatgctaccttgattaatcaatgtctatttgcatttccacatgtgaatttcttcagttttgatattccatatgaaggagctacagtgaaaacacttttgaataaagcagtgaaccctaagaatcttatcttgagatgagatgtgtgaaccaccatttgaatgttatttctccctgctgtgtacattagtctggctgggtgttggtcacagacatggatgcactgacggctattcccataaccgagccaggcgggaagggggaaaaggaagacattatttgtcaccaacaacccagtatcccaagtcaaaattctcaactatggccaaaaaggcctaaactcgacccacaggaactggctttctaactggttgacaaacacgtaagctgccctcctgcaaaagccaaccagagaacaggcaggtggcaacaggacccagcctagagcagagcacttcagaagaggatggataaatccatcagggatgctcagggcttcctgaccactgtcccgggtgaaggcactgccacattttctctcaacaaatctgttatgtccctggatccaattatttagcctaaggaatgtcacctctgctaaagagaagtgtgtttgtgaggggtccaaaatgataaaccgtcttgttagcatcatgctccaccctctgagttaaccagctcagatccttgctagattttggaatccagtaaatctgtgttgacccagaggtgctgctgctaatgcctccagagaattcgtgtccagatgaagagacttagagtggcttctccatcctgctcgaacttcaattgctctatctccggtagtccaaac

SEQ ID NO: 511 - DNA, 733 bp, Homo sapiens
  misc_feature (667)..(667): n equals a,t,g, or c
  misc_feature (676)..(676): n equals a,t,g, or c
  misc_feature (679)..(679): n equals a,t,g, or c
ctgtgaattaaaatatggaggctttgttgtgagaagaactactgaattaactgttacagcccctctgactgataagccacccaagcttttgtatcctatggaaagtaaactgacaattcaggagacccagctgggtgactctgctaatctaacctgcagagctttctttgggtacagcggagatgtcagtcctttaatttactggatgaaaggagaaaaatttattgaagatctggatgaaaatcgagtttgggaaagtgacattagaattcttaaggagcatcttggggaacaggaagtttccatctcattaattgtggactctgtggaagaaggtgacttgggaaattactcctgttatgttgaaaatggaaatggacgtcgacacgccagcgttctccttcataaacgagagctaatgtacacagtggaacttgctggaggccttggtgctatactcttgctgcttgtatgtttggtgaccatctacaagtgttacaagatagaaatcatgctcttctacaggaatcattttggagctgaagagctcgatggagacaataaagattatgatgcatacttatcatacaccaaaagtggatcctgaccagtggaatcaagagactgggggaagaagaaccgttttggccttgaaatcctacctganatgcttganagnccttatggatataagtggttatcccagattgagatttaatcccactggaacata

SEQ ID NO: 512 - DNA, 2590 bp, Homo sapiens
ggggccccgcccctgggccgtgcggtgacgccacttcagggccggcccgcggaacttttgggcaggtgtcagcgcccgtgtcaccgccacgtcgcggacatggtgatttcagaaagtatggatatactcttcagaataagaggaggccttgatttggcttttcagctagctactcctaatgaaatttttctcaagaaggcactgaaacatgtgttgagtgacctgtcaactaagctgtcttcaaacgcccttgtgttcagaatttgccacagttcagtgtatatatggcctagcagtgacataaacaccattcctggagaactgactgatgcttctgcttgtaagaacatactgcgctttattcaatttgagccagaagaagatataaaaagaaaattcatgagaaagaaggacaaaaagttatcagacatgcatcaaatagtaaatatagatcttatgctggaaatgtcaacctccctggcagctgtaacgcccatcattgaaagggaaagcggaggacaccattatgttaatatgactttacctgtcgatgcagttatatctgttgctccagaagaaacatggggaaaagttcgtaaactcctggttgatgcaattgcataatcaactaactgacatggaaaaatgtattttgaaatatatgaaaggaacatctattgtggtccctgaaccactgcactttttattaccagggaaaaaaaatcttgtaacaatttcatatccttcaggaataccagatggccagctgcaggcctataggaaggagttacatgatcttttcaatctgcctcacgacagaccctatttcaaaaggtctaatgcttatcactttccagatgagccatacaaagatggttacattagaaatccacatacttaccttaatccacctaacatggagactggtatgatttatgtggtccagggcatatatggctatcatcattatatgcaggatcgcatagatgacaatggctggggctgtgcttatcgatctctgcagactatctgctcttggttcaaacatcagggatacacagagaggtccattccaacacacagagaaattcagcaggctctagtcgatgccggggacaaaccagcaacatttgtcggatcgcggcaatggattggatctattgaggtgcagctggtactaaaccaattgatcggtataacgtcaaaaatcctgtttgtcagccaaggttcagaaattgcctctcaaggacgggaactggctaatcatttccaaagtgaaggaactccagttatgatcgggggaggagttttggcccacacaatactaggagttgcatggaatgagattacagggcagataaagtttctgattctagatccacattataccggtgctgaagacctgcaagttattttggaaaagggctggtgcggatggaagggcccagatttttggaacaaggatgcatactataacttatgtcttcctcagcgaccaaatatgatttaaaatatcttggagtcaaagactgcagtagagtggtattataaatttgtgaataaagaatcagtttaatttttcacattaaatcctggttctagtttgaccatttaaattatgacctttttcaaaggttgtaaatactgcacggagaatgtattttttagacgttcctttaataacttaaaagacaaagcatacacaaccagcatattataggcatgtaaatacatgtgttcttaaatggatcttcacttggaagaaagtttttcgtccttctcagaaggagattagacacaacatatggtaaagccaaaagcaggagcttatagatttgcatgaaatgaaggcgttcttcagacttcttcataacccacgtgacatcagcacttccttttcccactggtattttctacacttccgagactccgtttctgtctgagcacggcaacacaatcattcctgtcagggtgttcacttgcttttattgtctgcatacatttaattgttgtaagaaacttggcacagtctggaaatccacatgaccaagcgagatcttcagctgtttgcccgttcttattacataaatcaatttgggcatcactggctacaagcaggcttaggcactccaggcttccaacttttgctgccttgtgtagtggagcttctcctaaaacatcctgctggttgaggtcagcgcccgtttgcagctgccagagaagaaagcaagcaaggcgcttcctgcggctaagtggacaggcgactgcttgcagggatccgggggtgcgttgaccgaggcccctgtctccagcaaatgcttcagaccatccacctcggggttgcaatccagcaacagcatttcccgcctaaggcagatgacaagagtccttggaagtgcagagaggtgagacactcgccgcaccccgacaggtaagaatgcgcaggctggccctagcacgggagaatttaaagaccgctgggacttccgggccggcccttggcagccgcgccccagctccggttacgcccgagcagcctaatcctcaacgacccggaccctgtccagccccgccacggccgcctcgtgcc

SEQ ID NO: 513 - DNA, 1301 bp, Homo sapiens
  misc_feature (371)..(371): n equals a,t,g, or c
gaccgacgaatcagtgggcatgtgggcatcatcttcagcatgtcatacctggaaagcaagggattgctggctacagcttcagaagaccgaagcgttcgtatctggaaggtgggcgacctgcgagtgcctgggggtcgggtgcagaatattgggcactgctttgggcacagcgcccgtgtgtggcaggtcaagcttctagagaattaccttatcagtgcaggagaggattgtgtctgcttggtgtggagccatgaaggtgagattctccaggcctttcggggacaccagggacgtgggatccgggccatagctgcccatgagaggcaggcctgggtgatcactgggggtgatgactccaggcatcggctgtngcacttggtagggcgtgggtaccggggattgggggtctcggctctctgcttcaagtcccgtagtaggccaggtacactcaaggctgtgactctggctggctcttggcgactgctggcagtgactgatacaggggccctgtatctctatgacgtcgaggtcaagtgctgggagcagctgctagaggataaacatttccagtcctactgcctgctggaggcagctcctggtcccgagggcttcggattgtgtgctatggccaatggggaaggtcgtgtcaaggttgtccccatcaacactccaactgctgctgtggaccagaccctgtttcctgggaaggtgcacagcttgagctgggccctgcgtggttatgaggagctcctgttgctggcatcgggccctggcggggtagtagcttgcctagagatctcagccgcaccctctggcaaggccatctttgtcaaggaacgttgtcggtacctgctgcccccaagcaagcagagatggcacacatgcagtgccttcctacccccaggtgacttcctggtgtgtggtgaccgccggggctctgtgctgctattcccctccaraccaggtctgctcaaggaccctggggtgggaggcaaggctcgggctggtgctggggcactgtagtgggtagtggtagtagtgggggtgggaatgctttcactgggttgggcccagtgtctaccctgccctctctgcacgggaagcagggtgtgacctcagtcacatgccatggtggctatgtgtataccacagggcgtgatggagcctactaccagctgtttgtacgagacggccagctccagccagtcctaaggcagaagtcctgtcgaggcatgaactggctagctgggctccgtatagtgcccgatgggagcatggttatcctgggtttccatgccaat

SEQ ID NO: 514 - DNA, 614 bp, Homo sapiens
  misc_feature (2)..(2): n equals a,t,g, or c
  misc_feature (589)..(589): n equals a,t,g, or c
  misc_feature (598)..(598): n equals a,t,g, or c
cntatgggctggagctactcggccaagggtttaagactttaaatgagaataaagggtggtatttacgaggaaatgagagtgaataagtcatctctaacctctcccagcctttttttcataagagagaccatattaaacttacatgtttgaagactgcttcattctgcctctagtaccagcggtttctctgttctgtgatcaatgtgattcacaggaactccttaagtaacaaacgaaatgagccaggggcgtggaaaatatgacttctatattggtctgggattggctatgagctccagcattttcattggaggaagtttcattttgaaaaaaaagggcctccttcgacttgccaggaaaggctctatgagagcaggtcaaggtggccatgcatatcttaaggaatggttgtggtgggctggactgctgtcaatgggagctggtgaggtggccaacttcgctgcgtatgcgtttgcaccagccactctagtgactccaytaggagctctcagcgtgctagtaagtgccattctttcttcatactttctcaatgaaagacttaatcttcatgggaaaattgggtgttgcnaagtattcnaagatctacagttatg

SEQ ID NO: 515 - DNA, 743 bp, Homo sapiens
  misc_feature (19)..(19): n equals a,t,g, or c
  misc_feature (717)..(717): n equals a,t,g, or c
  misc_feature (720)..(720): n equals a,t,g, or c
gctcatgctgcccctgacngagggctcgctgcggctgcgggcggacgatgaggacagcctgacttcagaggattccttcttctccgccaccgagctctttgagtccctgcagactggagattacccgatcccactctccagacccgccgctgcctatgaggaggccctgcagctggtgaaggaggggagagtgccttgccggaccctcaggacggagctgctgggctgctacagtgaccaggactttctggccaagctgcactgtgtggcaggccttcgaggggcttctggaagacaagagtaaccagcttttcttcgggaaagtgggccgacagatggtgacaggcctgatgaccaaggctgagaagagccccaaaggcttcctggagagctacgaggagatgctgagctatgccctgcggcccgagacctgggccacaacacggctggagctggagggccgaggggtggtatgcatgagcttcttcgacatcgtgctggacttcatcctcatggacgccttcgaggacctggagaaccctccggcctcggtgctygccgtcctgcggaaccgytggctgtcagacagyttcaaggagacggccttggccactgcttgctggtcggtcctgaaagccaagaggaggctgctgatggtgcctgatggcttcatctcccatttctactccgtatcggagcatgtgagccctgtcctanccntcggcttccttggacccaagcct

SEQ ID NO: 516 - DNA, 1805 bp, Homo sapiens
  misc_feature (254)..(254): n equals a,t,g, or c
  misc_feature (313)..(313): n equals a,t,g, or c
  misc_feature (427)..(427): n equals a,t,g, or c
  misc_feature (430)..(430): n equals a,t,g, or c
  misc_feature (1803)..(1803): n equals a,t,g, or c
cagaatctcagcacccacctgcttatcctctatggtgtccagggactgctgaccttcgggtacctggtgctgctgtcccacgttggcgagcgcatggctgtggacatgcggagggccctcttcagctccctgctccgacaagacatcaccttctttgacgccaataagacagggcagctggtgagccgcttgacaactgacgtgcaggagtttaagtcatccttcaagcttgtcatctcccaggggctgcgaanctgcacccaggtggcaggctgcctggtgtccctgtccatgctgtcgacacgcctcacgnctctgctgatggtggccacaccagccctgatgggagtgggcaccctgatgggctcaggcctccgaaaattgtctcgccagtgtcaggagcagatcgccagggcaatgggcgtancanacgaggccctgggcaatgtgcggactgtgcgagccttcgccatggagcaacgggaagaggagcgctatggggcagagctggaagcctgccgctgccgggcagaggagctgggccgcggcatcgccttgttccaagggctttccaacatcgccttcaactgcatggtctttgggtaccctatttattgggggctcccttgtggccggacagcagctgacaggggagacctcatgtccttcctggtggcctcccagacagtgcaaaggtccatggccaacctctctgtcctgtttgggcaggtggtccgggggctgagtgcaggtgcccgggtctttgagtacatggccctgaacccctgcatcccactgtctgggggctgctgcgtccccaaagagcagctgcgtggctccgttacatttcagaacgtctgcttcagctacccctgccgccccggcttcgaggtgctgaaagacttcaccctgacgctgccccctggcaagatcgtggccctcgtgggccatctggcggaggaaagaccaccgtggcttccctgctggagcgcttctacracccacggcaggcgtkgtgatgctggatgggcgggacctgcgcacccttgaccctcctgctccsgggccagttgtcgcttcatcaccagagcccgtcctgtttgggacgaccatcatggaaaacatccgctttgggaagctggaagttcgatgaagaggtgtacacagccgcccgggaagcgaatctcacgagttcatcaccagcttccccgagggctacaacacggtcgtcggtgaacggggcactaccctgtctgggggccagaagcagcgcctggccatcgcccgagcccttatcaagcagcccacggtgctgatactggatgaagctaccagcgcgctggatgcagagtccgagcgggttgtrcaggaggccctggaccgggccagtgcaggccgcacggtgctggtaattgcccaccggctcagcactgtccgtggggcccactgcattgtcgtcatggccgatggccgtgtctgggaggctgggacacatgaagagctcctgaagaaaggcgggctatacgccgagctcatccggaggcaggccctggatgccccgaggacagcggccccaccgcccaaaaagccagaagkccccaggagccaccagcacaagtcctgagaagggccccctgaggtgtggtcgctgccaagcatcagtgttagggctggggctcagcctgggggagcctactgggactgagcccccaggagggccagcatgtggagagtcgctgcggctgctcctkctcacaataaagccggggccgagcagctggcaggggaggccaatccctcccnat

SEQ ID NO: 517 - DNA, 638 bp, Homo sapiens
  misc_feature (573)..(573): n equals a,t,g, or c
  misc_feature (626)..(626): n equals a,t,g, or c
cgagacagaacaaaataagaataatttttgtacacttacaaggctcagaaagaaaagacaatkaaactcagcaaaaagagagaggaggggaggccagccagcaccgtgggcagccgaccccttgcagcgctggccagcggccgccaccaccacaccgcggacacctagctagcagaccggtgtggcttgctctttaggggtcatgcaaaagaattatcccccagaaaaaaaatccccaaattatcccagacaggcagctccgtggaggtgacaaggtgagagggagaggaggggaggaggccccaggacgccagggtggccggctgctgggccacgtgctgtccgtggtgagccctgccgctgtcccatggcccagggagccactggtgcggacccggcagatgtttaccctgtgttcatggatggggacagctgtcctggggcacagcgtggacggaagatggtgtccactctgagtgttcatcggtggacagtccccttggagtttaggatcctgtgtcctgttccccattctgttgcccctcccttggcttgatttkttaggggaagatnaaagaaaatccttgtttgaaaacaatgttgaatttgaaagtgggcaggcattngggcaggagcct

SEQ ID NO: 518 - DNA, 2273 bp, Homo sapiens
  misc_feature (40)..(40): n equals a,t,g, or c
  misc_feature (57)..(57): n equals a,t,g, or c
tttacggcggctgacccataaaatctacctagttctaaanttctttaacccacccanttaacaaaaacggaggtaattaggtaaaacaaaaacgcccaggaaaagatcgcacttaaaggaacaaaagcacccaaggaggaaaaagaggcctgagatttccacggaattacaagtgaacttcctgtcctgggtaaacttccggaatcaacaacaggaagacccaatcagaatcttctccgggagccaatgggagagcacattacaaagagcaatcccagcgccgctgtcactgttatggtcctgtcagggtgccggcgtcgtggtgcttgggtggtcgccaccaagaagactttggtggggtagtctcggggcagctcagcggcccgctgtgcccgtttctggcctcgctcgcagcttgcacgtcgagactcgtaggccgcaccgtagggcgagcgtgcgggtcgccgccgcggccgcctcggggtctgggcccagccgcagcctcttctaccgcggccggttgggagtcgccgcgagatgcagcctccgggcccgcccccggcctatgcccccactaacggggacttcacctttgtctcctcagcagacgcggaagatctcagtggttcaatagcatccccagatgtcaaattaaatcttggtggagattttatcaaagaatctacagctactacatttctgagacaaagaggttatggctggcttctggaagttgaagatgatgatcctgaagataacaagccactcttggaagaattggacattgatctaaaggatatttactacaaaatccgatgtgttttgatgccaatgccatcacttggttttaatagacaagtggtgagagacaatcctgacttttggggtcctctggctgttgttcttttcttttccatgatatcattatatggacagtttagggtggtctcatggattataaccatttggatatttggttcactaacaattttcttactggccagagttcttggtggagaagttgcatatggccaagtccttggagttataggatattcattacttcctctcattgtaatagcccctgtacttttggtggttggatcatttgaagtggtgtctacacttataaaactgtttggtgtgttttgggctgcctacagtgctgcttcattgttagtgggtgaagaattcaagaccaaaaagcctcttctgatttatccaatctttttattatacatttattttttgtcgttatatactggtgtgtgatccaagttatacatgaatagaaaaagatggtgttaaatttgtgtgtaggctgggaattcttgctgaaggaattggagaaaacctgttgctgcaaaattttacatgttccagatggaaagggaagtctaagcgctttttaaaacaatttttttttgtatttaattaagcaattgcagttatctgggatttttgggtcagaattttaaattctgtttgattctccatattccagtgaataaaatacaaaagcattgtgtttttaagattgtgtcgatattcacctaaaaacttgtgccaaaagcacctggattggtaattatatttcacttaaagggtaaatttgacaatatcttgataatcaaaagtgcaatttttttcttcaaaatgttttctccagcatcacagatcctgcagatatatatttatatttatacatatatatttatgaaataattcttactcacaaaatatatttctgataaacattaagatattaaatctgatgcacaaactttttaatttggccattaatcttttttatttaaaaatttaaatttgtttttaaaattgtatatagtttttaaaatctcacacatgcttcgatacttccttgttaagaattcttaataactactaaaactgatttttaatagttgctgatatatatttggtttgtttgggtatacttttcaaaaccatttttgaatgtccaaacatctgatttaaagtttctgtttatctttctgaccaaaggagcaagaggtataatggatatggcattcattaaaatctttactatgtacaaaaacagtaatatttacagcatcagtaaatatttttaagtggtacttctaaatcataaaagttggggaaagagacctttaaaatcttgtggtgttgaacaatgttatatgaagtagaaaaaataaaatacttcccagttgtgtgttttgttttacaaaaaaaaaaaaaaaaaaaaaaaaaaaaaaaaaaaaaaaaac

SEQ ID NO: 519 - DNA, 2295 bp, Homo sapiens
  misc_feature (483)..(483): n equals a,t,g, or c
  misc_feature (2291)..(2291): n equals a,t,g, or c
ggctgtgaaagggtttatttatctgtgggggagggttgtatttttgaagtctatttattatgtgcctgtgatgattatgttcttttttagaggtggccggttatcagggtagagtctggtgtgtactgtcgggcgcagagggctccgcgrygggagctgagcggaaggcgckggctgcratctgctctctgttcccctggatccgcctatgcacattacccttgtttcattactttttcatgtcatttttttatcccaaaaaatattttttaaaagttaaaaaaagacatatcaaacatgcaaatacttgaatccagcargccaatagtgaaatgtgaacacttyctaattctacacttccaggttgacatcagtacacagaaacaggctctaggaaaaatttctaagttcatagcctacgtgtgtgtatgtgtgcgtgttgaaacagaagtgtgtgtgtgtgtgcatgtgtggcgcgtgctncctcacgscgtgcagttttctgtgtttgtgtgtttgaaagcgtgtgaggatttaactgtgggttttcccttgtattcagtatacgctttttttttggcgcattggtcaaacggttgttattattagcttctaactttgcactgagtgtcctcgcccttcctttagctaatcctatacattacagagaattcctaggacagggctggcgacaattcatgtgtaaatgtttactcaaggactctgtgactgcgtttaaaaagtacagtgtatatctctggagaaataacatgtatacctacctttagcagctttttattgtggactaatgcaagaaaattattaccagagtattgcaccatttttccatttggaatataaagttaaagagaaaaaaaaaaaaaaactgttgttgaactgtggccatagatacttgtaaagaatggatggttccgtggaaggaacagaaacaagcacttgggcgtgggttgtgactgcttttgggggagcctggggtttgggctcccacctgtttacagacctttttttctccttcagactttaaaattttaaaaatttaaaaaggaattaaaaaaaaaaaaagacttccgtcgtaaagaaacctattttcagaatgcagatgcgttccttcagagctctgggacgggacagtgttgttccctcggccatcgtcgtggactctgtcgattgctttcgccccttcgtcaaggtgacaggcgttgtggccactgtcttgcacatgccggacgcgctctcaggaaagccagggctcccgagggcagctccacaccatttcatgtatttttaaacccaactcctagcactgaagatgttatttaaaaaaaaaaaaaacaaaacaaaacaaaaaaatgaaaaaaaagaaaaagaggaaaaaaaaaacacaaagaagaaaaatacctaatctctaatgtgtagcagttacatatttaccaaataatggactcaaaagaaatagatgtttgaagagtgctttatatattaaaaattgctttatgttttaaaaatgatcaatgttttgattgttttgcaaggaagaaagacaatggaataacataccttcaagtatgttttaaaaaatatatatatgaacattgtgctccctgcctgcttgatcaggaaacttgtgcattacatttttttaattagctttttaatggttttatcaaaacaaaaaaaatacaaaaaaaaaaaaaaaagtcctgcaagactgcagatccacaaaagctggttttatagaggatcatgaactatgcacaaactgggttcaagactttttttctcaagtttagtaggatatttagaaaaaccarccttcctcagagtgactgcatctcattgccattacatgcgttctatatattcgatggacatacacctgcgtatgtatatccaatatgtgtgcgtgtgagcatgcgtgtgcgtatgtgcgtccgacataccacttcccgtgctgccggcgagcattgagttgtagaaaaactgttgttttaaaattggggatggaagtcaagaatatgtttgtttgtttttgggttttgttgggtttgaggggttttttgtttgtttgttttttgttttttttaccttttattttgaacttaatatgtctgtaactctgagattaaacaacaagttcgtggctcttaatgttttcctcatagaatgtgactgttgaagaacatgcatcgaaagttgctttcgaaagtacaacgctttattgaatcttaataaattgcaatttttttcttggcaaaaaaaaaaaaaaaaancccg

SEQ ID NO: 520 - DNA, 826 bp, Homo sapiens
  misc_feature (623)..(623): n equals a,t,g, or c
  misc_feature (665)..(666): n equals a,t,g, or c
  misc_feature (778)..(778): n equals a,t,g, or c
  misc_feature (808)..(808): n equals a,t,g, or c
tctagccttctcaaagccaagtcccactatttgctccatgaacagtaacatctggcaaatatgcattcagttggaaggaattggccagtttgcatatgcactaggaaaagacttctgtttgctcttgatgtcagccctttatccagtactggagaaggctggagacyaaaccctactcattagtcaggtggytaccagcaccatgatggacgtttgccgtgcttgtggctacgactccctgcagcacctgatcaatcaaaattcagactatttagtgaatgggatctctttaaatctgcgtcatctggctctgcatcctcataccccaaaggtcctggaagtcatgctgcggaactcagatgctaacctgcttcctttggtggcagatgtggttcaagatgtcttggccaccctggaccaattttacgrtaagagagctgcttcctttgtcagcgttctgcatgctctgatggcagcattagcccagtggttcccagacacaggtaatcttgggcacctccargagcaaagtttaggrgaagagggaagtcatttgaaccaaagaccagcagctcttgagaagagcaccaccacagctggaagacatcgaacagtttttgctngaactacctcaaagagaaggatgtgggcagatgggaaatgtnntcggattttgattaatgaagaagaggaacagttcagtccctcccaaagtgggatgagaatggacacccgttccagattgtggaggccaccaatggccattgcagattccaantaggccctgggacgtgatgggaaggtggcntccacttgttggtcagat

SEQ ID NO: 521 - DNA, 1785 bp, Homo sapiens
  misc_feature (476)..(476): n equals a,t,g, or c
gatgattaatcactaaacaggtattgcataaaatagcaattttcagctctggattttggggaagggagtagaggctggaaatgtaggtggagagtcaggctggggagagatgccacattcgcaacattgggttttttacaatagtactgcatctctgtagatccccgactccagcctctcctcttgctgcctctctcaacagtaacgatgctgttactccccacgccaaacctctgggctggccaggctcactccagccccacagtcattgccaggactgcctttgaccttacacagaggaaacatcttccacctgtcgggagggarccggggcggggatttccatggcararttactgttctctggtgatagagttctttcakttttgctacatggtcttgtggcaaaggactgggtgcaggtgcagccttggttatttctggaaacacttctccttttctttwattttgccagntctggctcatcagtcaccttcctctcagaaaggtgatttkggctcytctgcccagaccatcaaacatttctggaggtgtcacaagcttccgtgaggttctggtctctgcgaattgcaggaagaatccaaacataggaaaggggtgatgtgtatcagggtgtccatcctcagctttgctccacaaagaccctcacacttgcacattgttttgttaacagtattatctctgagtagtgggtttattgtttttgcttacctgttttaaacacttcttcaacaaacttgctttactttccattttttaaaagtgtatttcaattttttattaataatgccattttactcctgcaaaatttctcactccttcaaagtctgtgtatggcaaagatcttcctaaccatcattcaagttagagcaactccatttctgtatcaaaaagaaatacctttagttattgtctgaacttgtcagaatttctgagaacgatgccagaaattctgtaattgttttgtcacattaattgaacaatgagagggcaccagcattcctcactcatgaggtagaagcaccacatctacatttctttttagctatgggtgatgtttttgcttttaaatcttagaaatctgttaataaacaaataacacaacaaagtttggggtacttccttgtggggactgggatgcttaagctaaaacaaagtttaaatttggactgtgtgtgttatgtttcgcagaatctatatgtttctcaaaagtgggtgtcaccctccttcctcccccaacacacccttcaggggtaagaggagaagtaatgtagaaaaattaactgtttctccactgtaaaagtagggtgtctttagaatgtttcatgttcaaaggaaagattgtgcttctcccaaggcaaggtgttcccttaaaaaaaaaaaaaaaaggttgagcatgtctttgtattgctgtctctggaagaggaaatgaggcatctcttggggtgagaacaagggagaattgaactctcgggcctggccagatggattcctcacactggcacagagctgtgaagggaagggcctttcatcctccagaggaaagagggctggggtctcagaggccagagcatagggacaggcaggagtcctgcagccctgatgcctgcccctcccagtacagaatctctgtcctgacccccacctgttgaacctttcaaatcccagtgactcgccagctttctctgtggatattggctgaattggtggcttgtgtggctgcctgggagagcaatttacccctgarccaaggagggggtgggc

SEQ ID NO: 522 - DNA, 550 bp, Homo sapiens
  misc_feature (502)..(502): n equals a,t,g, or c
  misc_feature (516)..(516): n equals a,t,g, or c
  misc_feature (548)..(548): n equals a,t,g, or c
cccaaggtcacacagctgggatgtggcagagctggggttccagctcctgttcccattgcwggacagctgccacatctggcacccaatttaggaccccgcgggaggcccaagccccgggggtggcgggggatcctagaggaaagtggcaaggcaggaccctggagcagagccagtggaatgtcaccatcgcccaggtggggatttttgtgtgttttgttcactgctgtacacccagcccccagcacagcgcctgtccaggacaagtgcccagtaaacacttgggaagcaatgcaagcgtcctyccagcagctcctgcaaacagacccccgacccaagcccttccttctgsctccactgccaccactgctgctcatctctgctggcacagaagtctcttccctggtcttccagaaatcccctctccacactcagccagagggaagctattaaaactgcgggccagcccacattcagtccacagcaaagtcctctctaagggatntctgttgcttggangaataaaccctcggattctttccttggctctngg

SEQ ID NO: 523 - DNA, 639 bp, Homo sapiens
aagcagcacgccgccgcggcattttacgacgtcggcggtgacaggccctgggactctgggaatacccagcttcctccccgcaacccggtgaaagccaacgcaatgttcggtgcgggggacgaggacgacaccgatttcctctcgccgagcggcggtgccagattggcctcactttttggactggatsaggcagctgctggccatggaaatgaatttttccagtacacagccccaaaacagcctaagaaaggccagggaacggcagcaacaggaaatcaggcaacaccaaaaacagcaccagccaccatgagcaytcccacaataytggtcgcaacagcagtccatgcatatcgatacacaaatggkcaatatgtaaagcagggcaaatttggtgctgcagttctggggaaccacacagccagagagktgakagtgctcccacatctcatgtatattcagatgtcccaaataataccaatgagctggcttttatctggcttgccygatgtcttgtttatcagaagataaggatgattrtttgtattgaatgttaatttataacatcaagcatatagtaaatgatcacattttgcttactattgtkcattaaaacaaatccaaccattaaaaaaaaaaaaa

SEQ ID NO: 524 - DNA, 743 bp, Homo sapiens
  misc_feature (727)..(728): n equals a,t,g, or c
  misc_feature (736)..(736): n equals a,t,g, or c
gccggaggagcggcggcgtggcgcacggcgacatggccgttgtctcagaggacgactttcagcacagttcaaactccacctacrgaaccacaagcagcagtctccgagctgaccaggaggcactgcttgasamgcygctggaccgcccgccccctggcctgcagaggcccgaggaccgcttctgtggcacatacatcatcttcttcagcctgggcattggcagtctactgccatggaacttctttatcactgccaaggagtactggatgttcaaactccgcaactcctccagcccagccaccggggaggaccctgagggctcagacatcctgaactactttgagagctaccttgccgttgcctccaccgtgccctccatgctgtgcctggtggccaacttcctgcttgtcaacagggttgcagtccacatccgtgtcctggcctcactgacggtcatcctggccatcttcatggtgataactgcactggtgaaggtggacactttctcctggacccgtggcttttttgcggtcaccattgtctgcatggtgatcctcagcggtgcctccactgtcttcagcagcagcatctacggcatgaccggctcctttcctatgaggaactcccaggcactgatatcaggaggagccatgggcgggacggtcagcgccgtggcctcattggtggacttggctgcatccagtgatgtgaggaacagcgccctggnncttcttcntgacggg

SEQ ID NO: 525 - DNA, 1169 bp, Homo sapiens
  misc_feature (535)..(535): n equals a,t,g, or c
  misc_feature (646)..(646): n equals a,t,g, or c
tttttttttttttttttttttttttttttttttttttttttttttttttcaccaaggagtcataacctccaagacattttattttgacagaaaaggtgtgacacatccatcagaaatgggatcagaaatttttggtctcccagtccccagtcctgatttttaattcccaatttcaaaattctatactaacatccaaactataacttgacttttaaatttaccccactcctcgggaagagaagtgcaatgcaggcaggcagctgtttccaggagatcagaaaagggtaaatgaatactcaagatttacagcgtcaaaaggctatgttgaggataattcttatgactatgtaaaagacaaggtagtgaaattgtgagggcmctgggcccggccactcacagaatgactgaagcatgctgcagtggagaactggaaatgtatctcttgttgccctccatctccacccaccctcaagactgggacttagaattcccacgtccagcactgttgtagatggraggtaygttgtgctgaatnstgcgctggccacatcaagacmccacatgtgttcccaagtggtattgcagctgtcctgaggcccatctcttctccctctcatattgggatctcattgggagaaagtctagncagattcctgctmtgctgggccttctcttacgccagtgtggacttcacgggatagggcagacagagtattcgttgcatttatttgttctatcactacagaagaagcatttcaaaatgtgtacaaaaggatactctattcctccagtggtacatcccttgttcacagctaaacagcaataatttaacatcatcatagaggcagactggaaatatgactgcatttctcatttacaatcctgtgcatgtrctcgccagaagggcagctgaagacctaaagctgtactggatacaacagattcgacctgaacaatcaccacacacaacattataaaaaactgtattagaaagtattggaaacaatattgcatattaatatgtggttacacatgttcacagtgagtgccatcgcaccaaaagcattatgtgcttcttttttctgatgcctgtacatcttaaataagtctaataattttggttcatcttaaagtaaaaatacattgaaatgaatgagagagatctagat

SEQ ID NO: 526 - DNA, 669 bp, Homo sapiens
  misc_feature (204)..(204): n equals a,t,g, or c
  misc_feature (602)..(602): n equals a,t,g, or c
  misc_feature (621)..(621): n equals a,t,g, or c
  misc_feature (657)..(657): n equals a,t,g, or c
gcgcccagttaatttttgtatttttagtagagatgggggttttgccatgttggtcaggctgatctcgaactcctgacctcaggtgatctgcccgccttggcctcccaaagtgctgggattacaggcatgagccgccacgctggcccggtctggaaatcttatctaaaaagtagcaagtgctggaaaaagggcctggggggcggnggtggttcttgtcgaagcccccaggctcctgtctcagggatgaatgtggcgtctcattgggattcttctcttgcccgaaagkgcygttttgaggactatcaatactggggagtgggggtgaagccggacctcactcagggtgagatttcagggccccggcatcctgaacaccccccacaccccaacattctcctcgctctgtcccttcctcttctcccaaccccttttgtgctggggctgcgagctccccgagttctgcggtgactaaatcgaggccgagaagggaggctgccccccaccaccctgtggtkcagtacccctccccctggcttggagaaagtggggtcaccgcagctgagctggggggttattttggctggagctgctggagcaaaaangctgggtctgaaagcccancaaggtctggggattcgttggaaccgcgtggtgttngggcggggctgt

SEQ ID NO: 527 - DNA, 1480 bp, Homo sapiens
  misc_feature (1479)..(1479): n equals a,t,g, or c
caaaagctggagctccccgcggtggcggccgctctagaactagtggatcccccgggctgcaggaattcggcacgagtattgatacaatgatgattaactatgaattcttaagacttgcatttaaatgtgacattcttaaaaaaagaagagaaagaattttaagagtagcagtatatatgtctgtgctccctaaaagttgtacttcatttyttttccatacactgtgtgctatttgtgttaacatggaagaggattcattgtttttatttttatttttttaattttttcttttttattaagctagcatctgccccagttggtgttcaaatagcacttgactctgcctgtgatatctgtatcttttctctaatcagagatacagaggttgagtataaaataaacctgctcagataggacaattaagtgcactgtacaattttcccagtttacaggtctatacttaagggaaaagttgcaagaatgctgaaaaaaaattgaacacaatctcattgaggagcattttttaaaaactaaaaaaaaaaaaactttgccagccatttacttgactattgagcttacttacttggacgcaacattgcaagcgctgtgaatggaaacagaatacacttaacatagaaatgaatgattstttcrcttctacagtgcaaggatttttttgtacaaaacttttttaaatataaatgttaagaaaaattttttttaaaaaacacttcattatgtttaggggggaactgcattttagggttccattgtcttggtggtgttacaagacttgttatccatttaaaaatggtagtggaaattctatgccttggatacacaccgctcttcaggttgtaaaaaaaaaaaacatacattggggaaaggtttaagattatatagtacttaaatataggaaaatgcacactcatgttgattcctatgctaaaatacatttatggtcttttttctgtatttctagaatggtatttgaattaaatgttcatctagtgttaggcactatagtatttatattgaagcttgtatttttaactgttgcttgttctcttaaaaggtatcaatgtaccttttttggtagtggaaaaaaaaaagacaggctgccacagtatatttttttaatttggcaggataatatagtgcaaattatttgtatgcttcaaaaaaaaaaaaaaagagagaaacaaaaaagtgtgacattacagatgagaagccatataatggcggtttgggggagcctgctagaatgtcacatggatggctgtcataggggttgtacatatccttttttgktcctttttcctgctgccatactgtatgcagtactgcaagctaataacgttggtttgktatgtagtgtgctttttgtccctttccttctatcaccctacattccagcatcttaccttcatatgcagtaaaagaaagaaagaaaaaaaaaggaaaaaaaaaaaaacccant

SEQ ID NO: 528 - DNA, 2414 bp, Homo sapiens
  misc_feature (2131)..(2131): n equals a,t,g, or c
atgcgctgtggctaatgccgtagtcggttcagggctgagccatcctgcgtgtcttgcgctcggtggaaatgcccagccgagggacgcgaccagaggacagctctgtgctgatccccaccgacaattcgaccccacacaaggaggatctaagcagcaagattaaagaacaaaaaattgtggtggatgaactttctaaccttaagaagaataggaccgaacagaaatgctgtctgagagcaagaatatattggatgaactgaaaaaagaataccaagaaatagaaaacttagacaagaccaaaatcaagaaatagtcaacctgatttcacataacaatgtgtggcatttgttgttctgtaaacttttctgctgagcatttcagtcaagatttaaaagaggacttactatataatcttaaacagcggggacccaatagtagtaaacaattgttaaagtctgatgttaactaccagtgtttattttctgctcacgtcctacacttgaggggtgttttgactacccagcctgtggaagatgaaagaggcaatgtgtttctatggaatggagaaatttttagtggaataaaggttgaagctgaagagaatgacactcaaattttgtttaattatctttcctcctgtaagaatgaatctgagattttgtcactcttctcagaagtacaaggtccctggtcatttatatattatcaagcatctagtcattatttatggtttggtagggatttttttggtcgccgtagcttgctttggcattttagtaatttgggcaagagtttctgcctctcttcagttggcacccaaacatctggattggcaaatcagtggcaagaagttccagcatctggacttttcagaattgatcttaagtctactgtcatttccagatgcattattttacaactgtatccttggaaatatatttctagggagaatattattgaagaaaatgttaatagcctgagtcaaatttcagcagacttaccagcatttgtatcagtggtagcaaatgaagccaaactgtatcttgaaaaacctgttgttcctttaaatatgatgttgccacaagctgcattggagactcattgcagtaatatttccaatgtgccacctacaagagagatacttcaagtctttcttactgatgtacacatgaaggaagtaattcagcagttcattgatgtcctgagtgtagcagtcaagaaacgtgtcttgtgtttacctagggatgaaaacctgacagcaaatgaagttttgaaaacgtgtgataggaaagcaaatgttgcaatcctgttttctgggggcattgattccatggttattgcaacccttgctgaccgtcatattcctttagatgaaccaattgatcttcttaatgtagctttcatagctgaagaaaagaccatgccaactacctttaacagagaagggaataaacagaaaaataaatgtgaaataccttcagaagaattctctaaagatgttgctgctgctgctgctgacagtcctaataaacatgtcagtgtaccagatcgaatcacaggaagggcgggactaaaggaactacaagctgttagcccttcccgaatttggaattttgttgaaattaatgtttctatggaagaactgcagaaattaagaagaactcgaatatgtcacttaattcggccattggatacagttttggatgatagcattggctgtgcagtctggtttgcttctagaggaattggttggttagtggcccaggaaggagtgaaatcctatcagagcaatgcaaaggtagttctcactggaattggtgcagatgagcaacttgcaggttattctcgtcatcgtgtccgctttcagtcgcatgggctggaaggattgaataaggaaataatgatggaactgggtcgaatttcttctagaaatcttggtcgtgatgacagagttattggtgatcatggaaaagaagcaagatttcctttcctggatgaaaatgttgtctcctttctaaattctctgccgatttgggaaaaagcaaacttgactttaccccgaggaattggtgaaaaattacttttacgccttgcagctgtggaacttggtcttacagcctctgctcttctncccaaacgggccatgcagtttggatcaagaattgcaaaaatggaaaaaattaatgaaaaggcatctgataaatgtggacggctccaaatcatgtccttagaaaatctttctattgaaaaggagactaaattgtaatgtgattcacaatgtaacaatataaaaataagtttttatataattatataaaagtaagatactctgctgctttactattgtataatatagtagttttaaagttcaaaaaaaaaaaaaaaaaaaaaaaaaaaaaaaaaaaggggggggg

SEQ ID NO: 529 - DNA, 1055 bp, Homo sapiens
  misc_feature (502)..(502): n equals a,t,g, or c
ccaactataatcattcggcagacagctgggcagctctccttctccatcaaggtagcagaggatgtggccatggccttctcagctgaacaggacctgcagctctgtgttggggggtgccctccaagtcagcgactctctcgatcagagcgcaatcgtcggggagctataaccattgatactgccagacggctgtgcaaggaagggcttccagtggaagatgcttacttccattcctgtgtctttgatgttttaatttctggtgatcccaactttaccgtggcagctcaggcagcactggaggatgcccgagccttcctgccagacttagagaagctgcatctcttcccctcagatgctggggttcctctttcctcagcaaccctcttagctccactcctttctgggctctttgttctgtggctttgcattcagtaaggggaccatcagtcccattactagtttggaaatgatttggagatacagattggcatagaagaatgtnaaagaatcattaaaggaagcagggcctaggagacacgtgaaacaatgacattatccagagtcagatgaggctgcagtccagggttgaaattatcacagaataaggattctgggcaaggttactgcattccggatctctgtggggctcttcaccaatttttccagcctcatttatagtaaacaaattgttctaatccatttactgcagatttcacccttataagtttagaggtcatgaaggttttaatgatcagtaaagatttaagggttgagatttttaagaggcaagagctgaaagcagaagacatgatcattagccataagaaactcaaaggaggaagacataattagggaaagaagtctatttgatgaatatgtgtgtgtaaggtatgttctgctttcttgattcaaaaatgaagcaggcattgtctagctcttaggtgaagggagtctctgcttttgaagaatggcacaggtaggacagaagtatcatccctaccccctaactaatctgttattaaagctacaaattcttcacaccaaaaaaaaaaaaa

SEQ ID NO: 530 - DNA, 1096 bp, Homo sapiens
ggcagagcaagatgggggcttaccacaccatcgagctggagcccaaccgccagttcaccctggccaagaagcagtgggatagtgtggtactggagcgcatcgagcaggcctgtracccagcctggagcgctgatgtggcggctgtggtcatgcaggaaggcctcgcccatatctgcttagtcactcccagcatgaccctcactcgggccaaggtggaggtgaacatccctaggaaaaggaaaggcaattgctctcagcatgaccgggccttggagcggttctatgaacaggtggtccaggctatccagcgccacatacactttgatgttgtaaagtgcatcctggtggccagcccaggatttgtgagggagcagttctgcgactacatgtttcaacaagcagtgaagaccgacaacaaactgctcctggaaaaccggtccaaatttcttcaggtacatgcctcctccggacacaagtactccctgaaagaggccctttgtgaccctactgtggctagccgcctttcagacactaaagctgctggggaagtcaaagccttggatgacttctataaaatgttacagcatgaaccggatcgagctttctatggactcaagcaggtggagaaggccaatgaagccatggcaattgacacattgctcatcagcgatgagctcttcaggcatcaggatgtagccacacggagccggtatgtgaggctggtggacagtgtgaaagagaatgcaggcaccgttaggatattctctagtcttcacgtttctggggaacagctcagccagttgactggggtagctgccattctccgcttccctgttcccgaactttctgaccaagagggtgattccagttctgaagaggattaatgattgaaacttaaaattgagacaatcttgtgtttcctaaactgttacagtacatttctcagcatccttgtgacagaaagctgcaagaakggcactttttgattcatacagggatttcttatgtctttggctacactagatattttgtgattggcaagacatgtatttaaacaataaactaaaaggaaataatcwmmamrtaaaaaaaatgc

SEQ ID NO: 531 - DNA, 690 bp, Homo sapiens
  misc_feature (333)..(333): n equals a,t,g, or c
  misc_feature (683)..(683): n equals a,t,g, or c
  misc_feature (689)..(689): n equals a,t,g, or c
tttaaggagtaacaatgcatcgaacgtgggtttttgcatgtttgcttgtctcatggagacagcttgttaccaactatatttggtaacaagcactactgttgactcatgatttccttaatgccttagtatctatcatgtatatgtttactttgacatcagggcatggaaagttctattcaacaattcctgggtctaatttcagtagttccattctctgtgacctcacaatgggagccagcagccttccatcttgtgatggtgacttgctcttctaggtggagtgggaggagcaccgactatgtgctgggacagggcttggyttcaagggtctgnttcagccccttgctggctgcatgactytggsaaatcamttactgacatttgttgtaatgcacatactggcattcattgtagaatttctattctggtggtgatagtcaattggttctttatgcaaacggaggtgatatcaacactgaaaattctgagtgaattgttaaactctggtgaattgctctgtgagtggttaggcaaaattgaagaggactgctctgctggacaggcccaatttattaggccccgctctaaatatgacttttatccccatactttttaaataattagcttttgaactattttacatctgaaaataaaagacagaatatggaaaatatctggctttnccagana

SEQ ID NO: 532 - DNA, 793 bp, Homo sapiens
  misc_feature (787)..(787): n equals a,t,g, or c
  misc_feature (792)..(793): n equals a,t,g, or c
gggacccacggcaggcgcgaatcccagcggccggcgggcggcggggatacttctacatagacataatcaagttttgactatttggaaaccaagcatcattaaaattctctcaaactgctaattgcgaagaatcgataacatttcaagaagtgataacatttctctgaacaagaaaagaagtgattgaccacgttttaaaagtactctggcactggtgctgtgttttcttcccctccctaaatttgaagaactatggagaaatggtgctggtaaaccgcctatgtttggtgattatgaagctcagagacactggcaagaaataacttttaatttaccggtcaaacaatggtattttaacagcagtgataacaatttacagtattggggattggattacccacctcttacagcttatcatagtctcctatgtgcatatgtggcmaagtttataaatccagactggattgctctccatacatcacgtggatatgagagtcaggcacataagctcttcatgcgtacaacagttttaattgctgatctgctgatttacatacctgcagtggttttgtactgttgttgcttaaaagaaatctcaactaagaaaaagattgctaatgcattatgcatcttgctgtatccaggccttattcttatagactatgggacattttcaatataattctgtgagtcttggctttgctttgtggggtgtcctgggaatatcttgtgactgcgacctcctaaggtcaactggcattttgcttagctataaatataaccaganggacnn

SEQ ID NO: 533 - DNA, 804 bp, Homo sapiens
  misc_feature (794)..(794): n equals a,t,g, or c
ggcacaggtctgcccagacaagctgaaggaccacaggaaaagccatggagacttcagcatcctcctcccagcctcaggacaacagtcaagtccacagagaaacagaagatgtagactatggagagacagatttccacaagcaagatgggaaggctggactcttttcccaagaacaatatgagagaaacaagtcttcttcctcctcctcctcttcctcctcatcctcctcatcttcttcatcctcctcctcctcaggtcctgggcatggggagcctgacgttttgaaggatgagcttcaactctatggagatgctcctggagaggtggtaccctctggggaatcaggactccgaaggagaggctctgacccagcaagtggagaagtggaggcctctcagttaagaagactgaatataaagaaagatgatgagtttttccatttcgtcctcctgtgctttgccatcggggccttgctggtgtgttatcactattacgcagactggttcatgtctcttggggtcggcctgctcaccttcgcctccctggaaaccgttggcatctacttcggactagtgtaccgtatccacagcgtcctccaaggcttcatccccctcttccagaagtttaggctgacagggttcaggaagactgactgaggccacttccaggtgggcagcagaggcaggccccagtgtgaccaccactgcgacccctgagcccacaagggcagagcagcattctgagagacgcacaggagaccaagccagaccaataaacagaacacttttccttcnaaaaaaaaat

SEQ ID NO: 534 - DNA, 988 bp, Homo sapiens
  misc_feature (929)..(929): n equals a,t,g, or c
agcagcactcccacasctcccttccagcaggccagtggttatggccagcacggctacagtacaggttatgacgacctgacccaggggacagcagcaggagactactccaaaggtggctatgctggatcatcgcaggcaccaaacaagtctgcaggttctgggcctggcaaaggagtatcagtgtcttcaagcaccactggtctacctgatatgactggttctgtctacaataagacacagacttttgacaagcagggatttcatgcagggacgcctccacctttcagcctgccctcggtcttgggctccactgggcccctggctcgggagcggcccctggctatgcacccccaccattcctacacatcttgccagcccaccagcagccccactcacagctgctgcaccaccaccttccgcagatgcacagagtggctcgggtcagcgcagcagcccagctccctgcagcccaagtctcaagcctccaaacctgcctacggcaactctccatactggacaaactaaacccagaagagaggggtgggctggggcaaggcttatcctgggcaggagagaacacacgagcacgtatttgggagcccagtgccctttcctagaattcccgacatgtgtcagccatgcctctgtggggagtctgcctcccagactggctactgtatgtaatgtatttatgtatgtatttgtaaatgtgatagaagtctgggggggagttgggggatggcggcagatgttagccaggtctgccctccccattcaagccccttctccactgtagcaaaataagcacccccaccccatctgccttcaggtcttcttcacagcctgcactgcccagtgggccactaggggcagtctctggaagggctggttcaaggctgtttgggtataggggtcargtaccatgaagnatcacgyttgtytcamtcctttggraattgttttctttcccgtggtaattacttcatac

SEQ ID NO: 535 - DNA, 832 bp, Homo sapiens
  misc_feature (789)..(789): n equals a,t,g, or c
gctttgggagtgatttcaaactttcagtctagcccaaaatatggtagtgaagaagattgttctagtgccacttcaggctcagtgggagccaacagcaccacagggggcatcgctgtaggagcatccagctccaaaacaaacaccctggacatgcagagctcaggatttgatgcactactacatgagatccaggagatccgggaaacccaggccagactagaggaatcctttgagactctcaaggaacattatcagagggactattccttaataatgcagaccttacaggaggagcgatatagatgtgaacgattggaagaacagctaaatgacctaacagagctccaccagaatgaaatcttgaacttgaagcaggaactggcaagcatggaagaaaaaatcgcgtatcagtcctatgaacgggcccgggacatycaggaggccctggaggcatgccagacgcgcatctccaagatggagctgcagcagcagcagcagcaggtggtgcagctagaarggctggagaatgccactgcccggaaccttctgggcaaactcatcaacatcctcctggctgtcatggcagtccttttggtctttgtctccactgtagccaactgtgtggtccccctcatgaagactcgcaacaggacgttcagcactttattccttgtggtttttattgcctttctctggaagcactgggacgccctcttcagctatgtgggaacggttcttttcatccccttagatgatgctggcacagaaggcattgttccctaccctctnggcgagtgcatgcagcagagagttagacagcaacttacctact

SEQ ID NO: 536 - DNA, 1165 bp, Homo sapiens
  misc_feature (903)..(903): n equals a,t,g, or c
  misc_feature (1163)..(1163): n equals a,t,g, or c
aattcggcagagcgtctctatggtggcggcggatttggagggaccctacgaaccaggagtcaggcgagccgatctggggctgcaggatgttccgctgggagcgctccattcccctgcgaggctcggccgccgccctgtgcaacaacctcagtgtgctgcagctgccggctcgcaacctcacgtattttggcgtggttcatggaccaagcgcccagcttctcagcgctgctcctgagggtgtgcccttggcccagcgccagytccacgctaaggagggtgctggagtgagtcccccacttatcactcaggtccactggtgtgtcctccccttccgagtgctgctggtactcacctcacatcgaggaatacagatgtacgagtccaatggctacaccatggtctactggcatgcactggactctggagatgcctccccagtacaggctgtgtttgcccggggaattgctgccagtggccacttcatctgtgtgggaacgtggtcaggccgggtgctggtgtttgacatcccagcaaagggtcccaacattgtactgagcgaggagctggctgggcaccagatgccaatcacagacattgccaccgagcctgcccagggacaggattgtgtggctgacatggtgacggcagatgactcaggcttgctgtgtgtctggcggtcagggccagaattcacattattgacccgcattccaggatttggagttccgtgcccctctgtgcagctgtggcaggggatcatagcagcaggctatgggaacggacaagtgcatctatatgaggccactacaggaaatctacatgtccagatcaatgcccatgcccgggcgcatctgcgccctggacctggcttctgaggtgggcaagctactctctgcaggtganggacacctttgtgcatatctggaagctgagcagaaacccagagagtggctacattgaggtggaacatgtcatggtgagtgtgtcgccgacacccagctgtgtggtgctcgattttgtgattcctcaggcaactcctttgctgtgactggctatgaccttgcggagatccggagattcagcagtgtgtgagaagagcagccttcctttgtccctgtggtattcataaagtacccgctccacccaggaaaaaaaaaaaaaanaa

SEQ ID NO: 537 - DNA, 956 bp, Homo sapiens
ggaaggcaagatggcggcgcccatggaggtggccgtgtgtacggactcggcggccccgatgtggagctgcatcgtgtgggaacttcactcgggcgccaacctgctcacctaccgcggcggccaggcgggaccccgcggcctggcgctgctcaatggcgagtatctgctggcggcgcagctgggcaagaaytacatcagcgcctgggagctscagcggaaggaccagctccagcagaagatcatgtgccccgggcctgtcacctgtctgactgcatcacccaatggtctctacgtcctggcaggagttgcagaaagcatccacctgtgggaggtctccaccgggaaccttctggtcatcctgagtcgacactaccaggacgtctcctgccttcagttcacaggggacagcagccacttcatctcagggggcaaggactgcctggtgctggtttggagcctctgcagcgtgctgmaggccgacccctccaggattccggcgcccaggcacgtctggtctcaccacacgctccccatcacggacctgcactgcggctttgggggccccctggcccgggtggccacctcctcactggaccagacggtgaagctatgggaggtctcctcgggggagctgctgctctccgtcctctttgacgtgtccatcatggcagtgaccatggacctggctgagcaccatatgttctgcgggggcagtgagggctccatcttccaggtcgacctcttcacctggcccggacagagggagaggagcttccacccagagcaggacgccgggaaggtcttcaaagggcacaggaaccaggtgacttgcctgtcagtgtccactgacggcagcgtgctgctctcaggctcccacgacgagaccgtgcgcctctgggacgtgcagagcaagcagtgcatccggacggtggcctcaaaggccmagtcaccaatgc

SEQ ID NO: 538 - DNA, 1195 bp, Homo sapiens
ggccggctcctaccctgaaggtgcacctgcartcctcgccgataagaggcagcagttcggaagccggttcctgagmgatccggcgcgcgtcttccaccacaatgcctgggacaatgtggagtggtcggaagagcaagccgcggcggcggagagaaaagtccaggagaacagtatccagcgggtgtgccaggagaaacaagttgattatgagatcaatgcccacaaatactggaatgacttctacaaaatccacgaaaatgggtttttcaaggatagacattggctttttaccgaattccctgagctggcacctagccaaaatcaaaatcatttgaaggaytggttcttggagaacaagagtgaagtaystgaatgtagaaacaatgaggatggacctggtttaataatggaagaacagcacaagtgttcttcgaagagccttgaacataaaacacagacacctcctgtggaggagaatgtaactcagaaaattagtgacctggaaatttgtgctgatgagtttcctggatcctcagccacctaccgaatactggaggttggctgtggtgtgggaaacacagtctttccaattttacaaacgaacaatgacccaggactctttgtttattgctgtgatttttcttccacagctatagaactggtccagacaaattcagaatatgatccttctcggtgttttgcctttgttcacgacctgtgtgatgaagagaagagttacccagtgcccaagggcagtcttgatattatcattctcatatttgttctttcagcaattgttccagacaagatgcagaaggctatcaacaggctgagcaggcttctgaaacctggsgggatgrtrcttctgcgagattacggccgctatgacatggctcagcttcggtttaaaaaaggtcagtgtctatctggaaatttctaygtgagaggtgatggaaccagagtttacttcttcacacaagaggaactggacacgcttttcaccactgctggactggaaaaagttcagaacctggtggatcgccgactgcaggtgaaccgaggaaagcaactgacaatgtaccgggtttggattcagtgcaaatactgcaagccccttctgtccagcaccagctragaggcacctgctgccaacacgatgcaagcccrttgtgtttccgagctttttttaaaaaaa

SEQ ID NO: 539 - DNA, 404 bp, Homo sapiens
  misc_feature (10)..(10): n equals a,t,g, or c
  misc_feature (40)..(40): n equals a,t,g, or c
aatatgccangttcactcaagagcaagtagacaaaatctnccgcgccgccgctctggctgctgcagatgctcgaatcccactcgcgaaaatggccgttgccgaatccggcatgggtatcgtcgaagataaagtgatcaaaaaccactttgcttctgaatatatctacaacgcctataaagatgaaaaaacctgtggtgttctgtctgaagacgacacttttggtaccatyactatcgctgaaccaatcggtattatttgcggtatcgttccgaccactaacccgacttcaactgctatcttcaaatcgctgatcagtctgaagacccgtaacgccattatcttctccccgcacccgcgtgcaaaagatgccaccaacaaagcggctgatatcgttctgcaggct

SEQ ID NO: 540 - DNA, 1893 bp, Homo sapiens
tacatttttgtgcaagagacccccagaggaagattagtcataattcgagtccaaggaagacggctaattctagcgatcaatgtttgtttcccattswgaagaagtagatggctgccctgtcattctagtttgtggatcccaggatgttggaaagtcaacatttaatagatacctgattaaccatttgttaaatagtcttccctgcgttgactatttggaatgtgatctgggacagacagaatttacccctcctggttgcatttctttgcttaatattacagaaccagttctgggaccacctttcactcacctgaggactccacagaagatggtatattatgggaaaccttcttgtaaaaacaactatgagaattatattgacatagtgaaatatgtgttcagcgcttacaagagagagtcccctctcatcgtcaacactatgggatgggtttcagaccaggggctcctgcttctcattgatctgatccgattgctgtctcccagccacgtggttcagttccgctctgaccacagtaaatatatgccagaccttaccccgcagtatgtagatgacatggatggcttgtacacaaaaagcaagaccaagatgagaaatcgacgtttcagactcgcagcatttgcagatgctttggaatttgctgatgaagaaaaagagagtccagttgagttcactggacataaactgataggtgtttatacagactttgcattcagaataactccaagaaatagagagtcacataacaaaattcttcgagatctgtccatcttgagttaccttagccagctgcagcccccgatgcccaaaccactttctcctttacatagcctgacaccctatcaggtccctttcaatgcagtcgcactccggattacccactctgatgtcgcccctacccatatactatatgctgtaaacgccagctgggttggtctttgcaagatccaggatgacgtcagaggatacacgaatgggcccatcctgcttgcccagactccaatctgtgactgcttgggctttggcatctgtagaggcattgacatggagaagcggctgtaccacatcctcacccctgtscccccggaagagctaaggaccgtgaattgtctgytcgttggagctattgccattccacattgtgtccttaagtgccagcgtgggatcgaagggacagtaccttatgtcacaacggattacaattttaaacttcctggagcatcagagaaaattggagcaagagaacctgaggaggcacataaagagaaaccataccgaagacctaagttctgtcgaaaaatgaagtgatgctcgcgtttttaataagggaagaaactttcctaccagaaagctttgtctcaagcctgaccacaagagacatgatggagtttcatggccatgaatggtgcccttattarcaacagtgttttttgtgtaattcgtgaatgtcatatagtagtcttaagtttctcttttaaagctgcatgagctagaatttgttctagtcttctgtgtgatactcatacttgctgtccagagggagtaaaacagcagagaacagtttgtgtkccattaaaacagagattcctcagaaagttcttcagggacctggttattagaatcaggataaaaataaggaaactggggccattacaatgtaccgagaaggaaggaagaaggccaacctgcaggatctcaagcataatggatacaagggctcscacgggccttgcctgagccatgtgcagagctggggtccagcggtctgcttccttggagccagtgtggatggttacagcccatccatttggtgcagttgtacttggtctgttatattcaatcaaggtttaattagatagggctggggcatggtt

SEQ ID NO: 541 - DNA, 1943 bp, Homo sapiens
cgcaccctgccttccgggggccggacagggcccgggctgctgtctcaagacagccagacaaggagttctccttcatggatgaggaggaggaggatgaaatccgtgtgtgaggcggacagtgggtggccaccgggagctcttggctgcatcttctccctgcccccaccccactatgacctttgaccctacggcgcaggggcagccaggacccttgattcagaccatggaccctggaccttgtagatgagggacactggcctggccctcgggtcttcggaggacgtagggggctggcatgggtgccgactggctgcctgacttcatcatgctccctgcacttaggctgcgtgggacaagggctgtgttgtcacagcaggaataggttttcctctgttggcctccctttcctccaccctggcctcaaatggatgccagatgccaaccccagttctggccacgtacagccagcgggtcagcccagaggcagcctcagctccagggctaaggactctcggctcccattttctytgctggcgtttctgctgtgcccagcagtggctgctgggsaagcagctgcagcaggagggagacggtcttgcctctcagcccctccctgccccaccccagctcctgccctggaaatctggagccccttggagctgagctggacggggggccagctgcgagcatgtgcactaaacgcagccctttccaggggaagagaacaggatggagaatggaaggaaagccccccaggcttcgtgaattgcaagaagggacccttccaggatgacactaggaacagggctagggcactcgctcagtccctaggggcttgtttgttctttattattgtgtttaaatccttatagagcaatatcaggatggtgttaataggtctgcctcagaatgagaatcaatccttttagaaaacctttatactaagcctcctcttcraaattcacagtggcgattagcggactggagtctggtggcgattagcggactggagtctggggacatccgtggcaaagacaccagctcaactttagtgcttcccaactttatttagaatgacatggggtgggtgtctggtgtgtgtgttttccctacgcacctcccatagctattaacaactgaggaaggccagtgcagaatatttttggagaacgattttttttttaaataatatatcattcctatggggggaaagccttttttttctttttggctgagttattccctccctcccctcaataccctcagtactgactacttccctttcttttctcaggcctccccccaccgacttttgaggccagggttggccagatttagcaaaaccaaaacagagtgctgagttaaacgcaaatttcaggtaaacaaaagataattttctagcattaatatgccccacgcaatatttggaacacttatgtgaaaaatgatttgtttttctgaaattyacgtttctctctgagtcctgtaactgtccccgaggggattgagcagaagctcgggtatgagccctgaggttgactgccggttatttttctgtcctgggaacagcctgacccacctccctgtctccatgtagccagtgrggggagggggagacacagaaccaaccacagccaggggcgtccccatggcgactgtggcccggcccctcctctcttgcctgactctcctctcttgcctgactctagacactaacttagttccaggttcggtgccctgttggtgctcctgtttccaatagcttaggtcccatggtgggggaggaacctcagggctatgcagcccccgccagctgccctcraatcccgtccaggccarttccagattctaaactgatttttttcatgatattgtcaaaacagtgaggaaacattaaaaaaaaagccctaaagcaaaaaaaaaaaaaaaaaaaaaaaaaaaaa

SEQ ID NO: 542 - DNA, 804 bp, Homo sapiens
  misc_feature (792)..(792): n equals a,t,g, or c
gtccgacgtcgccggactgggcgcgcctggtgagccaggaggggagagacaaggagggacggaggaggaggaggtatctctgcattagccagattggacatatgtaaagggacatcagtatatctggatcatcagattgtgcttcaagaagaccatagggaagaacgcattttcatcttgctgcaaaagttgcaatagaagatctgaaggtttgaatgggccaatgagtatcctcatcattgaagcattctatggaggctcccataaacagctggtggatcttcttcaagaagagttaggagactgtgtcgtttatacccttcctgcaaagaaatggcattggagagcccggacatctgctttatatttctctcagaccattcccatcagtgagcattacaggaccctctttgcaagttcagtgcttaacctgaccgaactggctgcccttcggcctgaccttgggaaactgaaaaagattctgtattttcacgagaaccagttgatatatcctgtcaagaaatgtcaggagagggatttccaatatggatacaaccaaattctttcatgcctggtggctgatgtggttgtattcaactcagtttttaatatggaatcatttctcacttccatgggaaaatttatgaagctgattcctgatcacagacccaaggatctggaaagcatcatcagacccaagtgccaagttatttactttcccatcaggtttcctgatgtgagcagattcatgcccaagcacaaaacaacccwtttaagaagatgctcggcctnaaaggaaatggc

SEQ ID NO: 543 - DNA, 492 bp, Homo sapiens
ggcggtccgggagcacagagagccgtgggggaaaagaccccctctccagccctgggggcctggatctcggaggagcaattacaatttggaaggcatctcagtgaagatgttccttcgagggcgccccattaccatgtacatcccgtctggcatccgcagccttgaggagctgccgagtggcccaccgccagagaccctcagccttgactgggtttatgggtacaggggtcgtgactcccgctctaatctgtttgtgttgcgctctggggaggtggtctactttatcgcctgtgtggtggtgctgtaccggcctggaggaggcccagggggtcctggaggtggcggccagagacattaccgggggcacacagactgcgttcgatgccttgctgttcaccctgatggtgttcgggtagcctcgggacagacagctggagtggataaggatggaaagcccctgcagcctgtggttcacatctgggactcaaagac

SEQ ID NO: 544 - DNA, 593 bp, Homo sapiens
  misc_feature (284)..(284): n equals a,t,g, or c
  misc_feature (300)..(300): n equals a,t,g, or c
  misc_feature (490)..(490): n equals a,t,g, or c
  misc_feature (530)..(530): n equals a,t,g, or c
tttcctatcaaagcaccttagacatgcacgaggaagaaatatacacctctcttcagtgggatagcccagcaccagacacttaccagaaatgtctgtcttccaacaaatgttcaggagcatgctgtcttgtgatggtgatttcatgtgttttctgcatgggattattaacrgsatccattttcttgggcgtcaagttgttgcaggtgtccaccattgcgatgcagcagcaagaaaaactcatccaacaagagagggcactgctaaactttacagaatgggaaganaagctgtgcccttcanatgaaatattgccaagccttcatgcaaaactcattaagttcagcccataacagcagtccttgtccaaacaattggattcagaacagagaaagttgttactatgtcyctgaaatttggagcatttggcacaccagtcaagagaattgtttaaaggaaggttccacgctgctacaaatagagagcaaagaanaaatggtaaacactgttttgtggtctcatgttattctganaatatcattttacttattaaaagaaatccctcattctcataagaaaaaattccttaatattct

SEQ ID NO: 545 - DNA, 450 bp, Homo sapiens
  misc_feature (368)..(368): n equals a,t,g, or c
  misc_feature (413)..(413): n equals a,t,g, or c
  misc_feature (446)..(446): n equals a,t,g, or c
  misc_feature (450)..(450): n equals a,t,g, or c
gacaagacgccagccggactgaggtggtttctaagcagtggcttcacagctgtttcccacttgtcatctttatgagcagaaaacctgaactgtgtttacaacctagctttgcacattgtcagatttttcccagcatcctccagaagtgcaaaagcccagcttcctcgcctcaggctgtcccgggtgtctggagagcgttcactctcccaggccaagcctgccttgggacggggctctggccaggcctgcctgccctgctgcagtggcccagcccatctcctccgatggaagagtggccccggacgcacatcctccctatgttggtgggagcagtggcaggagcagtggcagcgagcaggacaggcggntatctcttcacccaaaggaccttggtaccaggattgcacgtactnctggctttgtgatgggcatttttgctccatggngggn

SEQ ID NO: 546 - DNA, 1991 bp, Homo sapiens
  misc_feature (1991)..(1991): n equals a,t,g, or c
gcggaggagagaaatgccccaggctctccggggcacacaaagcgcaggcgcagcgggttgggtggcagcagcatcgagtagcggccgcttaggcagcaacatccgcaacaagtgtagacaaggtcccgcctgactccgctctggaaagtccttttgaagaaatggccctggtgaggggcggctggctgtggagacagagctccatcctccgccgctggaagcggaactggtttgccctgtggctggacgggaccctgggatactaccacgatgagacagcgcaggacgaggaggaccgtgtgctcatccacttcaatgtccgtgacataaagatcggcccagagtgccatgatgtgcagcccccagagggccggagccgagatggcctgctgactgtgaacctacgggaaggcggccgcctgcacctctgtgcggagaccaaggatgatgccctagcatggaagacagcactgctggaggcaaactccaccccggtgcgcgtctacagcccgtaccaagactactacgaggtggtgccccccaatgcacacgaggccacgtatgtccgcagctactacggaccgccctacgcaggccctggcgtgacgcacgtgatagtgcgggaggatccctgctacagcgccggcgcccctctggccatgggcatgcttgcgggascgccactgggcggcrywgggctcgctcatgtggtcgccctgctggttctgagccctgggactcggagcactgacccctgcgcttggattgctagactcctcttcctcctggaccccatcctctaccatccaagccctgtcccactttggccctatcctctccattagctccttccgggtttggaccattccccccactccctacccttaatccccacatgggaagaagctatcatcacaggtacaaacatcgcttgaagtcttcacatctaccactagacacccccaaaatctgttatagacatttatggatacatttcctctaaacacaacagggcacagcaaatacgacttcatttggcttcgagttccccaggcgctgtagacacaacatgaatcgggctctctgctctctccttagggagctcgagtcctggtggggagaacaggagtaaacaaggacttgacaaagctgaagagttatcagtcctttgacaaggacaggtggggcagggagcaagacaggtaggctggaagaacagttattggcaagtatgcagagccgtgaacgtcatggcatgtccaaggaattaaatgggagttcatttgggctggggtggaggctgggatcagaccgtggtgggccttcaagctaaggagcttcctaggtgaaaggggagatgtgagccttctctggagggaagtttcatgattgcatctataatgaatatattgcctgttttgtgaatactgacacatgtccatacctaaaacactcctgagttaagtcccatccttcccacaaacagcttcctggctggtacccatgataacaattgagctgaacctggggacccctggttggggaacaggtgagttctatttgagacttccagccctagaaagctgcctccgtccagaaatgcctctcacaccaggagctcggccctctctttgtagctgtgactgtcaccctctcaggctttgtctcatccttcattctgaataagatggcagtgttctcctctggggcctgatccacctctacaccagcccaggaagccccatctgtgcctgccctcaggtggtccaccagtctccccctttggttcccttccagtctcttccccctttctatcccaatcaccaatagaaatgctaacatccctgcctggtagccagactagcccactaaagctcccctgtaaatgggggctccattagttctgctgccgagactaataaagatttggttggctctarmaaaaaaaaaaaaaaaaaaaaaaaaaaaaaaaaaaaaaaaaaaaaaaaaan

SEQ ID NO: 547 - DNA, 592 bp, Homo sapiens
  misc_feature (320)..(320): n equals a,t,g, or c
  misc_feature (341)..(341): n equals a,t,g, or c
  misc_feature (479)..(479): n equals a,t,g, or c
  misc_feature (502)..(502): n equals a,t,g, or c
  misc_feature (541)..(541): n equals a,t,g, or c
  misc_feature (566)..(566): n equals a,t,g, or c
ggcacgagccaagggggagtcggcggcacaaaatggcggcggcggcggcggcggctggtgctgcagggtcggcagctcccgcggcagcggccggcgccccgggatctgggggcgcaccctcagggtcgcagggggtgctgatcggggacaggctgtactccggggtgctcatcaccttggagaactgcctcctgcctgacgacaagctccgtttcacgccgtccatgtcgagcggcctcgacaccgacacagagaccgacctccgcgtggtgggctgcgagctcatccaggcggccggtatcctgctccgcctgccgcangtggccatggctaccgggcangtgttgttccagcggttcttttataccaagtccttcgtgaagcactccatggagcatgtgtcaatggcctgtgtccacctggcttcaagatakaakargccccaagacgcatacgggacgtcatcaatggttaacgcnttgacagttagagacaaaagaancccggctttaatatggataagatatgtaattaagaccanttaaggggaaacagtttaaatggtntgggcatgaaatctaaaaactagact

SEQ ID NO: 548 - DNA, 641 bp, Homo sapiens
  misc_feature (539)..(539): n equals a,t,g, or c
  misc_feature (609)..(609): n equals a,t,g, or c
  misc_feature (640)..(640): n equals a,t,g, or c
caagagccggctggttgtcaggatcctttggttgcaagtgacagaaaacccatctcaaaccaccttcagtaagaatgggaatttctctctgtttccctggggcagctgcctcctgggtgagggatgtagctctaccacatggtagtgggggaggagtggttcccagaaggaagcccccagggtgctgggaccagaagatggggagggatgccaggtgggagcatctctttcccctgtgctggtgcctcgatcccagattggaaggctttgccttcccccaagtcttgggtcccaggggagccccgttggcccatggcctgcttgcagtggctcttggcctttccatgtctgacctcagaatccttgctcctatcctgcctccttgggaggccttccttgacttattccagctctccctgtggatgtcattatgaacactggtgcccacatgtgtgaggaactgtgcccagtggacatttccaagcaacatagccccccaagaacctggtggggaaggtgttcctgcgttgcctgtttantgtgtcgatgaggagcagaggttcagaaaggttcctgactacccagagtcacaagcattttctcttctantgagattcagtttgtgcatttgtcttcctgna

SEQ ID NO: 549 - DNA, 612 bp, Homo sapiens
  misc_feature (51)..(51): n equals a,t,g, or c
  misc_feature (54)..(54): n equals a,t,g, or c
  misc_feature (510)..(510): n equals a,t,g, or c
  misc_feature (513)..(513): n equals a,t,g, or c
  misc_feature (530)..(530): n equals a,t,g, or c
  misc_feature (567)..(567): n equals a,t,g, or c
aattcggcagagggagattatggattctgttatattcctattaagaatatnaantttgtgttttagcaggcagttaacttggctgaactcaaattccagactcaatctccttatgttcagttcttttagtcttagcctggcagcctagagctcacctcatacatgcctaatgcgggggtcagccagagttttgagtggagtgtatgtacagagtttgtggttctccctctgtggttctctccttctggaatttttccctcactttccagctggtttggcagtcacgaatactgtcttttgtgtgtttcctcaaccaaaaagactgcargtttctatccagagtatctcctttcggattggsttttatccctgtggggratctgcaaatgccccmagggrggaaatggrgrtatatgctgggytcatttcaawgkgcctccctcccttacaggattctgcctccttcagtgctgcctgcctaagttgatctccattgtacttaaacagtgntanctgtggtttaacccagnttttgtagttgttctcagcaagggggattggtctganacaagctaattccctaggggccaaaagccaagggtcccggggccc

SEQ ID NO: 550 - DNA, 1065 bp, Homo sapiens
  misc_feature (573)..(573): n equals a,t,g, or c
  misc_feature (746)..(746): n equals a,t,g, or c
  misc_feature (785)..(785): n equals a,t,g, or c
  misc_feature (799)..(799): n equals a,t,g, or c
  misc_feature (807)..(807): n equals a,t,g, or c
  misc_feature (898)..(898): n equals a,t,g, or c
  misc_feature (921)..(921): n equals a,t,g, or c
  misc_feature (961)..(961): n equals a,t,g, or c
ggatacttggtcaggacctggtggctttaccagatgatcctctccacagtgactgtcccctttatcctgtgctgttgggtgctcccagagacacctttttggcttctctcagagggacgatatgaagaagcacaaaaaatagttgacatcatggccaagtggaacagggcaagctcctgtaaactgtcagaacttttatcactggacctacaaggtctgttagtaatagccccactgaagttcagaagcacaacctatcatatctgttttataactggagcattacgaaaaggacacttaccgtttggctaatctggttcactggaagtttgggattctactcgttttccttgaattctgttaacttaggaggcaatgaatacttaaacctcttcctcctgggtgtagtggaaattcccgcctacaccttcgtgtgcatcgccatgggacaaggtcgggaggagaacagtcctggcctactctcttttctgcagtgcactggcctgtggtgtcgttatggtgatcccccagaaacattatattttgggtgtggtgacagctatggttggaaantttgccatcggggcagcatttggcctcatttatctttatacagctgagctgtatccaaccattgtaagatcgctggctgtgggaagcggcacgatggtgtgtcgcctggccagcatcctggcgccgttctctgtggacgtcagcagcatttggatcttcataccacagttgtntgttgggactatggcctccctgagtgagtgttacactanacttccagaaccgntgggaacngctagcactacttggaggagctgcaaactgagcagagatgaacgagctagcaatcatcctcactatatattgctgaaaaagacgatcccangatctgctggtataagtcacacngcttcactggatatattccccatgtaggttgttactcagntgtggtaaattaaatacatgtaagaatgcgaaaaatttgcgtcgtcggtctccggtactgcacgattcccctggcggcctgggcgcggggccccctctcatact

SEQ ID NO: 551 - DNA, 844 bp, Homo sapiens
  misc_feature (797)..(797): n equals a,t,g, or c
ggcaactgctgtgcggcctgcgggcgcgcgctcccttatcggccaacggacgcgaggcgcgcgccatggaacagcggttagctgagtttcgggcggcgcggaaacgggcgggtctggcggcccaaccccctgctgccagtcagggcgcacaaaccccaggagagaaggcggaagcagcagcgactctaaaggcagccccaggctggctaaagcggttcctggtatggaaacctaggcccgcgagtgcccgggcccagcccggcctagttcaggaagcggctcagccccagggcagcacatcagagacaccatggaacacagccattcctctgccgtcgtgctgggaccagtctttcctgaccaatatcaccttcttgaaggttcttctctggttggtcctgctgggactgtttgtggaactggaatttggcctggcatattttgtcctgtccttgttctattggatgtacgtcgggacacgaggccctgaagagaagaaagagggagagaagagcgcctactctgtgttcaatccaggctgtgaagccatccagggcaccctgactgcagagcattggagcgcgagttacagttgagacccctggcagggagataggacccagctgtgctgtcatgcagctaacctctgatgtggtcttcctcaccattggctatggatttgatttcaggtgtataggactaagggcagcttgcgggttagctctgtgactgcataatttttctaccttctttccctgatctttgctgccatttgatctttgataatttttgtgaantctctaaaatacattcactgtgggtccgacgcaatttattaaaaatt

SEQ ID NO: 552 - DNA, 770 bp, Homo sapiens
  misc_feature (757)..(757): n equals a,t,g, or c
tcgacccacgcgtccgggccgccgtagcgcgtcttgggtctcccggctgccgctgctgccgccgccgcctcgggtcgtggagccaggagcgacgtcaccgccatggcaggcatcaaagctttgattagtttgtcctttggaggagcaatcggactgatgtttttratgcttggatgtgcccttccaatatacaacaaatactggcccctctttgttctatttttttacatcctttcacctattccatactgcatagcaagaagattagtggatgatacagatgctatgagtaacgcttgtaaggaacttgccatctttcttacaacgggcattgtcgtgtcagcttttggactccctattgtatttgccagagcacatctgattgagtggggagcttgtgcacttgttctcacaggaaacacagtcatctttgcaactatactaggctttttcttggtctttggaagcaatgacgacttcagctggcagcagtggtgaaaagaaattactgaactattgtcaaatggacttcctgtcatttgttggccattcacgcacacaggagatggggcagttaatgctgaatggtatagcaagcctcttgggggtattttaggtgctcccttctcacttttattgtaagcatactattttcacagagacttgctgaaggattaaaaggattttctcttttggaaaaaaaaaaaaaaaaaaacycgagggggggcccgtwcccattcscccyatatgaattccntttttacaatccc

SEQ ID NO: 553 - DNA, 2739 bp, Homo sapiens
  misc_feature (6)..(6): n equals a,t,g, or c
  misc_feature (119)..(119): n equals a,t,g, or c
ttgcgnccgccgctcggaggagtggcggaggggccagggctagccttcagcgaggatgtgctgagcgtgttcggcgcgaatctgagcctgtcggcggcgcagctccagcacttgctgansagatgggagccgcctcccgcgtgggcgtcccggagcctggccagctgcacttcaaccagtgtttaactgctgaagagatcttttcccttcatggcttttcaaatgctacccaaataaccagctccaaattctctgtcatctgtccagcagtcttacagcaattgaactttcacccatgtgaggatcggcccaagcacaaaacaagaccaagtcattcagaagtttggggatatggattcctgtcagtgacgattattaatctggcatctctcctcggattgattttgactccactgataaagaaatcttatttcccaaagattttgaccttttttgtggggctggctattgggactcttttttcaaatgcaattttccaacttattccagaggcatttggatttgatcccaaagtcgacagttatgttgagaaggcagttgctgtgtttggtggattttacctacttttcttttttgaaagaatgctaaagatgttattaaagacatatggtcagaatggtcatacccactttggaaatgataactttggtcctcaagaaaaaactcatcaacctaaagcattacctgccatcaatggtgtgacatgctatgcaaatcctgctgtcacagaagctaatggacatatccattttgataatgtcagtgtggtatctctacaggatggaaaaaaagagccaagttcatgtacctgtttgaaggggcccaaactgtcagaaatagggacgattgcctggatgataamgctctgcgatgccctccacaatttcatcgatggcctggcgattggggcttcctgcaccytgtctctccttcagggactcagtacttccatagcaatcctatgtgaggagtttccccacgagttaggagactttgtgatcctactcaatgcagggatgagcactcgacaagccttgctattcaacttcctttctgcatgttcctgctatgttgggctagcttttggcattttggtgggcaacaatttcgctccaaatattatatttgcacttgctggaggcatgttcctctatatttctctggcagatatgtttccagagatgaatgatatgctgagagaaaaggtaactggaagaaaaaccgatttcaccttcttcatgattcagaatgctggaatgttaactggattcacagccattctactcattaccttgtatgcaggagaaatcgaattggagtaatagaaaatggaagatggtgttgttaataaaggcatttaatagataaaaacatctccaaaaaggattttgaagctgatcctatttagttaaaaagataattttgctttcaacygtaggtccagaaaactaattattggcatcagtctgtgaaatagtccattatttgttgttaaaaatgcttcaaaaggttttcagtgtcagtctgagatgcctggtatataggagcctttgggaaatacctatttttcagtattccatgcatattrgatatcaccatgaagcaagagacatgcattctataatcatgtagacactcagactcaggggaaaatacaagttatatcctgaaagcctttaaaactctatggtaggatcaaagattcaaatggtttcagagaggttttatttcaattaatttgttctagtgctttcaagagcaagtacatcaaaatgtagaaggtaaaatgtatgcaacactaatataaattattccaagtctttaaggagccaaagaaaaaaaagatttctcacagctttttgttctgttttgtatttcaattaggaacttgcagtattattttgaaaaccattctaaaataataggagttaggaaataaataaagttttgctagccctgctaagttcaggcttagaggcttatcgctaagtrtaaacttcaccagattccacgaaaagctggatagctttttttctgacttatgttgtggttgcacccctcacaaatggcagaacagtatgtaaagctggtaacacctcggtttcagtgcaccatgtgtttgctttgtgaaggtgaagaatatgttggtttagagaaagaaattggatgtaattttatgcaatttacttttaaagacaaacataactatttagcagagaatattttaataaatgcaaaacaacagctggactgctgtacatcaaggacagattaactggaaaacatatgttccttatgtgtgattgagagccattcagaaaagacttcctttgtgttcagcctatacttttccatatggtataccttgaaaaaaattagcacaccatggttatttttctaccttttataaaagacagagcctgtttactcatttagaagatagagaaaattggtctaaaattgaacatcctagattcacactcccaagtcacttaaggtgatttgatggtgaggaaaatgattgacaaagcccaacaatgatctcaggaattacattttccaacagaccaaaaaatgttttcatgtagcagcaatgcagatttggtgaatatttaatatatattttagtatgtatttcactttatgactgacaattaaaaaatattgtttggccaaatagtaaacacccttttgaaaccaaaaaaaaaaaaaaaaaaa

SEQ ID NO: 554 - DNA, 1351 bp, Homo sapiens
  misc_feature (46)..(46): n equals a,t,g, or c
  misc_feature (595)..(595): n equals a,t,g, or c
cctgccggtaccggtccggaattcccgggtcgacccacgcgtccgntggaatcccttctgcagcacctggatcgcttttccgagcttctggcggtctcaagcactacctacgtcagcacctgggaccccgccaccgtgcgccgggccttgcagtgggcgcgctacctgcgccacatccatcggcgctttggtcggcatggccccattcgcacggctctggagcggcggctgcacaaccagtggaggcaagagggcggctttgggcggggtccagttccgggattagcgaacttccaggccctcggtcactgtgacgtcctgctctctctgcgcctgctggagaaccgggccctcggggatgcagctcgttaccacctggtgcagcaactctttcccggcccgggcgtccgggacgccgatgagsagacactccaagagagcctggcccgccttgcccgccggcggtctgcggtgcacatgctgcgcttcaatggctatagagagaacccaaatctccaggaggactctctgatgaagacccaggcggastgctgctggagcgtctgcaggaggtggggaaggccgaagcggagcncccgccaggtttctcagcagcctgtgggagcgcttgcctcagaacaacttcctgaaggtgatagcggtggcgctgtttgcagccgccttttgtctcgtcggccccaagaagagttggaacccggcatccacaaatcacctggagargggagccaagtgctagtccactggcttctggggaattcggaagtctttgctgccttttgtcgcgccctcccagccgggcttttgactttagtgactagccgccacccagcgctgtctcctgtctatctgggtctgctaacagactggggtcaacgtttgcactatgaccttcagaaaggcatttgggttggaactgagtcccaagatgtgcccygggaggagttgcacaataggtttcaaagcctctgtcaggcccctccacctctgaaagataaagttctaactgccctggagacctgtaaagcgcaggatggagattttgaagtacctggtcttagcatctggacagacctcttattagctcttcgtagtggtgcatttaggaaaagacaagttttgggtctcagcgcaggcctcagttctgtataggcaatgctgtgttattacttgaatatagaatatatagtttacaaaatgaaaattacaatgttctcaccaaatatatgccttcgtgtgtccaaagtataattattttagatgctaattttgaatagtttattaaacagttataaatatgcaaaaaaaaaaaaaaaaaaaaaaaaaaaaaaat

SEQ ID NO: 555 - DNA, 417 bp, Homo sapiens
  misc_feature (369)..(369): n equals a,t,g, or c
  misc_feature (399)..(399): n equals a,t,g, or c
ttggcgggccgcgtagcggacatggcgggctcccggctcccgcggcagctcttcctccagggcgtggcggccgtcttcatgtttgctttcgcttccctctacacgcaaatcccaggcctgtatggccccgagggcatcctacctgcaaggaggacgctgcggcctcagggcaaggggcgctggcagcagctgtgggagaccccgacgctgctgtgggaagcgccgagactggggctggacacggcccagggcctggagctgctgagcctgctgggtgcactagtggccctgggagccctgctgctgagcccactgcgccaccctgtcatctacttgctgctttgggccgctacctgcagcctgccaggnggccaggtgtcctttatttcagggggactncctgctgctagagactgg

SEQ ID NO: 556 - DNA, 578 bp, Homo sapiens
aggagacagagaaacttgggtgtgtgatgctcaccaaatacctacctgttttgggtaggagccaaacagcatgaattacaagtgaactcaatgcagctgctgtactaccaggctccgatgtcatctgccatgttgctggttgctgtgcccttctttgagccagtgtttggagaaggaggaatatttggtccctggtcagtttctgctttgcttatggtgctgctatctggagtaatagctttcatggtgaacttatcaatttattggatcattgggaacacttcacctgtcacctataacatgttcggacacttcaagttctgcattactttattcggaggatatgttttatttaaggatccactgtccattaatcaggcccttggcattttatgtacattatttggcattctcgcctatacccactttaagctcagtgaacaggaaggaagtaggagtaaactggcacaacgtccttaattgggtttttgtggagaaaagaatgttgtcccaagaagataaaaaatattgttaagtgtgcaagttattaaaaaaaaaaaaaaaaaaaaaaaaaaaaa

SEQ ID NO: 557 - DNA, 1354 bp, Homo sapiens
  misc_feature (1298)..(1298): n equals a,t,g, or c
  misc_feature (1310)..(1310): n equals a,t,g, or c
  misc_feature (1318)..(1318): n equals a,t,g, or c
  misc_feature (1339)..(1339): n equals a,t,g, or c
  misc_feature (1346)..(1346): n equals a,t,g, or c
gcgrccgcgggassttcccgggcctggccgtggaaccaggcagcaacctggacatggaagatgaggaggaggaagagctgaccatggagatgtttgggaacagctccatcaagtttgagctggacatcgagcccaaggtgttcaagccgccgagtagcacagaggccctgaatgacagccaggagttccccttccccgagacgcccaccaaagtgtggccgcaggacgagtacatcgtggagtactcactagagtatggcttccttcgcctgtcgcaggccacccgccagcgcctgagcatccccgtcatggtggtcaccctgggtgagtctgagctgctgggcttggggagctccatggcggggcctcccctcctccctcgggtctcctcctgctggtgcgggrcsgggggctgtgcaggaagcactggggtctgccccgccccaggcacgcttcccagggctggggtcctggatgggtttcctaagaatgggcagggcaggaagcaggccaggcctcagcaatggagccagctggggcagggcccagggggtggcctgggcggggctcccggctccctgattcacccacccgcagaccccacgcgggaccagtgcttcggggaccgcttcagccgcctgctgctggatgagttcctgggctacgatgacatcctcatgtccagcgtgaagggcctggccgagaacgaggagaacaagggcttcctgcggaatgtggtgtcgggcgagcactaccgctttgtgagcatgtggatggcgcggacgtcctacctggccgccttcgccatcatggtcatcttcacgctgagcgtgtccatgctgctgcggtactcacaccaccagatcttcgtcttcatcgcgcccctgctgaccgtcatcctggccctcgtcgggatggaggccatcatgtcggagttcttcaacgacaccaccaccgccttctacatcatcctcatcgtgtggctcgcggaccagtatgacgccatctgctgccacaccagcaccagcaagcggcattggctgcggttcttctatctctaccacttcgccttctatgcctatcactaccgcttcaatgggcagtatagcagcctggccctggcaccttctggctcttcatccagcattccatgatctacttcttccaccactacgagctgcctgcatcctgcascaggtccgcatccaggaratgctgttcargcgccgcactgggccccgggacccccacggcgctgccgatgacatgaacaacaactcgggcgccccggctacagnccctgactctgncgggcagncccccggccttgggccctgtntcggccnggggccaa

SEQ ID NO: 558 - DNA, 3110 bp, Homo sapiens
  misc_feature (1048)..(1048): n equals a,t,g, or c
  misc_feature (2933)..(2933): n equals a,t,g, or c
ggcagagtgagaagaagggaccatagatgttaccgacttcttgtccatgacccagcaggattcccacgctccactcagggactcaagggggagttcctttgagatgacagatgacgacagtsccattagggctctgacccagtttccacttcccaagaaccttctggccaaggtgattcagattgcaacgtcatcctccacagctaagaacctcatgcagttccatactgtgggcaccaagaccaagctgtctacactcaccctgctctggccctgccccatgacctttgttgccaaagggcgccgcaaagcagaggctgagaataaggcggcagccttggcctgcaagaaactgaagagcctgggcctggtggacaggaacaacgaaccgcttacacacgccatgtataacctggcctctttgcgtgagctgggtgagacccagcgccgaccatgcaccatccaggtgcccgagcccatcctccgcaagatagagaccttcctgaaccattaccctgtggagagttcatggatcgccccagaactccggctgcagagtgatgacatcttgcccttgggcaaggactcagggcctctgartgaccctatcacaggcaagccctatgtgcccctgttggaagcagaggaggtacgtctcagccagagtctgctagaactgtggcggcggcgagggccggtctggcaggaggccccccagctacctgtggacccacatcgggacaccatcctcaacgccattgagcagcacccggtggtggtcatctctggggacacgggctgtgggaagaccacgcgcatcccccagctgttgctggagcgctatgtgaccgagggccgaggtgcccgctgcaatgttatcatcacccaacctcgccgcatctctgctgtgtctgtggcacagcgggtcagccacgaactgggcccctccctgcgccggaatgtgggcttccaggtgcggttggaaagtaagcccccatcccgaggcggggccctgctcttctgcactgtgggtatcctgctgcgtaanctgcagagcaaccccagcctggagggcgtgagccacgtcatcgtggatgaggtgcatgagcgggacgtgaacacagactttctgctgatcctgctcaagggcctgcagcggctcaacccggccctgcggctggtgctcatgagtgccacaggggacaatgagcgcttctcccgatactttggtggctgccccgtcatcaaggtgcctggcttcatgtacccagtcaaggagcactacctagaggacatcctggccaagttgggcaagcaccagtacctgcaccggcaccggcaccatgagtctgaggatgaatgcgcactcgatttggaccttgtgactgatctggttctgcacatcgatgctcgcggggaaccaggtgggatcctgtgcttcctgcctgggtggcaggagatcaaaggagtgcagcagcgcctccaggaggccctgggcatgcacgagagcaagtacctcatcctgccagtgcactccaacatccccatgatggatcagaaggccatattccagcagcctccagttggggtgcgcaagattgtcttggccaccaacattgctgagacttccatcacaatcaatgacatcgtgcatgtggtggacagtgggctgcacaaggaagaacgctatgacctgaagaccaaggtgtcctgcctggagacagtgtgggtatcaagagccaatgtgatccagcgccggggccgggcgggccgctgccagtccggctttgcctaccacttgttccctcgaagccggctggagaaaatggtccctttccaagtgccagagatcctgcgcacacctcttgagaacctggtgctgcaagcgaaaatccacatgcctgagaagacggcggtggagttcctgtccaaggctgtggacagtccaaacatcaaggcagtggacgaggctgtgatcttgctccaggagatcggggtgctggaccagcgggagtacctgactaccctggggcagcgcctggctcacatctccaccgacccccggttggccaaggccattgtgttggctgccatcttccgttgcctgcacccactactggtggtcgtttcctgcctcacccgggaccccttcagcagcagcctacagaaccgggcagaggtggacaaggtgaaagcactgttgagccatgacagcggcagtgaccacctggcctttgtgcgggctgtcgccggctgggaggaggtgctgcgttggcaggaccgcagctcccgggagaattacctggaggaaaacctgctgtacgcacccagcctgcgcttcatccacggactcatcaagcagttctcagagaacatttatgaggccttcctggtggggaagccctcggactgcaccctggcctccgcccagtgcaacgagtacagtgaggaggaggagctggtgaagggcgtgctgatggccggcctctaccccaacctcatccaggtgaggcagggcaaggtcacccggcaggggaagttcaagcccaacagcgtcacatataggaccaaatcaggcaacatcctgctgcacaagtcgaccattaacagggaggccacacggttacggagccgatggctgacgtatttcatggcagtcaagtccaatggcagcgtcttcgtccgggactcctctcaggtgcacccgctagctgtgctgctgctgaccgacggggacgtgcacatccgtgatgacgggcgccgggccaccatctcactgagcgacagtgacctgctgcggctggagggtgactcgcgtaccgtgcggctgctgaaggagctgcggcgggccctgggccgcatggtggagcggagcctgcgcagcgagctggctgcacttccccccagcgtacaggaggagcacgggcagctsnttgcgctactggcagagctgctgcgaggaccctgtggcagctttgatgtgcgcaagacagctgacgactgagccctgcttctgctggggctgtgtacagagtgcaaatgtttatttaaaataaagttctatttatcccttgtgaaaaaaaaaaaaaaaaaaaaaaaaaaaactcgag

SEQ ID NO: 559 - DNA, 987 bp, Homo sapiens
  misc_feature (978)..(978): n equals a,t,g, or c
  misc_feature (983)..(983): n equals a,t,g, or c
acataatcagcgcactagtagggaaagctggtcacctgcaggtaccaggtccggaattccgggtggagcacgcgtccgggacgtgagagacggtgtgaagagagttcgcctgagccagatcccaggtttcactgaagaaacttcttagagattcattgcacttctgagatttaatgtttacaacttggagttgtcgaccttcttataagatacattttggaagtcaaaatgaaagttttctgtgaagttttagaagagttatacaagaaggtacttcttggagccacacttgaaaatgacagccatgattacrtcttttatctcaacccagcagtttcagatcaagattgttctacagccacctccttagaatgggcaaacacctgtggtatccagggcaggcatcagcccatctctgttggtgtggctcccattgctgtagcacctgtgtgtttgaagaccaactctcagatgagcggttccagagaagtaatgctccttcagttaacagtgatcaaagtgatgacaacccggatattgtctgtcaaaaccgagttccatgcaaaggagcagtacagagatgtaattaaaattctcttagaatcagccaaagtcgattctaaattaatctgcatgttccaaaattcagataaattgttatctcacatggctgcacagtgccttgcattgcttctatatttccaattgagagaaaagataaccttaagtaattcctggattgctttttgccagaaaaatctttctgaatactctgagagtaataaagcaatatactgcctctggactcttacagcaataataaaaggaaatctttaaaggattcatgttcacaggaaaacaggaaattctaaaggcagttcctggacttcatttcgacaccctttttggaggtgtttttacaattcccttattctctcaggccttttggaaaactgccccgggggtacttcctaaaangggtnaacc

SEQ ID NO: 560 - DNA, 2318 bp, Homo sapiens
taggaattttgcacgaggcaggaccggcgacccggcccgtggagccggcgcgggcgggctgctgaggtggctgtcgccggctccgagctgcggccgagcccccgatggaggccgaggccgcggacgctcccccgggcggggttgagtcggcgctcagctgcttctctttcaaccaggactgcacatccctagcaattggaactaaagccgggtataagctgttttctctgagttctgtggagcagctggatcaagtccacggaagcaatgaaatcccggacgtctacatcgtggagcgcctcttctccagcagcctggtggtggtagtcagtcacacaaaaccacggcagatgaacgtgtatcacttcaagaaaggcacagagatctgtaattacagctactccagcaacatcttgtccataaggctgaaccggcaaaggctgctggtttgcctagaagagtccatttatattcacaacattaaagacatgaagctgttgaagaccctcctggatattcctgcaaacccaacaggtctatgtgctctctctatcaaccattccaattcttacctggcctatcctggaagcctgacttcaggggagattgtgctttatgatggaaactccctgaaaacagtctgcactattgctgcccatgagggaacactagctgccatcaccttcaatgcctcaggctccaaactagcaagtgcgtctgaaaaaggcacagtcatccgggtgttctctgtccctgatgggcaaaagctctatgagttccggagagggatgaaaaggtatgtgacaatcagctctctagtgttcagtatggattcacaattcctctgcgcctccagtaacaccgagacggtacacatcttcaagctggaacaggtcaccaacagtcgaccagaagagccttcgacctggagtggctacatgggaaagatgtttatggctgctaccaactacctccctacccaggtgtcagacatgatgcatcaggacagggcttttgccactgcacgcttgaacttctccggacagaggaacatctgtaccctctcaacgatccagaagttgccacggctgctagttgcgtcatccagtggacacctttatatgtacaatttggatcctcaggatggaggagagtgtgtcttaatcaaaacccacagcttgcttggctcaggaacaacagaagagaataaagaaaatgacctcagaccttccttacctcagtcttatgcagcgaccgtagccagaccaagtgcatcttcagcctccacggtgccaggttattctgaggacggcggggcgctgcgaggagaagttattcctgaacatgagtttgcgacgggaccagtgtgtcttgatgatgagaatgagtttcctcctataatcttgtgccgtggaaatcagaagggcaaaacgaagcagtcatgatgagaagcacacctcagaaatcaggacatcccccctatcaggtggttttggagaaaacaaggaaggcggaagaatggagtgcaattgtgtgagcagaaaggggggcaggaatcccgggtgctccactgcttaaaccacaggacctggttaactcctcaccaagcttcccacgaccctggttgccaatgggcgcgggagacattgtatacacatcatgctatttaaaatacgttcaaactatagtgtaaatgctaattaaccatattggtatataaccggaattttatattaaaaggggcctcctttttaaatatatgccgtgtaaaaaatgtacttataggaacatctctttgaattgtatttcttgtatattacatacttagagagagactcttttagccaggcaaagtcttttttggctgtggctggaataaatcatttattacttgggagtcccattttggacactaataataaaatcatggcaatgcatttttgaggtttttatattttttttgtttccttgtggttataggggacaggaggaactctttaacttcttttaaatgcagtcatttcacccttaaaaggagaggaaggggattgggccacagacttatccatggactcgtctgctctgagatctggaaaacgacctaactttggtctaaatctgtgctcctcaaggcattgtttgatagaaatgtaggatttcaggatctactcgagccctactgagacggaatccggattctcacaagatcccaggtgatttgtttgcatattaaagatggagaccagtgagtacactggtttgtggaaggaaaaaaagagaaaagagagagaagctctgccctaaatactaattagaat

SEQ ID NO: 561 - DNA, 1292 bp, Homo sapiens
  misc_feature (534)..(534): n equals a,t,g, or c
gagtgactcgcgactggtcggcgcggcgaaagcagagcggcgcgccggttccttggttcctgagggcgatggcgcggggtggctggcgccggctacgccgcctgttatccgcggggcagcttctattccagggccgcgcgctgctcgtcactaacacgctgggctgcggcgcgctcatggcggccggtgatggcgtgcgccagtcctgggagatccgcgcccggcccggccaggttttcgacccacggcgctccgcgagcatgtttgcggtgggctgcagcrtgggtcccttcctgcactactggtacttgtcgctggaccgcctattccctgcgtctggcctccgaggcttcccaaatgtcctcaagaaggtcctcgtggatcagctggtagcctctccattgctgggcgtctggtacttcttgggccttggctgcctggagggtcagacagtgggtgagagctgccaggagctgcgggagaagttctgggaattctacaaggcagactggtgcgtgtggcctgctgcgcatntcgtgaacttcctcttcgtgcccccycaatttcgagtcacctacatcaacggcctgacgctgggctgggacacgtacctgtcctacttgaagtaccggagcccagttcctctgacacccccaggctgtgtggccctggacacccgagcagactgaactgtctgcttcctggaccagatgcaagactgtctcctggcggaccamcccctctgacaraaggggaatgggctcctgcagcaagctcgggtcttgagccacgtcccagcaccacttcagctccggagcattgggctgagccgccctttccaagctcacttctgggactgagtttcctcaaccggaacacacccatgaagatggatgatcatcccctagcccttctcagcaggaacctcatgygacctgtgaccaagatgtcccatcctcagcacagggcccactctgccaaccagtctcaagcaccagcccctcaacactgccatccacctggctctgggccaagccaccaatccagagctccctcaggtcctgggactaaggcggggacatgactgatcccctcagagcaggctcaggcctggagtcggcccccaaaagtttcacatagggccaggcagcctctgtgtttctttccctggtcctgaactgtggaaatgccattaaactctctctataatgtaactgaaactgctggctgggcgcagtggctcccacctgtaatctcagcccttcccgaggctgaggtggaaggattgctcg

SEQ ID NO: 562 - DNA, 966 bp, Homo sapiens
cggcgctgaggacgcacggatgccttccgtgccttccatcaagatctcaattttgtgcgcaagttcctacagcccctgttgattggagagctggctccggaagaacccagccaggatggacccctgaatgcgcatggtcgaggacttcgagccctgcaccaggcagccgaggacatgaagctgtttgatgccagtcccaccttctttgctttcctactgggccacatcctggccatggaggtgctggcctggctccttatctacctcctgggtcctggctgggtgcccagtgccctggsccgccttcatcctggccatctctcaggctcagtcctggtgtctgcagcatgacctgggccatgctccatcttcaagaagwcctggtggaaccacgtggcccagaagttcgtgatggggcagctaaagggcttctccgcccactggtggaacttccgccacttccagcaccacgccaagcccaacatcttccacaaagacccagacgtgacggtggcgcccgtcttcctcctgggggagtcatccgtcgagtatggcaagaagaaacgcagatacctaccctacaaccagcagcacctgtacttcttcctgatcggcccgccgctgctcaccctggtgaactttgaagtggaaaatctggcgtacatgctggtgtgcatgcagtgggcggatttgctctgggccgccagcttctatgcccgcttcttcttatcctacctccccttctacggcgtccctggggtgctgctcttctttgttgctgtcarggtcctggaaagccactggttcgtgtggatcacacagatgaaccacatccccaaggagatcggccacgagaagcaccgggactgggtcagctctcagctggcagccactgcaacgtggagcctcacttttcaccaamtggttcagcgggacttmaamtttccagatcgrgsaccacctctt

SEQ ID NO: 563 - DNA, 1092 bp, Homo sapiens
  misc_feature (57)..(57): n equals a,t,g, or c
  misc_feature (227)..(227): n equals a,t,g, or c
  misc_feature (1078)..(1078): n equals a,t,g, or c
ggtgtcttcccaggaggagttgctgggccgactctgccaggcatctgtgtccctggnagggtcttccccaacacaccctgcatgacaccttcgtcactaaaatcagcctcgtgagctggcaggcaaggaccctgttcctttactcagctgagaaaaccagagagggtggtggcctgtcctgggctctgaggcaaatcaggcagaagggttggatgcctgaggtcctnctcccacccaccaggcctccagacctccgggcacctggagacctctcggtatcgctctgccctcctctgcaggatttgctctgggccgccarcttctatgcccgyttcttcttatcctacctccccttctacggcgtccctggggtgctgctcktstttgttgctgtcagggtcctggaaagccactggttcgtgtggatcacacagatgaaccacatccccaaggagatcggccacgagaagcaccgggactgggtcagctctcagctggcagccacctgcaacgtggagccctcacttttcaccaactggttcagcgggcacctcaacttccagatcgagcaccacctcttccccaggatgccgagacacaactacagccgggtggccccgctggtcaagtcgctgtgtgccaagcacggcctcagctacgaagtgaagcccttcctcaccgcgctggtggacatcgtcaggtccctgaagaagtctggtgacatctggctggacgcctacctccatcagtgaaggcaacacccaggcgggcagagaagggctcagggcaccagcaaccaagccagcccccggcgggatcgatacccccacccctccactggccagcctgggggtgccctgcctgccctcctggtactgttgtcttcccctcggccccctcacatgtgtattcagcagccctatggccttggctctgggcctgatgggacaggggtagagggaaggtgagcatagcacattttcctagagcgagaattgggggaaagctgttatttttatattaaaatacattcagatgtaaaaaaaaaaaaaaaaaaaactcgagggggggccccggnaaccaattcgccct

SEQ ID NO: 564 - DNA, 673 bp, Homo sapiens
  misc_feature (669)..(669): n equals a,t,g, or c
  misc_feature (671)..(671): n equals a,t,g, or c
gaaaaaagaaggaactctccctgggctctttgttgaagttgagcctgtacttctctgctggtttgctgccctatgtccaccttcccatctcatcttaccttaatcacgcccggtggacctggggagaccagacaacactgcaaggatttttgacacattttctcagggaagaatatggaaccttcagcctggccaaatctgaaataggatccagtatgtctgaaatactgctttctcaagtaacaaatatgaggaccgaactctcattcaacatccaagcccttgcagtttgtgcaaatatatgtttagcaacaaaggacagacagaatccatcattagtatggctttttactggaatgtwttgcatttattcattgttctttgcttggagagcaaatttagatatttcaaaaccacttttcatgggtgtggtggaacgawtctggatgcakagcaatgcagtagtggccgcctcgctggcattggttkggctgcarttgtgtctgagacttaaccgagtgctgaatagcaatggggcttyagtgtctgggaatgggctttctgcaacyctttttggtagtttacccaaatatattctaattacagaaaaggaacatttgtttgcatagggattcatgaaggcgaccccacccggggaaaaaggacctntnca

SEQ ID NO: 565 - DNA, 1612 bp, Homo sapiens
  misc_feature (551)..(551): n equals a,t,g, or c
gggcatggcgtccgatcgaggcgggcgttcacgggcggccagggttgagtcccgggtcggggccgggggattgccggcgcatcagggccgagggctggggctggcggggccgctcgctgcctctcgctcgcagcagcggcggcaggcgcgggcgagggccacggggagaggagacgcagccccgcgggtggcacgctcggccgggccccggcccgcgctcaacgggcgcgatgctcttctcgctccgggagctggtgcagtggctaggcttcgccaccttcgagatcttcgtgcacctgctggccctgttggtgttctctgtgctgctggcactgcgtgtggatggcctggtcccgggcctctcctggtggaacgtgttcgtgcctttcttcgccgctgacgggctcagcacctacttcaccaccatcgtgtccgtgcgcctcttccaggatggagagaagcggctggcggtgctccgccttttctgggtacttacggtcctgagtctcaagttcgtcttcgagatgctgttgtgccagaagctggcggancagactcgggagctctggttcggcctcattacgtccccgctcttcattctcctgcagctgctcatgatccgcgcctgtcgggtcaactagcctcaccgaggtgccggagagggagcgctggacaactagaatgttgacctcgagccgaggccctacttgcagcgcaccggaggagaggctctctagtctgaaggcaccgccggcttgcgccgagctgagtgccgggtttccctattccaatcctgtttgaaatggtttcttcagcagggcttaaaagagcagccttcatcctgaaaatgtatttccttttgtttaatgctttgagtagataatcctgaattgaggtcatgaggaggccccccaggccagacagtcctgaacccctctgacacttggaaactgaatataagtaaaatgtccaggtggactctgagtatttcctgtggatcctgggaaagtactgttgcacaaaggctgcaaagctggactcaggaatgtcctccaaccagcagcgctgacctaagagctccctgtgccgtctatccagaccagacttcggtagatgcctttgttagatctatcacatgtaaacgagcttgtatctccttccctgtgccacgagagagattggctttttattccagtctaggcagagacagaagaatgttgaataagagcacgattagagtcctgtctggttatctgttgcccaagaaaagaactctgctgtccaggcactgcttggcttactatcccagcaaagactgcagttttgtggacttttgaccaccttgggctggcactcttagcacacctgagacagatttaagcctccctaagagactgaagagaggaacaggtgtcagatactcataggcactgagatctacaaatgggaagcttgtgagtggcccatctttgttggcctacgaactttggtttgatgccagtcaggtgccacatgagaacctttgctgagatgcaaataaagtaagagaatgttttcctgaaaaaaaaaaaaaaaaaaaaaaaaaaaaaaaaaaaaaaaaaaaagggcggcc

SEQ ID NO: 566 - DNA, 1034 bp, Homo sapiens
  misc_feature (975)..(975): n equals a,t,g, or c
  misc_feature (1034)..(1034): n equals a,t,g, or c
aactggcagagcctgggaagtccttcgraaggggaccagggcgtctraagtsctcagtgcccccactactctraggccgactccagctactctraggccgactcaatctctcggctggaagcagtgttttcccagagcttggcccttgctgacctcgctcactgggcccatcttcccacactgctcttagaaggacacccctaccggtagcagccccaagctgagggggctccctttttgaccttcactggcccgcccttcactgtctccagcaggagttcctagggcttggcctgccttgctccacagtacggcggaggcagccctgcttgtcactgaggagccctagacaaggccaatgggttcatcaatgcccactggctctctgccaaagccaaaaaggtgtcaggcagtctccagcgtgctggccgggtctcggatgccacccctgctcactgagcctgcatgggccttgcccccgaccctgtggtctctgggattggggtcggcttaccctgtagcacagacagggactcctgctgccctgggagctgtctcaagcaaaatctcttgtcccagaggtgcccatgtgggtccgctgtgtcccctgtcatcatccttgttttttctcattttggccaaggsaggctccctgggacaggcagggaacaactgcggagatattagtgattcataggtttgtacagtgttttatactttgcaaagcactttattagctcacacctgtccactyacatgaaactcgtgttaggccctgggaggcgaccggtaactctcaccgtgccctcagatgaagcacagagaggttgttacttgcccgggccatccagtgggctggcygggtcttgtgtccccatctgtggacccctctagggtctgagatgagatgaagaagtgtctcctgtatccacctcttcctggcctcccttcccccacttcctggtccctgtccantcctcaggttgggtgctctcacttcttgaaagctctaggcacccccgcctcccgccagn

SEQ ID NO: 567 - DNA, 2353 bp, Homo sapiens
gtggctccaaactttacatcagcccacccgagatcgagaaaaggaaaagcgtcatcaagatcgtgctctggccatctacaaacaagtactcagaaatgatgcaaagaatctgtatgctgccaatggcataggagctgttttggcccacaaaggatattttcgtgaagctcgtgatgtatttgcccaagtaagagaagcaacagcagatattagtgatgtgtggctgaacttagcacacatctatgtggagcaaaagcagtacatcagcgccgttcagatgtatgamaactgcctccgaaagttctataagcaccaaaacactgaagttgtactctatttggcccgggccctcttcaagtgtggcaagttacaggaatgcaaacagactttgctgaaggctagacatgtggcacccagtgatacagttcttatgtttaatgtggccttggtcctgcaaagattagctacctctgtcctgaaagatgaaaaaagtaatctgaaggaagtacttaatgctgtgaaagaactggagcttgcacatagatacttcagttatttgagtaaagtgggagataaaatgagatttgatttggcccttgctgctacagaagccaggcagtgttctgacttactgagccaggcccagtaccatgtggcccgggcacgcaaacaagatgaagaagagcgggagctgcgggccaagcaagagcaagaaaaggagctgttaaggcagaaacttcttaaagaacaggaagagaaacgtctcagagaaaaggaagagcaaaagaaacttttggaacagcgggcccagtatgtggagaagaccaaaaatattcttatgtttactggtgagactgaagcaacaaaagagaagaaaagaggtggtggtggtggacggcgttctaagaagggaggagagtttgatgaatttgtcaatgatgacactgatgatgacctacctatatccaaaaagaagaagagaagaaagggtagtggcagtgaacaagaaggtgaagatgaggagggtggtgagagaaagaagaaaaagaggagaagacatccaaagggagaagaaggatctgatgatgatgaaacagaaaatggccccaaaccaaaaaaacgacgtccaccaaaagcagagaagaaaaaggctcccaagccagaacgtctgcctccatcaatgaagggaaaaataaaatccaaagccataatttcatcaagtgatgactcttcggatgaggataaacttaaaattgctgatgaaggacatcccaggaacagcaacagcaacagtgactcagacgaggacgaacaacgaaagaaatgtgcctcatcagagagtgattccgatgagaaccagaacaagtctggcagcgaggccggcagtccccggaggccacgaagacagcggtcagatcaggactcagacagtgaccagccatccagaaagagaaggccctccggttctgagcagtctgacaatgaatctgtgcagtcagggagaagccactcaggagtttctgagaacgactctcgcccagcttctccaagtgccgaatcagatcacgaatcggagagaggatctgataatgagggttctggccaaggctctggaaatgaatcggaaccagagggatccaacaatgaggcctcagatagaggctcagaacatgggtcagatgatagtgactaggttttatttcatcaataagcttcatctctggaggaaacttttttaatatatgaaagctgtgataaaaatgtttcagatgtttagtcaattgtgaaatttttcttaaggcaattttcttttctatcagtttgtatattactaagccccaagagacatttcctgtgctagagtccaatatttgagtctctcgtgcaaatgagactattctttgtggtacaattccacctatcatatgtgaaaactgcagtaaaaataaacccagatgctaaatcattcctacaaaggtttgactgaaactgtggcagatgtctcatcttctttatatgttaagcagcatactcttctgatttttattgcaatcttttaccaagtggtgcacaaacttggtattgatgtctttattccattttgagtttagattgagaatatttttattttctgaaggcagagatatctactgtataattgcaccaaagtacatttgaaaggaaggttttcaatagtgtaatactgcagcgatgtagataaaatcacaaatgtataatgtgttaggttgaataaggtgtggaaaatgcttttctgttagtagaatgcaaaaacctacctaagccacataataataaaattcttttaccaactttaaaaaaaaaaaaaaaaaaa

SEQ ID NO: 568 - DNA, 1111 bp, Homo sapiens
  misc_feature (118)..(118): n equals a,t,g, or c
aaggtcggttggtttgcactggcggacaaatggtccaattaccgcggaaaagggacctctgaatccagattggcgtcctctctacctataaggtaggctcaggggcggtgataaccancccgtgatgtgggcgcggcactggaggtagaactgagagatcctctaccgcagtcgtttgaggaggcggaactgaagttttttcttaattatcatgtgacgggttctggatttaatggggggaaaagggcggaaaaggacaaggatccaaactggcgaatttgctgatcttcgcgtccctctccgctttccggccggcagcgctgccagggtatatttccttttttccgatcctgcaacagcctctttaaactgtttaaatgagaatgtccttggctcagagagtactactcacctggcttttcacactactcttcttgatcatgttggtgttgaaactggatgagaaagcaccttggaactggttcctcatattyattccagtctggatatttgatactatccttcttgtcctgctgattgtgaaaatggctgggcggtgtaagtctggctttgaccctcgacatggatcacacaatattaaaaaaaaagcctggtacctcattgcaatgttacttaaattagccttctgcctcgcactctgtgctaaactggaacagtttactaccatgaatctatcctatgtcttcattcctttatgggccttgctggctggggctttaacagaactcggatataatgtcttttttgtgagagactgacttctaagtacatcatctcctttctattgctgttcaacaagttaccattaaagtgttctgaatctgtcaagcttcaagaataccagagaactgagggaaaataccaaatgtagttttatactacttccataaaacaggattggtgaatcacggacttctagtcaacctacagcttaattattcagcatttgagttattgagatccttattatctctatgtaaataaagtttgttttggacctcaaaaaaaaaaaaaaaaaaaaaaaaaaaaaaaaaaaaaaaaaaaaaaaaaaaaaaaaaaaaaaaaaccggggggggggccccccccccaa

SEQ ID NO: 569 - DNA, 767 bp, Homo sapiens
  misc_feature (374)..(374): n equals a,t,g, or c
  misc_feature (645)..(645): n equals a,t,g, or c
  misc_feature (670)..(671): n equals a,t,g, or c
  misc_feature (725)..(726): n equals a,t,g, or c
  misc_feature (740)..(740): n equals a,t,g, or c
  misc_feature (759)..(759): n equals a,t,g, or c
aagctggagctccaccgcggtggcggccgctctagaactagtggatcccccgggctgcaggaattcggcacgagggcgggcgtgcgtggagcgggggccgcggccgcgccgcagagatgtgactcgggccgaagcagctggagcgtcggcgctgcggggccgcgggggtcgaatgttcgtggcatcagagagaaagatgagagctcaccaggtgctcaccttcctcctgctcttcgtgatcacctcggtggcctctgaaaacgccagcacatcccgaggctgtgggctggacctcctccctcagtacgtgtccctgtgcgacctggacgccatctggggcattgtggtggaggcggtggccggggcgggcgccntgatcacactgctcctgatgctcatcctcctggtgcggctgcccttcatcaaggagaaggagaagaagagccctgtgggcctccactttctgttcctcctggggaccctgggcctctttgggctgacgtttgccttcatcatccaggaggacgagaccatctgctctgtccgccgcttcctctggggcgtcctctttgcgctctgcttctcctgcctgctgarccaggcattggcgccgtgccggaaggcttggtgccggcattgggaacngggccccgcgggcttgcaagctggnngggccctggcgcttgtgccctgaatgcttggtgcaaagtcaatcattcgcttgnnggaaatggcttggnggcttaacccgtgcctgcnttgaacac

SEQ ID NO: 570 - DNA, 1350 bp, Homo sapiens
cagtcagtggcctctgctggagacaaagcctgcccagctggtgaccagcaagtgtcaggctgacgcccaggcccagcagtggcagctgttgccacacacatgacggagggattttcttgaagggtcagctattgcactgtgctgggaggctggctgtggctcctgtttgtgaagagaactcccagttccttttcacagccgctgagaacacatccacacatctaccccacggccttgtcttggaactgctcctgctatccccacaccctgcttcctcaccccactggctcttgggcaaatgactgttggtaccaggaccctgggggtctcccctaacaaagcagaccagcctggggcagatatacctaccacaggagccccctgtctttcataggccaaggatccacatacccatagagttcatggattctagagggtctaggaatctcttgaaattgtccctaaaatactgcatgtgtgtgcatacatgcattttcctggggaaaaagtccatggcttctaaaagaggtccctgatccccaaagggcctgaacctctgctctggattgaagccactgtctgcccaagctgccaccccctaatcttcctccctggcgtgctcaaactgccatcgcctgctccctccacacggcccttggggtcagcagccaagtgtctgtggtccgcagcacctgctctggagggctctccagcagtttcgcctcctgactctcaccagcgtcctctcggcagcactcccgtgcccaagtgcacccctctggacttgccagcgcaggccccttcgctcccagggccatgctttgcctgtcctctgtcgtgatgtttcttccgcagccaggtgcagcctcagawcccctgttcatctgggaagcctcctgccacagcttaggacagaactgggcccagggcaaaggcctctccccagaggatggactagaaggcctgggccacactcgggcatggacctttggggctggggagcmggggctgcgcctgttgaatgtaagaggactgctgaccagagggccttcaagagggtctctctgtcctttgctgtggtcagatcaggctctgcacttatcagccggtcctttgtggcaacgcagccctgttctgtttttgcttttcctcttcttgaccaaagcatgtgccactagctgtccttgaggacctcgtctttatgaaacacacacctggaataaaaccacttcttacatgtmmacaaaaaaaaaaaaaaaaaaaaaaaaaaaaaaaaaaaaaaaaaaaaaaaaaaaaaaaaaaaaaaaaaaaaaaaaaaaaaaaaaaaaaaaaaaaaaaaaaagggggggc

SEQ ID NO: 571 - DNA, 2551 bp, Homo sapiens
  misc_feature (1315)..(1315): n equals a,t,g, or c
tcgtgctgcggaggccggatttttccctggtatgatttatctcacctcgcaatggtttccgcagcgtaatcgcgccagcattatggggctgttctatatgggcgcaccgctggcgttaacactgggatcaccgctttccggcgcgctgttggagatgcatggatttatggggcatcccggctggttctggatgtttgtgattgaaggattgttggcagtcggtgctggggtattcacattcttttggcttgatgacacaccggagcaggcacgttttctgagtaaacaagaaaaaacgttgcttatcaatcaactggcaagtgaagaacaacagaaagtgacttctcggctgagcgatgcgctgcgtaatggccgagtctggcaactagcgattatctacctgaccattcaggtggcggtttacggattaawtttcttcctgccgacccaggttgcggcattgctgggaacaaaagtgggctttacagcgtcggtggtcaccgccattccgtgggttgcggccttgtttgggacctggcttattccgcgctattccgataaaaccggcgaacggcgtaatgtcgcagcgctgacattactggcggcgggcattggtattggtctgtccgggctgctttctccagtaatggcgatcgtagcgctgtgtgttgcagctatcgggtttattgccgtgcagccagtgttctggacgatgccgacacaactgctttccggtacggcgctggctgcgggaattggttttgtaaacctgtttggtgcagtgggcgggtttattgccccgatcctgcgcgtgaaagcagaaacgttatttgccagcgatgcggcgggattactgacgctggcagcggtggcggtcatcggttcgctgattattttcactctgcgtgtaaatcgcactgttgcgcagaccgacgtggcacatcattaaataggttaaggaacacgatgaacgcattattaagcaatccctttaaagaacgtttacgcaagggcgaagtgcaaattggtctgtggttaagctcaacgactgcctatatggcagaaattgccgccacttctggttatgactggttgctgattgacggggarcacgcgccaaacaccattcaggatctttatcatcagctacaggcggtagcgccctatgccagccaacccgtgatccgtccggtggaaggcaagtaaaccgctgattaaacaagtcctggatattggcgcgcaaactctactgatcccgatggtcgatactgccgaacaggcacgtcaggtggtgtctgscacgcgctatcytccntacggtragcgtgkttcggggccarkgtggcacgggctgcgcgctggggacgcattgagaatacatggcgcaagttaacgattcgctttgtctgtkggtscaggtggaaagtwaaacggcactggataacctggacgaaatcctcgacgtcgaagggattgatggcgtgtttattggacctgcggatctttctgcgtcgttgggctacccggataacgccgggcacccggaagtgcagcgaattattgaamccagtattcggcggatccgtgctgcgggtaaagcggctggttttctggctgtggctcctgatatggcgcagcaatgcctggcgtggggagcgaactttgtcgctgttggcgttgacacgatgctctacagcgatgccctggatcaacgactggcgatgtttaaatcaggcaaaaatgggccacgcataaaaggtagttattgatatcaaaggcccatggggatcggctgtgggcctgtgttaattagtggttattcgctgccagatcggcttcgcttagctgggtggccgcgagcacctggtcacgatcaaagccctgttccagcatgcgcaaagcaattttaatggcttgttcatgcaaaccttctaatttaccttcctgccagccaatttgatgtccttcctgccgcagccgttcagcaatagtcattaatctctccttttaatgacagttcggaatatcagcatcagtgagttgggttgtcgccagcacaatctcacgttcaaagccctgctccagcatgcgcaaagcaattttaatggcttgttcatgcataccttcctgccagccaatttgatgcccttcctgccgtagccgtwcagcaatagtcattaatctctccttttgtagtggtgaacgttcggcaatctcctcaataaaacgggtgaaacgggaggtatcgccgcattgcagcagataattaaacagtgtttgtagctggctgtcattagtgaagcctctaaccaaaagcgtggtgatcctgtcgaccatgccgattaaatcgcggtcgcgaatatgcttttgaatcagttccagcagagctatacgccgatgttgcatgatctcatcgtcaggtacgatggtgatatccaccaacagaaaagcttcggtgtacaactgccgggcaagttgcggatcgtcaaactcatccagccagttgagggggggcccggaacccaatycggcctatagttaagcggtatca

SEQ ID NO: 572 - DNA, 1213 bp, Homo sapiens
  misc_feature (685)..(685): n equals a,t,g, or c
ggtgtgcaggtgaagaggaaggtgcaggctttaaaggcagacattgatgctacattatatgaacaagtcatcctggaaaaagaaatgggaacttatttgggcacctttgatgattacttggagttattcctgcagtttggttatgtgagccttttctcctgtgtttacccattagcagctgcctttgctgtgttaaataacttcactgaagtaaattcagatgccttaaaaatgtgcagggtcttcaaacgtccattctcagaaccttcagccaatattggtgtgtggcagttggcttttgaaacgatgagtgttatatctgtggtcactaactgtgcgctgattggaatgtcaccacaagtgaatgcagtctttccagaatcaaaagcagacctcattttgattgtagtagcagtggagcacgcactcctggctttaaagtttatacttgcatttgccatacctgataagccacggcatatccagatgaaactagccagactggaatttgagtctttggaggcactcaagcagcagcaaatgaagctcgtgaccgagaacctgaaggaggaaccaatggaaagcgggaaggagaaggcaacctgagtgcccagcgtgcccagctgccctgttggcagaggcctgtgtctgtgccacacctgccacggtggcagggggggtaccnggggcagcatcgtggctcctgaacccagacccaatgcttagccaaacgaatggctcccatgtggcaagcacccttctcagtttcgcagtggcttggctcgggatccttggcagttcccccagccccaccctgtctgctccttcccagttccttcccgggccccacacgctgctccagctgccaactttgctgcagagccactgccgcccttgagcctctcaccatgagtgagccaccagctctccacgttcccctcatagcagtgtcactcccaaccccaccatggcccagggacccgtggacaggttggggatggggtgtgtgcccactgtgctcatcacaggagcctcagttgagagtgagcggggtacagtaaggcagtgcttcccacactggacctctttcctggttctcttttgcaatacattaacagaccctttatcaacataaacaatagtaactgagctattaaaggcaacctctctgacwaaaaaaaaaaaaaaaaaaaaaaaaaaaaagggcggccgc

SEQ ID NO: 573 - DNA, 378 bp, Homo sapiens
  misc_feature (369)..(369): n equals a,t,g, or c
  misc_feature (376)..(376): n equals a,t,g, or c
ccgatcctctccgtgggagccagcgagcctctctccctgatcttacgtgctcaaggatccagtttcacctatggaatgagaaagttggggaagaagtcatctagcgtcttgctactcaaagtgtggtccatggacagcagcatcagcatcacctgggatcttcttggaagaaatgtagaaactcaggcctcaccccagaatctgcctttttataagacccccagaagctgttgtgaaggcagagcagcatctgctgaagagacagaaaccagccccagaggtgtcacaggaagkcaccagcaaaggacattggtcttgattgattcagcagtcctgtycartataaatgtgatggctgtgctgcctggncctctgnag

SEQ ID NO: 574 - DNA, 929 bp, Homo sapiens
tttatatacaaacgtacatacaaagtttggatttttattgaaatcttgttaggtatcaaacaaattctgctttcttcagataaaaatattctctcagatgtctccagataactgctaagtctaaattggtccttcaatgtcttatttttattgtcctcgtgaaatgttcatatacagttaagatgttcccaaaaggatttttatcgtgtaaaggagcgtacatgacgacctctaccactgcctccactaacaaactttcctcttgagcctccactgccgctatttgcactagcccaggaaggtccaagtcccccacgacctctagaagcacggtcccgaggacttgggcggtaacctgtagaactaaggggtcgtaatggtggaagagggcctctgttaaaattgctctggcctccacgactttcattgtaatttcctcgaggagtattctgagcactccaactggagcctcttgttccttcccgacgactgtagtttccttttgaagcaggtggtgtgaaaaacctattctgactgtggaaagcaccccgtcctcctctattgcctgaaaacccaccacgggaagaaatcttctgtgatactttgagtggccgttttggtggaggtattccatcttgaggaatagtactccattagagtaataagactttggagatttttctccagactaaaaacatggccaacagctgatcttcccacaggattaraagtaatcaaataaagattgtgcagggttcccaagagatctgaatggtctgtttcttcactggctgtacaacgctgaaaatggctgaacagttctgtaatacattgcaatgtctgtgttgagtcctgtagccacaaggcaaatgcatcatcaataacacccatcagatggagaccttcctcctcatcttgatcataaaagt

SEQ ID NO: 575 - DNA, 2360 bp, Homo sapiens
  misc_feature (1733)..(1733): n equals a,t,g, or c
  misc_feature (2328)..(2328): n equals a,t,g, or c
  misc_feature (2340)..(2340): n equals a,t,g, or c
  misc_feature (2343)..(2343): n equals a,t,g, or c
  misc_feature (2350)..(2350): n equals a,t,g, or c
  misc_feature (2355)..(2355): n equals a,t,g, or c
ggatgatcgacgaacagtagacagtattcctgaggaggaagaggaagatgaagaggaagaaggtgaagaggatgaagaaggggatgatggttatgaacaaatttccagtgatgaagatggaattgctgacttggaacgtgaaacatttaagtatccrractttgatgttgaatacactgctgaagacttagcttcagttcctcctatgacatatgatccatatgacagggagcttgtaccactcttatacttcagttgtccatacaagactacttttgaaattgaaatcagtagaatgaaggatcaaggtccagataaagaaaattcaggggcaatcgaagcctcagtgaagttaacagaactcttagatttgtatagagaagatagaggtgcaaaatgggtaacagctttagaagaaattccaagtttaataataaaagggttaagctatttgcaattgaaaaacacaaaacaagactcccttggccagttggtagactggaccatgcaagctttaaatttacaagtagcgcttcgccaacctatcgccttaaatgttcgacagctcaaagctgggaccaaattagtgtcctcactagcagaatgtggggctcaaggagttacaggactgctacaagcaggagtgatcagtggattatttgaacttctgtttgctgatcacgtatcatcttctcttaagttaaatgcttttaaagctttggacagtgtcattagtatgacagaaggaatggaagctttttttaagaggtaggcagaatgaaaaaagtggttatcaaaagcttctggaactcatacttttagatcagactgtgagggttgttactgctggttcagctattctccaaaaatgccatttctatgaagtcttgtcagagattaaaagacttggtgaccatttagcagagaagacttcatctcttcctaaccacagtgaacctgatcacgacacagatgctggacttgagagaacaaacccagaatatgaaaatgaggtggaagcttctatggatatggatcttttggaatcctcaaatataagtgaaggggaaatagaaaggcttattaacctcctagaagaagtttttcatttaatggaaactgcccctcatacaatgatccaacaacctgttaagtctttcccaacgatggcacgaattactggacctccagagagggatgatccataccctgttctctttagatatcttcacagtcatcacttcttggagttggttaccttgcttctgtcaattccagtaacaagtgctcaccctggtgtgctgcaagccacaaaagatgttttgaagtttcttgcacagtcacagaagggtcttcttttttttatgtcggaatatgaagcaacaaatttattgatccgagctctgtgtcacttttatgatcaagatgaggaggaaggtctccaatctgatggtgttattgatgatgcatttgccttgtggctacaggactcaacacagacattgcagtgtattacagaactgttcagccattttcagcgttgtacagccagtgaagaaacagaccattcagatctcttgggaaccctgcacaatctttatttgattacttttaatcctgtgggaagatcarctgktggccatgtttttagtctggagaaaaatctccaaagtcttattactctaatggagtactattccaaagaagccttgggtgattccaaatctaagaantcagtagcttataattacgcatgcatacttattttggtggtggttcagtcttccagtgatgttcaaatgctagaacaacatgcagcatctctcttgaagctttgtaaagcagatgaaaataatgctaaattgcaagaacttggcaagtggcttgaacctctgaaaaaccttagatttgaaattaactgcatcccaaacttaattgagtatgttaagcagaatatcgataacttgatgaccccagaaggagttggccttaccactgccttacgtgttctctgtaatgttgcatgcccaccacctcctgttgaaggtcaacagaaagatctgaaatggaatcttgccgttattcagcttttttctgctgaaggaatggacacgtttattcgagttctgcaaaaattgaacagtattctgactcagccttggaggctccatgtcaacatggggactacccttcacagagttactactatttcaatggctcgctgcacactcactcttcttaaaactatgttaacggaactcctgagaggtggatccttttgagtttaaggacatgcgtagtccttcagcgcttggtctttcatatgcnctgcgctctatnccncttcatngtccntttgg

SEQ ID NO: 576 - DNA, 1213 bp, Homo sapiens
  misc_feature (1157)..(1157): n equals a,t,g, or c
  misc_feature (1169)..(1169): n equals a,t,g, or c
  misc_feature (1201)..(1201): n equals a,t,g, or c
accttcccgggtcgacccacgcgtccgaggcggcagcggttggaggcttcgcccggctttgcagcggggacttcggcggcggcgcctcaggcacctcggcccggacacgatgaggcgagtggtacgacagagcaagtttcggcatgtatttgggcaagcggtgaaaaatgaccagtgctatgatgacatccgggtttctcgtgtgacctgggatagttccttttgtgctgtcaatcccagatttgttgccataatcatagaggcaagtgggggaggagcgttccttgtcctccctctgcacaagactggtcgaattgacaaatcttaccctacagtatgtggccacacaggaccagtgctggacatagactggtgcccacataacgatcaggtcattgccagcggttcagaggactgcacggtcatggtatggcagatcccagaaaatggactcaccctttccctgactgaacctgtggtgattttggaaggccactcaaagagagtcggcatcgtggcttggcatccaacggcccgcaatgtgcttcttagtgcaggctgtgataatgccattatcatctggaatgtgggaacaggggaagcccttataaacttggacgatatgcattcagacatgatttacaatgtgagctggaaccggaatggcagtctgatctgcacagcttccaaagacaagaaagtgagagtcattgatcccaggaaacaagagattgttgctgagaaggagaaagcacatgaaggagcaagacccatgagagccatcttcctggccgatggcaatgtcttcaccactgggttcagccgcatgagcgagcggcagctggctctctggaatccgaaaaatatgcaggaaccaattgctcttcatgagatggacactagcaatggggtgttgctgcctttctatgaccctgacaccagcatcatttacttatgtggaaagggtgacagcagtattcgctattttgagatcacggatgaatccccgtacgtccactacctcaacacattcagcagcaaggagcctcagagagggatgggttacatgcccaagaggggacttgatgttaacaaatgtgagattgccagattcttcaaacttcatgagagaaagtgtgaacctattttaaattttnaatggaaccttngggttttttcccccccccccaaaagggggggnaaaaaaaagggg

SEQ ID NO: 577 - DNA, 2248 bp, Homo sapiens
  misc_feature (2178)..(2178): n equals a,t,g, or c
  misc_feature (2247)..(2247): n equals a,t,g, or c
gtgaagaaatacaaggtgatggccctaagaaggagcgcaccaagcttatcacccctcaggtggccaaactggagcacgcctataagccagtgcaatttgagggctctttgggaaagcttaccgtttctagtgtgaataatccccgaaaaatgattgatgctgttgtgacatctcggagtgaggatgatgagacaaaagaaaaacaagttcgagacaagaggagaaaaacccttgttataattgagaaaacctacagcttactccttgatgtggaggactatgaaagacgttatctcctaagtctggaagaagagcgacctgccctaatggatgacagaaagcacaaaatttgtagcatgtatgacaacttaagggggaaattgcctggacaagagaggcctagtgatgaccactttgtacagatcatgtgtatccgaaaagggaagagaatggttgcccgtattcttcctttcctctccacagagcaagcagctgacattctcatgacaacagccaggaacctccctttccttatcaagaaggatgcacaagatgaggtgctgccatgcttactgagtcccttctctctccttctctatcatcttccatcagtgagtatcaccagccttttgcgacagctaatgaacctacctcaaagtgcagctacaccagcactctccaatcctcacctcactgctgtgctccagaacaagtttggcctgtcactgctcctcatcctcctgagccgtggtgaagacctacagagttcagaccctgctacagaatcaacacaaaataatcagtggacggaggtgatgttcatggcaacacgagaacttctgcggattccccaagcagccctggccaagccaatctctatacctacaaacctagtgtccctcttttctcgctatgttgaccggcagaaactgaacttgctggagacaaaactgcagctagttcaggggatacgataaaagatctccaaatgtgtcctgtacctccttttggctgccacctgcactgctgccatcaccaatggagtgtttttaatgagggaaggaaggtagctttttccccaaagcaaagtcttgtgggatcgattcctgtttacaggggttgtctctctwaatktcagatatttccccactgctctatgaaatttggctgggtgatacttctgctggtttctttaccttctgtgttacagttctgcatgtcctacttttactcagttctgttttgcattttctttgccctagagacacaagtgtaatctctccctttatccctccactactccacctcagagtagattgtagcctgccaaaggattccttccctcatcctattgaagttgttttttcattgccccatattaatatgactatagaagagccaattaagtagaaatcaagatatacacacacacatagatacacacacacacaccccatacatgtatttatgtggtcttcagagggtccttaaagaatgaattttagattgaaaaatatttagttgtctcattacctcttctaaacacaaaccagctgatgtattttaatctgtttctgttctatcttgtaattaatttggtgggttctacttgttttaacataaataaagagtatgcagcacgtttaataaaatcagaactcttaattggcttatgcccaggtctaggctgagaagtcctttttcttcttcccacctttatttccttagtttctgtccaccttaatcgaaacaacacatggttatgtctttttcctgctacaactacagggtacttgagcctttcccctcaagtgcattcgaagtcacccaggatgatcctcactagtagcctgctttggcagtgtggctttttgcacacttgccctgtcttcctgagactacttcagtaagccatgcttccttcttccccacttttatttggtgtcatgaatagaaacttccaaatgtaaccatggaagctaagtttggcctgctttgctttttagtctccacaccatgggcagaactgctgtctttactacttcatctcacccaagtcccgttcccaggcagccaggggcctgggttttgaataattgcagggccagcctgccatgatctttctcamttactcctctcccattcagcaatcaaccagactaaggagttttgatcccnaggattamagccctgaagaaaattaaatctgaattaattttacatggccttcgtgatctttctgctgtnc

SEQ ID NO: 578 - DNA, 1031 bp, Homo sapiens
  misc_feature (307)..(307): n equals a,t,g, or c
gtacgcctgcaggtaccggtccggaattcgcggccgcgtcgacggctgagcaccttttttattaataggtataataaataaataaataaatacataaacagacgcctgggctcctcctccctcttctgatgaccaggcactggccacagcctatttacagctggggggcttagggatctggccccaatactgttacccatcctcatctccacctggcctagggaaccctgtagatggctttctgggccacccgcctccagggggacttgcttgtcttcacccatggaagggttggcccaracgggcnaggggaatcctggcagcccagtgctgtgtcccatccctctcctgggtggaggtctggacaaggtcactgggacagttaagggggcgtaattaatactgagcacagggagcaggtgccagcacagggatacgtggccccagctctcagtctactctgcagccaagccaatggcttgggaagggctctcgggctctgagtctgggggttatgagggtccctgaggccaccagcatgcacagggcctcagttttggctgcttccaggggttggacttggagttggggtcaatgtcacgtagccagggcaccaggccagagtcggggccacgtgcaggcagccagtctcctccagctcgccccagcactcgtaggatgtctcctttgtggaagctcagctgtccaggccggtggccaggtggtggcacagtgcctgcacctcacacggaggactggagggcagggctggggagtgtggctcctgcaggctctccttgggctctggctccggcgggaacccactgtctgcgccactagttggaacatggacttgtccaggctcagccagtccgaggggagcctatttgtgggccgggcctcccgctgggcttttcgggagccaaagagktgtccccacttgatgcctccaggtgaaggctctgaggccccttcctcatttactgctggcgaggcagcgggcccttccctctcccgactgcgcctcagct

SEQ ID NO: 579 - DNA, 793 bp, Homo sapiens
  misc_feature (237)..(237): n equals a,t,g, or c
ctcctagtgaacttggttgatgtgaaggagggtacacaggttttatgctctgggcaatttcacagcagtgcacagtagctcctctgtccctcgtgcatgtgcttctgcttgtcttcagcatgttacaaagatggacccgagttgcaatggttcccatcgctgttctaatgtctccaggtatatctttcttcatacttctccagcataggggaagctttagttcaagcatttcttttnttttttttccaaatgcagaaaaaaagtctttattctcataataaaaataagtctgttctgtattttacaatatatttcaaatatttccactatgaagcattcattagtcccacatggtcaagaagtatacaaccttttccaaagacagagctgccgggagtgtgtttaggacacacacctcgtacagccgcacttcaccactttctcaacctcgtccacaaaggaggagccgtcagtgcattcgaaagagtatttccgccgcttgctcctcagcggtccacagcactgccctcctgcacacccacctctgcactctaatcgggacaccttcttggttgtttgggcaagcaggcatagccctgctgcttttggtaataatctcttatcctttcccctcgacaagagatttctcgatcacagctgtcccccgtgtatccatgctgcattcacagtagggctgccccagacctgaaagcctgcacttccccatgcttgcacttgatcgcctggcatgggttaaacagatcctcctcttcatgcacagaggacacctaca

SEQ ID NO: 580 - DNA, 1906 bp, Homo sapiens
gctcgccaggcgccacgaagccccggcgtcccacaggtcccggaggccgctgcgtcgcggggagctgggctcgggccgccggcggttgcgccggggcagccccgcggggagagcaccatgaggactgactcgggggctcggctggaggagggccacctgcgtcctccacgagctcttccacctgtgccaagtcaagatgatattccacttagtcgtcctaagaaaaagaagcccagaacaaaaaacacaccagcaagtgcttctttggaaggccttgctcagactgctggtcgaaggccctctgagggmaatgagccatcaactaaagaactcaaagagcacccagaggctcctgttcaaagaagacagaaaaagacaaggctacctcttgaattggagacttcctccacccaaaagaagtcatctagttcatctttattacgaaatgaaaatggtattgatgcggagccagctgaggaggcagttattcaaaaacctcggaggaagacaaagaaaacccagccagcagaattacagtwtgccaatgagctaggagtagragrtgaagacatawtcactgatgagcaaactactgtggaacagcagtctgtattcactgcacccactggcattagccagcctgtaggcaaagtatttgtggaaaaaagccggagattccaggctgctgatcgttcagagttgataaagaccacagaaaacatagatgtgtcaatggacgtgaagccttcctggaccaccagagatgtggcacttacagtgcaccgggctttcaggatgattggtctcttttctcatggattcttggctggctgtgctgtgtggaatattgttgtgatatatgttctagcaggagatcagctatccaacctctcaaaccttctgcaacaatacaagaccctagcgtatccattccagagtcttctgtacttgcttttggctctgagtacaatttcagcttttgacaggattgactttgctaaaatatcagtagcaatccgaaattttttggccctggatcctacagctttagcatctttcttgtactttactgctcttatactatctctgagtcagcaaatgacaagtgacagaatccacctttacacaccttcttctgttaatggtagcctctgggaagcaggaattgaggaacagattctccagccatggattgtggtgaatctcgtggtggctcttctggttggattatcttggctatttttgtcttataggccaggcatggatcttagtgaagagttaatgttctcctcagaggtggaagaatatcctgataaagagaaagaaatcaaagcctcttcataataccagctcacctttggaggaataatgacccagtatttgtcccatttttgtttttaaatgtatttttataagatgtatacatgtgtatttgtaatagattttttgattatataatactgaaacatctctcaatattatgaaaaatgttaaaattgtgtttgctgtttatgtctaaacattaatttgtctagcattatcatcttaatgacaaagggaataatgaactagaaaccagcaagtgaaagtgtttatttcctattttctcaaaacagttgtatttataactattaccttaaaaagcactggtttagaaaaagccataacttaaatagtgttataaaatatatatcaggtttaaacataaatttagcgaatatggtagaagggaaaaaagccttcatttttgacctccccttactgaataaattgaaatatgaagtttgtcttttctgaaactggcttagtgattgagtatcatgtaataattataatataatttagcttgaaagatgctctacattatgaccaataaaaagggaatgtatgttttgtttgaaaaatt

SEQ ID NO: 581 - DNA, 1378 bp, Homo sapiens
  misc_feature (1353)..(1353): n equals a,t,g, or c
  misc_feature (1364)..(1364): n equals a,t,g, or c
  misc_feature (1367)..(1367): n equals a,t,g, or c
  misc_feature (1376)..(1376): n equals a,t,g, or c
ggcacagctgggctggccgaagggttggcgctgcgatcccgcasggcagcgacgcgactctggtgcgggccgtcttcttccccccgagctgggcgtgcgcggccgcaatgaactgggagctgctgctgtggctgctggtgctgtgcgcgctgctcctgctcttggtgcagctgctgcgcttcctgagggctgacggcgacctgacgctactatgggccgagtggcagggacgacgcccagaatgggagctgactgatatggtggtgtgggtgactggagcctcgagtggaattggtgaggagctggcttaccagttgtctaaactaggagtttctcttgtgctgtcagccagaagagtgcatgagctggaaagggtgaaaagaagatgcctagagaatggcaatttaaaagaaaaagatatacttgttttgccccttgacctgaccgacactggttcccatgaagcggctaccaaagctgttctccaggagtttggtagaatcgacattctggtcaacaatggtggaatgtcccagcgttctctgtgcatggataccagcttggatgtctacagaaagctaatagagcttaactacttagggacggtgtccttgacaaaatgtgttctgcctcacatgatcgagaggaagcaaggaaagattgttactgtgaatagcatcctgggtatcatatctgtacctctttccattggatactgtgctagcaagcatgctctccggggtttttttaatggccttcgaacagaacttgccacatacccaggtataatagtttctaacatttgcccaggacctgtgcaatcaaatattgtggagaattccctagctggagaagtcacaaagactataggcaataatggagaccagtcccacaagatgacaaccagtcgttgtgtgcggctgatgttaatcagcatggccaatgatttgaaagaagtttggatctcagaacaacctttcttgttagtaacatatttgtggcaatacatgccaacctgggcctggtggataaccaacaagatggggaagaaaaggattgagaactttaagagtggtgtggatgcagactcttcttattttaaaatctttaagacaaaacatgactgaaaagagcayctgtacttttcaagccactggagggaraaatggaaaacatgaaaacagcaatcttcttatgcttctgaataatcaaagactaatttgtgrttttactttttaatagatatgactttgcttccaacatggaatgaaataaaaaataaataataaaagattgccatgaatcttgcaaaaaaaaaaaaaaaaaaattcaagggggggcccgggtcccatnccccctttggngantccttttanaa

SEQ ID NO: 582 - DNA, 772 bp, Homo sapiens
  misc_feature (20)..(20): n equals a,t,g, or c
  misc_feature (56)..(56): n equals a,t,g, or c
  misc_feature (771)..(771): n equals a,t,g, or c
ccgaacgcccagaaaaaagntaaccaggtaaccgccgaaaatagaatcgcccccancagtttcccctggctgccaaatatgaccaattcccgctgcttctatcgccagtactttcgtcgttactgccgggatgttcggcgcaatgagcctgtacggttacaccacgaagcgcgatttaagtggctttggcaatatgctgtttatggcgttaatcggcattgtgctggcatcgctggtcaacttctggttgaaaagcgaagcattgatgtgggcagttacctacatcggcgtgattgtctttgtcggattgacggcgtatgacacgcagaaactgaaaaatatgggtgagcagattgatacccgcgacacgtcgaacctgcgcaaatattccattcttggcgcgttaaccttgtatctggacttcatcaacctgttcctgatgttgttgcggatcttcggcaaccgccgcgaatctgaagagcgtcaacctggtcgctaacttcaataccctgtttgtactggtgcaaatctccatcatggtggtgtttatcttcctggtagttcagggactgcataaaggagaaggcgttggcaccgtctggtcacttcagccgtttatcagcgagaacgcgcacctgatcccgattattaccggggcgacgattgtctgtttctccttcctcggtttcgatgcggtgaccacgctttcgraagagacgccggacgccgcacgcgtgatcccgaaagccatcttcctgacgggggggcccna

SEQ ID NO: 583 - DNA, 1787 bp, Homo sapiens
gcccagatccatctcctaggaaggaccgtcatgacaccccggatccatctcctaggagggcccgtcatgacaccccggatccttctcccctcagaggggctcgtcatgactcagacacatctcctcccaggaggatccgtcatgactcctcagacacttcacccccaaggagggcccgtcatgattctccagatccttctcccccaaggaggcctcagcataattcttcaggtgcatctcctaggagagtccgtcatgattcaccagatccctctcctcctaggcgagcccgtcatggttcctcagatatctcttcccccagaagggtccataacaactcccctgacacatctrggaggactcttggctcttcagacacacagcaactcagaagggcccgtcatgactcccctgatttggctcctaatgtcacttattccctgcccagaaccaaaagtggtaaagccccagaaagagcctctagcaagacttctccacattggaaggagtcaggagcctcccatttgtcattcccaaagaacagcaaatatgagtatgaccctgacatctctcctccacgaaaaaagcaagcaaaatcccattttggagacaagaagcagcttgattccaaaggtgactgccagaaagcaactgattcagacctttcttctccacggcatawacaaagtccagggcaccaggattctgattcagatctgtcacctccacggaatagacctagacaccggagctctgattctgacctctctccaccaaggaggagacagaggaccaaatcttctgattctgacctgtccccgcctcgaaggagtcagcctcctggaaagaagctgcacacatgtattctggggctaaaactgggttggtgttaactgacatacagcgagaacagcaggagctcaaggaacaggwtcaagaaaccatggcatttgaagctgaatttcaatatgctgaaaccgtatttcgagataagtctggtcgtaagaggaatttgaaactcgaacgtttagagcaaaggaggaaagcagaaaaggactcagagagagatgagctgtatgcccagtggggaaaagggcttgcccagagccggcaacagcaacaaaatgtggaggatgcaatgaaagagatgcaaaagcctctggcccgctatattgatgacgaagatctggataggatgctaagagaacaggaaagagagggggaccctatggccaacttcatcaagaagaataaggccaaggagaacaagaataaaaaagtgagacctcgctacagtggtccagcacctcctcccaacagatttaatatctggcctggatatcgctgggacggagtggacagatccaatggatttgaacagaagcgctttgccaggcttgccagcaagaaggcagtggaggaacttgcctacaaatggagtgttgaggatatgtaactttcctgaggctgtgggggtggctgggctgtggtagtgggcataggcagcgagatatccagtggtaacagttgtctgtgctaataattggagcccacacagaccagcaacttgttgaatgccasttttgaccacagaagaatattcgagacctgatgtttggactgaggtacctgtacttcttgggtgtgacagcaccggctgttgctggctttcagaggaagcattgatttctcattgaccagggtttgttcttggtagggtttttctttttcttttttaaataaacatgtatttatttttttaaaaaaaaaaaaaaaaaaaaamtcga

SEQ ID NO: 584 - DNA, 1125 bp, Homo sapiens
ttttttttgcacttcgcccacacaggacagtggagccccacctggtcagttccacttccgggctcccatgcacttgcccaaggcggcctctttgggacggggatggtttgaggaaacacttttaaagaaaaaaggaagacattgaaaggttttagtttcttccctatctgcatgtcctctcatatagaaagcccagaattaggggctagaactccaggagagggtctccccgactcatctcttgctgacggtcaccaggatgcagaaatagggagatggttagtgggggccaaagatgccccctcccaggccttcgtggttccctcctccgccccctgcaatctttggaggagtcagtgcctcactccagcagtgagtgcctactgtatgcaggtagtcagccaggcaaagagagactaacggtctcatgggggaaccctcttgcgggaggccaggtagctggagcgaagcgttccggctgcccttgctgctgggtggagtggagagggagacttctttttgttggttttaatttaaaaacacaaaggcctaaagaaatacgtatcttataatttttttaatttttgagacgttcatttaatgaattgtgcacgaatgaattctatatatataaaatatacatatatagctctatatttggggaggggcactgtctcttttttctctcatttttaaaatgaagtgttgttgcctttgtatgtggttcaaccatccagctcccagctggctaaactttgcctccagtggtcaaagatgggaaaagagtggggttggcaggagatggaaaacggaggtgccgccccagcatggggggcaggtcccccagtccaccctgcccctccccctgtggagaagacgcttagttgggggtgtgggtttgggctccattctggattcggcggttccgggggaggggtgggtctgtgccgattactctgtcttgtacgtttgttctgctgctcttcaatattgtatcaacgccaggaaaggggggtgaaaagcctcttttaccccccaaataaattgtcacattccgaagctgaaaaaaaaaaaaaaaaaaaaaaaaaaaaaaaaaaaaaaaaaaaaaaaaaaaaaggggggggc

SEQ ID NO: 585 - DNA, 2043 bp, Homo sapiens
  misc_feature (2035)..(2035): n equals a,t,g, or c
  misc_feature (2037)..(2037): n equals a,t,g, or c
gggggagcgcgcgcgccgccgccgttgccgccgggctgagagaagagcttgcggggtttgcggttgatggccccgactgaagggctggaggcggtgtatgccgctgttcttgctgtcgctcccgacacctccgtccgcttctggtcatgagaggagacagaggcctgaagcaaagacatctgggtcagagaaaaagtatttaagggccatgcaagccaatcgtagccaactgcacagtcctccaggaactggaagcagtgaggatgcctcaacccctcagtgtgtccacacaagattgacaggagagggttcttgccctcattctggagatgttcatatccagataaactccatacctaaagaatgtgcagaaaatgcaagctccagaaatataaggtcaggtgtccatagctgtgcccatggatgtgtacacagtcgcttacggggtcactcccacagtgaagcaaggctgactgatgatactgccgcagaatctggagatcatggtagtagctccttctcagaattccgctatctcttcaagtggctgcaaaaaagtcttccatatattttgattctgagcgtcaaacttgttatgcagcatataacaggaatttctcttggaattgggctgctaacaacttttatgtatgcaaacaaaagcattgtaaatcaggtttttctaagagaaaggtcctcaaagattcagtgtgcttggttactggtattcttagcaggatcttctgttcttttatattacacctttcattctcagtcactttattacagcttaatttttttaaatcctactttggaccatttgagcttctgggaagtatttkggattgttggaattacagacttcattctgaaattctttttcatgggcttawaatgccttattttattggtgccttctttcatcatgccttttaaatctaagggttactggtatatgcttttagaagaattgtgtcaatactaccgaacttttgttcccataccagtttggtttcgctaccttataagctatggggagtttggtaacgtaactagatggagtcttgggatactgctggctttactctacctcatattaaaacttttggaattttttgggcatctgagaactttcagacaggttttacgaatattttttacacaaccaagttatggagtggctgccagcaagagacagtgttcagatgtggatgatatttgttcaatatgtcaagctgaatttcagaagccaattcttctcatytgtcagcatatattttgtgaagagtgcatgaccttatggtttaacagagagaaaacatgtccactctgcagaactgtgatttcagaccatataaacaaatggaaggatggagccacttcatcacaccttcaaatatattaagttgtataaactatcaaggccacaaaatactaatgtcatttggtcataatgactactgataaggcatcagaatggattttcagggctaccagaaaaatgtttccagatggttttagaatgtaggacttatgatccaattcaccaaaagattaaatgaaaccaccctgtgttttaaaatatatataatgttcaacctaatgtatatgcaacatttattctattctaattatttgacaggtaactgcagtgttaaattgtaaatgtgttttctttatgttaccaaaacagcaatttgaaattagaactagtggttttagagaactcaggtattctttcctgacattgttttcagaataaagaatatttttcataatattttaagatacatactatctaaaagtagaattttgttcagcattgacttttataattcccatcctaaaaattcttaatattttcataaaatttgtatttttaaatgaaaattctaaatgttgtattttatcagtaacattttctaagtgaagattaatttactgaggatgatacattatagtattgtattattctctgtagtaagattagtaataagtgaaaataaatgatttaaattcaaaaaaaaaawaaaantnactcga

SEQ ID NO: 586 - DNA, 2898 bp, Homo sapiens
  misc_feature (2893)..(2893): n equals a,t,g, or c
  misc_feature (2897)..(2898): n equals a,t,g, or c
cattcttccccctcaaagggcgccaaatctgtacatggtcccccaggggatcaggcctgtggtccagctcactgccattgagattctagcttggggcttaagaaatatgaaaaacttccagatggcttctatcacatcccccagtcttgttgtggagtgtggaggagaaagggtggaatcggtggtgatcaaaaaccttaagaagacacccaactttccaagttctgttctcttcatgaaagtgttcttgcccaaggaggaattgtacatgcccccactggtgatcaaggtcatcgaccacaggcagtttgggcggaagcctgtcgtcggccagtgcaccatcgagcgcctggaccgctttcgctgtgacccttatgcagggaaagaggacatcgtcccacagctcaaagcctcccttctgtctgccccaccatgccgggacatcgttatcgaaatggaagacaccaaaccattactggcttctaagctgacagaaaaggaggaagaaatcgtggactggtggagtaaattttatgcttcctcaggggaacatgaaaaatgcggacagtatattcagaaaggctattccaagctcaagatatataattgtgaactagaaaatgtagcagaatttgagggcctgacagacttctcagatacgttcaagttgtaccgaggcaagtcggatgaaaatgaagatccttctgtggttggagagtttaagggctcctttcggatctaccctctgccggatgaccccagcgtgccagcccctcccagacagtttcgggaattacctgacagcgtcccacaggaatgcacggttaggatttacattgttcgaggcttagagctccagccccaggacaacaatggcctgtgtgacccttacataaaaataacactgggcaaaaaagtcattgaagaccgagatcactacattcccaacactctcaacccagtctttggcaggatgtacgaactgagctgctacttacctcaagaaaaagacctgaaaatttctgtctatgattatgacacctttacccgggatgaaaaagtaggagaaacaattattgatctggaaaaccgattcctttcccgctttgggtcccactgcggcataccagaggagtactgtgtttctggagtcaatacctggcgagatcaactgagaccaacacagctgcttcaaaatgtcgccagattcaaaggcttcccacaacccatcctttccgaagatgggagtagaatcagatatggaggacgagactacagcttggatgaatttgaagccaacaaaatcctgcaccagcacctcggggcccctgaagagcggcttgctcttcacatcctcaggactcaggggctggtccctgagcacgtggaaacaaggactttgcacagcaccttccagcccaacatttcccagggaaaacttcagatgtgggtggatgttttccccaagagtttggggccaccaggccctcctttcaacatcacaccccggaaagccaagaaatactacctgcgtgtgatcatctggaacaccaaggacgttatcttggacgagaaaagcatcacaggagaggaaatgagtgacatctacgtcaaaggctggattcctggcaatgaagaaaacaaacagaaaacagatgtccattacagatctttggatggtgaagggaattttaactggcgatttgttttcccgtttgactaccttccagccgaacaactctgtatcgttgcgaaaaaagagcatttctggagtattgaccaaacggaatttcgaatcccacccaggctgatcattcagatatgggacaatgacaagttttctctggatgactacttgggtttcctagaacttgacttgcgtcacacgatcattcctgcaaaatcaccagagaaatgcaggttggacatgattccggacctcaaagccatgaacccccttaaagccaagacagcctccctctttgagcagaagtccatgaaaggatggtggccatgctacgcagagaaagatggcgcccgcgtaatggctgggaaagtggagatgacattggaaatcctcaacgagaaggaggccgacgagaggccagccgggaaggggcgggacgaacccaacatgaaccccaagctggacttaccaaatcgaccagaaacctccttcctctggttcaccaacccatgcaagaccatgaagttcatcgtgtggcgccgctttaagtgggtcatcatcggcttgctgttcctgcttatcctgctgctcttcgtggccgtgctcctctactctttgccgaactatttgtcaatgaagattgtaaagccaaatgtgtaacaaaggcaaaggcttcatttcaagagtcatccagcaatgagagaatcctgcctctgtagaccaacatccagtgtgattttgtgtctgagaccacaccccagtagcaggttacgccatgtcaccgagccccattgattcccagagggtcttagtcctggaaagtcaggccaacaagcaacgtttgcatcatgttatctcttaagtattaaaagttttattttctaaagtttaaatcatgtttttcaaaatatttttcaaggtggctggttccatttaaaaatcatctttttatatgtgtcttcggttctagacttcagcttttggaaattgctaaatagaattcaaaaatctctgcatcctgaggtgatatacttcatatttgtaatcaactgaaagagctgtgcattataaaatcagttagaatagttagaacaattcttatttatgcccacaaccattgctatattttgtatggatgtcataaaagtctatttaacctctgtaatgaaactaaataaaaatgtttcacctttaaaaaaaaaacanactnn

SEQ ID NO: 587 - DNA, 2209 bp, Homo sapiens
  misc_feature (38)..(38): n equals a,t,g, or c
gcgcaaatgcttgtgccaagcaatatgcgggaactggngccttgaagactgactttaccagaactggaaagagaactcatttgggacttataatggatggctggaactcaatgatacgatattataagaacaacttttccgatggatttagacaagattccatagacttatttcttggaaactattcagtggatgaattagaatctcatagtcctttaagtgttccaagggactggaaattcctggctttgcctattatcatggttgttgccttttcaatgtgcattatctgtttgcttatggctggtgacacttggacagaaacactggcctatgtgctcttctggggagttgcaagcattggaacattttttatcattctttacaatggcaaagattttgtcgatgctcccagactggtccagaaagaaaagatagactgaatttgtatttgtggaaagcggcttggcttggaagattccattgtgcagaactggagtctttactgacccgctttccacatcagcccaaggtctttttaatgcctttatccaaaagcacatcttgtgctccatgcaggatgatgacagaattgatctgatgttactgccttgatggtctctttactattgggacagttagatttataatttgaagctattctgtaattaaaatataacctgaattcagcttgcagaatggaagctgaatctgttcattgtattctattgattgtcaatttaattagctgttgcagaataagtaatatattttaaaaacctagctcctttcattatttaaaacagcaaaattatttttgtagctcagtttcattattgtcattgtagaagcggtcactattagcaggcatacttttccacacatctttggacttttcttaaaagttcagtaataagctaactgtgtttataaaatgtaagtctcttacagacatcaagtagtttgatgagacagtctgtgacttcatgataggaaagaggaggatgaggtctggggttctttaaagtctctggtgggctgcctcatgactttaatcagcttgaactgccagtgcaccagcagtttaggtgtgatgagagaattcagatatactttatctttttaaaaaagtgtaaataaaatcaaagaatgtaaagtctatctcttacgctagaggtccaaagctgcctctgttttaaagattatcccaatgtggaagatgcccatgactggtcagctacttcctcctatacattttggtttctttgagggtcactcattgagacacgcaggcctctgagagggtcttgttctagatttcatattgcacttggagggtaacagctgctttttcacgcatggtactcttgatgtttttcactctgtcaaggattttgttggctatcaatgaatgtgtctaaaacttagtgcttccaggtagttatagtactccaaatcaaggaccaacttaaacgttaatttttgtgcaaaaacaaacctgaaaaatatgcttcggaaactgtgcatagttctaattgtaagtcagattgtatattcaaattgtaattaagagatttaaatattagaacggtatgtaaggtagtataattaccactattttaaaacaattcagttaaacactgctgcaatatttcagtgttgtgcttgaaaatatgtacagtttttttccaatattaataccttatgttgtccttaaatatttctaaaagcgcctttatttcagcattacctttttttcatcactatcttttataaaacattaatataagtcgttacttttagaaactaaaggaaataatagctggaaaaccctctgtagtttaaaatcagtcattaaactcacaatagggtaagtaaatatagccacctgttaacatgtaaataagcataatttgttccaaagatggaatattgaaacttagttcatgtctgctgtaaaatattatttaaatgctgctgggcatttcacttaaagaacttaatgtcaacagctacaacaaagaccaaatctgaactgctaatgtggctgctttgtagggaatggactaatatcagtgtgttagatcttaaggtatcagtatttcagaatcctgcgacgattttatttctaaattcatgtactgtatgtccataagtgaaaataaaatgtcatattcttttcwaaaaaaaaaaaaaaaaaaaaaattac

SEQ ID NO: 588 - DNA, 320 bp, Homo sapiens
  misc_feature (24)..(24): n equals a,t,g, or c
  misc_feature (304)..(304): n equals a,t,g, or c
  misc_feature (309)..(309): n equals a,t,g, or c
cccagggcattgatgattccaganaaagacaaccggggcacccaagatgccctgaaccctgaggatgaggtggatgagttcctgagccgtgccatcgatgcccgcagcattgatcagctgcggaaggaccatgtgcgccggtttctgctcaccttccagagagaggatcttgagaagaagtactcccggaaggtggatccccgcttcggagcctacgttgcctgtgccctgttggtcttctgcttcatctgcttcatccagcttctcatcttcccacactccaccctgatgcttggggatctangccancaatcttcctg

SEQ ID NO: 589 - DNA, 2078 bp, Homo sapiens
  misc_feature (2073)..(2074): n equals a,t,g, or c
cccacgcgtccggtaccgacccggcagaagctcggagctctcggggtatcgaggaggcaggcccgcgggcgcacgggcgagcgggccgggagccggagcggcggaggagccggcagcagcggcgcggcgggctccaggcgaggcggtcgacgctcctgaaaacttgcgcgcgcgctcgcgccactgcgcccggagcgatgaagatggtcgcgccctggacgcggttctactccaacagctgctgcttgtgctgccatgtccgcaccggcaccatcctgctcggcgtctggtatctgatcatcaatgctgtggtactgttgattttattgagtgccctggctgatccggatcagtataacttttcaagttctgaactgggaggtgactttgagttcatggatgatgccaacatgtgcattgccattgcgatttctcttctcatgatcctgatatgtgctatggctacttacggagcgtacaagcaacgcgcagcctggatcatcccattcttctgttaccagatctttgactttgccctgaacatgttggttgcaatcactgtgcttatttatccaaactccattcaggaatacatacggcaactgcctcctaattttccctacagagatgatgtcatgtcagtgaatcctacctgtttggtccttattattcttctgtttattagcattatcttgacttttaagggttacttgattagctgtgtttggaactgctaccgatacatcaatggtaggaactcctctgatgtcctggtttatgttaccagcaatgacactacggtgctgctacccccgtatgatgatgccactgtgaatggtgctgccaaggagccaccgccaccttacgtgtctgcctaagccttcaagtgggcggagctgagggcagcagcttgactttgcagacatctgagcaatagttctgttatttcacttttgccatgagcctctctgagcttgtttgttgctgaaatgctactttttaaaatttagatgttagattgaaaactgtagttttcaacatatgctttgctrgaacactgtgatagattaactgtagaattcttcctgtacgattggggatataaygggcttcactaaccttccctaggcattgaaacttcccccaaatctgatggacctagaagtctgcttttgtacctgctgggccccaaagttgggcatttttctctctgttccctctcttttgaaaatgtaaaataaaaccaaaaatagacaactttttcttcagccattccagcatagagaacaaaaccttatggaaacaggaatgtcaattgtgtaatcattgttctaattaggtaaatagaagtccttatgtatgtgttacaagaatttcccccacaacatcctttatgactgaagttcaatgacagtttgtgtttggtggtaaaggattttctccatggcctgaattaagaccattagaaagcaccaggccgtgggagcagtgaccatctgctgactgttcttgtggatcttgtgtccagggacatggggtgacatgcctcgtatgtgttagagggtggaatggatgtgtttggcgctgcatgggatctggtgcccctcttctcctggattcacatccccacccagggcccgcttttactaagtgttctgccctagattggttcaaggaggtcatccaactgactttatcaagtggaattgggatatatttgatatacttctgcctaacaacatggaaaagggttttcttttccctgcaagctacatcctactgctttgaacttccaagtatgtctagtcaccttttaaaatgtaaacattttcagaaaaatgaggattgccttccttgtatgcgctttttaccttgactacctgaattgcaagggatttttatatattcatatgttacaaagtcagcaactctcctgttggttcattattgaatgtgctgtaaattaagtcgtttgcaattaaaacaaggtttgcccacawaaaaaaaaaaaaaaaaaaaaaaaaaaaaaaaaaaaaaaaaaaaaaaaaaaaaaaaaaaaaaaaaaaaaaaaannaaaa

SEQ ID NO: 590 - DNA, 1623 bp, Homo sapiens
ttttttttttttttttttttttttttttgccaaagctggctaagggaatatttttattyttctgagggcagttaaggcttytgataaggaaagagagtctgaacagagcacacacatytggagctccaggagtgggggatgcagcatcarattccatcttgaatttctgctaaaatactttgtactcataatggatctcaacaaaratctgtatttcatctgkggctccatcttccctctgggtcaagtagatgttaagctggaccttggcacgcctcttaacatgaagagatctagctagacagacagactcccccatttatggaacaagaattcaatttattctctatttataaaacatttttttaaagtgccttgggtataaaaatctaaatgtctgcggtgtgatcagtcaggagcacgtaactatcactcttcgcatcctttggtcactgggagatcctttgggggctgggaggtccttctgtcccaggctaaaggaaaagcttcacaagggtaagagccacagaaccctcggcaagaaaggccggtcagggagaatgaatggtacagagaggaaaggaaggaaagggggtggaacagaggtagaaggcaaggaagggatgccgcactggagaccgatggggacactctaattgtgcaagagggaggatcttccttcttgaatgctgaacacagctagtctgaaccttccttggaaagtccagctgtttgcccatgcatagggccaactctccctgcaaagcagcaaatgtggcttctatcaggaaggaaaagtatccatcagtgtgacaagaggtcaccttcgaacttgcatgaactccttgcgcagccacaaagagtcctggtagaagtgaggatcgcctagtcttacggctgtccgtttatagaagtagcagtacaacactgctgctagtctctggaatacaaacagcatttgaagtccatctgtccatatgaagctgttggagtttttccagcgtaagttcatgacccagacatgaagggagatgctgagggcaaagtacacagctgtcaggatgatggtccctttgaacttatggaataggaggttgaccaggccagcctggaagacgaaggtgttgaagaacatgaggaaaatgatgatgatgttgaagaggactgcaatatcctggatgatgaagagcacaagctggatgacaggagtcttttggagcagttctgagaaggaattgacaaagaggtcataggacagcagcaggaactgcagagagagcaccaggctgtagttactggtctggagcatcttccttctgttttctcgggcccccaagggcacatcccacagttcccagaaaaccgctcctggctgtctccctaccactgagggagaggcttctagttcctttgaatgagagctgtttcccttgctctaaggcaagcacctccaaactccaacgtcggttgtcatgcggacatcgtcccggcttccggaagccggctttaaattccggaagtaaatggaggaggcgggccccgtctgcgccgtgcggcctgctagtccccggctttctcttcccgctctatggccagtctggccgccatgttggagctttcgcc

SEQ ID NO: 591 - DNA, 630 bp, Homo sapiens
  misc_feature (554)..(554): n equals a,t,g, or c
  misc_feature (558)..(558): n equals a,t,g, or c
  misc_feature (608)..(608): n equals a,t,g, or c
  misc_feature (611)..(611): n equals a,t,g, or c
  misc_feature (615)..(615): n equals a,t,g, or c
ggtgcaggtgtaaaccctgtgccttgtaactgcaaccctcccgtgcccacggtatcttccagaggacgagaacaagccgtaagaaagagcgaaaaggaaaggatgagagaataccaacgagaactagaagaaagagaagaaaaattaaaaaagaggccactgctatttgaaagagttgctcagaaaaatgcaagaatggcagcagaaaagcattattctaataccctaaaagcactaggaatatctgatgagtttgtttcaaagaaaggccaaagtggaaaagtacttgagtacttcaacaatcaagagacgaaaagtgtcactgaagacaaagaaagctttaatgaagaagaaaaaatagaagaaagagagaatggggaagaaaattattttattgataccaacagccaggattcttacarggaaaargwtgaasccaatgaggaaagtgaagaagagaaatctgktgaagaatcmcactgratcatyaaggtcttctctctatgcccttgctggtggttgcagcgtcagggtgtcagcagccgcatttgggnttanaacatctgtggggaccttttgatatgtgcagggctggtgatcaaggcatntgnaccngaaaaagctgaatcc

SEQ ID NO: 592 - DNA, 487 bp, Homo sapiens
  misc_feature (464)..(464): n equals a,t,g, or c
ggcacgaggcgcgccaaggcgtcagtcgaggagtcaaggcagcaatgaatcgtgtcttgtgtgccccggcggccggggccgtccgggcgctgaggctcataggctgggcttcccgaagccttcatccgttgcccggttcccgggatcgggcccaccctgccgccgaggaagaggacgaccctgaccgccccattgagttttcctccagcaaagccaaccctcaccgctggtcggtgggccataccatgggaaagggacatcagcggccctggtggaaggtgctgcccctcagctgcttcctcgtggcgctkatcatytggtgctamctgaggraggagagcgaggcggaccagtggttgagacaggtgtggggagaggtgccagagcccatgatcgttctgaggagcctgagaytccagctgctacagagcgagaayttgacggggtgcccgctggggctgcangaagggagcccgacagccgcctt

SEQ ID NO: 593 - DNA, 1467 bp, Homo sapiens
ctaatccctggccctcccagctgtctgggacttcagtggacccccagcccctgcccccactcaccaaggcctcgctcgtccctctcgtctgacatgtctgtgtgcacccccctcctctccaccctaccttccatcaaccagggcagatccaccgtgccctggttccccagacattccagaatgccccacatcattggcacaggagtggggcagccccggaaggaaccagggattaggctgtaggggggtgagaaggagagaagggaccaccccattcttctcaagcaaggattgccagcgcgcgctgacacagtgatgggctgcccagggctggaggggacgctgttcctcccgccgccactgcccaacctttcctgataatcgtggcatgcgccctttcctcttccctgccccaccccctggccgcagcaggycagcactgcagagtttgggtgctggtggtgtggctgtaggggaggggagaccacacccaaggtgggggctgtggccatgtgtggccgtgatgtcgatgatactcgttttccctgatccgtggtgttgcagtccgttgtcaccagccttgtttctagtgtgtatatatgtcgcccccgtgatgcatatatacacaggtattaaatatatcgctctatataatattatatatgtgtgtggtatccaaggaatcacttttatgagggctaaagataaagaatttggccagaaaatgcagccatccttgtgtgattaggagggtttcaggggccactggactatttgcaaggtgacagggactggagccatggctcagaggtgattcgggcagccagggacaggagccaccctccccaggcccaactctgctagcttcccagaccacccccatcgagtgcggagagagtgggagtgctcagggaaagaaggtgatttgtatttgtctccccgctgaaaagaacaggattcaagtccagagttttcatcttcagcctgtgatctgtccagggacccttgggatctggggcttcctggcctggccagagctggagcccccacagggtaaggaagagagagtgggaggcagagtgtgatggggaggagggacaggaagacccttttaatgatgagggtaactatttcagttgtgagccttctagggccccaggctgggaggctcagaggactgaatctgggacctgtgttccccccggcaggcagggacaagatggcatggcaagcatgggggcggggtgggtggggagggatgctgcatttctcagctgggcagtaatcaatttaatggtcctttaaaatgtctgtgtattaaaaatttaagaataccacactttaatattaaatattcataaggtctagtatcttgataataatgtagatgttttaataacaatttttgtccttcttaaaataaaatgaaagaaacttgcaaaaaaaaaaaaaaaaaaaaaaactcga

SEQ ID NO: 594 - DNA, 926 bp, Homo sapiens
ggagggtgcctcccagggccatctgacatggatgtgtatgtcctcctttgtggacacacaaggaggatcctttgtgttgccaggtttggtgtgagtgagccacgaacaggactggagttcttaccgcttgctgtgtttcttccctagaaaggagcgagtgggactgtgctgctggccggctcctctttgatggcttcaccctacaaatccagcagcccaaagctgtctggggccatgagctcgaactccttgggaattataacccctgtccctattcctgtccatgtgctctccttcagcgctgactcctctgccaaagcaggggtctccaaggatgccatcgtcacaggccctgcccccgggtccttccaccatggccttggcacagtcttctggctggcttgcactccagcccgccccatgcagcgcctctcccacacgctgcggtgcccacccatatcccgcagagtctgccaggtgcttctcagcttcacgggaaagggcctgctgtaccacggaaattgtgaccgcttcagaggcaaggsttgccamttgggtctgggtggaatcagaacgtgcaggtctcccaggatgtacactcactgcgccctttctgctgcttggtgttcttctggaggagcgtgagttctcagcggagcgcttctcggcacttctgatgtgcctcccatggagggagccgggcccttgctgctcaggaggtgcagactgccccgtgctctgggccttgcagctctgtcgctagacggttgttagaggggcagctctaggctggggcttgcgctgggccgtggtgggaggcacagtgtttacaggctctggtggcagagcagttggcacacctgtgggtgaatytgcctgatcccctggcatttggtcagagtacctcagagcaccccactgctcag

SEQ ID NO: 595 - DNA, 787 bp, Homo sapiens
gggccggaaggaagccggggagacaggtggggtactcgggaagctggagcgggccggcggtgcagtcacgggggagcgaggcctgctgggcttggcaacgagggactcggcctcggaggcgacccagaccacacagacactgggtcaaggagtaagcagaggataaacaactggaaggagagcaagcacaaagtcatcatggcttcagcgtctgctcgtggaaaccaagataaagatgcccattttccaccaccaagcaagcagagcctgttgttttgtccaaaatcaaaactgcacatccacagagcagagatctcaaagattatgcgagaatgtcaggaagaaagtttctggaagagagctctgcctttttctcttgtaagcatgcttgtcacccagggactagtctaccaaggttatttggcagctaattctagatttggatcattgcccaaagttgcacttgctggtctcttgggatttggccttggaaaggtatcatacataggagtatgccagagtaaattccatttttttgaagatcagctccgtggggctggttttggtccacagcataacaggcactgcctccttacctgtgaggaatgcaaaataaagcatggattaagtgagaagggagactctcagccttcagcttcctaaattctgtgtctgtgactttcgaagttttttaaacctctgaatttgtacacatttaaaatttcaagtgtactttaaaataaaatacttctaatggaacaaaaaaaaaaaaaaaaaaaaaactcga

SEQ ID NO: 596 - DNA, 1603 bp, Homo sapiens
  misc_feature (477)..(477): n equals a,t,g, or c
gaagccctcatggcaacactaaccaccacccaaacgtcaccgtcgctgcttggcggcgtggtgattatcggcggcaccattattggcgcagggatgttttctctgccagtggtcatgtccggggcgtggtttttctggtcaatggcggcgctgatctttacctggttctgtatgctgcattccggcttgatgattctggaagctaacctgaattacagaatcggttcgagttttgacaccatcaccaaagatttgctgggcaaaggctggaacgtggtcaacggcatttccattgcctttgtgctctatatcctgamctatgcctatatttctgccagtggttcgattctgcatcacaccttcgcagagatgtcactaaacgtcccggcacgggcggcgggttttggttttgcattgctggtagcgtttgtggtgtggttgagcactaaagccgtcagtcgcatgacagcgattgtnctgggggcgaaagtcattaccttcttcctcacctttggtagcctgctggggcatgtgcagcctgcgacattgttcaacgtcgccgaaagcaatgcgtcttatgcaccgtatctgttgatgaccctgccgttctgtctggcatcgtttggttatcacggtaacgtgccaagcctgatgaagtattacggcaaagatccgaaaaccatcgtgaaatgtctggtgtacggtacgctgatggcgctggcgctgtataccatctggttgctggcgacgatgggtaacatcccgcgtccggagtttatcggtattgcagagaagggcggtaatattgatgtgctggtacaggcgttaagcggcgtactgaacagccgtagtctggatctgctgctggtcgtgttctcaaactttgcggtagcgagttcgttcctcggcgtaacgctgggtttgtttgactatctggcagatctgtttggtttcgacgactcggctgtgggccgcttgaaaacggcattgctgacctttgccccgccagttgtgggggggctgttgttcccgaacggattcctgtacgccattggttatgctggtttagcggctaccatctgggcggcaattgttccggcgctgttagcccgtgcatcgcgtaaacgctttggcagcccgaaattccgcgtctggggtggcaagccgatgattgcgctgattctggtgtttggcgtcggcaacgcactggtgcatattttatcgagctttaatttactgccggtgtatcagtaatcagcggtgccttatccgacatttctgctgcctacacaatgcctgattgcgttcgcttatcaggtctatgtaggacagcgttgccagctcggataaggcttcccgcgttaagacacactatcccaacaactcttccttaacatccatcgccagctcaaacgaatgcagccgcgcctggtggtcgaaaatctgcccgttgaccataatctcatcggcgtcggtttcgcgcaggatcgactgcaagccatgacgcactttcgctttatcacctaccaacgacatactcagcgcctgctgcacgccatactgctcagacggtgaccagaactgatccatattttgaatcggc

SEQ ID NO: 597 - DNA, 2150 bp, Homo sapiens
gcggacgcgtgggtcgacccacgcgtccggtttgacccgtcggtcgtgcgtgagaggaaagggaaggaggaggtcccgaatagcggtcgccgaaatgttccggtgtggaggcctggcggcgggtgctttgaagcagaagctggtgcccttggtgcggaccgtgtgcgtccgaagcccgaggcagaggaaccggctcccaggcaacttgttccagcgatggcatgttcctctagaactccagatgacaagacaaatggctagctctggtgcatcagggggcaaaatcgataattctgtgttagtccttattgtgggcttatcaacagtaggagctggtgcctatgcctacaagactatgaaagaggatgaaaaaagatacaatgaaagaatttcagggttagggctgacaccagaacagaaacagaaaaaggccgcgttatctgcttcagaaggagaggaagttcctcaagacaaggcgccaagtcatgttcctttcctgctaattggtggaggcacagctgcttttgctgcagccagatccatccgggctcgggatcctggggccagggtactgattgtatctgaagatcctgagctgccgtacatgcgacctcctctttcaaaagaactgtggttttcagatgacccaaatgtcacaaagacactgcgattcaaacagtggaatggaaaagagagaagcatatatttccagccaccttctttctatgtctctgctcaggacctgcctcatattgagaatggtggtgtggctgtcctcactgggaagaaggtagtacagctggatgtgagagacaacatggtgaaacttaatgatggctctcaaataacctatgaaaagtgcttgattgcaacaggaggtactccaagaagtctgtctgccattgatagggctggagcagaggtgaagagtagaacaacgcttttcagaaagattggagactttagaagcttggagaagatttcacgggaagtcaaatcaattacgattatcggtgggggcttccttggtagcgaactggcctgtgctcttggcagaaaggctcgagccttgggcacagaagtgattcaactcttccccgagaaaggaaatatgggaaagatcctccccgaatacctcagcaactggaccatggaaaaagtcagacgagagggggttaaggtgatgcccaatgctattgtgcaatccgttggagtcagcagtggcaagttacttatcaagctgaaagacggcaggaaggtagaaactgaccacatagtggcagctgtgggcctggagcccaatgttgagttggccaagactggtggcctggaaatagactcagattttggtggcttccgggtaaatgcagagctacaagcacgctctaacatctgggtggcaggagatgctgcatgcttctacgatataaagttgggaaggaggcgggtagagcaccatgatcacgctgttgtgagtggaagattggctggagaaaatatgactggagctgctaagccgtactggcatcagtcaatgttctggagtgatttgggccccgatgttggctatgaagctattggtcttgtggacagtagtttgcccacagttggtgtttttgcaaaagcaactgcacaagacaaccccaaatctgccacagagcagtcaggaactggtatccgatcagagagtgagacagagtccgaggcctcagaaattactattcctcccagcaccccggcagttccacaggctcccgtccagggggaggactacggcaaaggtgtcatcttctacctcagggacaaagtggtcgtggggattgtgctatggaacatctttaaccgaatgccaatagcaaggaagatcattaaggacggtgagcagcatgaagatctcaatgaagtagccaaactattcaacattcatgaagactgaagccccacagtggaattggcaaacccactgcagcccctgagaggaggtcgaatgggtaaaggagcatttttttattcagcagactttctctgtgtatgagtgtgaatgatcaagtcctttgtgaatattttcaactatgtaggtaaattcttaatgttcacatagtgaaataaattctgattcttctaaaaaaaaaaaaaaaaaaaaaaaaaaa

SEQ ID NO: 598 - DNA, 1495 bp, Homo sapiens
  misc_feature (968)..(968): n equals a,t,g, or c
  misc_feature (1461)..(1461): n equals a,t,g, or c
  misc_feature (1469)..(1469): n equals a,t,g, or c
  misc_feature (1492)..(1492): n equals a,t,g, or c
gctcgtgccgaattcggcacgagcaggatccgggcagggccgagtgtgagggtccccccaggctgggacatctcgtcgctgaacctggccgaggcgatgcggcgcgcgaaggtgctggactgggggctgcaggagcaactgtggccgcacatggaggccctgcggccccggccttctgtttacatccccgaattcatcgcggccaaccagagcgcgcgcgcggacaacctcatcccaggctcgcgtgcgcagcagctggagcagatccgcagggacatccgagacttccggtctagcgcggggctggacaaagtcatagtgctgtggacggcgaacacggagcgcttctgtgaggtgattccaggcctcaacgacacagccgagaacctgctgcgcaccattgagctcggtctggaggtgtcgccctccacgctcttcgccgtggccagcatcctggagggctgtgccttcctcaatgggtctccgcagaacaccctggtgcccggagctcttgagctcgcgtggcagcaccgggtttttgtgggcggagatgacttcaagtcaggccagaccaaagtcaagtccgtgcttgtggacttcctcattggctccggcctcaagaccatgtccatcgtgagttacaaccacctgggcaacaacgatggggagaacctrtcggcgccattgcagttccgctctaaggaggtgtccaagagcaacgtggtggacgacatggtgcagagcaacccagtgctctatacgcccggcgaagagcctgaccactgcgtggtcatcaagtatgtgccgtacgtgggtgacagcaagcgcgcgctggatgagtatacctcggagctgatgctgggcggaaccaacacactggtgctgcacaacacgtgtgaggactcgctgctggccgcacccatcatgctggacctagcgctgctgaccgagctgtgccagcgcgtganctttctgcactgacatggaccccgagccgcagaccttccaccccgtgctgtccctgctcagcttcctcttcaaggcgccactagtgccgcccggcagcccggtggtcaatgcgcttttccgccagcgcagctgcatcgagaacatcctcagggcctgcgtggggctcccgccacagaaccacatgctcctggaacacaaaatggagcgcccagggcccagcctcaagcgagttggacccgtggctgccacctaccctatgttgaacaagaaaggaccggtacccgctgccaccaatggctgcaccggtgatgccaatgggcatctgcaagaggagcccccaatgcccaccacctgaggccccggtcacacagtttctcggctcttcctccccgctgccccccacgaccctaccttgaaggcccccacaaataaaggcgctgccactcaaaaaaaaaaaaaaaaaaaaaaaactcgaaggggggggcccggtanccaaattnggccctaataaggggagtcgtantta

SEQ ID NO: 599 - DNA, 1436 bp, Homo sapiens
acggatccgtacattgccgagaaagaataatttgccaggcatttgactggcagacgtccccgccgttggtgattaacgacggcgttttgattaactaacatgagaacccatacgacgccatgagcgacgacaattcacacagtagtgacacgataagcaacaagaagggatttttctccctgttactcagccaacttttccacggtgaaccgaaaaaccgtgacgaactgctggcgctgatccgtgattccgggcagaacgaccttatcgacgaagatacgcgcgatatgctcgaaggggtgatggacatcgcagaccaacgcgttcggagcatcatgatcccccgctcccagatgattaccctgaaacgcaaccagacgctggacgaatgtcttgatgtcatcatcgagtccgcccactcacgtttcccggtgattagcgaagacaaagatcacattgaagggattctgatggcgaaagacttgctgccgtttatgcgcagcgatgctgaagccttcagcatggacaaagtgttacgtcaggcggttgtcgttcctgaaagtaagcgcgtagaccggatgctgaaagagtttcgctctcagcgttaccacatggcgatcgttattgacgaattcggtggggtttccggtctggtgaccattgaagacatcctggaactgattgttggtgagattgaagacgagtatgacgaagaagatgatatcgacttccgtcagctgagtcgtcatacctggaccgtacgcgcactggcttccattgaagacttcaacgaagcgttcggcacccactttagcgatgaagaagtcgacactatcggtggtctggtgatgcaggcatttgggcatcttccggcgcgtggcgaaactatcgacatcgacggttaccagttcaaagtggcgatggccgacagtcggcgtattattcaggttcatgtcaaaatcccggatgactcaccccagccgaagctggatgaataaaaccgaaactggatagataactacatggcttttgcctcattaattgaamgccagcgcattcgcctgctgctggcgttattawtcggtgcctgcggaacgctggccttctctccttacgacgtctgctgcggcgattatttcgctgatggggcttcaggcgttgacctttaaccgccgtccactccagtctgccgctattggcttttgctggggatttggcctctttggcagcggtattaactgggtctatgtcagcatcgcgacctttggcggaatgcctggcccggttaacatcttcctggtggtgctgctggcggcgtatttgtcgctgtataccggactgtttgctggccgtgtgtcgcgtctgtggccgaaaaccacctggtgccgtagcgattgccgcccctgccctctggcaagtgaccgagtttctgcgcg

SEQ ID NO: 600 - DNA, 1215 bp, Homo sapiens
  misc_feature (18)..(18): n equals a,t,g, or c
  misc_feature (21)..(21): n equals a,t,g, or c
  misc_feature (27)..(27): n equals a,t,g, or c
ccacgcgtccgcggtacntgntgtaantttttcattttttgagtcaagagactgctccttgtactgggagacactagtagtatatgtttgtaatgttactttaaaattatctttttattttataaggcccataaatactggttaaactctgttaaaagtgggccttctatcttggatggtttcactgccatcagccatgctgatatattagaaatggcatccctatctacttactttaatgcttaaaattatacataaaatgctttatttagaaaacctacatgatacagtggtgtcagccttgccatgtatcagtttcacttgaaatttgagaccaattaaatttcaactgtttagggtggagaaagaggtactggaaaacatgcagatgaggatatcttttatgtgcaacagtatcctttgcatgggaggagagttactcttgaaaggcaggcagcttaagtggacaatgttttgtatatagttgagaattttacgacacttttaaaaattgtgtaattgttaaatgtccagttttgctctgttttgcctgaagttttagtatttgttttctaggtggacctctgaaaaccaaaccagtacctggggaggttagatgtgtgtttcaggcttggagtgtatgagtggttttgcttgtattttcctccagagattttgaactttaataattgcgtgtgtgtttttttttttttaagtggctttgtttttttttctcaagtaaaattgtgaacatatttcctttataggggcagggcatgagttagggagactgaagagtattgtagactgtacatgtgccttcttaatgtgtttctcgacacattttttttcagtaacttgaaaattcaaaagggacatttggttaggttactgtacatcaatctatgcataaatggcagcttgttttcttgagccactgtctaaattttgtttttatagaaattttttatactgattggttcatagatggtcagttttgtacacagactgaacaatacagcactttgccaaaaatgagtgtagcattgtttaaacattgtgtgttaacacctgttctttgtaattgggttgtggtgcattttgcactacctggagttacagttttcaatctgtcagtaaataaagtgtcctttaacttcaaaaaaaaaaaaaaaaaaaaaaaaaaaaaaaaaaaaaaaaaaaaaaaaaaaaaaa

SEQ ID NO: 601 - DNA, 1564 bp, Homo sapiens
  misc_feature (55)..(55): n equals a,t,g, or c
  misc_feature (988)..(988): n equals a,t,g, or c
gctgccccgcgagtattgaccttaacgagtggctggccagcaacagtgcgcggtngcctgggggcgggccccctccctcctccctgctcctcctcgaagcccctcctcaagggggacccccacggctggtgctcagcagccccctgccgcgaggggagaatgtggcccgtggacgggcagagctcacccagccgagctcctgcacctgttgctggaagcaggggtggacggggcggctcagctctggcgtttttcacatctggctccttctcttctcttccagccacgacgtttttccaccacatcaacctgcagtatagcaccatctcggagttctgcacaggagagacgtgtcagacgatggccgtgtgcacacacagtactactggtatgacgagcgggggaagaaggtcaagtgcacggccccacagtacgttgacttcgtcatgagctccgtgcagaagctggtgacggatgaggacgtgttccccacaaaatacggcagagaaattccccagctcctttgagtccctggtgaggaagatctgcagacacctgttccacgtgctggcacacatctactgggcccacttcaaggagacgctggccctggagctgcacggacacttgaacacgctctacgtccacttcatcctctttgctygggagttcaacctgctggaccccaaagagaccgccatcatggacgacctcaccgaggtgctatgcagcggggccggcggggtccacagtgggggcagtggggatggggccggcagcgggggcccgggagcacagaaccacgtgaaggagagatgagccccccgggccggacaggggcacacgtgtgcaaagagacggtggtgtgtgttctctcctgcatctgcgtgtgcacacatgtgctgggcacgcgtgtggtgaggtctgagagggccccgggctgcactggtgtgggctgcacaggcacagacgcagacggccccggccntgtcctgtggccccctgtcggatggatgcgtgccgtttgtagagaagagcctttgggcccattcactcgttcagcagacacgcatgggactgatgctttgagttttcttctgtggggttttcctttctctggtctctgtgcagcccctgccctccctcgggtgctgctggcctcaaaggaggaactcgtggggggagggtgtgatttgcagacctgggtctctgctctgctctgggggtggggcttgctttcacagagaccctccttccctctcacccctcctctcccggcctcgccaggagtcttggctgttggcagctcagaggtgggggaggcctgtggtgtgagtgccctgcacctgctcctgctcctgtcaccccttcctgctgcctcctccatgcccaaggaacacccatggtgcagtcctcaggcaaggccaggacggggctgaggccctgcgtggagatgctgcaccagcggaaggctgagacccgcttaccttagttcatctgttcactcgtaataaaaagaattctctcaggtcaaaaaaaaaaaaaaaaaaaaaaaaaaaaaaaa

SEQ ID NO: 602 - DNA, 595 bp, Homo sapiens
  misc_feature (517)..(518): n equals a,t,g, or c
  misc_feature (583)..(583): n equals a,t,g, or c
ggcacgagggctgagctgctgcttaccctactccctggggctgaaggtgtcagtggatgtcagtggcatgtcagtggctgcaaccccgagaggaggggtgccacagcaacttggatcctaaggctgtcagggcaccgtggcaatggaagccgctggggtggtgcagtgctgttgtggcacaggcctaggagggagagggctgctgccactcatgtccaggcatgtcagaacaccatggcggtaaggctccagggacagcagggtgcagccatgactagggccccagrggcagggtacagtgctggtgacttcagttcctgggacggctgggcctgcagcagcctagagctcagagctctttacgtgatttcagagggtcctagtgcctctggtgtggttcctcaagaacacagatatcagctccatttccaggatccgtctgaaaagatgataatgtttcagtctgtgttctgcctcctgttctttgctgagctgtgctgcatagcaggaataatgnnttttagtaagggaaagtttccccttcattgaagatcacactttggaatttctgcctcaaactgtnatacatttcccc

SEQ ID NO: 603 - DNA, 1668 bp, Homo sapiens
  misc_feature (1)..(1): n equals a,t,g, or c
  misc_feature (14)..(14): n equals a,t,g, or c
  misc_feature (16)..(16): n equals a,t,g, or c
  misc_feature (20)..(20): n equals a,t,g, or c
  misc_feature (1013)..(1013): n equals a,t,g, or c
ngggggggggggtntntttntttttttttttttttttttttttttttttttttttggggagtggataaagtgcatttattttcttctatgtttgtttttgtaaaaaggagaaaggaagcaaaagactccttcctttcagacccagtgtccactgagcttggagggggtggagccgggaccagccccctaggaaaaggtgtaggaatagaaggcaatggcattggcgctatagtccatggggaggaggtgcccgatgtgcctggcccctaggctggccccacccagagcggaggagtgcctcagcttcatcagggtgaagctggagaagaagttctgagcctggatctctctgccctgggtcagcgccaraagaaaaccttccttcagcagctcccagctcttccacacagagcccacgcacaggatggggagtccaatcttgccctggaacaagaccgggtcaatctcgggcaacactgctacgatgtgtctgcccagcatctccccagccttcctgaagatatagcgggaaagggggtctccctgctgagcaccttctgcaattttccggcaaaacccagcaaacctgcatttatcaaagtccctatacaggtgagtgagtatccctagccgatctggcacctggaaatagtggaacatggcctgtttgacgtagccgatatcatgaggagccgcctctaggttgtcaatggagtcaaacactattttcactgcttggtgtgcgatccagtaggctgaaccctcatcacccatcatatggccccagccgccgcagccactctcggagccatcagggttgatgagcctgcagttggagcctgttccagatatgagcacaactccaccatccggtgtagctgtggcgatggagccggcggcatcggtggtgattaagtagctttcactcaggtagggaaatcggtccctcagctcctcgatcaggatcctccccgcgtcctcctggtccccaccgctcagagataggcccaagnttcgcagcggtaccagaggatccacccctgctttccgtttggccctgttcaccatctcattgatcctctccacacacttgtctgtcccgatcagccagtggtttgtgctcagtccatctgcttctgccaggatcttcccatcctctgagactaaaaggacctcggatcgtgtgcctcccccctctacacccccatagatcgcggccatgctgctgctaccgtcgctgctggtcccgccgtttgcgtctctccccgcctgacacctccttccctccagctgtctgggcaccgccccacttcccgtgacctcccgcgcaccagctgactccctgtgcgcgtgcgcatgcgcggggcggggcgccggtaggagccggggatrgctgcgtccctcaggctgtcttccttctggtgtctcctccaggtggagcgactgcggtccgcagcggcccctcccgtcctcctggatcctgcttccagagatggacactaatcccaagaggaggaatcaaagaggggtatctaggtcggtcggacccttaggacacatcactgacctgcctgcctgttaaacgcccggaattgctggcawtcccgcttaagttgcgctgccactgstyttggcgctwagttgtgaagcagttcggccaaaccccgc

SEQ ID NO: 604 - DNA, 621 bp, Homo sapiens
  misc_feature (539)..(539): n equals a,t,g, or c
  misc_feature (574)..(574): n equals a,t,g, or c
  misc_feature (587)..(587): n equals a,t,g, or c
  misc_feature (610)..(610): n equals a,t,g, or c
  misc_feature (621)..(621): n equals a,t,g, or c
gcccacgcgtccgatcttgcagaagaggaaacaagctcagaggttaagtaacttgttccaaactatgcagacagtgagacagaaagccagaattcagagtcacatttatctgatactgaagtctctgaatattgcttctctcctgacctcatttcctacctttaaccccatgattaccacctctatcttatctacttaacttacttaaatccttaccatacatgcagtataagggcagggtgggacctggtcatctttcccataattttatctggtccctagggccctccccctttcacaagactcgaatatacttttcctatccagtcatttgccccaacatcccagccttttgtcatctccattctctatatctgccatggsccacctttacatccaccttgcagctttactctgtcatttatgctccctgtcctgcccctccgctatcctacttttcctcacatgttctgatcccactgcctcacatgctgstgtccttcctgtccacccatgtcattcttctaagtctaatctgnaaccctcagccaccctgctatcctgcctaaactgncttgcttaactgncactctggttattggtactttgnctattactggn

SEQ ID NO: 605 - DNA, 1034 bp, Homo sapiens
  misc_feature (1014)..(1014): n equals a,t,g, or c
gaattcggcacgagctcatttgcacccaggcaaccctaatatctcactgtcgagggtacaggctgctgtggctatccgtacctgggtgacacaccactccaaaatttaatgacttaaacaacaaccattttgttgctcaacaatgtgaacagctcagtagggatggcttgtgtctgctactcatgatattgactggcactattcaactggggctggagagtccaagatggtgtcattcacatgtctggcacctcagctggggagactccatcacctggggcttggctggggttgttgggcttcttttcttctcatgggctccctcctgtatctgggccctagttctcctccacatgtcctctgtttccatgtgttgtctcatctatcaagacctctctccacttgacctctctctccaacagtacagtgtggactctgcacatggtgaattttcctctgagcaaaatcaggagttacaagacaccttcagggctggacttaggaatctcaaattttcatttatgacaaatgtgtcttctggtcagagcaagtcacaagagcagtccagattcaaagggaaaggtccacctctggataggaggagtagcactcatgtccgtgggaaaatgtttggtggccttgcatgcacattgatactaccttgactctccatatcagagttctgtgtaaggggggagtattgcaggagtcagacaaatgaagatcgaggtacagaacaagttttgttggaagtaaagctaaattggtttaggcaacaatgggcttaacataaacttgttttaggcaacagcgagcgtccttcttctttgaccctgagttggatttactcacttgtttaaatgtacaacctcagamcttcctagccttaggggcagagccttcctgggagagttcacccaacaaaggaggatggagcagggcagacactaggggcagarggtaggtgcgagccacctgagttcattcgtccttctagcctcacaacccactcantccttcctgatcccatggaa

SEQ ID NO: 606 - DNA, 817 bp, Homo sapiens
  misc_feature (668)..(668): n equals a,t,g, or c
  misc_feature (789)..(789): n equals a,t,g, or c
  misc_feature (816)..(816): n equals a,t,g, or c
gcggacgcgtgggcggacgcgtgggcggacgcgtgggcgggtcgcttggtggctccgtctgtctgtccgtccgcccgcgggtgccatcatggcggacgcggccagtcaggtgctcctgggctccggtctcaccatcctgtcccagccgctcatgtacgtgaaagtgctcatccaggtgggatatgagcctcttcctccaacaataggacgaaatatttttgggcggcaagtgtgtcagcttcctggtctctttagttatgctcagcacattgccagtatcgatgggaggcgcgggttgttcacaggcttaactccaagactgtgttcgggagtccttggaactgtggtccatggtaaagttttacagcattaccaggagagtgacaagggtgaggagttaggacctggaaatgtacagaaagaagtctcatcttcctttgaccacgttatcaaggagacaactcgagagatgatcgctcgttctgctgctaccctcatcacacatcccttccatgtgatcactctgagatctatggtacagttcattggcagagaatccaagtactgtggactttgtgattccataataaccatctatcgggaagagggcattctargatttttcgcgggtcttgktcctcgccttctaggtgamatcctttctttgngggytgggtaactcactgggctacctcgkcaatacctatgcactggamagtggggkttctaccatgaatgaaatraaraktattctcaagctgcacagggattttttgcgagatggtgganctatccctttgggcttggcttcaaacnt

SEQ ID NO: 607 - DNA, 1749 bp, Homo sapiens
  misc_feature (204)..(204): n equals a,t,g, or c
  misc_feature (1704)..(1704): n equals a,t,g, or c
  misc_feature (1708)..(1708): n equals a,t,g, or c
tttttttttttttttttttttttttttttttataagttttcactactatttattttgaagagttttctgtaatggaactatttcttctgaagatttcagaaaagcttttgatgtctgttacctcaccatgtctaagaggtggaaggaactgagagtcatcttcccgctcatttcacaagtgaggaagccaaggcccagacggcnaagggtcttgcccagcatcacccagcagggatggctcagctggacccacaggcaaagacagtacctgccctccccacagccactcccctgggcagcggctgccatccagatacacagagatagggaggaaggaagatgatggacagacaggcagatacataggtaagagggtttgggaataacacatagatattttaacttttcgagagaggaaaaggaaaaaatggcttgtgatagacattttttggacccaccaaagccttgcatatctgaaaagaaaattactttggctttctggaaacattaaactgcattcaatcaaaaaaacagactaaattataacacatcacaaccagtaagcttcatagcagccgcagtaggagtgatggcatttcgtgttggtgtgcgcgtacacgtggaaaggaagtttgcagggcaacaaggtcagcaagaaccagacctcagattgtttcactcaccacagaagaaaaacacccatggcaattcccttttggaaagttaaagcttatctcctcggaatgaagttccaaagacatccatttccacagaagatggaggaaaaaagacaattacatttcaaatctgtaagtcacaaatagacaggcagagttctggcgagccgtgtcacagttaaccagtttgaggacatcagtgtcttcccccagagtctgtaaacacgcagccagtcaatttcctaatgaatgcttccctttaacaaaggctgcttcagtcctccctgcaggcctactagagtcttccagcagcacatctcagtgggagccatcagattttccaaaaaatcttctttctatagaggatgtaggcaatgagcacccagagggcagtggcgacgatgttctgagtcaggtgctccttgtgggactggttgtccttcagcttccactgaaaggggaagtagttctcaaacacctcgtggccgacgtataccagaatggaattcattcctggataaaagaatggggttcctgtccacagccccttcacatccacaactgggtacaggaccagcaggatgaagaaggcaaaagaactgagcgtagtgacatacgaaagggaccagagatttttgtttactggaataaagccttcattttcagaaaccttcgtcagagcaacagaaatgagcccaagaatacaacaccaagcagtgaatcgaatcaggatgtctttggtccgagccttgtaatacaatagtatttttcctgcctgaactcctaaaaaggccatcacgatggagttgatggtgcccaggatgccctcggggtcataggccacctcggtgtggtaaagtacagcagaagatgggtgctggtaaaggtgatcgtctcccagcagcaggcggtcgatgtagcctgcagctcctccagtgcaatttggatacttgccaaaatctccaatgcccccaggaccaagataaccagtagggcacccagggactggcaggaggaatgtcaagcnccancacaggscttccagcaccaggatgagcagccactggggccc

SEQ ID NO: 608 - DNA, 812 bp, Homo sapiens
  misc_feature (2)..(2): n equals a,t,g, or c
  misc_feature (4)..(4): n equals a,t,g, or c
  misc_feature (14)..(14): n equals a,t,g, or c
  misc_feature (16)..(16): n equals a,t,g, or c
  misc_feature (723)..(723): n equals a,t,g, or c
gnantgcccgggtncnacccacgcgttccggaagcggctccgaggaaggcctgtgggagtctcggagacgtgtctgtctgtgaggcgctgggtgcacgtccccagggctctgggctaggaaggcagcggcgaggtgcctccccacgtacccctcgcgggcccagccgagcaacgtggggcgaaggcggcggcgaaggcccgggctgggagcgttggcggccggagtcccagccatggcggagtctgtggagcgcctgcagcagcgggtccaggagctggagcgggaacttgcccaggagaggagtctgcaggtcccgaggagcggcgacggarggggcggccgggtccgcatcgagaagatgagctcagaggtggtggattcgaatccctacagccgcttgatggcattgaaacgaatgggaattgtaagcgactatgagaaaatccgtacctttgccgtagcaatagtaggtgttggtggagtaggtagtgtgactgctgaaatgctgacaagatgtggcattgttgctactctttgattatgacaagtggaactagccaatatgaatagacttttcttccaacctcatcaagcaggattaagtaaagttcaagcagcagaacatactctgaggaacattaatcctgatgttctttttgaagtacacaactataatataaccacagtggaaaactttcaacatttcatggatagaataagtnatggtgggttagaagaaggaaaacctgttgatctagttcttagctgtgtggacaattttgaagcccgaatgaccaataaataccagctt

SEQ ID NO: 609 - DNA, 673 bp, Homo sapiens
  misc_feature (578)..(578): n equals a,t,g, or c
  misc_feature (595)..(595): n equals a,t,g, or c
gaattcggcacgagtgaccagtaatcaaatgcatcttctggccggcctggcgatgacccggcatgctgtctgtccaaaccctgatgatggcaggtgtcaaccgagaccctgcactctgcccctgcctctgtgcctcactctggcggggcagctccgaggggctatgcaagggcccctacctgggcaagacctctgcagagcccagccccagctggcaggggtgttcatggcatggagtcccctgcccgcggcagacagcgatgtctcctggcaccaaggccactgcgcctgcggtttcagattccttccctgtcccgtcgctggtgttgtgggtgawttatttgctgcttggcagaactcagcagcccttaggaaatggatgtcagcttattgtgtttgggggarggatggatatgtactttccgstacataaactggagccttcctagctttamgtccgtctgcccacargctgtgttgggagcctcggsctggccctcacccactcaccttcttcatggtctttgcctgccaacagtgtctgcagcctttccaagccccaagttcatgaaaacggnccatagtaagagatatntgttttaaacatgaacccggattcattgtcatctgatattagaaatctgaattcaaagatttcctggtgcgataagga

SEQ ID NO: 610 - DNA, 2201 bp, Homo sapiens
  misc_feature (852)..(852): n equals a,t,g, or c
gctccaggcccttcttcagggacatcgttttctacatggtggctgtgttcctgaccttcctcatgctcttccgtggcagggtcaccctggcatgggctctgggttacctgggcttgtatgtgttctatgtggtcactgtgattctctgcacctggatctaccaacggcaacggagaggatctctgttctgccccatgccagttactccagagatcctctcagactccgaggaggaccgggtatcttctaataccaacagctatgactacggtgatgagtaccggccgctgttcttctaccaggagaccacggctcagatcctggtccgggccctcaatcccctggattacatgaagtggagaaggaaatcagcatactggaaagccctcaaggtgttcaagctgcctgtggagttcctgctgctcctcacagtccccgtcgtggacccggacaaggatgaccagaactggaaacggcccctcaactgtctgcatctggttatcagccccctggttgtggtcctgaccctgcagtcggggacctatggtgtctatgagataggcggcctcgttcccgtctgggtcgtggtggtgatcgcaggcacagccttggcttcagtgaccttttttgccacatctgacagccagccccccaggcttcactggctctttgctttcctgggctttctgaccagcgccctgtggatcaacgcggccgccacagaggtggtgaacatcttgcggtccctgggtgtggtcttccggctgagcaacactgtgctggggctcacgctgctggcctgggggaacagcattggagatgccttctcggatttcacactggctcgccagngctacccacggatggcgttctccgcctgctttggcggcatcatcttcaacatcctcgtgggtgtggggctgggctgcctgctccagatctcccgaagccacacagaagtgaagctggagccagacggactgctggtgtgggtcctggcaggcgccctggggctcagcctcgtcttctccctggtctcagtcccattgcagtgcttccagctcagcagagtctatggcttctgcctgctcctcttctacctgaacttccttgtcgtggccctcctcactgaatttggagtgattcacctgaaaagcatgtgactgaagccgcttagtgctgtggcctcactgcaggcaggagccccgcccctcctgccgggggaggcccagggaccggagcatttctgcaaggcccttgtgggcacgagagtgcggcccttgctgctggagatctgaggtcactgctgtragctgggagaactgctgtgtacctcttgctgccagcacccaacagccttgccgtggggaccttggaaacctggctttgctctggacaaagggttccagagagaagctagaagtcccccttgaatgacccccagagcccctctgagaagggctggagtttgggggaaggggatggctggatgtgctccaggccatgctggaggtaccccygaggcacaggcactgcccgttcccyttgcctgggcttcargccttctggcaccttctcaggacacaagtggctgcccaaccctgactcagagaatgagggtggcttggacccctgggaatcaggccgccgagggctgagctccagagccgcaccatctgccacaaacagaattcgagacatacttaattttgaatttctccttgccacgttaataaagccaaaagcagcgggtgctattcgtggcaacacacttcactgaacccacttgcttccaaaacgatgccagcccgaggcactgctacgccagcagctgccacatgggatggtggctcaggcgctccctccaggattctgcccctgcctgtccacagactcctttgtgctggaacctgggctcctccagctgccaggcaggagtcggtaggactgtgcctgtgcctccctcagcggggccctgggcggggttccaaggcctgcgagctgggaaaggacagatgaggggacctcgtgccttcttgctgtcatgcaatgaccccgccttatgttgccgaaataagcaactcttaggtttgcctgactgccttatgctggtaaagaaaagggattcaactgtctcttttccaaataaaaaaaaagtcaaaatttcaaaaaaaaaaaaaaaaaaaaaaaaaaaaaaaaaa

SEQ ID NO: 611 - DNA, 2796 bp, Homo sapiens
  misc_feature (1)..(1): n equals a,t,g, or c
  misc_feature (3)..(3): n equals a,t,g, or c
  misc_feature (2774)..(2774): n equals a,t,g, or c
ntncacgcgtccggggcgccagacccggctttgccgtccggctattagcctactgtggctagtcacccccggggtcccggccttctcgggctggggccgccgccaccgcggcaggacggggaggcgggccatggcgtcctgcgtggggagccggaccctaagcaaggatgatgtgaactacaaaatgcatttccggatgatcaacgagcagcaagtggaggacatcaccattgacttcttctaccggccgcataccatcaccctgctcagcttcaccatcgtcagcctcatgtacttcgcctttaccagggatgactctgttccagaagacaacatctggagaggcatcctctctgttattttcttctttcttatcatcagtgtgttagctttccccaatggtccgttcactcgacctcatccagccttatggcgaatggtttttggactcagtgtgctctacttcctgttcctggtattcctactcttcctgaatttcgagcaggttaaatctctaatgtattggctagatccaaatcttcgatacgccacaagggaagcagatgtcatggagtatgctgtgaactgccatgtgatcacctgggagaggattatcagccactttgatatttttgcatttggacatttctggggctgggccatgaaggccttgctgatccgtagttacggtctctgctggacaatcagtattacctgggagctgactgagctcttcttcatgcatctcctccccaattttgccgagtgctggtgggatcaagtcattctggacatcctgttgtgcaatggcggtggcatttggctgggcatggtcgtttgccggtttttagagatgaggacttaccactgggcaagcttcaaggacattcataccaccaccgggaagatcaagagagctgttctgcagttcactcctgctagctggacctatgttcgatggtttgaccccaaatcttcttttcagagagtagctggagtgtaccttttcatgatcatctggcagctgactgagttgaataccttcttcttgaagcatatctttgtgttccaagccagtcatccattaagttggggtagaattctctttattggtggcatcacagctcccacagtgagacagtactacgcttacctcaccgacacacagtgcaagcgcgtaggaacacaatgctgggtgtttggggtcattggtttcctggaggccattgtttgcataaaatttggacaagatctcttctctaagacccaaatactctatgttgtgctttggcttctttgcgtggctttcaccactttcctctgtctgtacggcatgatttggtatgcagaacactatggtcaccgagaaaagacctactcggagtgtgaagatggcacctacagtccagagatctcctggcatcacaggaaagggacaaaaggttctgaagacagcccacccaagcatgcaggcaacaacgaaagccattcttccaggagaaggaatcggcattccaagtcaaaagtcaccaatggcgttggaaagaaatgaaaaaccctggttaatcaaagatgttccagagtgcctagaactgagagggaaatggaactcatttggaactccccgtgaggaggtcgaggcgcacagggcaagcaggaagaggcgagggcacttgggggtcattatttgagatcgtaagtcttgtttcccacagacctggccgcgtcaggcagatcatcgcctggggggcctttgccaacgtggggtctcttctaacttcagcacttgacatgcggtcaccggtggcagcgcggtgtgttgaagggaaacggtagctattcattcacagttgccaagagcagctccgcgcctgctggatcgtggatgcagcgtaaacatcttccttcagacgaggcattaaccccatggttaatggactggtcaccagtttttattttatttttatgaatctacctttccattgattgatttaagttcaggccacttttctgtcttttatttggttactgttgttatttgtttttaagttaggatgctttttaacagcctttagaagccgctgctgaaattgatactgggggaagggttccccttccttctagagcagaaaagggagagaggtgttgtattcctgtttggtaacctcagtctcctgtaagacctcctaccacatggcgagtatacaccaatcaggagagggtagctgcctgcataggagcctcgcttccgattattcccttcccaatattattcatccagacttagccacagtgcacaaaagcaaacctgctagagaggcagtgaacaccacagcttctccccagctaggtgccttttacatcgggtttgttctccttccatggtgtgttgctgacattgtcactgagtcccatgtgaggtgctggtgagtattacctttcatctgtgccatgctctagaaccttgaccttgatagttcaccacctctgatggatccctgttttaaaaggcaaacctgctrgrgaggcagtgaacaccacagcttctccccagctaggtgccttttacatcgggtttgttctccttccatggtgtgttgctgacattgtcactgagtcccatgtgaggtgctggtgagtattacctttcatctgtgccatgctctagaaccttgaccttgatagttcaccacctctgatggatccctgttttaaataaaaacgattcactttaaagcctaaaaaaaaaaaaaaaaaaaaaacttggggggggncccgtaacccaattggcccttt

SEQ ID NO: 612 - DNA, 1128 bp, Homo sapiens
cttacaaatgattactacaggaatagtggccacttaatgtcagttactccggtggaagaatttatctagtttttttttttttcttttttggaaggatggtgtgaaaaatagcaagattagagaatgagttgtatagttttttctatcacatttcatctaaaatgatttgaaggacttttgaagatttttaccaacatccttaaatcaactccaggttggatgaacaactgatttaaaacaaactaagagaacattaactagatgtgggctttttaaaatatataggtattgcatttcctaccttgttatttattccactttgaatactttagagggcttaactttcaactctttaaggtagtaatggatagttttatacttgttctcacaaaattgttatggtcagtttatatcattgctccatgcattgattataaaaattcagtattaattttttctgatcttataagctttataggagttttcttttctcttataaagtgtttcaccttatgtaaaacaaatgcctgcttgcatattggaagatgttgaaattagttttagacaaaagtggtccatcaattcagacactctgcttggatgccttacccttttcattagtgcattctttgcttctgaaacttggcagaaactcgttagccagtccactgcctttctgacaatgtgtggagtcacgtatgcttggtatatgcctttactacttttaaagttctacagtttattacttgcccaagtgttactaaatccttttcttatgtgtactggatggagaaaaaattatagccagcactttgagaggaaagttttcagaaacaatattaactggcactactaactgaaggccacaggagatgctatcaatgttatttgtaatctgaagattgaacaaggctgtgaggctcatttcaaactattttgaggtgttaaaatatatatatgctgtttctcagctgttccactcaaaccgtgttaggactctcaaaggtaaaatgtcacaggggcttttcagttgttacagagctcagcagctgtggttgcccctgttctacaccaatttcagttcaataaaaatgttaactttgcaaaaaaaaaaaaaaaaaaactcga

SEQ ID NO: 613 - DNA, 495 bp, Homo sapiens
  misc_feature (389)..(389): n equals a,t,g, or c
  misc_feature (409)..(409): n equals a,t,g, or c
  misc_feature (424)..(424): n equals a,t,g, or c
  misc_feature (428)..(428): n equals a,t,g, or c
caacctgcccctgatgcctttccaagttccagagctgcctgttggcaatgagacaggcctactggccgcgagcagcaagacaagagccctgtgtgagcccctcccgtactacacctgcagctgtgtcctgggcttcatcgcctgctcggtcttcctgaggatgagcctggagccaaaggttgtgctgctgacagtggccctggtggcctacctggtgctcttcaacctctccccatgctggcagtgggactgctgcggccaaggcctgggcaacctcaccaagcccaacggcaccaccagtggcacccctagctgttcctggaaggacctgaagaccatgaccaatttctacctggtcctgttctacattcaccctgctttacactctnccagacagattggactattnatggccgcttgggantgcntatggaagaagaatttcaagaaggagcacgaggagttttgagaccatggagaacgtggaaaccgctt

SEQ ID NO: 614 - DNA, 2652 bp, Homo sapiens
  misc_feature (20)..(20): n equals a,t,g, or c
gggactgcctggccgtgggncagaggggtttgcccttctcggagggtacctcctgttccctgtctgagcatcctgcatggaagtcaaaggaaatccctttcttggtgacgacttaaatctgggttccctcagacattgggttgcaccccaacaaatattaaatggcttcttcttaaagcccagagaaagaggttttttaaaagactgtcgccaaatagctgagccaaaaggctgatcagaattcactttttggaatgtggcagttaaacactaccttgatcattctctcctctttcctcgaggaactcctggagggtttgagcgtctggaaactctctgctctgacccgaggaagcaccctcctgacgccgccttcctccggttattgaaaggacgcctcagaaatgctttgttttcttttacgatgtattcagaagcctttactgattaaagttttcttttatttgggtggccgggagagacccagggaggttctggaggttcctttctgtctcctggccccaccagggatttccccatttctgtttgctgcctgaaagcaggatgaggaaggccaaggagagtccttgcacccgtgagcgtcaggatgaggaaatgacaggaggaagacgtgggtttgggttagtggctgctggcgttttggcccttggtgtttctggagcctccagggatctaggggagcctgggctgcgtgcatgtcgataagcagagctgttcttggggagaaggagggaggtctcgggagtgtagcaccatgccaaccagccctgcgcgaagacagagtgagccacgcccggatggcagggcatgtttctgttttggtgtctcactttcctcccagcgtgacttatttggggattcctcagggcctactggaatgtgactgcccactgcccagctgcctcgggtacaagtcctggccctatgtcccagctgtcaggggctcagggaatcctacccagccacctgtcctgggatggagtgtcagcatccaccccttggttgtcatcgaggccgccctcccagtcctgggtgaagatatttgggccaccagggctcccttggccccttcacgtaggaaatagacacgtgctttttaatgcaggacactttgagtgttacaaaatctgtagacctggcagtagggtcatgatgttgggaagggtgtagtgccctaggttggtgacagaagggacagacacttgtgcacaggtgtctttggtgatggggtttttttttttataacttagtaaaaaaaaaaaaatgtatgtggaattctgtctcttggtaaagctcaaagccaggctagcctgaggtggcgcagggctctccttcctgtcccttcgatctccttgagaattaagagctggcagctgctgatggtgtttcccaacccccctcacttcccaagacaacccccagcttcaggtcctcatggggaggggagggcacgttcttgayacatgggaacttcgctcaggagggcctccccttcccctctccctcagagttttcactgccgtctcgtctttagaaagctgtttgaattccccccgcccccagtttggaccgtgtagatataactggatatacggatttttctctttgtgcaggcttcttatgccgttggtatacagggcaggaaagagaggaataaagggagagagcagtgtggaaaccacggtggttttgctttgttcttactaggttttggtgccaccttccctgcctgcgcttgtgccccctctcctccttggcactggcggcctccttgcctcccttccaccagtgctgccatcccgtgcctgtcgtgttggttcttcacacgtgctctgttctcggggttgttccattcatgccttcttggagggtgagggtggcttgggaaccgacccagtgatcatgcctactttcttctttgtatctccctccttcccagcccacccgggcagcagactctgatggaaggaaggtgccgtagtgggcttttagaaactaacgggactggttttcaaagcagttatcttgggaaactgtttattccagcgatgtgacttttttcagaatatttcttggaatcatattcagagtctggggctgtgtgttgagcagccttaaggatgctagacactcatttagtgcccagggagtccagcgaatgacgtctgtggccaagcgaggtctcaggtgcaaagcaaaaggaccatttaaagtaaaatagcttggattcaatcatgtgacttttaaattggctcagaaagcaattttgtaatttcagagagtgttttgagccatggccacgttgtcattgtgagtctatagcttgactccttggagaacaatattcatttggttgtggagactgatttgctgggagaaatctgtcctgttactttctggtcatcccaggttctgacttttaccaggggcaaaaaaaaaaaaaaaaagcaagagggagataaatcccatctgtgagtttgtcttattggcgcctttttcctcagctgtcttccaagtattatttttactgttaaaaaattttttaaaaatgtgaaatgtaatgtttttacagcaacaatatgaaatatattttataaggaataaaatggtaccttgtctgatttaaaaaaa

SEQ ID NO: 615 - DNA, 636 bp, Homo sapiens
  misc_feature (560)..(560): n equals a,t,g, or c
  misc_feature (605)..(605): n equals a,t,g, or c
  misc_feature (631)..(631): n equals a,t,g, or c
ctaacccggcacagtgagcggagcgcctgggcggcggcggcggcggcgtgatggctccggccgcggaccgagagggctactggggccccacgacctccacgctggactggtgcgaggagaactactccgtgacctggtacatcgccgagttctggaatacagtgagtaacctgatcatgattatacctccaatgttcggtgcaattcagagtgttagagacggtctggmaaaacggtacattgcttcttatttagcactcacagtggtaggaatgggatcctggtgcttccacatgactctgaaatatgaaatgcagctattggatgaactcccaatgatatacagctgttgcatatttgtgtactgcatgtttgaatgtttcaagatcaagaactcagtaaactaccatctgctttttaccttagttctattcagtttaatagtaaccacagtttaccttaaggtaaaagagccaatattccatcaggtaattttttgtaaattattacacattagattgtttacgatacatggctgctttgtgatttccttggctaanaaatgatatgcaagataaaaatttttttaatgaaatggtagatgntctaaggaaggtcaagtggttaaaanggagg

SEQ ID NO: 616 - DNA, 2326 bp, Homo sapiens
  misc_feature (1)..(1): n equals a,t,g, or c
  misc_feature (36)..(36): n equals a,t,g, or c
  misc_feature (2305)..(2305): n equals a,t,g, or c
naatattagtaaaccatgatgcagcaactgctaagngctaaactaacaaaattgtgtcatcatagctgctggcttggtgtgaactcgcttaaaagcaatggtgaaaggataacctcgatgatgtaaatccacccaaagatactgttctacaaaaagtagggtgtggacgcaaacctgtgacagcagagggggacgacttcacactcactgcctcatgtggcccctttcccagtggcagctggtgacactaacgattgctactcggttcacttgcccagatgtcttcatatgatgagcaaggccagaagcaaggctagattcgaagtttctgacaccatttccagtttgcacaaaagtcagtattttatcttaaagtggcttgatttccaatagctgaacttgggcagaaaacagcaggccaatgttcctatgtggtttctttgttgttgtttttgtttggggtgggggcaagtacagggtaattcatgagcaagacatttcactgctgtcgaagtctctgggatcccgctgtgggtctgagatggcctgggaaggaccttgtggacaatggttttatctgttctttttgtcactgttaatttctgggctgctgaggttctagaatagaagggctgccaaatgaggtttgctgcaggaggaaagtttaatcccccattccaaaagtccaggccaaatggtgggcttagcctctttgaaaagttctgccttgcccccacaggtgggcacatcctgtgtctcattcaccatgatgcttcctgagggtgttctagaagcccgttccccagtggctgtatccagcctttccttgcatcatcttcctcttgaaggtgaggaagtgaaaactacagacctcccccggacagcccactctctatcacgagcctaacccgcgggaggcggaagagacatccattcgagaactgaagcggcctccgggatgaggtcagaggccccacctgattttcctggtggtggtatccaaaatcttcagtaactaggaaggaaaccagggtctcatggtttaaaagactttgaagcaggaatgttgcatttgacgcctttaaaactacctttttgctgttgggaggagtcgggggcgagccttagcagctgcaccgccatccccatgctggttggtgctgccctgcctctcgtgccgggtgttgcttcagcccagagccagagggctgggtcccgggtcctccacaggtgaccccggtggacacacgcgttcccatcctggcctccgtctctgcttttccacttctacctgcgtgtgggtttgccgccttgtcatcggttgtgtgagtgtcgcagacctttccagagctccggttcactctttccaaacaggcctccctgtcggtggcactgcactcctagaaccttcagtttctacgatggtttgtttggtccttttgaaccaccccaaagaactcaacatggcaaagcaaatggtaaaagcttcccgactgttctactttgggtccgcgcgaagcccactcacgtgtgatctgtgttgcccctctcggtggtcccaggcgatccagccatgccccctgcccctctgcccagatgcttcaggggcccggcttttcaggcttgccctcaccagcggccgtcagccgacactcagggatgtagctaacaccactccgccagtgctttcagtaggaagagctgaggctgcctgggaggcccggggcgaccggaaaagggctctctcaagttctgaaaagagaatctgccaccagatcgaatttcgacccctgagcttgttcggacgtatggtccaaattcagattaaggtggtcacccaacccgagatgtcaggaaaggccttctgcagagaaaatgtccccccacccgccatctgcagccaggtgtgtgccacacggcagccttcccgaaacatagtatggattttaaaaatgtgtttatttttgtttctcaaccactttataacgtattttttaatttattttgtaatgtcttgttttgaagtattgctgctatccttgttatccttcccactgtttttatcactgatttattttgtgaaagttgtacactaatgttctatgtcaaaatcaaaagtatttaatgaaatactagttctatttaatgtggttatggaaccagctggaaacacaaaacaaacagtgattgtacagcaggctgggcccaggaggtcaggttcattttgttacatatgcaataaactcacgactttaaaaaaaaaaaaaaaaaaagggcggccgctctagaggatccctcgagggancccaagcagagcgcttcccgt

SEQ ID NO: 617 - DNA, 1477 bp, Homo sapiens
ttgggtatctttctactcctaagaaggtattaagaataacataaaacctagtgagtttgcaaggcttagcctccgaagggtgactaagacaggctttcttttcctgtcttcagaatgaatggattacaaagactagatacaactttaggttttctttgtcttctttttttttaatttaatttttattttctttttctttttctgtgagcctatggttgtattgaaactttaggttttcttgagctgtggtgctgagggcaggaagaagacactaacagcgaagcatgtgtttgtggttgttggaggattcctgcagttcacttgaggtggcggaatcttctggtggagggatgccctccggcgtgggtctggggttgtgtgctcctggtggtcctagtggttttctttgcctgtggtccagatactgctggatactggcagctcctgtggttgggccagtttgtacacttggcgttaggcttgatcagtgatgttgctgaccctcgcccatgctgggtaagtgtccaggtggaagaggctaactccccaggtgttgatggccaccattactatcaccagtccaataacgttgactcccaggccagctttcaccatatctttgatctggcagtgcccatagctgaagacgatggcattagggggattgcccacaggcagcatcactgcaaaggagatgcacatggtgactgggatcagggtgtagagggggttaatgtgcagcgtttcagacaggctgcacaggatgggcaggaagatggtgatggttgctgggttgctcacaaactcagtgacaatggacacgaggatgcatgccagcagggtgacagcccacggtgggaggctgctcagggacaacatctggttcccaatccatgtagagaggccagagctcttgctaccagaagccagagcatagcctcccccaaccagaatgacaatctcccagggcatggtcttctggaagtccttccacgtgatgatgggctcggtccccagtgagtgctcctggttctctccatcattctttttcccaaagcagggcttcttcgctggaatgaggaagaggaggaagccaaggaagacagagactgtggcatcagtacggtagcctttcttttcaaagaaagaatcccagccagggacaaagccaggctcccgggtaaaccacagtacggtcatcaggatgaagaaaaatccagtcaccatttctgggtagctaatgtctcccagtttttcatattcttcttggatcctcttctctgacaactgttcccttttggtcttcttcttcttgctcagagagcaggtctctttaaaattgcagcccaggaacagccagtgcatccagaaccagctgaccaccagcatgatgagggatatggggaagctgaagaggaaccaggtgccaaagttcaccacctctgcggctggatactggttgttgaagtgttccagg

SEQ ID NO: 618 - DNA, 716 bp, Homo sapiens
  misc_feature (625)..(625): n equals a,t,g, or c
ggcacagaccggacttccggctggtctgtggggtttcgggttcggggtttcctggtgggcgtcaggggcaggcaacagagtggcggccgctacggccctggaacggggccatggagaagctgcggcgagtcctgagcggccaggacgacgaggagcagggcctgactgcgcaggtcctggatgcctcatcccttagtttcaacaccagattgaaatggtttgccatctgcttcgtatgtggcgttttcttttctattcttggaactggattgctgtggcttccgggcggcataaagctttttgcagtgttttataccctcggcaatcttgctgcgttascagtacatgctttttaatgggacctgtgaagcaactgaagaaaatgtttgaagcaacaagattgcttgcaacaattgttatgcttttgtgtttcatatttaccctgtgtgctgctctttggtggcataagaagggactggctgtgttattctgcatattgcagttcttgtcaatgacctggtatagcctgtcrtacatcccatatgcaagggatgcagttattaaatgctgttcttctctcctaagttgaaaatcagaaacttgtggaaaagagcacttgaatgtnggtacyctatgkttggtgaagtttgcttttccccataaaacactccaggaacaactgacgtgacagtgaagacgttttgacaagtcattgt

SEQ ID NO: 619 - DNA, 1108 bp, Homo sapiens
  misc_feature (1101)..(1101): n equals a,t,g, or c
cgccggsagtggacgccgccgaggcccggagtcgcgcctgcagacacagcatctactcagcgtgggtcacctctgtgaacatcactgactgcaagcctccctcaatttctggtgcagcccatcagggacccacagcgcctgggaggatggtgcggatcttggccaatggggaaatcgtgcaggaygacgacccccgagtgaggaccactacccagccaccaagaggtagcattcctcgacagagcttcttcaayaggggccatggtgctcccccagggggtcctggcccccgccagcagcaggcaggtgccaggctgggtgctgctcagtcccccttcaatgacctcaaccggcagctggtgaacatgggctttccgcagtggcatctyggcaaccatgctgtggagccggtgacctccatcctgctcctcttcctgctcatgatgcttggtgttcgtggcctcctcctggttggccttgtctacctggtgtcccacctgagtcagcggtgacctctgagggctgataggggtgggtttgttgagagggacttgctgggccttggtgtgagagcaggcatatttggaggggatctggtggtgccttgaaggtatgatcagagaggggaccacaggtgtgtgtttcccctttgtgttaagcgtgaggcagagggagacgttagtccagcatttccaaagtgtgggtgggtccgttggttcccgagatacttttaggtggtatggggcctgcattaagtggcacaaaatcagagcaagaaagcgatgcccttcccaattctctcaatccttttatgccgagaagatctcagctggatgccaacatgttccgatgcctgtggaagacatgccgacgtctcctctgcctagggagcaggacttgggcttagggcaggtggaaaaaattccagacttttttagcactgtttttgttttaatggtatatttttattggctactttattgtttaggacaagtggtagtggcattctatttattgtgaccttttcaataaatagatttaagtaaaaaaaaaaaaaaaaaaactcgagggggggcccggtacccaattcgcccctatagnagagtcg

SEQ ID NO: 620 - DNA, 2638 bp, Homo sapiens
tcgacccacgcgtccgctcttcttcttcaacatgctcttctgggtgatttccatggtgatggtggctgtgggtgtctacgctcggctaatgaagcatgcagaagcagccctagcctgcctggcagtggaccctgccatcctgctgatcgtggtgggtgtcctcatgttcctgctcaccttctgtggctgcattgggtccctccgcgagaacatctgcctcctgcagacgttctccctctgcctcaccgctgtgttcctgctgcagctggccgctgggatcctgggcttcgtcttctcagacaaggctcgagggaaagtgagtgagatcatcaacaatgccattgtgcactaccgagatgacttggatctgcagaacctcattgattttggccagaaaaagtttagctgctgtggagggatttcctacaaggactggtctcagaacatgtatttcaactgctcagaagacaaccccagtcgagagcgctgctctgtgccttactcctgttgcttgcctactcctgaccaggcagtgatcaacactatgtgtggccaaggtatgcaggcctttgactacttggaagctagcaaagtcatctacaccaatggctgtattgacaagttggtcaactggatacacagcaacctattcttacttggtggtgtggctctaggcctggccatcccccagctggtgggaattctgctgtcccagatcctagtgaatcagatcaaagatcagatcagctacagctctacaaccagcagcaccgggctgacccatggtactgagaatccatcctgcacctcctcaccatggaaactggcaagcctcataaacgaacagcagtgggtgctgaaagcagcaccaaatggagatttggattccagccccccagtgacagcccagtgggaagaagcaaactccagatgggcagaaggcagggtgcacaggtggctccagtctcaggaggatgcgcctcctctcccccatcccagccctcagcattgtgccagagtgatacccttaagtgtttgggtttatgttttcagttttgtttgggaaacagcagttgcacagagagttgggggtactgctgctgccttttcaccgaggcactgccaccaccagctctagcagggatgctcctgagcttggcggacatacttagatcctaacgtgccagtgagacctggctgtggagagtagcactggcagccctgcctggactccacttggcatgataccagctccagaagggaagggagtggagcaggcagtgaggagagagcctgggggtcggctggggacagccgtatgtgctaggtaggagtggagggagatatgtttaccaaatgcctgtcctgccatcctcccaggtagtcagagtgagctacatcctgccccgccttcatttccatggaaacatggcagctaggacacggggtacaacagcagccaaattcttccccacctcccttacttcgaaaaaaagtttggaaccctggtccctatactctgcagtcagaagtgggactgagccatacatgcccttgaattcctccctgtctggccctccctctccagcaagcagggttttctttaacttggcagtgtgcagaggagaagtggtaacacccccaccccattcccctgcatcggagctcagtattcctacagggtaagaggtaggaatcttgctgggacgaggggagccagaagtggcaataaaagcgtgttgacctgggctacgcgggactccatgaattttccattctggcaactggaaggggaggtgtagaagggccctgcagaggacggcactggagactctcctaaacgccacacacctcccccttgctgcccgccacacgcgcgtctccttcaaccgatgcattgccaccctcccacagcctcgccctctgctctaaattaggtcgaaagagtcccagttccaatctaggaacagcataattttgttccaaaacctgatctgtgtttttctaattaaaattaatttgtcacccaaaacaggagggggatggggaggagggacatgagcactccgctggggccgggacggggaatgaggaggaagaaggccctctcttcccctacccgggccctccaggaccttctccctgagtcggctgtagggaggactccgaggaagctcggcgcggtgcgctgggcctcctggcgccgggaggagcgcgcgaggcaggcggggcgggcgcgtccggggcggggcgctggacttcgtgggtggtccccgcccccgcggcggcctaggcccgcgcctgcgtcccccaacccggaggagatggggggctgtgctagctgcttgcccagcgagtgttcccggagtctcctcgccgcaccccgctatcgggcgctcagaccaggggctcggcctggcgggaaatagcctcgaccgaactgctgcggggacaaagagccgcgagttcgctccctgcccccagtgtctcctaagcgagccttctgctcctaggaaggcgcctttccagcagccgctgggaccctggccagtgtttagctcccaactagtaacagacggaaagaaaaaataaaattatccagaatctaaaaaaaaaaaaaaaaaaaaaaaaaaaaaaa

SEQ ID NO: 621 - DNA, 1393 bp, Homo sapiens
gggtcgcggtcattttgagcccctgtctggatgacttcttgcggctgttctacccctccccctccccgcggtaccttgcacttttctccctccctgccccctctcgagtccaccctccgggccttctgcccctgatcgcttggttttccttgcagtcgcctgctgctgtcgtcgggaggaaagatgaatgggagggctgattttcgagagccgaatgcagaggttccaagaccaattccccacatagggcctgattacattccaacagaggaagaaaggagagtcttcgcagaatgcaatgatgaaagcttctggttcagatctgtgcctttggctgcaacaagtatgttgattactcaaggattaattagtaaaggaatactttcaagtcatcccaaatatggttccatccctaaacttatacttgcttgtatcatgggatactttgctggaaaactttcttatgtgaaaacttgccaagagaaattcaagaaacttgaaaattccccccttggagaagctttacgatcaggacaagcacgacgatcttcaccacctgggcactattatcaaaagtcaaaatatgactcaagtgtgagtggtcaatcatcttttgtgacatccccagcagcagacaacatagaaatgcttcctcattatgagccaattccattcagttcttctatgaatgaatctgctcccactggtattactgatcatattgtccaaggacctgatcccaaccttgaagaaagtcctaaaagaaaaaatattacatatgaggaattaaggaataagaacagagagtcatatgaagtatctttaacacaaaagactgacccctcagtcaggcctatgcatgaaagagtgccaaaaaaagaagtcaaagtaaacaagtatggagatacttgggatgagtgaaaaattacatcattggacatgaaggagtttcaacatccagcttcatctaggtggtcatgattacctgcatgctttgagctcagcagcagtcttcataaacacatttaaaacaagatcctgggtttttgtggtttgacttctatggtgttttaaaaaaacacagatttttagtgttaatattgtgtaaatgtactcaccttagggattcatttgaatgatggtattataccatgattgtatacagtttgtgaaattgttgcaagggcaaagataactcttaaaaaaccgtcgagattacaatgctctagaatcagcatataagaaaataaatgatatctgcatgttgaattggggtggatggggggagcaagcataatttttaagtgtgaagctttgcatcaagaaattattaaaaagctttttttctccaaaaaaaaaaaaaaaaaaaaaaaaaaaaaaaaaaaaaaaaaaa

SEQ ID NO: 622 - DNA, 1778 bp, Homo sapiens
  misc_feature (1730)..(1730): n equals a,t,g, or c
  misc_feature (1747)..(1747): n equals a,t,g, or c
  misc_feature (1753)..(1753): n equals a,t,g, or c
gctgtttactaggcacgactgcgaaggcaagggggcaccagctcaggactgcatctgcctgccatttcccttccactcctcctttctggagtctgacattagaaagccagcgagaaggaagattcaaacaaccaaccctgatttcctgcttctccttttcatgagtgttcctgtggtctctgcacctcctttctgtcccccggcagagggcagtagagatggccggcccaaggcctcrgtggcgcgaccagctgctgttcatgagcatcatagtcctcgtgattgtggtcatctgcctgatgttatacgctcttctctgggaggctggcaacctcactgacctgcccaacctgagaatcggcttctataacttctgcctgtggaatgaggacaccagcaccctacagtgtcaccagttccctgagctggaagccctgggggtgcctcgggttggcctgggcctggccaggcttggcgtgtacgggtccctggtcctcaccctctttgccccccagcctctcctcctagcccagtgcaacagtgatgagagagcgtggcggctggcagtgggcttcctggctgtgtcctctgtgctgctggcmggcggcctgggcctcttcctctcctatgtgtggaagtgggtcaggctctccctcccggggcctgggtttctagctctgggcagcgcccaggccttactcatcctcttgcttatagccatggctgtgttccctctgagggctgagagggctgagagcaagcttgagagctgctaaaggcttacgtgattgcaagggttcagttccaaccatggtcagaggtggcacatctgctcagccatctcattttacagctaacgctgatctccagctccagcgatggaacccactacagaggaggtggggcccctgtgtcaaagaggccgaggggcagcaagggcagccagggcacctgtgacttcttagtacaagattgtctgtccttcaggacttccaaggctcccaaagactccctaaaccatgcagctcattgtcacaccaattcctgctttaattaatggatctgagcaaatcttcctctagcttcaggagggtggggagggagtgattgctgtcatggggccagacttccaggctgatttgccaaatgccaaaatgaaacctagcaaagaacttacggcaacaaacgaggacattaaaagagcgagcacctcagtgtctctggggacatggttaaggagcttccactcagcccaccatagtgagtgggccgccataagccatcactggaactccaaccccagaggtccaggagtgatctctgagtgactcaacaaagacaggacacatggggtacaaagacaaggcttgactgcttcaaagcttccctggacctgaagccagacagggcagaggcgtccgctgacaaatcactcccatgatgagaccctggaggactccaaatcctcgctgtgaacaggactggacggttgcgcacaaacaaacgctgcaccctccacttcccaacccagaacttggaaagacattagcacaacttacgcattggggaattgtgtgtattttctagcacttgtgtattggaaaacctgtatggcagtgatttattcatatattcctgtccaaagccacactgaaaacagaggcagagacatgtaaaaaaaaaaaaaaaaaactcgagggggggcccggtacccaaktcgcccttatagngagtcggaattaacaanttcaantgggccgtcgtttttacaacggtcg

SEQ ID NO: 623 - DNA, 1176 bp, Homo sapiens
ctgcctcagcctcgcctgctcctacgtgggcagcctctacgtctggaagagcgaactgcccagggaccatcccgcggtcatcaagcgacgcttcaccagcgtcctggtggtgtccagtctctcacccctgtgcgtgctgctctggagggaactcacaggcatccagccaggcacatccctgctcaccctgatgggcttcaggctggagggcattttcccagcggcgctgctgcccctgttgctgaccatgattcttttcctgggcccactgatgcagctctctatggattgcccttgtgacctggcagatgggctgaaggttgtcctggccccccgctcctgggcccgctgcctcacagacatgcgttggctgcggaaccaagtgatcgccccgctgacagaggagctggtgttccgggcctgtatgctgcccatgttagcaccgtgcatgggcctgggcctgctgtgttcacctgcccgctcttttttggagttgcccattttcaccatattattgagcagctgcgtttccgccagagcagcgtggggaacatcttcttgtctgctgcgttccagttctcctacacagctgtcttcggtgcctacactgctttcctcttcatccgcacaggacacctgattgggccggttctctgccattccttctgcaattacatgggtttcccagctgtttgcgcggccttggagcacccacagaggcggcccctgctggcaggctatgccmtgggtgtgggactcttcctgcttctgctccagcccctcacggaccccaagctctacggcagccttcccctttgtgtgcttttggagcgggcaggggactcagaggctcccctgtgctcctgacctatgytcctggatacgctatgaactctsaccgtctccccagccctccccaccaaggggtactgcaggggaagggctggctggggtccccgagatctcaggaatttttgtaggggattgaagccagagctagttgcgtcccagggaccaagagaaagaagcagatatccaaagggtgctcggggttttttatttataaaacctctccccaccccccaccccccaacttcctgggttttctcattgtctttttgcatcagtactttgtattgggatattaaagagatttaacttgggtaaaaaaaaaaa

SEQ ID NO: 624 - DNA, 983 bp, Homo sapiens
ggcacgaggttttctttatggagtacttctttcctccgcctttcctctgttttcctcttcctgtctcccctccctcccacctttttctttccttcccaattccttgcactctaaccagttcttggatgcatcttcttccttccctttcctcttgctgtttccttcctgtgttgttttgttgcccacatcctgttttcacccctgagctgtttctctttttcttttctttctttttttttttttttttaagacggattctcactctgtggcccaggctggagcgcagtggtgcgatctcgactcactgcaacccccgcctcctgggttcaagcgattctcctgccccagcctcccaagtagctgggaggacaggtgtgagctgccgcacccagcctgtttctctttttccactcttcttttttctcatctcttttctgggttgcctgtcggctttcttatctgcctgttttgcaagcaccttctcctgtgtccttgggagccctgagacttctttctctccttgcctccacccacctccaaaggtgctgagctcacatccacaccccttgcagccgtccatgccacagccccccaaggggccccattgccaaagcattgctgcttctcttcaccccatggaggctatgtcaccctaactatcctggaatgtgttgagagggattctgaatgatcaatatagcttggtgagacagtgccgagatagatagccatgtctgccttgggcacgggagagggaagtggcagcatgcatgctgtttcttggccttttctgttagaatacttggtgctttccaacacactttcacatgtgttgtaacttgtttgatccacccccttccctgaaaatcctgggaggttttattgctgccatttaacacagagggcaatagaggttctgaaaggtctgtgtcttgtcaaaacaagtaaacggtggaactacgactaaaaaaaaaaaaaaaaaa

SEQ ID NO: 625 - DNA, 2338 bp, Homo sapiens
  misc_feature (18)..(18): n equals a,t,g, or c
gcccacgcgtccgggccnattcgtgtaattattgcccatttggctcattccccaagcccctaattcattttaattcattttaaacaaaagcagagtacaccggtattgctccagatcgctcacatcacctgggacagtcccatggcccctatgagtcaactcacagcttgcggggagtgggccttctcctggccttgttcttgctcataaacaggtcacttcctccatgaagagaccagtttccacgctcccatctctcactgctgactcagcgatgcctctgcctcggtctgcttttgaagactgtgaccttcaccaggaggttttacttacaccagtcgggaagattagtccctcattctgcctggagtgccccgtgtttgacttggcagcgggtgtggagccatccccgcgtcctcctggcrcattgccactgtggctgtccaggaacaggatgtggctgccttggccgaatgttgtcctactctccccaaccycggcgcctcagctcctcagctcctcgggcccctgcgtctggctggtgtttgcagggctttcgctctgctctggtattgctctgcctttatagaaagtcttattgaagaagtgtaagaaagacctaaggtggggaagactcctacacacaccattagtatcagtgacaccagcaatgtaggttcccagccccttcccagtggcagcttgtgtgtccaggagataggacatcatttaacgcatcagcaaagtagcagcagatgccacatacagagtagagcgaaggcatttggtggatcggtcactagagatctatcttgcagaaagtatgtttttcctcataaaagtgcctcttaattggccattgtaccagccacttgtcctagccaaatgtccaaaacacgcccttgggccccgccacgttacaatccacagattgtctgtctgagtcgtttaaggcatttcctggtgcttgtgttccatgaataaaaggacaaagtcagaagatcactgatgtcttactgtcaacagagatattttaaaagagagaagcaggaaaagatcttccttttttgatctacaacttatatagttttctgattatgcacataatagatatgccttccagatgcataaggcaaacatctggaaagaaatatacccaaatcttagcaggggttatctttgggagtggagtacatgggattttgctttcttcatttttataattttatattactgtcttggaagatgtgtttatgtgtgtgtgttacttttacaatcaggaaaacatatttaataacatatagtcaagaaaacagacttaaaaataaatactatgtgtccattgagaaaattcacaatataaacagaaatacaaataaatacatacacaattttaaagtcacctgtagccctacccttagaggtacccagggttaacattttggtggtattgtcttatcaatttttccgttgatacattcagcaaatttggagcacattgaccatggagttttgtgtccaaatccaatctgaatttacctggaagaggccttgacacctgcatggaaatgagctaagaaaaccactggagccttgggagctctttggcctcctggctggcccagtaatatctgagctcctttggttaatttataactgatataaaactacatcttctttataatataaattgtacctgtgagtctagaagctttaaatgtgtttaaattaaaatattcaagctaaatgttactgctctctcccaaattctgtaagtttgactcccgttaccccaattagaagtaacttctttgtttcatgccacttttatagcatttggtaattctgctataacacatcttgcccctattattaactgtgcacagctacacaaaggtgtgccttctacgtgggaacatggattgtgaatgactctgtaatgaggcctgagtcttagttatctttccactcactccccgtctcccctttccaaccccaaaggctcacgataggggctcactaaatgtcagtgtttcaccaaagtattttttccattgtattaagagtccagtcactgtatatggaagtattttattttttatttttttatatcacttgagtccactagtagtacttccttgctctgtttgacttgtcagatacaaagacacgggattagattttgggtggtaaaattgtgatacgcatggctgttgatggagtggaacatcttagtgatgtgagaaaggtcattttagttataaatgtaaaccaattactttagcacaacaataaagatgttctggaaattattataaaaaaaaaaaaaaaaaaaaaa

SEQ ID NO: 626 - DNA, 564 bp, Homo sapiens
aagaaaggatttatgtgcttgggattcttgaggggttttccagagtcagtccccaattctgatgtttttatacgcaacactaggggtccttctgaagttatcccggcccctgggaaactcacgtggcatggggcccccttctgccctggtctctttcatcccatctgtcccggccccagagcctgtccagtctggtcctctctgtcctgcttggtttgtcaccatgtgatgttgggatggcttgtctttgccgcctcacttcctaagctgacagacgtgtctgctagggaccatcagctcccaagccgcatgacggtgctttccttcaaggttcagaggcttccctttcagtctggcccatctcccacatcctaatggctctgctgtctcaggggcagctctcctttttaacttattggcagagctgggatgacttataggtccctggctcagtgagtaagcaagttcagagacttggctttggccattttgttctcttaggctcatccttggatgccaacagggaaattacctgccagatttcagtcactactttttagaagt

SEQ ID NO: 627 - DNA, 1324 bp, Homo sapiens
ccggcttgtgcatgatgacggccggcctggtgatgaacaccattcatcctggccatggtcatcagcagtttcggaggactcatcttgagcaaaaccgtttctaaacagcagtacaaaggcatggcgatatttacccccgtcatatgtggtgttggtggcaatctggtggccattcagaccagccgaatctcaacctacctgcacatgtggagtgcacctggcgtcctgcccctccagatgaagaaattctggcccaacccgtgttctactttctgcacgtcagaaatcaattccatgtcagctcgagtcctgctcttgctggtggtcccaggccatctgattttcttctacatcatctacctggtggagggtcagtcagtcataaacagccagacctttgtggtgctctacctgctggcaggcctgatccaggtgacaatcctgctgtacctggcagaagtgatggttcggctgacttggcaccaggccctggatcctgacaaccactgcatcccctaccttacagggctgggggacctgctcggtactggcctcctggcactctgctttttcactgactggctactgaagagcaaggcagagctgggtggcatctcagaactggcatctggacctccctaactgggccccgctggtcccatttgctcattagaatttcctctcacatcagtgggatacagaattcagtttctcccttgccaggtccttgggatggttgacccctgcctctgcagtagccttttgtgagtctgctaaggtagctctcacacacctcggctctggggttgatacctgagcctgcaatagagccctgaaatcaagagcatggcttgagtgtgtgaatatgatgtgtgcacatgcttaatgagcgtgcaagtgtgcacacgtttgtggagaggagggtgttctggcctgagaaggtaaagaagaggcatgtccagtatgctttgcagggtgtgtttgctcttttccatgcccatgcaacccagattggggtggagcaggaaggagctcttttctgttcccaagcctcagaactcttgagctgtggcttacttgctgtcttcaccaggttcaagctccgtgggccacactgctgctgtgccaagaaggtgtacagcctccccaggatggggcctcatacaacccttcatctgcactcaacatttaatcgtgtccttgctgtctttttattttcctttttgtttgttagcaaaaacctctatttagatttcaataatcagagaagtgtaaaataaaacagattatattgtaaaaaaaaaaaaaaaaaaaccggcacgag

SEQ ID NO: 628 - DNA, 1626 bp, Homo sapiens
  misc_feature (1)..(1): n equals a,t,g, or c
  misc_feature (60)..(60): n equals a,t,g, or c
  misc_feature (1600)..(1600): n equals a,t,g, or c
nccaccccatacccccaccaccctactaccccagcttcctgccctacttcctctcgatgnatgtcaatgtcaccaacagcaatggggcccaccatmagcytggacctggacgtggatgatgtggagatggagaactatgaggccctcctgaacctggccgagcggctgggagatgccaagccccggggtctcaccaaagcagacatagagcagctcccgtcgtaccgctttaacccggacagccatcagtcggagcagacgctgtgtgtggtctgcttcagtgacttcgaggcgcggcactgctccgagtcctcccctgcaaccatgagttccacaccaagtgtgttgacaagtggttgaaggccaaccggacgtgtcccatctgccgggccgacgcctccgaggtgcccagggaggctgagtgaggccacgcagccgcctgcccgggagaaccctgcctgaagctctggaaacttgtgggtggggcccagggaggatggggagggagtggcccaggcctgccccttcgctcctgcctgcatttccagagctggtgccagggtcagcccagcgaggagtccctgcaataagcccctgcatttgccaagctccaaagactccctccctagtctgcctgcccgcccgcccgccacggagctgcctgagtgtccctgatcgggtctccctcctgtgcaccctcaggtccctccttttcctgctggcactgagtgccaggggtccgctccctcagtggggccggtggagatccttggccccaggatgggcagacagagcaccatcctgggtcagaaggtctcatsctctgaaatggcgtgccctctgcccaggtggcactgccaggtgcgtagacagacggtgtcacgagccatttcctgagccccagggctgaatcccccctccttgaccccgaacagtgaactcaggcagctggctctgtgttggctgctgtgagggctgagtctggttccctaggggaccctcatcccaggaacaacattccagccccaccctcaggctggagggcgtcccagcctaatcccgagctggggcacacgtatcctgaggggcttkggccatacggggagagggagccctgtgttcccggtggttgtccctcccagggatgcagccagacccgtgcccaatctcctctccctctgttgttttgcatgaacgtgaggagcagcagtttttgttcattcatttggcccaaaatcacgtgtaggatttggggatgtggatatttaagacaatttcttttttcttttggtttaataggggcgggtatagggaccaactgggaccgagtgcccagggggccgagcacggtcatgctggccggcctgcatgcatgcgtgtgccgggctgggctgggcggccggcggtcgtggggcagggttgggggtctgtgctcagctgataactgccatgcactgtactgcacacgtccctagagcctaccgggacccgacgcttttcarggcatttctccctccagccarggcccaactcccacctgyctkgggcgaatctcctcccaaagaaattccccagaaagaattgggaaccagaaaaggtntttgaacccccatcttcccagggggc

SEQ ID NO: 629 - DNA, 1083 bp, Homo sapiens
  misc_feature (16)..(16): n equals a,t,g, or c
  misc_feature (27)..(27): n equals a,t,g, or c
  misc_feature (32)..(32): n equals a,t,g, or c
  misc_feature (111)..(111): n equals a,t,g, or c
aaggcagccacacctnagtaatgaagnataantaacaccctaaaactttgcccgaaactgtatattgtagccatacttaaaccccatgcaaggaaaaaattggcaaattgnaaaattcctccccattaaagattgatatttttgcaaactaacaaatttaacgatttcggtacccctccccaaaaatgcagtcacataaaatatatcaatactattttgaattagctctagaaatcacactgaaactatgttacatttacaaatattaaatttattataactaaaatgaatttaattgttctcagatttggccaccttatagctccgtttaaggaggggatttgttaaaaacaaaaatgcattataacttggtcaaattactttcacattaaggaaaaaaacttctaaaaaggaaaacaagaaaagcaactcttcagtttcacataattaaaagaacaggagaaagcacgcaagctacatatagctaaatttacgaaaccaaccaaagccagggggatttctcttctgattatgtgtcataaaaaggtccactgtcttatatacacatgtatataatgttacattccatcactgtaaaaagtcccctttgccccctcccccaaaaaagtttcagtctagtctccaaacttggaaagcggcgctcgctcctgctgccggtgcagttcgttctcggtcagcagctggaggttctcggcgcgcagccggtccagctccagctccagctcccgcacacgcgcgtcgtcgccacccagccgcttgctctccagccgcagccggttgttctcgtcctccatgcgcgagaggcacttctccagttccaggtactccttgatgagctcctgcttgctcatgttctgcaggctctccgtgtggtaccgctcgtacgtctccgagaagtcccgctgcagaaactcgctgccgtcccctcccatcccatcgctgcccccatcctcctcacccccttcttccatgaagtcgtcatcgctggtgtcgtcggatttgcggcggsccgyttggagtamaggccggttttgaggtccggctcctcctggtcgtgatcat

SEQ ID NO: 630 - DNA, 1817 bp, Homo sapiens
gtctggttctatcatgacttatgtaattgatacatattatcaaatatttaattgtgggatgttgaactattcaaaattaccacattaatgatacgtaatcttatgtatattctgtgagccaccacgcccggccgatttggggcatttttatttaacagaacttctctaaycttccaactgcttcccacaaacacattggcctcaaggctccttagaatcccagttccagcttcctaaaatagacagtgggtatcgggcagcagtcactggggctcaagggcagtgagcaagagaaatgtctaaagctgcttctcccaacaccgtccaaagtctccactgcctgagttttgtttcggctggtttgaactcatttcgggtgtgtgcatttttcttttggtacccatgtgagacatgaacaacaggagggagggaaagagcccaggtgggacgtgggacaggcttaggggaaagagcttgtcctatctcaggaacaaaattataggctgtgggcagagggtctgaaaggtgggctttggggtagtgcccaagcctggtcgtgttgccaggagtggtgacaagaaatgcagcttacatcaaacgaacatgtagtgcatgcccactgcctgatggccagatggctgtaggaagagctaccagggcttccagacctgtggaacgaagaggatggggaaaaggcagagggcactgagtgtccctttaaaaactaacacactgaatattccgtgtgatctagaacagtgtggcagctttcacagcacaggaccgttcatcgggggcctaaacgtttccctcrgctctgtcaccaactcacttctctcggcttcgttgtctgtaaattggatgaaaagagctctaatgcctttcaggctcttagaagccatagatttggacaagcccagcaagatgggtgtccttccaggcctcttcccctttcctccatctctggcaacagttcttggggtttggcaattgtttggattttttttctttctgcagttgtgtgtatgtgtgtttgtgtgaagaaaaacagactctgtccaggtagaaatggtgaggagggggaagagaattacatttccagggtcagaaacttggcaacagttttcctagagtgactcagacacaccacagtaacaactctcgctgcaattttattttaatttgagaaataaagatttcctccaagccacatgaggactctggcacccacccacaaagcaagacctgtatttataagccgagggctcagggagcctaactgcgggacccgtcaggccccgtgacccatccccgtccccacccccccctccaccgctgggcccatcagtgtgtgttggggggatgcttggcagctgggggtgaggagacaacaaacctcgggaactggagccagagctgcggcctgactgacgccttttgatgctcacgggaaatttctgcccaggatctcagccccaggctggttgtttctacaaatctctctcaaatgtattattttggtgacaaaaatgaaggagctttgtaaatttttttaaaattatgaatcatatcaagtagttgtttacatttcttgaaaaaataggaactcgggcagcagaatcagattggcagaatctttagactacacaggcaataatcaagtctgctgttttggcctttcgtagtagaagtggttgtagtgtttagatatctgtttggtcttgcttcttgtattgcatttttttcaataaacaacaacaaaaagaaaaaaaaaaaaaaaaaaaaaaaaaaaaaaaaaaaaaaaaaaaaaaaaaaaa

SEQ ID NO: 631 - DNA, 1887 bp, Homo sapiens
gaattcggcacgaggcggtgcggggcctgggcgggagccgggaggcgcggccggcatggaggcgctgctgctgggcgcggggttgctgctgggcgcttacgtgcttgtctactacaacctggtgaaggccccgccgtgcggcggcatgggcaacctgcggggccgcacggccgtggtcacgggcgccaacagcggcatcggaaagatgacggcgctggagctggcgcgccggggagcgcgcgtggtgctggcctgccgcagccaggagcgcggggaggcggctgccttcgacctccgccaggagagtgggaacaatgaggtcatcttcatggccttggacttggccagtctggcctcggtgcgggcctttgccactgcctttctgagctctgagccacggttggacatcctcatccacaatgccggtatcagttcctgtggccggacccgtgaggcgtttaacctgctgcttcgggtgaaccatatcggtccctttctgctgacacatctgctgctgccttgcctgaaggcatgtgcccctagccgcgtggtggtggtagcctcagctgcccactgtcggggacgtcttgacttcaaacgcctggaccgcccagtggtgggctggcggcaggagctgcgggcatatgctgacactaagctggctaatgtactgtttgcccgggagctcgccaaccagcttgaggccactggcgtcacctgctatgcagcccacccagggcctgtgaactcggagctgttcctgcgccatgttcctggatggctgcgcccacttttgcgcccattggcttggctggtgctccgggcaccaagagggggtgcccagacacccctgtattgtgctctacaagagggcatcgagcccctcagtgggagatattttgccaactgccatgtggaagaggtgcctccagctgcccgagacgaccgggcagcccatcggctatgggaggccagcaagaggctggcagggcttgggcctggggaggatgctgaacccgatgaagacccccagtctgaggactcagaggccccatcttctctaagcaccccccaccctgaggagcccacagtttctcaaccttaccccagccctcagagctcaccagatttgtctaagatgacgcaccgaattcaggctaaagttgagcctgagatccagctctcctaaccctcaggccaggatgcttgccatggcacttcatggtccttgaaaacctcggatgtgtgcgaggccatgccctggacactgacgggtttgtgatcttgacctccgtggttactttctggggccccaagctgtgccctggacatctcttttcctggttgaaggaataatgggtgattatttcttcctgagagtgacagtaaccccagatggagagataggggtatgctagacactgtgcttctcggaaatttggatgtagtattttcaggccccacccttattgattctgatcagctctggagcagaggcagggagtttgcaatgtgatgcactgccaacattgagaattagtgaactgatccctttgcaaccgtctagctaggtagttaaattacccccatgttaatgaagcggaattaggctcccgagctaagggactcgcctagggtctcacagtgagtaggaggagggcctgggatctgaacccaagggtctgaggccagggccgactgccgtaagatgggtgctgagaagtgagtcagggcagggcagctggtatcgaggtgccccatgggagtaaggggacgccttccgggcggatgcagggctggggtcatctgtatctgaagcccctcggaataaagcgcgttgaccgccaaaaaaaaaaaaaaaaaaaaaaaaaaaaaaaaaaactcgag

SEQ ID NO: 632 - DNA, 2394 bp, Homo sapiens
  misc_feature (2004)..(2004): n equals a,t,g, or c
  misc_feature (2017)..(2017): n equals a,t,g, or c
cggaagcgctggacgagaggaggaattactctagggtacaaggcctcgcccaggagtggggggttgcttccgggtcgcgctcccggaaacaggaagttgcccatcctcctcgcccggcggcagctgtccccgaggcgggaggagcccgagggggcgcgagcccgcatggattttatattggaagacatggatcttgctgccaacgagatcagcatttatgacaaactttcagagactgttgatttggtgagacagaccggccatcagtgtggcatgtcagagaaggcaattgaaaaatttatcagacagctgctggaaaagaatgaacctcagagaccccccccgcagtatcctctccttatagttgtgtataaggttctcgcaaccttgggattaatcttgctcactgcctactttgtgattcaacctttcagcccattagcacctgagccagtgctttctggagctcacacctggcgctcactcatccatcacattaggctgatgtccttgcccattgccaagaagtacatgtcagaaaataagggagttcctctgcatgggggtgatgaagacagaccctttccagactttgacccctggtggacaaacgactgtgagcagaatgagtcagagcccattcctgccaactgcactggctgtgcccagaaacacctgaaggtgatgctcctggaagacgccccaaggaaatttgagaggctccatccactggtgatcaagacgggaaagcccctgttggaggaagagattcagcattttttgtgccagtaccctgaggcgacagaaggcttctctgaagggtttttcgccaagtggtggcgctgctttcctgagcggtggttcccatttccttatccatggaggagacctctgaacagatcacaaatgttacgtgagctttttcctgttttcactcacctgccatttccaaaagatgcctctttaaacaagtgctcctttcttcacccagaacctgttgtggggagtaagatgcataagatgcctgacctatttatcattggcagcggtgaggccatgttgcagctcatccctcccttccagtgccgaagacattgtcagtctgtggccatgccaatagagccaggggatatcggctatgtcgacaccacccactggaaggtctacgttatagccagaggggtccagcctttggtcatctgcgatggaaccgctttctcagaactgtaggaaatagaactgtgcacaggaacagcttccagagccgaaaaccaggttgaaaggggaaaaataaaaacaaaaacgatgaaactgctttctgggggttggttacttagttacctgccctttgcatgcatgtgtgaaccagctgtgagctgcaaggcagtgggccagagcctcgccctcctgactcttcctgcaggtggctcaggaaggattcagcctggccacttggctaggactctgccagcacccatctgagactgacctcttccgggcctttggacactatgaccttgatgctgcccttcaggcaggaaacagggctggtgccttttttcacctgcatggccagcttccttccctggcagtggagagggcagccaacaggttctaatgtcagagccatcctttaccaggtgggcctgcttgtccctgtcttgcctgccacatcactctactttttggaaggccatggctgattaaagaagttcttgtagtttcccaagcaaagtggaatctagaaacagtgaaaaaagttcagataactttgaattgcattcaagaagtacacttctttcccattgtccgtggctcttggagtctccgtgatgccaggctagagtctgattatataataattcaaaatggtaactcccaaggtaatgctttcttccatttcatcaggttcttttatccccactgcaccccctccccttctcccttgcctatctggatggcttctcagaagctcggccctagtcctccctgccttggcggggnccagagcccactnactgctgaggcagcactgctctcgtcagctgtgttgcctttaccaagtgtcttcagagggttatgagttagagtagctggcctggggagagggtgcctccctgggtttgatctttagggtctgactttctgcagagaagatgttttacagatgtgtcaaagctgatgtaatgtggttgggggaggaaatccagacccaaagtgtttgtcagctgggtgtacaactgcctatgtgatcctctgtcttaaaatgatttctgtctgtgctgcgaaacaaagacaaggtgaggtgtttttcttttttgtaataatataaagctgtgtgtttctgattggatgattcactatgtgcattgttccycctaagtgcttttagta

SEQ ID NO: 633 - DNA, 766 bp, Homo sapiens
  misc_feature (56)..(56): n equals a,t,g, or c
  misc_feature (91)..(91): n equals a,t,g, or c
  misc_feature (141)..(141): n equals a,t,g, or c
  misc_feature (652)..(652): n equals a,t,g, or c
  misc_feature (753)..(753): n equals a,t,g, or c
  misc_feature (763)..(763): n equals a,t,g, or c
gaagttaggcaacatgccttataaggagagaaaaagcaccgtgcatgccgattggngggagtaagggtggtatgatcgtggtatgatcgtncccttgttaggaaggcaacagacgggtctaacacggattggacgaaccantgaattccgcattgcagagatattgtatttaagtgcccagctcgatacaataaacgccatttgaccattcaccacattggtgtgcacctgggttgggatctgccatcatggaggcgggcggctttctggactcgctcatttacggagcatgcgtggtcttcacccttggcatgttctccgccggcctctcggacctcaggcacatgcgaatgacccggagtgtggacaacgtccagttcctgccctttctcaccacggaagtcaacaacctgggctggctgagttatggggctttgaagggagacgggatcctcatcgtcgtcaacacagtgggtgctgcgcttcagaccctgtatatcttggcatatctgcattactgccctcggaaggctaaggtgattcaaactaaatcaacccaatgtctctcctacccactcaccattgctacccttctcacctctgcctcctggtgcctctatgggtttcgactcagagatccctatatcatggngtccaactttccaggaatcgtcaccagctttatccgcttctggcttttctggaagtacccccaggagcaagacaggaactactggctcctgcaaacctgangctgctcatntga

SEQ ID NO: 634 - DNA, 3004 bp, Homo sapiens
  misc_feature (86)..(86): n equals a,t,g, or c
  misc_feature (2898)..(2898): n equals a,t,g, or c
  misc_feature (2971)..(2971): n equals a,t,g, or c
aactacttccgcgggaaagaacgcgcaggcacttggccttgtgggcgctcacttgccccggaagtactgttgagttagcgcctcgncttccggggcggattgtctgtcgttgcagtagctgtaggaaggggaggccattttccgtttctgggaggagtgaggggcaacgggtcggagaaaaaggaaaaaagaagggctcagcgcctccccgccgggccgtggacagaggggcacagtttcggcaggcgggtgaggtcgctgagggcccgccggagatgttttccttgtcgagcacggtgcaaccccaggttacagttcctctgagtcatctcatcaatgccttccatacaccaaaaaacacttctgtttctctcagtggagtgtcagtttctcaaaaccagcatcgagatgtagttcctgagcatgaggctcccagcagtgagccttcacttaacttaagggaccttggattatctgaaytaaaaattggacagattgatcagctggtagaaaatctacttcctggattttgtaaaggcaaaaacatttcttcccattggcatacatcccatgtctctgcacaatccttctttgaaaataaatatggtaacttagatatatttagtacattacgttcctcttgcttgtatcgacatcattcaagagctcttcaaagcatttgttcagatcttcagtactggccagttttcatacagtctcggggttttaaaactttgaaatcaaggacacgacgtctccagtctacctccgagagattagctgaaacacagaatatagcgccatcattcgtgaaggggtttcttttgcgggacagaggatcagatgttgagagtttggacaaactcatgaaaaccaaaaatatacctgaagctcaccaagatgcatttaaaactggttttgcggaaggttttctgaaagctcaagcactcacacaaaaaaccaatgattccctaaggcgaacccgtctgattctcttcgttctgctgctattcggcatttatggacttctaaaaaacccatttttatctgtccgcttccggacaacaacagggcttgattctgcagtagatcctgtccagatgaaaaatgtcacctttgaacatgttaaaggggtggaggaagctaaacaagaattacaggaagttgttgaattcttgaaaaatccacaaaaatttactattcttggaggtaaacttccaaaaggaattcttttagttggacccccagggactggaaagacacttcttgcccgagctgtggcgggagaagctgatgttcctttttattatgcttctggatccgaatttgatgagatgtttgtgggtgtgggagccagccgtatcagaaatctttttagggaagcaaaggcgaatgctccttgtgttatatttattgatgaattagattctgttggtgggaagagaattgaatctccaatgcatccatattcaaggcagaccataaatcaacttcttgctgaaatggatggttttaaacccaatgaaggagttatcataataggagccacaaacttcccagaggcattagataatgccttaatacgtcctggtcgttttgacatgcaagttacagttccaaggccagatgtaaaaggtcgaacagaaattttgaaatggtatctcaataaaataaagtttgatcaatccgttgatccagaaattatagctcgaggtactgttggcttttccggagcagagttggagaatcttgtgaaccaggctgcattaaaagcagctgttgatggaaaagaaatggttaccatgaaggagctggagttttccaaagacaaaattctaatggggcctgaaagaagaagtgtggaaattgataacaaaaacaaaaccatcacagcatatcatgaatctggtcatgccattattgcatattacacaaaagatgcaatgcctatcaacaaagctacaatcatgccacgggggccaacacttggacatgtgtccctgttacctgagaatgacagatggaatgaaactagagcccagctgcttgcacaaatggatgttagtatgggaggaagagtggcagaggagcttatatttggaaccgaccatattacaacaggtgcttccagtgattttgataatgccactaaaatagcaaagcggatggttaccaaatttggaatgagtgaaaagcttggagttatgacctacagtgatacagggaaactaagtccagaaacccaatctgccatcgaacaagaaataagaatccttctaagggactcatatgaacgagcaaaacatatcttgaaaactcatgcaaaggagcataagaatctcgcagaagctttattgacctatgagactttggatgccaaagagattcaaattgttcttgaggggaaaaagttggaagtgagatgataactctcttgatatggatgcttgctggttttattgcaagaatataagtagcattgcagtagtctacttttacaacgctttcccctcattcttgatgtggtgtaattgaagggtgtgaaatgctttgtcaatcatttgtcacatttatccagtttgggttattctcattatgacacctattgcaaattagcatcccatggcaaatatattttgaaaaaataaagaactatcaggattgaaaacagctcttttgaggaatgtcaattagttattaagttgaaagtaattaatgattttatgtttggttactctactagatttgataaaaattgtgcctttagccttctatatacatcagtggaaacttaagatgcagtaattatgttccagattgaccatgaataaaatattttttaatctaaatgtagagaagttgggattaaaagcagtctcggaaacacagagccagggnatatagccttttggcmtgggtgccwgggcttcacatctgtaatcccagcacttttgggaggctgaggccggtngggttgcttgagggccgggggtttcgagacccg

SEQ ID NO: 635 - DNA, 517 bp, Homo sapiens
gctaggtggcagcggaccaagctgacccggcgagcggaccggggctggagagcggcgaccactgcggatctcggaaggaagaaatgatgtaaatcactcatccaaactttaaggtcaaaggtgagaaggaaggtcaggaagaacatggcctggccaaatgtttttcaaagagggtctctgctgtcccagttcagccatcatcatgttgtagtgttcctgctcactttcttcagttattcgttgctccatgcttcacgaaaaacatttagcaatgtcaaagtcagtatctctgagcagtggaccccaagtgcttttaacacgtcagttgagctgcctctggagatctggagcagcaaccatttgttccccagtgcagagaaagcgactcttttcctcggcacactggataccattttcctcttctcctatgctgtgggcctattcatcagtggcatcgttggggatcggttgaatttgcgatgggttctgtcttttggcatgtgctcttctgcattaa

SEQ ID NO: 636 - DNA, 2695 bp, Homo sapiens
  misc_feature (65)..(65): n equals a,t,g, or c
  misc_feature (356)..(356): n equals a,t,g, or c
  misc_feature (2685)..(2685): n equals a,t,g, or c
tgggtctctcacggatctcggcctgagggtgtgggggagaaggcctggacagcctcagggcaggntgtgttttcccaccagccgcagagagccaggatggacgttcctcggacggacggttttcctgcttgggaatgttcctgggctgtgagatccactcttctgggcaggtggttagcacctaacgtttttccctcacttccccccaaattcttaagtcctttggtccatttcactgctcggaccttgagacaacagtcattctgcctgagtctgtcttcagagagacgccccccgtggtcaggcccgcagccccggagaggcccaggagccagaggagctggcacggcgacagngacggcacccggagytgagccagggtgaggytgtggccagcgtcatcatctaccgyaccctggccgggytaytgcctcataaytwtgaccytgacaagcgcakcttgagagtccccaaacgcccgwtcatcaacacacccgtggtgagcatcagcgtccatgatgatgaggagcttctgccccgggccctggacaaacccgtcacggtgcagttccgcctgctggagacagaggagcggaccaagcccatctgtgtcttctggaaccattcaatcctggtcagtggcacaggtggctggtcggccagaggctgtgaagtcgtcttccgcaatgagagccacgtcagctgccagttcaaccacatgacgagcttcgctgtgctcatggacgtttctcggcgggagaatggggagatcctgccactgaagacactgacatacgtggctctaggtgtcgccttggctgcccttctgctcaccttcttcttcctcactctcttgcgtatcctgcgctccaaccaacacggcatccgacgtaacctgacagctgccctgggcctggctcagctggtcttcctcctgggaatcaaccaggctgacctcccttttgsctgcacagtcattgccatcctgctgcacttcctgtacctctgcaccttttcctgggctctgctggaggccttgcacctgtaccgggcactcactgaggtgcgcgatgtcaacaccggccccatgcgcttctactacatgctgggctggggcgtgcctgccttcatcacagggctagccgtgggcctggaccccgagggctacgggaaccctgacttctgctggctctccatctatgacacgctcatctggagttttggtggcccggtggcctttgccgtctcgatgagtgtcttcctgtacatcctggcggcccgggcctcctgtgctgcccagcggcagggctttgagaagaaaggtcctgtctcgggcctgcagccctccttcgccgtcctcctgctgctgagcgccacgtggctgctggcactgctctctgtcaacagagacaccctcctcttccactacctctttgstacctgcaattgcatccagggccccttcatcttcctctcctatgtggtgcttagcaaggaggtccggaaagcactcaagcttgcctgcagccgcaagcccagccctgaccctgctctgaccaccaagtccaccctgacctcgtcctacaactgccccagcccctacgcagatgggcggctgtaccagccctacggagactcggccggctctctgcacagcaccagtcgctcgggcaagagtcagcccagctacatccccttcttgctgagggaggagtccgcactgaaccctggccaagggccccctggcctgggggatccaggcagcctgttcctggaaggtcaagaccagcagcatgatcctgacacggactccgacagtgacctgtccttagaagacgaccagagtggctcctatgcctctacccactcatcagacagtgaggaggaagaagaggaggaggaagaggaggccgccttccctggagagcagggctgggatagcctgctggggcctggagcagagagactgcccctgcacagtactcccaaggatgggggcccagggcctggcaaggccccctggccaggagactttgggaccacagcaaaagagagtagtggcaacggggcccctgaggagcggctgcgggagaatggagatgccctgtctcgagaggggtccctaggcccccttccaggctcttctgcccagcctcacaaaggcatccttaagaagaagtgtctgcccaccatcagcgagaagagcagcctcctgcggctccccctggagcaatgcacagggtcttcccggggctcctccgctagtgagggcagccggggcgkcccccctccccgcccaccgccccggcagagcctccaggagcagctgaacggggtcatgcccatcgccatgagcatcaaggcaggcacggtggatgaggactcgtcaggctccgaatttctcttctttaacttcctgcattaaccctgggccgtggttcctamgcccgaggctcccttcccttccccagccgcactcatgccctgctcctgtcttgtgctttatcctgccccgctccccatcgcctgccgcagcagcgacgaaacgtccatctgaggagcctgggccttgccgggaggggtactcaccccacctaaggccatctagtgccaactccccccccaccattcccctcactgcactttggacccctggggccaacatctccaagacaaagtttttgnagaaaaaaaa

SEQ ID NO: 637 - DNA, 1579 bp, Homo sapiens
  misc_feature (1529)..(1529): n equals a,t,g, or c
  misc_feature (1556)..(1556): n equals a,t,g, or c
  misc_feature (1569)..(1569): n equals a,t,g, or c
ggcagagggaacccacgcggaggaaggaagagacgcaggcaggctgcggttacccaagcggccacccgggcctcagggaccccttccccgagagacggcaccatgacccagggaaagctctccgtggctaacaaggcccctgggaccgaggggcagcagcaggtgcatggcgagaagaaggaggctccagcagtgccctcagccccaccctcctatgaggaagccacctctggggaggggatgaaggcaggggccttccccccagcccccacagcggtgcctctccaccctagctgggcctatgtggaccccagcagcagctccagctatgacaacggtttccccaccggagaccatgagctcttcaccactttcagctgggatgaccagaaagttcgtcgagtctttgtcagaaaggtctacaccatcctgctgattcagctgctggtgaccttggctgtcgtggctctctttactttctgtgaccctgtcaaggactatgtccaggccaacccaggctggtactgggcatcctatgctgtgttctttgcaacctacctgaccctggcttgctgttctggacccaggaggcatttcccctgggaacctgattctcctgaccgtctttaccctgtccatggcctacctcactgggatgctgtccagctactacaacaccacctccgtgctgctgtgcctgggcatcacggcccttgtctgcctctcagtcaccgtcttcagcttccagaccaagttcgacttcacctcctgccagggcgtgctcttcgtgcttctcatgactcttttcttcagcggactcatcctggccatcctcctacccttccaatatgtgccctggctccatgcagtttatgcagcactgggagcgggtgtatttacattgttcctggcacttgacacccagttgctgatgggtaaccgacgccactcgctgagccctgaggagtatatttttggagccctcaacatttacctagacatcatctatatcttcaccttcttcctgcagctttttggcactaaccgagaatgaggagccctccctgccccaccgtcctccagagaatgcgcccctcctggttccctgtccctcccctgcgctcctgcgagaccagatataaaactagctgccaacccagcctgtggccaggtcactgtctaccccagcccagcccagccctctgccgcttgtacatacgccatggggaccctgaggaactgaggccacgtcaatccctgtgccgccccattcgcccgttacatcttccaaactgggacggtcaaggctgaaggctcctctgggtttgagggtccaagggacaaggaggagaagcctagcaggatttcagatgcaggagagagacccaggaagcccggcagagcctgagccccaytgcaattyctyctagggstgcacawtcatgtggcyttagggcamaytgtyctgcatccagtctgtgtyctyctgtctttctcatccaggtcaggcattgacatttgtaagaaanggggtaagggacacagctgggcaagtngattggttggcangattgctgtc

SEQ ID NO: 638 - DNA, 1334 bp, Homo sapiens
ggcacgagcggcaatgaggtcagtgactgccgggagtcctgcaggggcggggcggcgccaagcgcagggagcccggctgagtggcagcccagattgaagatggatacgtgacaatcccagggaccgctgcactgacttcatttccttagacaagacacagtgtagggcccggcccgtgttggccccaggactcctttggaatatagctgtggacaatgaatcctgcgagcgatgggggcacatcagagagcatttttgacctggactatgcatcctgggggatccgctccacgctgatggtcgctggctttgtcttctacttgggcgtctttgtggtctgccaccagctgtcctcttccctgaatgccacttaccgttctttggtggccagagagaaggtcttctgggacctggcggccacgcgtgcagtctttggtgttcagagcacagccgcaggctgtgggctctgctgggggaccctgtgctgcatgccgacaaggcgcgtggccagcagaactggtgctggtttcacatcacgacagcaacgggattcttttgctttgaaaatgttgcagtccacctgtccaacttgatcttccggacatttgacttgtttctggttatccaccatctctttgcctttcttgggtttcttggctgcttggtcaatctccaagctggccactatctagctatgaccacgttgctcctggagatgagcacgccctttacctgcgtttcctggatgctcttaaaggcgggctggtccgagtctctgttttggaagctcaaccagtggctgatgattcacatgtttcactgccgcatggttctaacctaccacatgtggtgggtgtgtttctggcactgggacggcctggtcagcagcctgtatctgcctcatttgacactgttccttgtcggactggctctgcttacgctaatcattaatccatattggacccataagaagactcagcagcttctcaatccggtggactggaacttcgcacagccagaagccaagagcaggccagaaggcaacgggcagctgctgcggaagaagaggccatagctgctccagccggggctccggggcggcagcagagctggcacaccgattctgggaagccccgcgaatgatggcttttgaattaatgaggcagtgaatgttttgtgtttacttctaagggaaatactaactttctttcgcattagtattaattttgaagtagctacaaagtatttttaagaaattataattttatgactgtcaaaaaaaaaaaaaaaaaaaaaaaaaaaaaaaaaaaaaaaaaaaaaaaaagggcggccgc

SEQ ID NO: 639 - DNA, 633 bp, Homo sapiens
  misc_feature (395)..(395): n equals a,t,g, or c
  misc_feature (536)..(536): n equals a,t,g, or c
  misc_feature (545)..(545): n equals a,t,g, or c
  misc_feature (554)..(554): n equals a,t,g, or c
  misc_feature (581)..(581): n equals a,t,g, or c
  misc_feature (620)..(620): n equals a,t,g, or c
ggcagctcggcagcatggcgtccgtgacgctgagcgaggcggagaaggtgtacatcgtgcatggcgtccagttcagccagtgctacccctgaatttgaaggtagaggaggtgatgaccttggcaccgagatcgctaacaccctctatcggatatttaacaataaaagcagtgtcgacttaaagaccctctgcattagtcctcgggagcactgctgsgttctctatgtggatgtgctgcttctggaatgtggtggaaatttgtttgatgccatttccattgctgtaaaggctgctctcttcaatacaaggwtaccaagggttcgagttttggrggwtgaagagggktcgaaggmcattgaattktcagatgacccttatgactgcatacgactaantgtggagaatgtcccctgcattgtcactctgtgcaagattgctatcggcatgtggtggatgctactcttcaggaggaggcctgctcgctggccagcttgctggtgtccggtgaccagcaagggagttgcgacgtgcatgangaaagtggngaaaggcancctggacccagagagcatcttcgagangatggagactggcaagcgtgtggcaaggtactggatgcnttccttgcaaaag

SEQ ID NO: 640 - DNA, 2523 bp, Homo sapiens
  misc_feature (1248)..(1248): n equals a,t,g, or c
  misc_feature (2514)..(2514): n equals a,t,g, or c
gaggcgccggcttcggagtgcgcccgccgccgcagcagcagcgctcctggaggaccccgccgtcccccggcwcascgctgcccttcctgctgctgagctacccgagcggcggcggcggcagagcggcagggcaagcaccatcctaattatctcatggctaatgaacgcatgaacctcatgaacatggccaagctgagtatcaagggcttgattgaatcagctctgaacctggggaggactcttgactctgactatgcacctctccagcaattctttgtggtgatggagcactgtctgaaacatggcttgaaagctaaaaaaacttttctcggacaaaataaatccttctgggggcctctagaactggtagaaaagcttgttccagaagccgcagagataacagcaagtgttaaagatcttccaggacttaagacaccagtaggtagaggaagagcctggcttcgtttggcattaatgcaaaagaaactttcagaatatatgaaagctttgatcaataagaaagaacttctcagtgaattctacgaacccaatgccctcatgatggaagaagaaggagccataattgctggtctgttggtgggtctgaatgtcattgatgccaatttctgtatgaaaggagaagacttggactctcaggttggagttatagatttttcaatgtatctcaaggacgggaacagcagtaaaggtactgaaggagacggtcagattactgcaattctggaccagaagaactatgtagaagaactgaacagacatttgaatgctactgtaaacaaccttcaggcaaaagtagatgcattagaaaaatccaacactaaactgacagaggagcttgcagttgcaaacaacaggatcattaccttacaagaagaaatggaacgagttaaagaggaaagttcctacatactggaatccaatcggaagggtcccaagcaagacagaactgcagaagggcaagcactaagtgaagcaagaaagcatttaaaagaagagacacaattacgattggatgttgagaaagaactggagatgcagatcagcatgaggcaggagatggaattggctatgaagatgctggagaaggatgtctgtgagaagcaggtgccctggtatctcttcgggcagcagctggatgacctcagagctctcaagcatgaacttgcctttaagctgcagagttcagacttaggagtwaaacmgaaaagtgaactaaacagtcgcttnggaagagaagactaatcagatggctgctaccattaaacaacttgaacaaagrttgcgccaggctgacgargccgccaatctgctgagttggacaaccggctcttcaaacaggactttggagacaagatcaacagtctgcagctggaagtcgaggagctcaccaggcagcggaaccagcttgagttagaactaaaacaggaaaaagaaagaagattacaaaacgacaggagcatcccaggaaggggttcccagaagtcagaatccaagatggatgggaagcacaaaatgcaagaggaaaatgttaaactaaaaaagcccctggaagaaagccacaggctgcaaccccaccctatggatgaacaggatcagctgctgctctctgaaaagccacagttgtgtcagctatgccaggaagacggcagcctaacaaagaatgtgtgtaagaactgcagcggaaccttctgtgatgcctgttcaacaaatgaactgcctcttccttcaagtatcaagcttgagcgagtttgcaatccctgtcacaagcatctgatgaagcaatattctaccagcccatcataagactggaggccaagacctggaccaaaacgtttatgcaggctcctctgtacctgtgttttagctgtcaggatctcatagagcccagttcttagagtcaactaaagagttgataggratttactaggtccagggagaaaaggcagtggttggggttactggaaattttgctcattttctctaatgactgtatgaataaaagtgaacttacttgagcctttctcttctaaatctaaacaacctgatattgaaggtttgctttatagcatatctttggaaaggcaactcatttttatgattagtgatactggggtggatttaataggagagagaatccaggcagataagaataaaaaggaaaatgatcatctccttctatagcatttgcagattcaagggggagaggtagatgctgagatcaaaatgacagttgttacttatttttccaggtgctgttagtataaacattgtttcctcttcacccctgctaactacctctttaaagtatttctaccaaactgtgaacccaatctcagggaaaagaaattaaaaagtaatataaattctgcatatattaaaaacaatattgtaatatgttataatttcaggaccagaattttctggtctttacctacaagggttttcattatcaaaaaaaagaacattaggttttctactttatgacttcaaagnaaataactg

SEQ ID NO: 641 - DNA, 605 bp, Homo sapiens
  misc_feature (599)..(599): n equals a,t,g, or c
gcttcagcttccccacctgtccagggggaggccagtgactgattttagaaccctttaagcattgaagttctctgatccttaaatcactcaagtttaatggggaaaaagtcacctccattgtaattcctgagaactaagttgggaggtgctggtgaaaccaagcttcgaaaggttaatcagaccaaggaccaacgctagtgtgagttgtgagggatggacactggtgaagctccaggctagggtgggccaagggaggcaggcctgccaatgacccatcttctcccccgccttccccagcacatgttttacgtgggtcaggattcaagccgctgcgtggyttgcatggtggactccagcctgggtgtgtgggtgacattgaaaggtagtgcccacgtgtgtctctaccatccagacacctttgagcagctggcagaagtagacgtcactcctcccgtgcacaggatgctggcaggctcggatgccatcatccggcagcacaaggctgcctgtctgcgaatcacagcgctgctggtgtgtgaggagctgytgtgggtgggcaccarwgctggtgtcgtctcaccatgcccacttcgtccggnactgta

SEQ ID NO: 642 - DNA, 444 bp, Homo sapiens
  misc_feature (434)..(434): n equals a,t,g, or c
  misc_feature (436)..(436): n equals a,t,g, or c
acatcagacatcaccatcacctcgcttagaatccatggggccttctcctcaaattcaatcttcccaggcatttcatgaacttgcgtctagtttctgttccctctcaaattgcccaggctgtcctgtgagtgacagcagctatttcgtgggcctcctctggaatcatgagaagtcacccaaacaatctcagttttctagctcactccgtcttgacatttctacactgtcatccttggttttcttggaaattaatttgcttttcttcattgtctttctttggagctgctttccttttgttggttactattttatttttagcttctcacaccataccgacatatgttggttattcttttagacatgttttttgttgttgttgtcacctggaacttttgtatcttgaataaatttggggatcaaatacaaaaaaaaananaggagaga

SEQ ID NO: 643 - DNA, 1483 bp, Homo sapiens
  misc_feature (6)..(6): n equals a,t,g, or c
  misc_feature (9)..(10): n equals a,t,g, or c
  misc_feature (1409)..(1409): n equals a,t,g, or c
  misc_feature (1417)..(1417): n equals a,t,g, or c
caaagntgnncaggaaaagagggcaagtggctggtgctgtggacagagaagctttatttttagtatgagacaacctctattttctttcaggagagggaagttggattatcaattcttttgtaaatgtgtatggtgatatttgctccgctttttgcaatctttgcatttgcaacatgcggtggctattctggaggcctgcggctgagtgtggactgcgtcaacaagacagaaagtaacctcagcatcgacatagcgtttgcctacccattcaggttgcaccaggtgacgtttgaggtgcccacctgcgagggaaaggaacggcagaagctggcattgattggtgactcctcgtcttcagcagagttcttcgtcactgttgctgtcttcgccttcctctactctttggctgccactgtcgtttacattttcttccagaacaaataccgggaaaacaaccggggcccactcattgacttcattgtcactgtagtcttttcgttcttgtggttggtgggttcatcagcttgggcaaaaggactgtctgacgtcaaagttgcaacggatcccaaggaagtattgctactaatgtcagcttgsaaacaggccatccaacaaatgcatgggctatccacagccctgttatgtcaagcttaaacacttctgtggtctttggattcttgaactttattctctgggctggaaacatatggtttgttttcaaggagaccggctggcattcttcgggacagagatatctttcagatccaatggagaagcactccagcagctataatcaaggtggttacaaccaagacagctatggatcaagcagtgggtacagtcagcaggcgagtttggggccaacctcagatgagtttggccaacagcctactggccccacttcctttaccaatcagatttaacagagtagcatttgcattcttctgcagtsgcctcaccatcttccatttcagtggcagaagaattttttaagggtttcaatcaattattaatgcagagagtattgaatgtaaatcagagctctctagtcttcattaaggcagcaagtcctgggttgtgaaaaatgatacttagagatgaggcgacatgaggagatatattattcatcatagatggctaattggagagtaccttgttatatatacagatactttcatggtcattttgtatgtatgttaaagtagtagaagtattttgtagcttaaagtctctagtatgtaatatggcataaagtaaatcaaatagcgttgagttttcttatgcattttgatgtgaaagatgttataataatttctagaagacaatttggtgtatcacaacatgcatgtcttatttttttttagttttaagtcctataggactatgagtctctaagttaattgtttcanaaaattantccttttttatgtgataaatcatatgattaaagtgcatgaatagcaattcccaaaaaaatggacaa

SEQ ID NO: 644 - DNA, 677 bp, Homo sapiens
tgttgtccaacttctcccggagcagccggagagcaggcgtcgggacgcagcaaagagaggagaggccaccatggcggagctgcaggaggtgcagatcacagaggagaagccactgttgccaggacagacgcctgaggcggccaaggaggctgagttagctgcccgaatcctcctggaccagggacagactcactctgtggagacaccatacggctctgtcactttcactgtctatggcacccccaaacccaaacgcccagcgatccttacctaccacgatgtgggactcaactataaatcttgcttccagccactgtttcagttcgaggacatgcaggaaatcattcagaactttgtgcgggttcatgtggatgcccctggaatggaagagggagcccctgtgttccctttgggatatcagtacccatctctggaccagcttgcagacatgatcccttgcgtcctgcagtacctaaatttctctacaataattggagttggtgttggagctggagcctacatcctggcgagatatgctcttaaccacscggacactgttgaaggtcttgtcctcatcaacattgatcccaatgccaagggttggatggattgggcagcccacaagctaacagggctcacctcttccattccggagatgatccttggacatcttttca

SEQ ID NO: 645 - DNA, 2171 bp, Homo sapiens
  misc_feature (24)..(24): n equals a,t,g, or c
  misc_feature (1066)..(1066): n equals a,t,g, or c
cgcctgccgggccggcgggcggtngtgattgatccgcgttccctggagctggaggctcgggggaaagggccagcacggagcgggcgctcggttgctgcgcacaaaggctgaggctccaagagctgcagggcgtgtttgggaccccagagtcagaaggagtgagaaccctgacccctaatcccactgcatccagccaataggagcccagccaccatggcggagctgcaggaggtgcagatcacagaggagaagccactgttgccaggacagacgcctgaggcggccaagactcactctgtggagacaccatacggctctgtcactttcactgtctatggcacccccaaacccaaacgcccagcgatccttacctaccacgatgtgggactcaactataaatcttgcttccagccactgtttcagttcgaggacatgcaggaaatcattcagaactttgtgcgggttcatgtggatgcccctggaatggaagagggagcccctgtgttccctttgggatatcagtacccatctctggaccagcttgcagacatgatcccttgcgtcctgcagtacctaaatttctctacaataattggagttggtgttggagctggagcctacatcctggcgagatatgctcttaaccacccggacactgttgaaggtcttgtcctcatcaacattgatcccaatgccaagggttggatggattgggcagcccacaagctaacaggcctcacctcttccattccggagatgatccttggacatcttttcagccaggaagagctctctggaaattctgagttgatacaaaagtacagaaatatcattacacatgcacccaacctggataacattgaattgtactggaacagctacaacaaccgccgagacctgaactttgagcgtggaggtgatatcaccctcaggtgtcctgtgatgctggtggtaggagaccaagcacctcatgaagatgcagtggtggaatgtaactcaaaactggaccccacccagacctcgttcctcaagatggctgactccggaggtcagccccagctgactncagccaggcaagctgaccgaggccttcaagtacttcctgcaaggcatgggctacatggcctcatcctgcatgactcgcctgtcccggtctcgtacagcctctctgaccagtgcagcatccgttgatggcaaccggtcccgctctcgcaccctgtcccagagcagcgagtctggaactctttcttcggggcccccggggcacaccatggaggtctcctgttgaatggcccttgttgccctagagtgggacccagccctcacctcccccagagctaacctgggaggtgctgaaggggcattgggccaccgtaagcaagggaaaaagggcagatcatgcggggagatgaccttgatctttgattgctaccctaaccttgacctttaacccgtgattccccccagctcctggaagagatgtcctaatatctcttagggacccagacccctaaattctcctcctcccccattttgrtgttaaggtggagagggcatatgcatcctctgtcctgatctaggtgtctatagctgaggggtaagaggttgttgtagttgtcctggtgcctccatcagactctccctacttgtcccatatttgcaaggggaggggatttggggctggggctccattcaccaaagctgaggtggcttctcattaaccctttaggactctgaagggtatggacctacgtgaatgtgtgtcagggggagacttgctggtgggttagtggtcctcaggatgtgatagaaacatccagtgtaaaaaggaagttggaatgggagttggcgggcagtgaacgagtgtggggaaggattggtgctggggcaacaggaaggggcctggggccgtttggctgcactaactttggtagctcagtgtgcatctagagtgggactggggagggagctaagcttgggctgggctgcttggggcttggcatagggtggaaagggctaccctggggctctgaccacactgtagtatgtgtggagggtgccctcccgtctcccacaacttctgctataacaataaactgtagaggaatctgaaaaaaaaaaaaaaaaaaaaaaaaaaaaaaaaaaaaaaaacccgggggggggcccgggac

SEQ ID NO: 646 - DNA, 2956 bp, Homo sapiens
tgggaccgctgtgtagtagggggctacctctctccaaagacagtcgcagatacatttgagaaggtagtggctggctccatcaattggccagccatagggtccctcttggactatgtgatmcgcccggccccacccccagaagccctcacactggaggtgcagtatgagcgtgacaaacatctcttcattgacttcctgccatcagtgaccctcggtgacacagtcttggtggccaaaccacaccggctagcccagtatgacaacctgtggcggctgagcctgcgtcccgcggagacggcacgcctgcgggctctggaccaggctgactcgggctgccgatctctgtgcctcaagatcctcaaggccatatgcaagtccaccccggctctgggccacctcactgccagccagctaaccaatgtcatcctccacttggcccaggaggaggctgactggtctccggatatgctggccgaccgtttcctgcaggccttgaggggacttatcagctacttagaggctggagtcctgcccagtgccctaaaccccaaggtgaacttatttgcagagctcacccctgaagaaatagacgaattaggatacactctgtattgctcattgtctgagccagaggtgctgctgcagacgtagggcaggtgaaggccaaagcgggtgttggtggtcaggccctggattctccgttagatacacttggctacctagttggtgcctcacagggttcctgctgcctggtgtcttgctgatcatcaccctggtcacttcatgctgattagaatgacatctctttcgtctcctattttgttacccaactcttcctatttttgttaccaatcactgtgctctctgccgccccctggctccaggctaatttttctggaatgaattgagaaggtggcgtgctggcctgagctgatggaccacttggtgttttgcgttttggcccatgtttgctgcctctatctggtctgccttgcccgtttgcctgttcctattcagtgtcttttctattttttcctctctcgttcatgccttctgttttgctcttgtccctggagcatatctgcctaattaagatgttgccttttagttgaatgccactgaagagctgtgatagcatgtttcaaagctgaactctacagagcgagtgctgagacagtatttagggtttctgggagtgaggctggtagaagagttggcctttgaccacggttcctggagtagaagtccatcctccccccaacctcctgacccattcataaatgctgagaatgtctctcatgggaacactgttaatgacccacacaggataagctgaatgcaaagttatttgcaggttgaatttcttggtggctattagcagaagtgcagagtagggaaccagagctggttaagggcctagtgaagggtttgtgtgcccagtgtctgctcgtcatctgtggctgcaggggtcagacagacaaggatggggactgccagggcaccacttcatcatgaatgctggttttcacaccttttccttattttattgccaatcaggacaaggccttgaaggaacgcagccttagacatcaggtgaggatgatggaggtagacagtcgactgaatgtcagctggaaaatccagtcactagttggggtttggtggccatgttttctacccagacaggccctgcttttctaggatgtggccttagagcaagaacagacccaacagccagcccttcatcctccagcgtctgccataggaatgtgagaggggtgtttgctgagcgctccgggcacggccagagggcaagtgagcatgcacggacctcttccccctgtcctgtttctcacccagcacctggggagatcggtgctaccaaggaagagagcacacagataagacagaggggaggaggtgggcatttcctacattcctccttgtttgccgctgctgagattgcagtatttattgcaatgtaaatgtatcctgaaggtggggaggaatgtttaatctaccatgtccgtgtgtcatcttggtttgtgtttttccctgtttgtagcaagactctgatgataattctgtttctcatctgcccattcagtattttgttttccttccgtcaagttgtcttattttttcaatgactacctctccatcattgaggttctggtgaagctctctgcagctgtctcattccttcccaacgatagtaacaggaaatgactctttagcatcgatacctcaacatcaatttagggtagagattcctgcccctcttttgtcacagattaggaaattgagaactagggttaaccttgactatatttagaggtctttttgcctcttttccccttaacaaggatttcttatggtggtttcagtttcatttgcataaaggtattgagagggaacaaaaaacataaagctgagaatcttgagagagctcatctaccctgtctgttggtcagactcaaatgagagttaaaaaaaaaaaaaaaaatctktatgcctgagtaccatcctggatgaatctagaaggtatggggtagagcttgacagggttcctgtgtacccactgggtatccgttagaggtaagggagaggagaggattgatagagtgttgcaaaagtatagattattcattgagataaaggatttggtttccctgccatgagtattaaaaaaatttaagttttcccaagcttgcatctctgaccaaatttcacataaaacattggaaggaggctgggtgcggtggctcatgcttgtaatcccagcactgggaagctaaggcgggtggwtcacttgaggtcaggagttcgagaccagcctggccaacatggtgaaaccccgtctccacgaaaaagataaaaataagctgggcgtggtggcaggcgcctataatcccagctactcgggaggctgaggcaggagaataacttaaacccg

SEQ ID NO: 647 - DNA, 940 bp, Homo sapiens
  misc_feature (399)..(399): n equals a,t,g, or c
ggaacatggagcgggggccggtggtgggggcaggactgggggccgggcgaaatccaggcactgctgggctgcctgctcaaggtgctgctctgggtggcctctgcttgctgtactttggaakcgaacaggccgcccgccttctgggcagcccctgcttacggcgcctctaccatgcctggctggcagcagtggtcatctttgggccgcttctgcagttccatgtcaaccctcggactatcttcgccagccacggcaacttcttcaacataaaatttgtgaattcagcctggggctggacatgcactttcttagggggctttgtgttgctggtggtgttcctggctacacggcgcgtggcagtaactgccagacacctgarccgactggtagtaggggcanccgtgtggcggggarccggccgggccttcctgctcatcgaggacctgactggctcctgcttcgagccactgccccagggtctgctgctccacgagctgcctgaccgccgcagctgcctggcagccggccaccagtggcgaggctacaccgtctcctcccacaccttcctgctcaccttttgctgcctgctcatggcagaggaagcagctgtgttcgccaagtacctgcgcccatgggcttcctgccggcgccccactgcgccttgtcttcctgctgaacgtgctgctgctgggcctctggaacttcttgctgctctgtaccgtcatctatttccaccagtacactcacaaggtggtgggcgccgcagtgggcacctttgcctggtacctcacctatggcagctggtatcatcagccctggtctccagggagcccaggccatgggctcttcccccgtccccactccagccgcaagcataactgaaagaaataaaaaccatcgggcctgaaaaaaaaaaaaaaaaaaaaaaaaaaaaaaaaaa

SEQ ID NO: 648 - DNA, 2105 bp, Homo sapiens
  misc_feature (7)..(7): n equals a,t,g, or c
  misc_feature (11)..(11): n equals a,t,g, or c
  misc_feature (13)..(13): n equals a,t,g, or c
caggctngtanantaacaatgrratttgggtagggggagaaagataccttctaaaatggatcaatagaaccaaaataatacagcatgttctataaccacaaggaaatcaaatgatcctgtcatgattccagttagtcataactatgttagcagtgctaaatgcattttagaaatggtgacttctgtggttttcytagcatttgtctctaacaaatggtgaaataattactcatggccctctctgccattgtctttcattttttcacagtgaaattagacccctttacttcaccattctgccactgcaaattaagtataaagaaaatagcaagagtgtccacaccagtagacagtaagcttctctacctgtaagtgatgaaatcatagctaatgcacttgccatggagttttcaagatgattggtgtcagacagttttcactttgtttaaaaagtgttggtggccttttgtggtggtgttacaatcctctgggggcttaggaggatgttgatgcaacttttagaagcttttaatttcaaaaacaactcaaaaatctgaaggacagtcatagctgccactcagccccagttagtcaaaccccagtgacctttgcccctggttgccaagggctttgcaacatcaagcagggaaataaggatctgtctgtttagtggataccgtgtatcctttaatagaccaggtaacagttcgtgttagtttagactattgttttgtactgtactttcttgggtggcagaggaaagaaaagtaaaacattaaaaaaaaaaaaaaaaactgcgttctttaaattctgtattattagcaacctctgttgtacatagtgtttgataataaagtattaatttgattcttatgtcttttgtaagtgagaacaatagactttmaggatacaaaacatgcattgaggctttgaaacatccaatgtgtaccatggctgaaaaaaagagtcacaagtggctgagacactgctccatacaggactcatgtgtggtcattgcccacccaatcttatgactccatcatcttgggacctggaacaacatgacttttttgatcgatattttgtcctcggtgttttcaaggtctgatgttggagccctgtggcccaccctcccttctccaccagcatgttggtttgaaaaggatagggratttagaaacagttctgtactttggtttggtttggttttctgtttgtgattgttttcatggactgttttattttttcccaggaagagtctttatcaatatcatgtgcagctcactcatggaaatggttgcaaaccaatcagtgtaggaagcttaaatggggctgtttccctctctgtgtcgttgtgaaaggaagagtcacacagtacctgtggattttcagggactctgtttttctccggtgccttagcaacggcagcagccatttgtattattttcaaataattagaaaaacagttttcaactcctcctttccattcattgctctcagagttgtggtcactgacttttcttttgaaaaccgcctccaccaacacccccgtttgcctacaccaccccccttttacttagtatgtttattttttgtgtgtctcttgccttcctcccacgttttatttcccctcagagctgtgaatgggcaggtctgtctctggtttggcatcactgagtttttcccatgcattggccccagggctgctaggatgtgagacaaatctccctacaatgggcttgctcccattgtctgtacagtttaatagatgctggcatgtcggaggttacccatgagtcaaaatccgctctccatgcttactcttgacaccccattgaagccactcattgtgtgtgcgtctgggtgtgaagtccagctccgtgtggtcctgtgcttgtactgccctgctttgcagttcctttgcacttactcatcgagtgctgttttgaaatgctgacattatataaacgtaaaagaaaatgtaamaaaaaaaaacccacacacaaacaaacccatacgatctgtatttgtatatacacgtgtccgtacaagtataactaaataaaaattaaagattttcatcattttaaaaaaaaaaaaaaaaa

SEQ ID NO: 649 - DNA, 912 bp, Homo sapiens
cagcattccactggtcagggaagactccatagagtaggcaacatttgggcagtgttttgaagaatgacaagggcctgccagacagtacatgggggagaaggactttcaggggagaggaacagcatgggcaaagttatggaggcatgcaaacatctccctcttctctcccttactttccaagcaagttaggtacgctttccatggggattctggcctgtgtggtaggaagggatctcccttgctcccatgttgctggctgtccgtacatcaccctgtcccctgcaggagggggctacaggccatctccctcctgtaggcctctgactcccctccacttttgggccctcagcttatctcgggcaggggaccattgcagcatcctcccctcctcggactcaaggtgctgaggtataagccctgggccccagatccctggtgacaccttcctggagaagactctcaaaagtgactgtatatttgagttcaccagcaataactccccacactcgaagcaggtccaaacccaggatcycagggtccttgggctctgtggcactgtcttcccaagatccttcctgttgcacaatgggaaacctaagaggaaaaagacaggggcctgcttgcccagccatgcgagggattccatgcccacctgccctctgtctgcctcgctggaatgtgggcccctgctccccgtcaggttgtgctgtctctgacctatgtttacatccccgaggggtttctgcctcctccccacccaggtcagggtgtggtccagcagcttgctgtggggtgctgacatgtgtcaccactgccccccttgcccccgggggggtcatggtctcctcctggatgctgctccttgaatcttttttcttgataaaccttttacaattaagataaaaaaaaaaa

SEQ ID NO: 650 - DNA, 978 bp, Homo sapiens
  misc_feature (977)..(977): n equals a,t,g, or c
acagagtctcgctctgttgtccagcctgggcaacagagaaaacaaaaaggaaaacaaatgatgaaggtctgcagaaactgaaacccagacatgtgtctgccccctctatgtgggcatggttttgccrgtgcttctaagtgcaggagaacatgtcacctgaggctagttttgcattcaggtccctggcttcgtttcttgttggtatgcctccccagatcgtccttcctgtatccatgtgaccagactgtatttgttgggactgtcgcagatcttggcttcttacagttcttcctgtccaaactccatcctgtccctcaggaacggggggaaaattctccgaatgtttttggttttttggctgcttggaatttacttctgccacctgctggtcatcactgtcctcactaagtggattctggctcccccgtacctcatggctcaaactaccactcctcagtcgctatattaaagcttatattttgctggattactgctaaatacaaaagaaagttcaatatgttttcatttctgtagggaaaatgggattgctgctttaaatttctgagctagggattttttggcagctgcagtgttggcgactattgtaaaattctctttgtttctctctgtaaatagcacctgctaacattacaatttgtatttatgtttaaagaaggcatcatttggtgaacagaactaggaaatgaatttttagctcttaaaagcatttgctttgagaccgcacaggagtgtctttccttgtaaaacagtgatgataatttctgccttggccctaccttgaagcaatgttgtgtgaagggatgaagaatctaaaagtcttcataagtccttgggagaggtgctagraaaatataaggcactatcataattacagtgatgtccttgctgttactactcaaatcacccacaaatttccccaaagactgcgctagctgtcaaataaaagacagtgaaana

SEQ ID NO: 651 - DNA, 739 bp, Homo sapiens
gccgcgccctgcagattgtctcttgttgcgtaagtttttttgaccgtcactcgtgtcagcttcaaagtcagatagatttttctcccagcatgttctacttccgaggctgtggccgttgggtcgcggtttccttcaccaagcagcaatttccgttggcacggttgagcagtgacagcgcggcgccccggactccgcacttcgacgtgatagtcattggtggaggacatgccgggactgaggcagccaccgccgccgctcggtgcggctctcggactctgctcctcactcaccgcgtggacacgatcggtcagatgtcatgtaatccttcctttggtggcatcggaaagggacatttaatgagggaagtagatgccttggatggcctgtgttctcgcatctgtgaccagtctggtgtacattataaagtattaaaccggcgtaagggaccagctgtgtggggtctgaragctcagattgataggaaactctataaacagaacatgcagaaagaaatcttgaatacaccactgsttactgttcargarggarctgtagaagatcttattcttacagaaccagagcctgaacacactgggaaawgccgtgtcagtggggttgttttggtggatggaagcacagtatatgcagagagtgtgattctgactactgggacatttctgagaggcatgattgtaattggattggagacgcatccagcaggacgtttaggggatcagcc

SEQ ID NO: 652 - DNA, 2039 bp, Homo sapiens
  misc_feature (2034)..(2034): n equals a,t,g, or c
  misc_feature (2038)..(2038): n equals a,t,g, or c
ggcacaggttgctagaggcttcagaactccagcctaatggatcccaaactcgggagaatggctgcgtccctgctggctgtgctgctgctgctgctgctgcggagcgcggcatgttctcctcaccctccccgcccccggcgctgttagagaaagtcttccagtacattgacctccatcaggatgaatttgtgcagacgctgaaggagtgggtggccatcgagagcgactctgtccagcctgtgcctcgcttcagacaagagctcttcagaatgatggccgtggctgcggacacgctgcagcgcctgggggcccgtgtggcctcggtggacatgggtcctcagcaggtgctcgatggtcagagtcttccaatacctcccgtcatcctggccgaactggggagcgatcccacgaaaggcaccgtgtgcttctacggccacttggacgtgcagcctgctgaccggggcgatgggtggctcacggacccctatgtgctgacggaggtagacgggaaactttatggacgaggagcgaccgacaacaaaggccctgtcttggcttggatcaatgctgtgagcgccttcagagccctggagcaagatcttcctgtgaatatcaaattcatcattgaggggatggaaagaggctggctctgtttgccctggaggaacttgtgggaaaaagaaaaggaccgattcttctctggtgtggactacattgtaatttcagataacctgtggatcagccaaaggaagccagcaatcacttatggaacccgggggaacagctacttcatggtggaggtgaaatgcagagaccaggattttcactcaggaacctttggtggcatccttcatgaaccaatggctgatctggttgctcttctcggtagcctggtagactcgtctggtcatatcctggtccctggaatctatgatgaagtggttcctcttacagaagaggaaataaatacataccaaagccatccatctagacctaagaagaataccggaatagcagccgggttgagaaatttctgttcgatactaaggaggagattctaatgcacctctggaggtacccatctctttctattcatgggatcgagggcgcgtttgaatgagcctggaactaaaacagtcatacctggccgagttataggaaaattttcaatccgtctagtccctcacatgaatgtgtctgcggtggaaaaacaggtgacacgacatcttgaagatgtgttctccaaaagaaatagttccaacaagatggttgtttccatgactctaggactacacccgtggattgcaaatattgatgacacccagtatctcgcagcaaaaagagcgatcagaacagtgtttggaacagaaccagatatgatccgggatggatccaccattccaattgccaaaatgttccaggagatcgtccacaagagcgtggtgctaattccgctgggagctgttgatgatggagaacattcgcagaatgagaaaatcaacaggtggaactacatagagggaaccaaattatttgctgcctttttcttagagatggcccagctccattaatcacaagaaccttctagtctgatctgatccactgacagattcacctcccccacatcccctagacagggatggaatgtaaatatccagagaatttgggtctagtatagtacattttcccttccatttaaaatgtcttgggatatctggatcagtaataaaatatttcaaaggcacagatgttggaaatggtttaaggtcccccactgcacaccttcctcaagtcatagctgcttgcagcaacttgatttccccaagtcctgtgcaatagccccaggattggattccttccaaccttttagcatatctccaaccttgcaatttgattggcataatcactccggtttgctttctaggtcctcaagtgctcgtgacacataatcattccatccaatgatcgcctttgctttaccactctttcctttttcttattaataaaaatgttggtctccaaaaaaaaaaaaanaaana

SEQ ID NO: 653 - DNA, 1434 bp, Homo sapiens
agaaacccatgataccctactgaacaccgaatcccctggaagcccacagagacagagacagcaagagaagcagagataaatacactcacgccaggagctcgctcgctctctctctctctctctcactcctccctccctctctctctgcctgtcctagtcctctagtcctcaaattcccagtcccctgcaccccttcctgggacactatgttgttctccgccctcctgctggaggtgatttggatcctggctgcagatgggggtcaacactggacgtatgagggcccacatggtcaggaccattggccagcctcttaccctgagtgtggaaacaatgcccagtcgcccatcgatattcagacagacagtgtgacatttgaccctgatttgcctgctctgcagccccacggatatgaccagcctggcaccgagcctttggacctgcacaacaatggccacacagtgcaactctctctgccctctaccctgtatctgggtggacttccccgaaaatatgtagctgcccagctccacctgcactggggtcagaaaggatccccaggggggtcagaacaccagatcaacagtgaagccacatttgcagagctccacattgtacattatgactctgattcctatgacagcttgagtgaggctgctgagaggcctcagggcctggctgtcctgggcatcctaattgagctggaaaagcttcaggggacattgttctccacagaagaggagccctctaagcttctggtacagaactaccgagcccttcagcctctcaatcagcgcatggtctttgcttctttcatccaagcaggatcctcgtataccacaggtgaaatgctgagtctaggtgtaggaatcttggttggctgtctctgccttctcctggctgtttatttcattgctagaaagattcggaagaagaggctggaaaaccgaaagagtgtggtcttcacctcagcacaagccacgactgaggcataaattccttctcagataccatggatgtggatgacttcccttcatgcctatcaggaagcctctaaaatggggtgtaggatctggccagaaacactgtaggagtagtaagcagatgtcctccttcccctggacatctcctagagaggaatggacccaggctgtcattccaggaagaactgcagagccttcagcctctccaaacatgtaggaggaaatgaggaaatcgctgtgttgttaatgcagagaacaaactctgtttagttgcaggggaagtttgggatataccccaaagtcctctaccccctcacttttatggccttttccctagatatactgcgggatctctccttaggataaagagttgctgttgaagttgtatatttttgatcaatatatttggaaattaaagtttctgactttaaaaaaaaaaaaaaaaaaaaaa

SEQ ID NO: 654 - DNA, 3296 bp, Homo sapiens
gggcatgcctgaaggagggggcgctctcgcagaaggctttcaagtgaggatgtttgagtttcagaattttgagaggagatttgaggagtgcatctcccagtctgcagtgaagaccaagtttgagcagcacacggtccgggccaagcagattgcagaggcggttcgactcatcatggactccctgcacatggcggctcgggagcagcaggtttactgcraggaaatgcgtgaagagcggcaagaccgactgaaatttattgacaaacagctggagctcttggctcaagactataagctgcgaattaagcagattacggaggaagtggagaggcaggtgtcgactgcaatggccgaggagatcaggcgcctctctgtactggtggacgattaccagatggacttccacccttctccagtagtcctcaaggtttataagaatgagctgcaccgccacatagaggaaggactgggtcgaaacatgtctgaccgctgctccacggccatcaccaactccctgcagaccatgcagcaggacatgatagatggcttgaaacccctccttcctgtgtctgtgcggagtcagatagacatgctggtcccacgccagtgcttctccctcaactatgacctaaactgtgacaagctgtgtgctgacttccaggaagacattgagttccatttctctctcggatggaccatgctggtgaataggttcctgggccccaagaacagccgtcgggccttgatgggctacaatgaccaggtccagcgtcccatccctctgacgccagccaaccccagcatgcccccactgccacagggctcgctcacccaggaggagttcatggtttccatggttaccggcctggcctccttgacatccaggacctccatgggcattcttgttgttggaggagtggtgtggaaggcagtgggctggcggctcattgccctctcctttgggctctatggcctcctctacgtctatgagcgtctgacctggaccaccaaggccaaggagagggccttcaagcgccagtttgtggagcatgccagcgagaagctgcagcttgtcatcagctacactggctccaactgcagccaccaagtccagcaggaactgtctgggacctttgctcatctgtgtcagcaagttgacgtcacccgggagaacctggagcaggaaattgccgccatgaacaagaaaattgaggttcttgactcacttcagagcaaagcaaagctgctcaggaataaagccggttggttggacagtgagctcaacatgttcacacaccagtacctgcagcccagcagatagtgggcacctgaggcggagtctgcgtggagaggggcggtgctgccagccctaagtgccrtgtgggctcccccaggggcacgtgtggctcctgccccctggccactgccaagagaatgaagcacccagtctcgtaccattttgagccctccagcactacttattttcccccacctttgcctgctgttgctggaagagctggctcatacccccaaaggacactttcagcgacagctatggacagcatggtaccaaggagttaagttgaggctttttccagctttctctggttcatttgattgcttgataaggcctcaggatctcagcattgcacaatgcctcatggaagcctttgagggtatcacacagacacccccaccttcctccagcctgtgcgcacctgccctccttgcagcccagcacacctgcaggtgtaagggacgattggagtttcttcccagagagtctgtcccagaaggactgtggcttgtgtgtgtccatctcgcctgttggctcagtgcttcatcccatttgcagagcctcagacacgtcttggtggtgaggctcagttacccctgggcttaggctgaggcgggccctgtgctgggggtggtagaaaggatgctgctgaggcagctggaggagtgggagtagctcagaggggagggctgttggatgtatggggagctggcagagcaggtggcagtcactgggacaaggagggacttgcctctcttctcattattgtgtcctttgctttagtgtcagtcctggacttgtgcaggcctgttttgtgtagatctgttttggaagatggcatggtctaggtggttgaaggatgtagtagaaggatggatggtggaaggtggggacgttggtggctggctgaggtgcatggsccccacacaggacagctggagaatgggccgtccacttggcctcgttctgcgaggggctcatgggtctgagagcccccacccactaggcttgattgcatccctgttgtgccctttaagagacatgtttccaccccacccccaaccttgtcccaagtgccctggactaaatttcctgtgccagtgactgcagttggccaagggacaatgtggaaaacccagtgtccatctttccaccctccctgatctccagaaccttcgactgacccccttgtctttatgctgatgttgagttttgggattgttactggttgaagtgggggcagatgcctgtcaccaaggtgttgactgtgtgagaaaagcagtttgggtgacaaatcctgtgtggcacaagttggatcgcttcctagaaataagcaacacctctcccaaaaagcagcccacaaggcaggggcccagcagcccagccatcactcatctttgaggaaatgagttggtagcctctgtgcactgtttggtggccacatcacaggtgatgtcctgttcacatacctgcttgtatttaaagccctcagtctgtcctgttgtgtggggcgaagtgatggactctgccaggtggacatgctgtgggtggatgttcccggcgtgtgccgggcctgaatggacaggggccacttcacagcatgtcagggaaaatcactgtcacacaattccaatggattttgtgctctttttgaaaaaaaaaaattctttagcgtaaacatgaattttttttcaatgtagcccctggggaatgaatgaaattttgagcttcttcaatacgtaaaattaaatttataccactgagggagagaccctttctgaaagaagtatggccaaaagcactttaatgctgctgacattgttgtttttatgttcatttgctggagcgcaagacgtgctgacacagtgagttttctctgatgtatttaaggtgatgtatttgcttgagttactcctgtatcattgctcataatattggaaactaaaataaaacctagttggaaatccaaaaaaaaaaaaaaaaaaaacycgaggggggg

SEQ ID NO: 655 - DNA, 663 bp, Homo sapiens
  misc_feature (626)..(626): n equals a,t,g, or c
  misc_feature (656)..(656): n equals a,t,g, or c
gaattcggcacgagggcagaggttgggaagatggcgtggcgaggctgggcgcagagaggctggggctgcggccaggcgtggggtgcgtcggtgggcggccgcagctgcgaggagctcactgcggtcctaaccccgccgcagctcctcggacgcaggtttaacttctttattcaacaaaaatgcggattcagaaaagcacccaggaaggttgaacctcgaagatcagacccagggacaagtggtgaagcatacaagagaagtgctttgattcctcctgtggaagaaacagtcttttatccttctccctatcctataaggagtctcataaaacctttattttttactgttgggtttacaggctgtgcatttggatcagctgctatttggcaatatgaatcactgaaatccagggtccagagttattttgatggtataaaagctgattggttggatagcataagaccacaawaagaaggrgacttcagaaaggagattaacaagtggtgggawtaacctaagtgatggccagcggactgtgracagtttgtkttagcttacacgttttaaaccattcaaggaagagaaatcaaaccaaaaggtattatagctgcaaatgtcccttgtantctggtttatgggagagtaccttcttctgncagcggg

SEQ ID NO: 656 - DNA, 2583 bp, Homo sapiens
ggcacgagctgaactcccaaagggagtgtgtgtatttcctcccgttctttatcagagcccccaaaataagtaggaatgggcagtggstattcacattcactacaccttttccatttgctaataaggccctgccaggctgggagggaattgtccctgcctgcttctggagaaagaagatattgacaccatctacgggcaccatggaactgcttcaagtgaccattctttttcttctgcccagtatttgcagcagtaacagcacaggtgttttagaggcagctaataattcacttgttgttactacaacaaaaccatctataacaacaccaaacacagaatcattacagaaaaatgttgtcacaccaacaactggaacaactcctaaaggaacaatcaccaatgaattacttaaaatgtctctgatgtcaacagctacttttttaacaagtaaagatgaaggattgaaagccacaaccactgatgtcaggaagaatgactccatcatttcaaacgtaacagtaacaagtgttacacttccaaatgctgtttcaacattacaaagttccaaacccaagactgaaactcagagttcaattaaaacaacagaaataccaggtagtgttctacaaccagatgcatcaccttctaaaactggtacattaacctcaataccagttacaattccagaaaacacctcacagtctcaagtaataggcactgagggtggaaaaaatgcaagcacttcagcaaccagccggtcttattccagtattattttgccggtggttattgctttgattgtaataacactttcagtatttgttctggtgggtttgtaccgaatgtgctggaaggcagatccgggcacaccagaaaatggaaatgatcaacctcagtctgataaagagagcgtgaagcttcttaccgttaagacaatttctcatgagtctggtgagcactctgcacaaggaaaaaccaagaactgacagcttgaggaattctctccacacctaggcaataattacgcttaatcttcagcttctatgcaccaagcgtggaaaaggagaaagtcctgcagaatcaatcccgacttccatacctgctgctggactgtaccagacgtctgtcccagtaaagtgatgtccagctgacatgcaataatttgatggaatcaaaaagaaccccggggctctcctgttctctcacatttaaaaattccattactccatttacaggagcgttcctaggaaaaggaattttaggaggagaatttgtgagcagtgaatctgacagcccaggaggtgggctcgctgataggcatgactttccttaatgtttaaagttttccgggccaagaatttttatccatgaagactttcctacttttctcggtgttcttatattacctactgttagtatttattgtttaccactatgttaatgcagggaaaagttgcacgtgtattattaaatattaggtagaaatcataccatgctactttgtacatataagtattttattcctgctttcgtgttacttttaataaataactactgtactcaatactctaaaaatactataacatgactgtgaaaatggcaatgttattgtcttcctataattatgaatatttttggatggattattagaatacatgaactcactaatgaaaggcatttgtaataagtcagaaagggacataggattcacatatcagactgttagggggagagtaatttatcagttctttggtctttctatttgtcattcatactatgtgatgaagatgtaagtgcaagggcatttataacactatactgcattcattaagataataggatcatgatttttcattaactcatttgattgatattatctccatgcattttttatttcttttagaaatgtaattatttgttctagcaatcatgctaacctctagtttgtagaaaatcaacactttataaatacataattatgatattatttttcattgtatcactgttctaaaaataccatatgattatagctgccactccatcaggagcaaattcttctgttaaaagctaactgatcaaccttgaccacttttttgacatgtgagatcaaagtgtcaagttggctgaggttttttggaaagctttagaactaataarctgctggtggcactttgtaacgtatgattatctaagctgattttgatgctaaattatcttagtgatctaaggggcagtttagtgaagatggaatcttgtatttaaaatagccttttaaaatttgttttgtgatgatgtattttgacaacttccatctttaggagttatataatcaccttgattttagtttcctgatgtttggactatttataatcaaggacaccaagcaagcataagcatatctatatttctgactggtgtctctttgagaaggatgggaagtagaaaaaaaaaaaagaaagaaaggaaaggaagagaggagagaagaaggcagggatctccactatgtatgttttcactttagaactgttgagcccatgcttaattttaatctagaagtctttaaatggtgagacagtgactgga

SEQ ID NO: 657 - DNA, 1867 bp, Homo sapiens
cggctctgctccactctgctcagctccgctccaggaaggccacctcctcctccccctcctcctcccgctgtcaccactcaccgctcataacctcaagggggtggggaccccagggctggacacaccccaccgtggccccagagctcagccggtcgcacggacggacagttggaagccggaccccagagcctgaggtgggcagtgtgccagggtcccttgcggcctcctcaagccctgtccaggctatgggcatcaagacagcattgccggcggctgagctgggcctctactctctggtgctgagtggggccctggcctatgctggccggggcctccttgaggcttcacaagatggggcccacaggaaggccttccgggagtctgtgcgacctggctgggagtacattggccggaagatggatgtggctgacttcgagtgggtgatgtggttcacctcctttcgcaacgtcatcatctttgccctctccggacatgtgctgtttgctaaactctgcacgatggttgccccaaagctccgcwcctggatgtatgctgtgtacggggccttggctgtgatgggcacaatgggcccttggtacctgctgctgctgcttggtcactgtgtgggcctctatgtggcctcgcttttgggccagccctggctctgtcttggccttggcttggccagcctggcctccttcaagatggaccccctaatctcttggcagagcgggtttgtaacaggcacttttgatcttcaagaggtgctgtttcatgggggcagcagcttcacagtgctgcgttgcaccarctttgcactggagarctgtgcccaccctgaccgccactactccttagctgacctgctcaagtacaacttctacctgcccttcttcttcttcgggcccatcatgacctttgatcgcttccatgctcaggtgagccaggtggagccagtgagacgcgagggtgagctgtggcacatccgagcccaggcaggcctaagcgtggtggccatcatggccgtcgacatcttctttcacttcttctacatcctcactatccccagcgacctcaagttcgccaaccgcctcccagacagtgccctcgctggcctagcctattcaaacctggtgtatgactgggtgaaggcggccgtcctctttggtgttgtcaacactgtggcatgcctcgaccacctggacccaccccagcctcccaagtgcatcaccgcactctacgtctttgcggaaacgcactttgaccgtggcatcaacgactggctttgcaaatatgtgtataaccacattggtggggagcattccgctgtgatcccagagctggcagccacagtggccacatttgccatcaccacactgtggcttgggccttgtgacattgtctacctgtggtcattccttaactgctttggcctcaactttgagctctggrtgcaaaaactggcagagtgggggcccctagcacgaattgaggcctctctgtcagtgcagatgtcccgtagggtccgggccctgtttggagccatgaacttctgggccatcatcatgtacaaccttgtgagcctgaacagcctcaaattcacagagctggttgcccggcgcctgctactcacagggttcccccagaccacgctgtccatcctgtttgtcacctactgtggcgtccagctggtaaaggagcgtgagcgaaccttggcactggaggaggagcagaagcaggacaaagagaagccggagtaggagggagcgggtagagggatgggctctgctcagctattcttgggccagatggggcctgaccgatagaataaaagacttttctacaacaaaaaaaaaaaaaaaaaaaa

SEQ ID NO: 658 - DNA, 1824 bp, Homo sapiens
gcccacgcgtccgaacggggtctatggtttttctcatcaagaggtcatgacgccagtcagatcacactagccttgggcacagctgcctcctaccccagggcctgccaggctctcggggccatgctgtccaaaggagccctgaaccctgctgacatcaccgtcctgttcaagatgttcacaagcatggaccctcctccggttgaacttatccgcgttccagccttcctggacctgttcatgcagtcactctttaaaccaggggctcggatcaaccaggaccacaagcacaaatacatccacatcttggcgtacgcagcaagcgtggttgagacctggaagaagaacaagcgagtgagcatcaataaagatgagctgaagtcaacgtcaaaagctgtcgaaaccgttcacaatttgtgttgcaacgagaacaaaggggcctctgaactagtggcagaattgagcacactttatcagtgtattaggtttccagtggtagcaatgggtgtgctgaagtgggtggattggactgtatcagaaccaaggtactttcagctgcagactgaccatacccctgtccacctggcgttgctggatgagatcagcacctgccaccagctcctgcacccccaggtcctgcagctgcttgttaagctttttgagactgagcactcccagctggacgtgatggagcagcttgagttgaagaagacactgctggacaggatggttcacctgctgagtcgaggttatgtacttcctgttgtcagttacatccgaaagtgtctggagaagctggacactgacatttcactcattcgctattttgtcactgaggtcagcaatgsaccrttggtttcatgtttcatactgtttacactagcactgccctttttggcttaatttagttcattttgtacctaactgagaactgtgctttctgatgtagtgatgacaatgacagatactcgtttaccaaaaagcaccttctgcctgcagcagctgtatgacacactttacctccattaccaccctgggcatctgaatgttggagatgggtggtgtcaccggccggtkggggtggggagggattttttccaaactgatggccatttcacccggatgtcggtggatgccccgcactagtgtgcgaagaagtcaccctgtgctcccccacgcaggtgctggacgtcattgctcctccttatacctctgacttcgtgcaacttttcctccccatcctggagaatgacagcatcgcaggtaccatcaaaacggaaggcgagcatgaccctgtgacggagtttatagctcactgcaaatctaacttcatcatggtgaactaatttagagcatcctccagagctgaagcagaacattccagaacccgttgtggaaaaaccctttcaagaagctgttttaagaggctckggcagcgtcttgaaaatgggcaccgctgggaggaggtggatgacttctttacaaaggaaaatggtagcagcttcagtgagaaactgcccttacaaacagtcccttctctgctgtcaatccaatactgctcccaaatcctgttttcagtgttcatttccctcaaggcaggcgctgggctcccacgacccctcaggacagatctggccgtcagccgcgggccgctgggaactccactcggggaactcctttccaagctgacctcagttttctcacaagaacccagttagctgatgttttattgtaattgtcttaatttgctaagaacaagtaataagtaaatttttaaaaagcctttctgctgggttggattaaaaaaaaaaaaaaaaaaaaaaaaaa

SEQ ID NO: 659 - DNA, 868 bp, Homo sapiens
aaactatgttaacggaactcctgagaggtggatcctttgagtttaaggacatgcgtgttccttcagcgcttgttactttacatatgctcctgtgctctatccccctctcaggwcgtttggatagtgatgaacagaaaattcagaatgatatcattgatattttactgacttttacacaaggagttaatgaaaaactcacaatctcagaagagactctggccaataatacttggtctttaatgttaaaagaagttctttcttcaatcttgaaggttcctgaaggattttttttctgggactcatactcctttcagagctgctgcctcttccattgcccatgcaaacaactcaggttattgagccacatgatatatcagtggcactcaacacccgaaaattgtggagcatgcaccttcatgttcaagcaaagttgctccaagaaatagttcgctctttctctggcacaacctgccagcccattcaacatatgttacggcgtatttgtgttcaattgtgtgaccttgcctcaccaactgcacttctgattatgagaactgtgttggatttgattgtagaagacttgcaaagcacttcagaagataaagaaaaacagtatactagccaaaccaccaggttgcttgctcttcttgatgctctggcttcacacaaagcttgtaaattagctattttgcatctaattaatggaactattaaaggtgatgaaagatatgcagagatattccaggatcttttagctttggtgcggtctcctggagacagtgttattcgccaacagtgtgttgaatatgtccatccattttgcagtctctctgtactttcagctccagaatctcttcagaatctgttg

SEQ ID NO: 660 - DNA, 836 bp, Homo sapiens
ccgtgtccatctytttratatcatcacccagtaccgtgccatcttctcaracgaggacccactgctgccccctgccatgggtgagcacactgtgaatgagagtgccatcttccatggctgggtgctacagaaggtctcacaattcctgcaggtgctggagaccgacctttaccggggcataggcggccacctggactctctgctgggccagtgcatgtactttgggctgtccttcagccgggtgggagctgatttccggggtcagttggctcctgttttccagcgggtggccatcagcactttccagaaagcaattcaggaaacagtggagaaattccaggaagaaatgaactcctacatgctcatctcggctccagccatcctgggcaccagtaacatgcctgctgctgtgccagccacccagccggggacgctgcagccacccatggtgctcctagatttcccacccctcgcctgctttctcaacaatattctggttgccttcaatgatctgcgcctctgctgccctgtggccctggcgcaggatgtgactggggccttggaagatgcccttgccaaggtaactaaaataatcctggccttccatcgcgctgaagaggctgccttcagcagcggggagcaagagctctttgtccagttctgcactgtcttcctggaagaccttgttccgtatttaaatcgctgtctccaagtcctttttccaccagctcagatagcacagactttaggtaagagaatgaaaattctgtaaactgccttactgatgtgtaattcacatactaaataattcatccatttgtgtaaaaaaaaaaaaa

SEQ ID NO: 661 - DNA, 735 bp, Homo sapiens
  misc_feature (3)..(3): n equals a,t,g, or c
  misc_feature (10)..(10): n equals a,t,g, or c
  misc_feature (13)..(13): n equals a,t,g, or c
  misc_feature (18)..(18): n equals a,t,g, or c
cgngatttanaantaggncgcccttttttttttttttttttttttttttttttttttttttttttttttttttttttttttttttttttcagactttcagcccctttaattaggtgctctgagaagaggtcagaatggcaggcagggggtggggaaggcggtgcttcttgagccccacttagcaactggtcactcatcctctggcagctggatcttgctggggtcgaagcagttggattccatgatgggaaggccattggctctcggtatttcacaagcctctcagcttcgcggcgggaccactctttcatcccatcccacgctcttggacaccctgtgcacctgtagtcaggcagataggccacaaaggtgctgccaaggaccaggatgatggagacgccaaagaagaagacaagtcgcatgttccagacgtccaaaacggggtccttgtcataaccatgggagtctgggttcttctcatacaagttttcgtcctcgggttctgggtcctcttgccacggtgtggtcggttctgggggccgctttcccgccacagcggacggggcgaccacagtcctggagaagctagattcccagcggacgcgggcggccgggagccctcgcgtcgccgctgccgccaaaagacggcgagcgctcaaaccaaacagcccagccgccatgacagatggtgctgcagggtctcccccttctgtcgtcttctcggagccgtacaac

SEQ ID NO: 662 - DNA, 692 bp, Homo sapiens
  misc_feature (23)..(23): n equals a,t,g, or c
  misc_feature (32)..(32): n equals a,t,g, or c
  misc_feature (651)..(651): n equals a,t,g, or c
  misc_feature (684)..(684): n equals a,t,g, or c
  misc_feature (692)..(692): n equals a,t,g, or c
aatttatacgactcactatgggnaatttgccntcgagccaaaattcggcacgagggctgtttggtttgagcgctcgccgtcttttggcggcagcggcgacgcgagggctcccggccgcccgcgtccgctgggaatctagcttctccaggactgtggtcgccccgtccgctgtggcgggaaagcggcccccagaaccgaccacaccgtggcaagaggacccagaacccgaggacgaaaacttgtatgagaagaacccagactcccatggttatgacaaggaccccgttttggacgtctggaacatgcgacttgtcttcttctttggcgtctccatcatcctggtccttggcagcacctttgtggcctatctgcctgactacaggatgaaagagtggtcccgccgcgaagctgagaggcttgtgaaataccgagagccaatggccttcccatcatggaatccaactgcttcgaccccagcaagatccagctgccagaggatgagtgaccagttgctaagtggggctcaagaagcaccgccttccccaccccctgcctgccattctgacctcttctcagagcacctaattaaaggggctgaaagtctgaaaaaaaaaaaaaaaaaaaaaaaaaaaaaaaaaaaaaaaaaaaaanaaaaaaaaaaaaaaaaaaaaaaaaaaaaaaaangggggggn

SEQ ID NO: 663 - DNA, 1250 bp, Homo sapiens
  misc_feature (1209)..(1209): n equals a,t,g, or c
cgcgtccgcccacgcgtccgcccacgcgtccgcccacgcgtccgctcaggaggcgggaggaggacccggaatgaagacgaaggcgctcaccattaaatcgtacggctcgcactgccccctgcccgcagtccagcgtcttcaaccgtttctgcggcagctctggaggccgcggctttggctcagggaaagccatgctcccaggactccttccttgcagccttaaatcggtctgtacggaaaattccgcgccttagaaacccacgcttgggtgtaaccttattattgttcttcctgacctacttcctgtttatcacttccgggttcatcattttggcatttcggtgatcgggttggaactattgaagcccgctttcaggttcttttccccattttccctttgaaaggaagacttctggcttctcctaaatctccgttctctgggtaaggggagtccaagcctctgtcatgaggaacggaaatgcgagggcctcgggtgttactctaaaatccgccctcagcttgcacgccggaagctgcgattcctgcagcggaagaggcgtgatctggccttcgactcgctatgtccactaacaatatgtcggacccacggaggccgaacaaagtgctgaggtacaagcccccgccgagcgaatgtaacccggccttggacgacccgacgccggactacatgaacctgctgggcatgatcttcagcatgtgcggcctcatgcttaagctgaagtggtgtgcttgggtcgctgtctactgctccttcatcagctttgccaactctcggagctcggaggacacgaagcaaatgatgagtagcttcatgctgtccatctctgccgtggtgatgtcctatctgcagaatcctcagcccatgacgcccccatggtgataccagcctagaagggtcacattttggaccctgtctatccactaggcctgggctttggctgctaaacctgctgccttcagctgccatcctggacttccctgaatgaggccgtctcggtgcccccagctggatagagggaacctggccctttcctagggaacaccctaggcttacccctcctgcctcccttcccctgcctgctgctgggggagatgctgtccatgtttctaggggtattcatttgctttctcgttgaaacctgttgttaataaagtttttcactctgaaaaaaaaaaaaaaaaaaaaanctygrgggggggcccggaacccaattcsccggatagtgagt

SEQ ID NO: 664 - DNA, 1606 bp, Homo sapiens
  misc_feature (1310)..(1310): n equals a,t,g, or c
aagcttggcacgaggctggaagaattcgcggcctgggtctagttggcggcggggtcgggtccgcgcgagccgcgatggagctgcacatcctagaacaccgggtgcgggtgctgagcgtcgcccgtcccggtctctggctctacacccacccgctcatcaagctgctcttcctgccccgccgcagccggtgcaagttcttcagcctgacggagacccctgaggattacacgcttatggtggacgaggagggctttaaagagctgcccccatctgagttcctgcaagtagctgaggccacatggctggtgctgaacgtgtcgtctcacagcggtgcggcagtgcaggctgctggggtcaccaagatcgcccgttcggtcatcgcgccactggccgagcaccacgtgtctgtgctgatgctgtccacttaccagacggacttcatcctggtgcgggagcaggacctgtccgtggtgatccacacgctggcccaggagttcgacatttaccgcgaggtgggcggagagcctgtgcctgtgacgagggatgattccagcaatggctttccccgcactcagcatgggcccagccccacggtgcatcccatccagagcccacagaaccgcttctgtgtcctcacactggaccctgagacgcttccagccatcgccaccaccctcatagatgtcctcttctactcgcacagcacccccaaggaggcagcctctagcagtcctgaacccagctccatcacgttctttgccttctccctcatcgagggttatatctccattgtcatggatgctgaaacacagaaaaagttccccagtgacctcctgctgaccagctcctcgggggagctgtggaggwtggtgcgcatcgktggacagcccctgggctttgatgaatgtggcatcgtggcacagattgcaggtcccctggctgccgctgacatctctgcctactacatcagcaccttcaacttcgaccacgccctggtgcccgaggacggtatcggcagcgtcatcgaggtcctccagcggcggcaggaaggcctggcttcctgaggcccatgggcaacagagcagcctccctgctctcccctcgacccaggcttccaaagacttctctaagctatttccttaagctctggaacgagccccctgttctgctggggaccctcgttccgctctctgtatgtaagctgcgtgcaggcaccggcttttacgcggacacctgtgtacactcacaggtggagtgggcaggtgctagcctgactgcgtgtctgcccatgcaggggaacacggtgctcngggcttaagcccccaacccatcactccctgcgcagcctcggcgtttgcacagtccctgcctgaggcctgagccattccccaaaggcttcctgggccagctgccccsctgacctccgttctgcctctggtggggttgccttccctggccaggtgagtcctgacagtgcctctccctcctggggcctccaaggaaagtattttgacatctctctctcttctgtttttattgacttgttaataaaggactttgtagtgacaaaaaaaaaaaaaaaaaaaaaaaaaaaaaaaaaaaaaaa

SEQ ID NO: 665 - DNA, 2051 bp, Homo sapiens
cgctcccggggaggtgttgcagccatggctacggcagccggcgcgacctactttcagcgaggcagtctgttctggttcacagtcatcaccctcagctttggctactacacatgggttgtcttctggcctcagagtatcccttatcagaaccttgggcccctgggccccttcactcagtacttggtggaccaccatcacaccctcctgtgcaatgggtattggcttgcctggctgattcatgtgggagagtccttgtatgccatagtattgtgcaagcataaaggcatcacaagtggtcgggctcagctactctggttcctacagactttcttctttgggatagcgtctctcaccatcttgattgcttacaaacggaagcgccaaaaacaaacttgaagttgtctgaaagcttgctctacacttttacattcatcctcacccttttttttgtggggtagaggaggtgcagtaatttactcagtgatctttctactttctagaaactgtccttcaaagctctttaagaccccctcgttagtcagttttttctcttatatgctctggttgagcttgaatagaccagttgttacttaagaaagaaacagagaaagattttagcttttcaatcctatttggcagaggacttcagctaccttcttacagtctttggctgtgttggtaccctcgtgtgctctgagctaagccacatactaaactgactttttggtttgtatacccttgctcccgccttctgatgaaaacaccttaccctcacaaccaccatctttcctctcctttccaaagctctttccaccttgctgcactaagataaagtgacacttycactatatgtcaattccacacacatttattaggtacctgtgaggtaggatcctatcctctcaaacttccatttctcatgctacagagaaagataaggaagatgagcaagtgcctggaatggggcaggctgagcagtcacacaggcatagaggcacgctgagaacctggaggggagactgcagagtgccttccctgatgctgcagccggaagtgatccttccctccacctggcccctgggacactgtgctctgcagtgtgcagggcctgatggcactgctagattgctccttcagctcagggccacagcttaaacagctttacctttcccctcagcacctgtcccactatcttgcacacaggtgctctaaccatgtttattgaacaaaggagggaaactgatttcactttcacttgttcattatcattccaatttttatgtgaaaatggcacaacccatttggggtaccctcaccccaaaataaaagcccaagtctacctttgactggtaccaccttttttgtggtttcgttggtgagaaacctttatctttttcatacctttctattctcaatcacttctccaaaagtgtgtctttccagctctgatttaytcaaaacacaagcattyctgtttagagattctagcccatgggttatctggctagttattacctctcctgttcacttagttatactttattattgctcacaggctggggaggcagaatgactctgtcaccactaggagccattagggcttcttccctggaggactgcctgcttgctttctggggacactagccctcatttcccttctgtggtacagtggggcaaattatttgtattaagcaaacatttatgggaaacaacccgctcccgaaaacggagcccccaagtaaagcacaaccctgaaagattatgaactatgaattgtctctrgtagagataaatttctgcaaacatatctcagtcttccctctgtttctctggtgattaagaagttcctttttggtaaggaaaaggatttttaaccatagagttaggcatcatggaaattcaaaccagatttcttaatacctggtcttcctcaaagagaaataataacagtaatagtggtgctgggaacaatatggcagattattgaatgaaattgattaacttgaataaaatgctgtgaattttctctaaaaaaaaaaaaaaaaaaaaaa

SEQ ID NO: 666 - DNA, 414 bp, Homo sapiens
  misc_feature (257)..(257): n equals a,t,g, or c
  misc_feature (397)..(397): n equals a,t,g, or c
  misc_feature (399)..(399): n equals a,t,g, or c
  misc_feature (407)..(407): n equals a,t,g, or c
ggataatttatgaagaacagaaatttgtttcccacagttctgaaggttgggggaagtccaaaatcaaggctccagcagatacagtgtttgataagttgccctctgctttcaagatggtcccttgtttctgtgtcctcacttggcagaaggaatgaacttgctcccttgagtccttatataaagtcattaatcctatccataagggtggagctagtatggcctaatcatctcatgaaagccccacctctttatttttnatttttggtagagatggggtctcactgtgttgcccaggctggtgtcgaattcctaggctcaatgatccttctgcttgggcctcggaatgctgtggttacaggtgtgagccacacctcttaaatcccgttggcatgggggntnaagtttcnaaaagga

SEQ ID NO: 667 - DNA, 835 bp, Homo sapiens
  misc_feature (826)..(826): n equals a,t,g, or c
gcggcgggtgcgctccttccacggcccgcacaccacctgcctgcatgcggcctgcgggcccgtgcgcgcctcccacctggcccgcaccaagtacaacaacttcgacgtgtacatcaagacgcgctggctgtacggcttcatccgcttcctactctactttagctgcagcctgttcactgcggcgctctggggtgcgctggccgccctcttctgcctacagtacctgggcgttcgcgtcctgctgcgcttccagcgcaagctgtwcggtgctgctgctgctgctgggccgccggcgcgtggacttmcgcctggtgaacgagctgctcgtctatggcatccacgtcaccatgctgctggtcgggggctgggctggtgcttcatggtcttcgtggacatgtgagggccgtgggtgcgagcttgatgtatcgtcccggcctgtggctgtgttctctccatgggtggggtcggccagcgccttcccttcgcccatcccccaggcagtcgctgctgcccggcgcccacggagagaaaagaaagggctgagacttctgtgatgggggcgcggacaccacccctaggctggcttcctggacccaccctccccgtatgcactctcaggggcagcgcccacctgccggtggctcctgctcacatgtcttcgggtcgtactgcggggtgggccctccgttccgcctctctgtgggcctctctccaggaccacagctgccagggactttagacatcaccctgggaggccctggacacagagggytgtktgcccaggagcaattccggagggggcctcctggctgcacagcccttctgntgcctggcc

SEQ ID NO: 668 - DNA, 593 bp, Homo sapiens
  misc_feature (574)..(574): n equals a,t,g, or c
acgcgtgggcggggcggtaccaagatggactcctcgcgggcccggcagcagctccggcggcgattcctcctcctgccggacgccgaggcccagctggaccgcgagggtgacgccgggccggaaacctccacagctgttgagaaaaaggagaaacctcttccaagacttaatatccattctggattctggattttggcatccattgttgtgacctattatgttgacttctttaaaacccttaaagaaaacttccacactagcagctggtttctctgtggcagtgccttgttgcttgtcagtttatcaattgcattttactgcatagtctacctggaatggtattgtggaattggagaatatgatgtcaagtatccagccttgatacccattaccactgcctcctttattgcagcaggaatttgcttcaacattgctttatggcatgtgtggtcgtttttcactccattgttgttgtttacccagtttatgggggttgtcatgtttatcacamtccttggatgatttccgaagagacagggtcttctatgttgcccaggctgtctttgaactcctnggatcaagtgatcctcctt

SEQ ID NO: 669 - DNA, 450 bp, Homo sapiens
  misc_feature (344)..(344): n equals a,t,g, or c
tcgcccacgcgtccggagtttagcaactttgcatgttatgaccacatttctctataggatactgccacaacatgtcaactgtcctggaggaattaatgcctggaatactatcacctcttatatagacaaccaaatctgtcaagggcaaaagaacctttgcaataacactggggacccagaaatgtgtcctgagaatggatcttgtgtacctgatggtccaggtcttttgcagtgtgtttgtgctgatggtttccatggatacaagtgtatgcgccagggctcgttctcactgcttatgttcttcgggattctgggagccaccactctatccgtctccattctgnctttgggcgacccagcgccggaaaagccaagacttcatgaactacataggtcttaccattgacctaagatcaatctgaactawcttagcccagtcagggagcyctg

SEQ ID NO: 670 - DNA, 1575 bp, Homo sapiens
  misc_feature (1482)..(1482): n equals a,t,g, or c
  misc_feature (1521)..(1521): n equals a,t,g, or c
  misc_feature (1524)..(1524): n equals a,t,g, or c
gcattgcatggttcactgtcttttactttggcaatggctggattcctaccctcatcacggcctttgtycttgctacctctcaggcccaagctgkatggctgcaacatgattatggccacctgtctgtctacagaaaacccaagtggaaccaccttgtccacaaattcgtcattggccacttaaagggtgcctctgccaactggtggaatcatcgccacttccagcaccacgccaagcctaacatcttccacaaggatcccgatgtgaacatgctgcacgtgtttgttctgggcgaatggcagcccatcgagtacggcaagaagaagctgaaatacctgccctacaatcaccagcacgaatacttcttcctgattgggccgccgctgctcatccccatgtatttccagtaccagatcatcatgaccatgatcgtccataagaactgggtggacctggcctgggccgtcagctactacatccggttcttcatcacctacatccctttctacggcatcctgggagccctccttttcctcaacttcatcaggttcctggagagccactggtttgtgtgggtcacacagatgaatcacatcgtcatggagattgaccaggaggcctaccgtgactggttcagtagccagctgacagccacctgcaacgtggagcagtccttcttcaacgactggttcagtggacaccttaacttccagattgagcaccacctcttccccaccatgccccggcacaacttacacaagatcgccccgctggtgaagtctctatgtgccaagcatggcattgaataccaggagaagccgctactgagggccctgctggacatcatcaggtccctgaagaagtctgggaagctgtggctggacgcctaccttcacaaatgaagccacagcccccgggacacygtggggaaggggtgcaggtggggtgatggccagaggaatgatgggcttttgttctgaggggtgtccgagaggctggtgtatgcactgctcacggaccccatgttggatctttctccctttctcctctcctttttctcttcacatctcccccatagcaccctgccctcatgggacctgccctccctcagccgtcagccatcagccatggccctcccagtgcctcctagccccttcttccaaggagcagagaggtggccaccgggggtggctctgtcctacctccactctctgcccctaaagatgggaggagaccagcggtccatgggtctggcctgtgagtctccccttgcagcctggtcactaggcatcacccccgctttggttcttcagatgctcttggggttcataggggcaggtcctagtcgggcagggcccctgaccctcccggcctggcttcactctccctgacggctgccattggtccacccywtcatagagtgctctgaccctgggctttcacgggccccattccaccgcctccccaacttgagcctgtgancttgggaccaaagggggatcctcgtctcttgtgactcancanaagcagtggccacgttcaaggaagggccgctggccttggaagctcaaccca

SEQ ID NO: 671 - DNA, 884 bp, Homo sapiens
tttttcataaccacctcaaatgtgattcaaataagtcctaagttttaaatatatcaaaaattaatgggaaactcttcgcgatttgtgatgtctaacgggccatttcatgtaacagaacgtttccatacaccgctatccatctaaatttaaatcactttttcagagaactgcgtaagtattacgcatgttttccctgtcattcatccagaatctaatcaccagactaatgattccatcaatcctggcgcattttagtcaaaacgggggaaaattttttcaacaaatgctcaaccagcattgggtatatccagtacactccacgctttacttaagtctagatatttgtgggagaaaggatgcctggttcattacgtaaaatgccggtctggttaccaatagtcatattgctcgttgccatggcgtctattcagggtggagcctcgttagctaagtcactttttcctctggtgggcgcaccgggtgtcactgcgctgcgtctggcattaggaacgctgatcctcatcgcgttctttaagccatggcgactgcgctttgccaaagagcaacggttaccgctgttgttttacggcgtttcgctgggtgggatgaattatcttttttatctttctattcagacagtaccgctgggtattgcggtggcgctggagttcaccggaccactggcggtggcgctgttctcttctcgtcgcccggtagatttcgtctgggttgtgctggcggttcttggtctgtggttcctgctaccgctggggcaagacgtttcccatgtcgatttaaccggctgtgcgctggcactgggggccggggcttgttgggctatttacattttaagtgggcaacgcgcaggagcggaacatggccct

SEQ ID NO: 672 - DNA, 576 bp, Homo sapiens
  misc_feature (545)..(545): n equals a,t,g, or c
  misc_feature (550)..(550): n equals a,t,g, or c
ggaaggctgaggtgtgcgccttttttttttttccttcttagtcgtgtgtacatcattgggaatggagggaaataaatgactggatggtcgctgctttttaagtttcaaattgacattccagacaagcggtgcctgagcccgtgcctgtcttcagatcttcacagcacagttcctgggaaggtggagccaccagcctctccytgaataactgggagatgaaacaggaagctctatgacacacttgatcgaatatgacagacacygaaaatcacgactcakccccctccagcacctctacctgttgcccgccgatcacagccggaatgcagctgaaagattccctggggcctggttccaacygcccactgtggactctgaggcctctgcatttgcgggtggtctgcctgtgatattttggtcatgggctggtctggtcggtttcccatttgtctggccagtctctrtgtgtcttaatcccttgtccttcattaaaagcaaaactaaagaaaaaaaaaaaaaaaaaaaaaaaaaatttgggggggggncccgntacccaattgggcctttagggggggg

SEQ ID NO: 673 - DNA, 1468 bp, Homo sapiens
ggaattggtgtgacagtgccatcgagtacctgttggatcagactgatgtgttggtggttggtgtcctgggcctccaggggacaggcaagtccatggtcatgtcattgttgtcagccaacactccagaggaggaccagaggacttatgttttccgggcccagagcgctgaaatgaaggaacgagggggcaaccagaccagtggcatcgacttctttattacccaagaacggattgttttcctggacacacagcccatcctgagcccttctatcctagaccatctcatcaataatgaccgcaaactgcctccagagtacaaccttccccacacttacgttgaaatgcagtcactccagattgctgccttccttttcacggtctgccatgtggtgattgttgtccaggactggttcacagacctcagtctctacaggttcctgcagacagcagagatggtgaagccctccaccccatcccccagccacgagtccagcagctcatcgggctccgatgaaggcaccgagtactacccccacctagtcttcttgcagaacaaagctcgccgagaggacttctgtcctcggaagctgcggcagatgcacctgatgattgaccagctcatggcccactcccacctgcgttacaagggaactctgtccatgttacaatgcaatgtcttcccggggcttccacctgacttcctggactctgaggtcaacttattcctggtacccttcatggacagtgaagcagagagtgaaaacccaccaagagcaggacctggttccagcccactcttctccctgctgcctgggtatcgtggccaccccagtttccagtccttggtgagcaagctccggagccaagtgatgtccatggcccggccacagctgtcacacacgatcctcaccgagaagaactggttccacttacgctgcccggatctgggatggggtgagaaagtcctytgctctggcagagtacagccgcctgctggcctgaggccaaggagaggaatgtcatgcaggggacctcctgggtccgcagtgtactgcgagggagcacagatgtccatcccccgctggggtggagagcggcagcaggcctgatggatgagggatcgtggcttcccggcccagagacatgaggtgtccagggccaggccccccaccctcagttggggctgttccgggggtgactgtgagcgatcccaccccaaacctgagatggggtagcccgtcctgtgtcctccacagggacaagcagtgggaggagtctgaatggtcaccaggaagcccgggctccatcttgacctcctttttcagggacaggagcaacaggcccctcttccctgactctaagcccttccctgtaaggtgaggcagggtctggagagctctttattggaacagatctggtggttcaaataaacacagtcatgcaaaaaaaaaaaaaaaaaaaaaaaaaa

SEQ ID NO: 674 - DNA, 469 bp, Homo sapiens
  misc_feature (13)..(13): n equals a,t,g, or c
  misc_feature (400)..(400): n equals a,t,g, or c
  misc_feature (431)..(431): n equals a,t,g, or c
  misc_feature (456)..(456): n equals a,t,g, or c
aacctaagcaacncattatgggcagtgggattttgggactcgcctttgccctggaaacactggaatcctactttttctggtacttttgacttcagtgacattgctgtctatatattcaataaacctcctattgatctgttcaaaagaaacaggctgcatggtgtatgaaaagctgggggaacaagtctttggcaccacagggaagttcgtaatctttggagccacctctctacagaacactggagcaatgctgagctacctcttcatcgtaaaaaatgaactaccctctgccataaagtttctaatgggaaaggaagagacattttcagcctggtacgtggatggccgcgttctggtggtgatagttacctttggcataattctccctctgtgtctcttngaagaacttagggtatcttkggctataactnagtgggattttcccttggagctgtnatgggtttttttt

SEQ ID NO: 675 - DNA, 1120 bp, Homo sapiens
  misc_feature (1108)..(1108): n equals a,t,g, or c
ggggacccggagmgggaagatggcggcggcgcaggaggcggacggggcccgcagcgccgtggtggcggccgggggaggcagctccggtcaggtgaccagcaatggcagcatcgggagggacccgccagcggagacccagcctcagaacccaccggcccagccggcacccaatgcctggcaggtcatcaaaggtgtgctgtttaggatcttcatcatctgggccatcagcagttggttccgccgagggccggcccctcaggaccaggcgggccccggaggagccccacgcgtcgccagccgcaacctgttccccaaagacactttaatgaacctgcatgtgtacatctcagagcacgagcactttacagacttcaacgccacgtcggcactcttctgggaacagcacgatcttgtgtatggcgactggactagcggcgagaactcagacggctgctacgagcactttgctgagctcgatatcccacagagcgtccagcagaacggctccatctacatccacgtttacttcaccaagagtggcttccacccagacccccggcagaaggccctgtaccgccggcttgccacagtccacatgtcccggatgatcaacaaatacaagcgcagacgatttcagaaaaccaagaacctgctgacaggagagacagaagcggacccagaaatgatcaagagggctgaggactatgggcctgtggaggtgatctcccattggcaccccaacatcaccatcaacatcgtggacgaccacacgccgtgggtgaagggcagtgtgccccctcccctggatcaatatgtgaagttcgacgccgtgagcggtgactactatcccatcatctacttcaatgactactggaacctgcagaaggactactaccccatcaacgagagcctggccagcctgccgctccggtctccttctgyccrctctcgctttggcgctggcagctctatgctscccagagcaccaagtcgccctgggaacttcctgggcgattgagtttgtacggagcagtcaagattgagggagcagggacttcggttgaaggtggccctgcttggaggaccaacccttacctgttggcgtttnaccattcatcgg

SEQ ID NO: 676 - DNA, 835 bp, Homo sapiens
  misc_feature (630)..(630): n equals a,t,g, or c
  misc_feature (803)..(803): n equals a,t,g, or c
  misc_feature (823)..(823): n equals a,t,g, or c
tcaacgagagcctggccagcctgccgctccgcgtcmtccttctgcccactctcgctttggcctggcagctctatgctccagagcaccaagtcgccctggaacttcctgggygatgagttgtacgagcagtcagatgaggagcaggactcggtgaaggtggccctgctggagaccaacccctacctgctggcgctcaccatcatcgtgtctatcgttcacagtgtcttcgagttcctggccttcaagaatgatatccagttctggaacagccggcagtccctggagggcctgtccgtgcgctccgtcttcttcggcgttttccagtcattcgtggtcctcctctacatcctggacaacgagaccaacttcgtggtccaggtcagcgtcttcattggggtcctcatcgacctctggaagatcaccaaggtcatggacgtccggctggaccgagagcacagggtggcaggaatcttcccccgcctatccttcaaggacaagtccacgtatatcgagtcctcgaccaaagtgtatgatgatatggcattccggtacctgtcctggatcctcttcccgctcctgggctgctatgccgtctacagtcttctgtacctggagcacaagggctggtantcctgggtgctcakcatgctctacggcttcctgctgacttcggcttcatcaccatgacgccccagctcttcatcaactacaagctcaagtctgtggsccamcttccctggsgcatgtcactaaaaggscctcaamacattcatcgacgacctgttcgccttttggtcatcaangaatggcccgttaatggtancggaatcgggct

SEQ ID NO: 677 - DNA, 2697 bp, Homo sapiens
acaatgagcgtgtgcacaagaggctgaggactgtggatacggacagccatgccgagcaggggccagctcagcagccccaggcccaggtggaggatgcagatgcattcgagcacattaaacaaggcagtgacgcatacgatgcacagacctatgatgtggccagcaaagaacagcaacagtctgcaaaagactctggcaaagatcaggaagaggaggagatagaggacacccttatggacacagaggagcaggaggagttcaaagcagcagacgtggagcagctgaagccagaggaaatcaagtcgggcaccacagcacccttgggctttgatgagatggaagtggagatccaaactgttaaaacagaggaagaccaagaccccagaacagacaaagcccataaggagacagaaaatgagaaaccagaaagaagccgagagtctaccattcatacagctcatcaattcctcatggacacgatcttccagccctttttaaaagatgtcaatgagctaagacaggagctggagagacagctggaaatgtggcagccacgtgaatctggaaacccagaggaggagaaggttgcagctgagatgtggcagagttacctgatcttaacagcgcctctttcacaacggttatgtgaagagcttcgtctcatattagagcctacccaggcagccaagctgaaaggagactatcgaactgggaaacgactaaacatacggaaagtcattccatacattgctagtcaatttcggaaagacaagatttggcttcgaaggaccaagcccagtaaacgccagtatcagatttgtttggctatcgatgactcttctagtatggtagacaatcataccaagcagcttgcatttgaatctttggctgtgattggaaatgctctaaccctcctggaagtgggtcagattgcagtgtgtagttttggagaatctgtaaagctgttacacccatttcatgagcagttcagtgattactctgggtcccagattctacgtctctgcaaattccaacaaaagaaaaccaagattgctcagtttctagagtctgttgccaacatgtttgcagctgctcagcagytctcgcagaacatcagttcagaaactgcacaactcctcctggtagtctctgatgggcgaggccttttccttgagggcaaagaaagagtcctggcagcagttcaggctgccggaatgcaaatatctttgtcatctttgttgtattggacaatcccagttcacgggattctatcttggacattaaagtaccgatatttaaaggacctggagagatgcctgaaatccgatcctacatggaagagttcccattcccatactatatcattcttcgagatgtaaacgcacttcctgagacactcagcgatgccctcagacagtggtttgagttggtgacagcctctgaccacccatagaacagaaagaagagtccaaagtgagacttaactgtggtcagaaggtcacattgcttacccaggtgctcccttttggacaactacaaaaaattttattgtaatatttttattttacaacgtgatcttacagcctacagaatgctctctggctcccggctttgctgggctgaggtttttataccaaacctggaagcagcagcaggtgcctgaactcgtaactagagaagagttatccttcttccctgccttggaagccctggcctgggaggaggtcataccccaccgttggagcccagctgcctgttttcttttgcaggggatctgggcacctgtgctttgaggagatgctgccaggagcatgggactctgacagtcctttgtataaaggactaaagggagctgcccttttgaccctgttctaagctctgccttgccaagcccatagtgtgtgcccaaaagctgtcaagtggccaagacagctcgtttctggagagtatgagggtgtgttttcttattgtgaaaggaactaccttctcttagagggtaggaagaatgtggtgtgtgtgtgttctcataaagcaactggacattataggtgcccaggtcatctataaaaacgatccttgggctgtgtaaaaatgaagtggcttttcagtatcctctttcacacttgctgcttcgggagactatgcaatgatgggaaggtgattgcccctttatttcattcagtgccatggtccctgttgttgtagtaatttatttgtttagttcatttttttttttcttaacagtcaaggggaagagtgattcctcacactgctttcaagctggactgagccagtctcattctgggaaagaaacgctgtgtccagaactcagcagctccatctattttttccagtcgaaagaaactgatctttaggcagtttttacttggccagaaagcagtgctgaatacttgaaactgtgtgctctgttctacttaatgttctgtcagaatgttcttttgtaggcagtatgtcatgatgtaatcatctatctccttgtctgtttccaagttacactgtgaagtctgcgacccttttgaggtggtcatcaaagacacagattccttgtttaaccaagtgtcccaaagcatgtacctgaagttatatcattttttattctaaaaagctatgcagcttatattctgaaaactattaaaacatataccactgttgttgatgtaaaaaaaaaaaaaaaaa

SEQ ID NO: 678 - DNA, 734 bp, Homo sapiens
  misc_feature (232)..(232): n equals a,t,g, or c
cttttaacagcgcatgcgtgcagtgttgcctcgcccaaagaagactacaatctccagggaaacctggggcgtctcgcgcaaacgtccataactgaaagtagctaaggcaccccagccggaggaagtgagctctcctggggcgtggttgttcgtgatccttgcatctgttacttagggtcaaggcttgggtcttgccccgcagacccttgggacgacccggccccagcgcagntatgaacctggagcgagtgtccaatgaggagaaattgaacctgtgccggaagtactacctgggggggtttgctttcctgccttttctctggttggtcaacatcttctggttcttccgagaggccttccttgtcccagcctacacagaacagagccaaatcaaaggctatgtctggcgctcagctgtgggcttcctcttctgggtgatagtgctcacctcctggatcaccatcttccagatctaccggccccgctggggtgcccttggggactacctctccttcaccatacccctgggcaccccctgacaacttctgcacatactggggccctgcttattctcccaggacaggctccttaaagcagaggagcctgtcctgggagccccttctcaaactcctaagacttgttttcatgtcccacgttctctgctgacatcccccaataaaggaccctaactttcaaaaaaaaaaaaaaaaaaaaaaaaaaaaaaaaaaaaaaaa

SEQ ID NO: 679 - DNA, 2028 bp, Homo sapiens
  misc_feature (13)..(13): n equals a,t,g, or c
  misc_feature (15)..(15): n equals a,t,g, or c
  misc_feature (91)..(91): n equals a,t,g, or c
  misc_feature (2023)..(2023): n equals a,t,g, or c
gctgcgcggagcncngggctgggtctccgcctcgattctccgtcctcgcggcctcccagcttccagagccgagctgctgcccttgactggngctcaggggaccacagctgcaatgacagtttgggcctgcaaaaagaaggctggaacaacgggagatggaagctttctgcaaatgcagcaccactggtatccatgaatttaacctgcccatcattcttcctagacaagagactattgaaaagtcagggtgttcaaaatggcttcagatcttatcaggacaatcttggttgttgcactaatttccaaacttggcacagctgtagatgcagaactgatgccatctggtgcgattctacagaataagagagaaaatttacccagagtgtgccatgcactggcttttctgggaatggcaaggtgccaggatttgtttttggttcgcttgcaggggtggaaacttggaactaggttccaagatggtccccgcagcaccccacaagaagaaggaggaagcccacagagaaaacggggcatgccagttcaaatccacttccttttaaagagcttcctcagcagcccaataacttttgccttcatctcattggccagaactgtgtcattggctactgctatctgcaagattgtctgagaaatgtagtttttgtagctggatatataactgcctttgacaaaaatccagtttctcttgatgaagaagaagatggtggtggatcttgggaggacaactaacattttatgccctggctacagaatacagttgcagaggagcataaagttcaaaaagatcaaaactctagttccttcacaactgtcaaagctccaagcagcactgctcccctctgacagagtgagcagagtgaaggcatgtcaggtgttctcacaaaactcttgacagggctgacctctctcagtcaatatccttgtcccacatcaggattttctagagggccctgggtacctgtgcacttccttggtggccgtaacctctttgtggagggttggtgtaggataaagaatgttctattacgctgctccctcatctgtatcatttctctcctctctaattttcctgtcagttatattttggtggagtctgggtttgtgtatttgattcctatagaaagaccatcgctttcatgcatggaggaggggaatctacgcaaagaaaggctaccttactcctttctgtgactccaccaccagtctaggaatatcctgggagaagaattgcctctcaaagctgcttctataagcagcctacatcctagctaagcaaagaagaaacacttcccacatctagggctgtctaaaagaactttctgtgatgacagaaatgttctatatctgcagtgtccaatatggtaaccatataggcacatgtggctagtgaacacttgaaatgtggctagtgtgactgaggaaggaaaatttaaattttgtttaattgtaattaatttaaattcagatagccaaatggggctactagctattgtgttagatagcacggtatactttattctctttcttgtgttgtagaaccagctgggagaggtgtgggtcagtcatgggcttggtatcccctggtcttcactattctagcttgccattgaatttgtctcccagaggaaaagaaagaatggtatttggaattaaattcaagatgttaacttgacatctatatattgcacatattcctgtatagtgaatggatgacctcctgggaatagttcctgtgactgattttagtgataattgatcatgaagaaatggcagtactgctccacttcaccttcctagtgactattatgtgttcctagtcagagtgactcagcagagattattttgttctcttgtgcaatttattctgtgtcattttatttttgtaatattgtggcagctaaatgattattctgtgtatgtttttcaaaatattaggtggcttatattttttaaaaggctatgaaataaaaataaactatacgtaamamaraaaaaaaaaaantcgag

SEQ ID NO: 680 - DNA, 639 bp, Homo sapiens
aattcggcacgagcttccttttagggtgacaacaaaaaaatggaagatgctaaattctacctgaccctgcctggaaccaagatggagatggaagaaaaagagcttcaagcatctaaaaacctggtcaccttcaccccaagcaaggatagcactaaagacagctttcagattgccaccctcatctgctccacaaagctcacccagaatgttgacctgttaggcttgttaaattggcgttccaactcccagaacattaaacacaacctaaagaagttaatggaagtggatggaggagagattgttaagtttttgcaagatacactagatgcactctttaacataatgatggaaatgtcagacagtgaamcctatgacttccttgtgtttgacgcactggtatttattatttcactgataggagacaksargttccagcattttaatcctgtacttgaaacctacatttacaagcacttcagcgccactttggcatatgtgtaagtatgatctgaaggaactacatgttgttggatctttggatttgtactcttaggactggattgttgagaaacgagacggacctattactattcagtaaatacgcctgttaaggcagaactcttattctaagcttccggg

SEQ ID NO: 681 - DNA, 1863 bp, Homo sapiens
  misc_feature (22)..(22): n equals a,t,g, or c
  misc_feature (1820)..(1820): n equals a,t,g, or c
  misc_feature (1830)..(1830): n equals a,t,g, or c
ccgaatgaaattgccttaaggncttcttcctatgctgtatggcagaagagttcatggttgcattcagggattgcaaggaccatatagacatgtcacaggtggaawaagggccacwagccgttttgcacaaatgcctgmccacctgcccctcttccatccaggagtgtgttactgaggggctggctggaccaacctgctggctcaggcatgtgactggcctaactgcatgcccagggcactgccagggttcaatgggccagccgtctcctactccaccttggatttttctctccatcacatcatttctgaccatttgctcccttccattcttgaaacacctcatgccccacaggagccccagtggtgactggatctgcaagggttatctcccgccctctggggtttgagtggaggtatggagccagagaggctatcctagctaccttcctcctagggggagctggtccccttcctatgtggtagagagactggtgtaagagtgtgggtgtggcaggcgccggaaatcctcaaagctttcagaagcatccagaatgcctaccatcagctcctgaatcagggattttcagcactacctctgagccatggggttggctgcccagccaggcttccaggccctgaggacatgtggtcaggttcagcaggctcctgggtaaagagggtgggagggggcttctccttttggaagcagatagccatgcaggtagaattgtcatctcccaagtggccacatacagcaacccactccaggccatggggaccaccactcagggttcggggctggcaggagggtagtttctccagtctccccagtctgttggtgtctttataggaaactataaagcagagcagtggtgtctttagaggaaactcattcaagtcagggcactgattttcctctcagtttattatttggggggatagggtcaggtgggtatagtagtactttaccagggtgcttttaagttactttaaaaaaagcctacaaaatattttttttcttttatttgctcgagttcacattaatgatggtcacaaggctgccttgttgggcaggcgtattgcccccagttcctcttctgctggcctgtatgacctccacagccaggccctgggcccaagccccttgtcccttctccactgcccctctttccagacagtaaaggccatggtcagtgtgtttttctcttgtaaacaaaccccagcttgtttaacagaaatgctaataacctactgggaaagatggaggtctaaattacctccagggtttttctgggggtttatcaccagtgtgggtcccttctgataccaccaggttcactccaggcagagtggggcggaaggctgctgaggatatgggtcagttacagcagccctcacctcaaagggctggcctgcttctcagcctacattcatttgcaagcttcaatctctggaccatctggtgttcacaggtgttagagggttaggggttaggggccagttttggatttgattcataggtaggagggcttagattttaaggcacttctgaaagtcaatccctggacaaggcagtcatcacataagaacagctaccttctccacttggtggcacaagaggtagggaggggagtatgggttcatttggcttcgcattatgcaaggtgaaaccgtttgttttccctctccattttccctaactaaatgaaaaggacacattctgaaatcccttttgttggagaataagtcagtctgargggaaatgggaggccagagatgagaaaccctttgrrgaagattktammattactgtttttgangaatttcccntagaagttttccccttagaagtttccctacttt

SEQ ID NO: 682 - DNA, 918 bp, Homo sapiens
ggcgcccggcctgcaaacttttttgtaggtatttctggtaaacaaatccttaggttatctttgctgtggttgtggtttggctttagtcatgatttcaaagtagaaatagctaggcattattttttgaaatatatgacctatatgtagtcaagaatccactgaacagagggaagcaaaccttttggaaactggcttttgggcagacagtaaacgtccagtttgatgctggaagcatgaacagcttcatcaggtaggtactcctcaactctgatgagtttgtcctttcagcctaagggggtggaagggagttgtttgagaatagcaaatacgcatgttgattgcgagtgtgtggagacaaaggcagttcccaccacagttaggtcctggccrttgtttcctcgcctgcgatgctccttgtacrtcctcaccctcctctcccgcctctgccttctgctgggtcaaaggtggcctttttctctccagccttgaattgttccctgttggcttcccaagggcccatctgctggtacagtccacacttccamagccaagacccgagagggctttcactgccccaagcctctctcctgtgaccttgggattctgtcttggcagaatcctttgtcagcggctcttrctctgtccttcctgtttggccacagctctttcaatcaatgggtattctagaaccgcaggatgtcagagctggaagggacgcgataccggtttacacaaggggaaactcctcgaggctctgggagggacggagggttttggtgacagagcgagagctaaaattgaggattcctgaatccagatcttgcctcccatcagccatctttctcccaataaatttttgttttgtgcaaggcaaaaaaaaaaaaaaaaaaaaaaaaaaaaaaaaaaaaaaaaaaaaaa

SEQ ID NO: 683 - DNA, 1123 bp, Homo sapiens
ccgcgcaagcttaaagcctccagccggacctcggctctgctctccggcttcgccatggtggcaatggtggaggtgcagctggacgctgaccacgactacccaccggggctgctcatcgccttcagtgcctgcaccacagtgctggtggctgtgcacctgtttgcgctcatgatcagcacctgcatcctgcccaacatcgaggcggtgagcaacgtgcacaatctcaactcggtcaaggagtccccccatgagcgcatgcaccgccacatcgagctggcctgggccttctccaccgtcatcggcacgctgctcttcctagctgaggtggtgctgctctgctgggtcaagttcttgcccctcaagaagcagccaggccagccaaggcccaccagcaagccccccgccagtggcgcacagccaacgtcagcaccagcggcatcaccccgggccaggcagctgccatcgcctcgaccaccatcatggtgcccttcggcctgatctttatcgtcttcgccgtccacttctaccgctcactggttagccataagactgaccgacagttccaggagctcaacgagctggcggagtttgcccgcttacaggaccagctggaccacagaggggaccaccccctgacgcccggcagccactatgcctaggcccatgtggtctgggcccttccagtgctttggccttacgcccttccccttgaccttgtcctgccccagcctcacggacagcctgcgcagggggctgggcttcagcaaggggcagagcrtggagggaagaggatttttataagagaaatttctgcactttgaaactgtcctctaagagaataagcatttcctgttcttccagctccaggtccacctcctgttgggaggcggtggggggccaaagtggggccacacactcgctgtgtcccctctcctcccctgtgccagtgccacctgggtgcctcctcctgtcctgtccgtctcaacctccctcccgtccagcattgagtgtgtacatgtgtgtgtgacacataaatatactcataaggacaaaaaaaaaaaaaaaaaaaaaaaaaaaaactcgagggggggcccgtacccaatcgcctgtgatgcatcgtata

SEQ ID NO: 684 - DNA, 731 bp, Homo sapiens
  misc_feature (33)..(33): n equals a,t,g, or c
  misc_feature (610)..(610): n equals a,t,g, or c
  misc_feature (672)..(672): n equals a,t,g, or c
  misc_feature (676)..(676): n equals a,t,g, or c
  misc_feature (717)..(717): n equals a,t,g, or c
cgcggaggctggagctggaggcgcggcgccgsntgagctgagaaccatgtgtgctcagtattgcatctcctttgctgatgttgaaaaagctcatatcaacattcgagattctatccacctcacaccagtgctaacaagctccattttgaatcaactaacagggcgcaatcttttcttcaaatgtgaactcttccagaaaacaggatcttttaagattcgtggtgctctcaatgccgtcagaagcttggttcctgatgctttagaaaggaagccgaaagctgttgttactcacagcagtggaaaccatggccaggctctcacctatgctgccaaattggaaggaattcctgcttatattgtggtgccccagacagctccagactgtaaaaaacttgcaatacaagcctacggagcgtcaattgtatactgtgaacctagtgatgagtccagagaaaatgttgcaaaaagagttacagaagaaacagaaggcatcatggtacatcccaaccaggagcctgcagtgatagctggacaagggacaattgccctggaagtgctgaaccaggttcctttggtggatgcactggtggtacctgtrggtggaggaggnatgcttgctggaatagcaattacagttaaggctctgaaacctagtgtgaaggtatatgctgntgancctcaaatgcagatgactgtaccagtccaagctgaaggggnacttatgccaattg

SEQ ID NO: 685 - DNA, 1568 bp, Homo sapiens
  misc_feature (44)..(44): n equals a,t,g, or c
  misc_feature (1428)..(1428): n equals a,t,g, or c
  misc_feature (1451)..(1451): n equals a,t,g, or c
ggcagagctagtgtggactccatccccctggagtgggatcacgnctatgacctcagtcgggacctggagtctgcaatgtccagagctctgccctctgaggatgaagaaggtcaggatgacaaagatttctacctccggggagctgttgscttatcaggggaccacagtgccctagagtcacagatccgacaactgggcaaagcctggatgatagccgctttcagatacagcaaaccgaaaatatcattcgcagcaaaactcccacggggccggagctagacaccagctacaaaggctacatgaaactgctgggcgaatgcagtagcagtatagactccgtgaagagactggagcacaaactgaaggaggaagaggagagccttcctggctttgttaacctgcatagtaccgaaacccaaacggctggtgtgattgaccgatgggagcttctccaggcccaggcattgagcaaggagttgaggatgaagcagaacctccagaagtggcagcagtttaactcagacttgaacagcatctgggcctggctgggggacacggaggaggagttggaacagctccagcgtctggaactcagcactgacatccagaccatcgagctccagatcaaaaagctcaaggagctccagaaagctgtggaccaccgcaaagccatcatcctctccatcaatctctgcagccctgagttcacccaggctgacagcaaggagagccgggacctgcaggatcgcttgtcgcagatgaatgggcgctgggaccgagtgtgctctctgctggaggagtggcggggcctgctgcaggatgccctgatgcagtgccagggtttccatgaaatgagccatggtttgcttcttatgctggagaacattgacagaaggaaaaatgaaattgtccctattgattctaaccttgatgcagagatacttcaggaccatcacaaacagcttatgcaaataaagcatgagctgttggaatcccaactcagagtagcctctttgcaagacatgtcttgccaactactggtgaatgctgaaggaacagactgtttagaagccaaagaaaaagtccatgttattggaaatcggctcaaacttctcttgaaggaggtcagtcgtcatatcaaggaactggagaagttattagacgtgtcaagtagtcagcaggatttgtcttcctggtcttctgctgatgaactggacacctcagggtctgtgagtcccacatcaggaaggagcaccccaaacagacagaaaacgccacgaggcaagtgtagtctctcacagcctggaccctctgtcagcagtccacatagcaggtccacaaaaggtggctccgattcctccctttctgagccagggccaggtcggtccggccgcggcttcctgttcagagtcctccgagcagctcttncccttcagcttctcctgcttctnctcatcgggcttgcctgccttgtaccaatgtcagaggaagactacagctgtgccctttcaacaacttttgccggcattccacccatgctcagatacacgaatggcctctcactctga

SEQ ID NO: 686 - DNA, 899 bp, Homo sapiens
  misc_feature (837)..(837): n equals a,t,g, or c
  misc_feature (839)..(839): n equals a,t,g, or c
gaatttgtaaatgaacagtccaatatttcctctcggctcattttgcacatccatttttggggaaatgtgatttctctctctttttttttttttttttgcctaaggcacaatctcaagaggtcctgagaccacgtacccatgatttttttcttgctctgtgatacccaataactccttcacctaagccctgttgttgattttgaagtgcttcctaggccagtgattttagcttctgccagctgcttttgccagtagattaacgtgtttttatttttcaaactccgtgtttcctaacgtggagtgtatgggtctaagagagcctgctgtcctccctgccttccaccttggagaggaggctggacgcatcagcagtggccagggcaggtcgcaaaatctcccagcctagagaccacacctgaaacggctgaagccagcttgcacaagggctgctgtccctctgcggcaggcagagctggtgggggcaggggtcacagagcagtcatagacaccatggaccagggcaggagaagggcagatggcacatgggcacaacagggccttgtccttagagcactggggggtcatggctgggaggggcatggcaggggctggcatccctgtagagccagaggggccacccagggcagtgacattccagatatgttgggctcacctcatccttgctgtgagactggagttccatggggacatgaagtcagtacaccgcagagctgctcagctgctctacctctcgctgacttttttgttgcacatatacattttctttcaattagcatttatttcagcttttatttaagctttttgacagtacatgtnanatatatgattataaccatttaaaaataaaaaaaaaaaaaaaaaaaaaaaaaaaaaaaaac

SEQ ID NO: 687 - DNA, 1001 bp, Homo sapiens
gctcgtggcgctggaccgcatggagtacgggggcaccttccgcaagcgcgaggacctgcgcggccgcctgttttgggtggcgctggacctgctggacctgctggacatgcaggccagcctgtgggagccgccgcgctccgggctgccgctgtgggccgagggcctcaccttcttctactgctacatgctgctgctggtgctgccgtgcgtggcgctcagcgaggtcagcatgcagggcgagcacatagcgccgcagaagatgatgctgtacccggtgctcagcctcgccaccgtcaatgtggtggccgtgctggcgcgcgccgccaacatggcgctgttccgggacagccgtgtctcggccatcttcgtcggcaaaaacgtggtggcgctcgccaccaaggcctgcaccttcctggagtaccgccgccaggtgcgcgacttcccgccgcttgcgctatcactggagctgcagccgccacccccgcagcgcaactcggtgccgctcgccgccgccgctgcacggcccgcctgggcgcccccacatgtcctcgcccacgcgtgaccccctggacacgtgacagggcccgcgcggcccccgacacgcccctggggcgcagagacaccgggttggcttggggcgcgcggtttgcatgggatggggtgggggcgggctcccctagggacaggtgcctcgagtgcccgtgcctggggtcccgcggtcgcttcttcatctcaggaatctctcggaccgcggatcctcagcccccgctccaccagcccgccccagggcgtgggtctgtttgggaggcctgggccggagcagagcagaggtgatccggcccctgcctgctgggccgcccgggttggaagggagggcagtgtgggcggagatctgctccttcggtgggggcctctggctcagatttggggccaaggaggcctctgtcattttaaagactcgtgtttacagttttgtaaaaaaaaaaaaaaaaaaaaaaaaa

SEQ ID NO: 688 - DNA, 1156 bp, Homo sapiens
  misc_feature (24)..(24): n equals a,t,g, or c
  misc_feature (47)..(47): n equals a,t,g, or c
  misc_feature (351)..(351): n equals a,t,g, or c
  misc_feature (397)..(397): n equals a,t,g, or c
  misc_feature (432)..(432): n equals a,t,g, or c
  misc_feature (792)..(792): n equals a,t,g, or c
  misc_feature (1119)..(1119): n equals a,t,g, or c
  misc_feature (1156)..(1156): n equals a,t,g, or c
aattcggcacagttcaggcgccanagctggccgatcggcgttggccnccgacatgacgcccgaggacccagaggaaacccagccgcttctggggcctcctggcggcargtctacatctccgaaatcrcctacccagcagtccgggggttgctcggctcctgtgtgcagctaatggtcgtcgtcggcatcctcctggcctacctggcaggctgggtgctggagtggcgctggctggctgtgctgggctgcgtgcccccctccctcatgctgcttctcatgtgcttcatgcccgagaccccgcgcttcctgctgactcagcacaggcgccaggaggccatggccgccctgcgnttcctgtggggctccgagcagggctgggaagacccccccatcgggnctgagcagagctttcacctggccctgctgcggcancccggcatctacaagcccttcatcatcggcgtctccctgatggccttccagcagctgtcgggggtcaacgccgtcatgttctatgcagagaccatctttgaagaggccaagttcaaggacagcagcctggcctcggtcgtcgtgggtgtcatccaggtgctgttcacagctgtggcggctctcatcatggacagagcagggcggaggctgctcctggtcttgtcaggtgtggtcatggtgttcagcacgagtgccttcggcgcctacttcaagctgacccagggtggccctggcaactcctcgcacgtggccatctcggcgcctgtctctgcacagcctgttgatgccagcgtggggctngcctggctggccgtgggcagcatgtgcctcttcatcgccggctttgcggtgggctgggggcccatcccctggctcctcatgtcagagatcttccctytgcatgtcaagggcgtggcgacaggcawytgcgtcctcamcaactggctcatggsctttctygkgaccaaggagttcagcagcctcatggaggtcctcaggccctatggagccttctggcttgcctccgctttctgcatcttcagtgtccttttcactttggtctgtgccctgaaactaaaggaaagactctggaacaaatcacagcccattttgaggggcgatgacagncactcacttaggggaatggagcaagccttgtgacttn

SEQ ID NO: 689 - DNA, 695 bp, Homo sapiens
  misc_feature (25)..(25): n equals a,t,g, or c
  misc_feature (689)..(689): n equals a,t,g, or c
ccggcgatgtctctgtctgtttggntcatcagttccgaatcacgccaccaacagccccgcaatggcgctgctgatcccaaccggtctgcatcaggtactaacaccatcgcctggttccagattggtkaattcaccaacgcggcgggtacggttttccacggtgacattaaccgcttctatgccggtgacgaccgcggggatgttcatgtccggcttcttcccgatcatgatgttcggtctgccgggtgcggcgctggcgatgtacttcgcagcaccgaaagagcgtcgtccgatggttggcggtatgctgctttctgttgctgttamtgcgttcctgaccggtgtgactgagccgctggaattcctgttcatgttccttgctccgctgctgtacctcctgcacgcactgctgaccggtatcagcctgtttgtggcaacgctgctgggtatccacgcgggyttctctttctctgcgggggctatcgactacgcgttgatgtataacctgccggccgccagccagaacgtctggatgctgctggtgatgggcgttatcttcttcgctatctacttcgtggtgttcagtttggttatccgcatgttcaacctgaaaacgccgggtcgtgaagataaagaagacgagatcgttactgaagaagccaacagcaacactgaagaaggtctgactnaactgg

SEQ ID NO: 690 - DNA, 594 bp, Homo sapiens
tcaggcctcatctcatgcagcagtcagttgaatacgaaaggaagaagtttcaagagattttggagaggcaaccaaattccctggactttgtcacccagtggctggaagaagcctcagaggaccttatgactcagaagtataaacacgccctgccagtggggggaatggctgctggctctggggacatgcccaggctgagccctgttgctgtccagaattacgcttacctgaagcttctgaagtgggaccacctccagaggccrttccccgaaacagttttaatggaccagtctcgcttccacgagctccagttgcagctggaacaactgaccatcctgggggctgtgttgctggtcaccttcagcatggcagcgccaggaatttccagccaggccgactttgctgagaaactcaagatgattgtgaagattttgctaacagatatgcacctgccctccttccatctgaaggacgtcctcactaccatcggggagaaggtgtgcctggaggtgagcagctgcctctccctgtgtgggtcctctcccttcaccacggacaaggagaccgtgctcaagggccagatccacgccgagc

SEQ ID NO: 691 - DNA, 1296 bp, Homo sapiens
cttcatcagctgcgacctcctcaccgctttcctcttataccgcctgctgctgctgaaggggctggggcgccgccaggttgtggctactgtgtcttttggcttcttaaccccctgcctatggcaktatccagccgcggtaatgcggactctattgtcgcctccctggtcctgatggtcctctacttgataaagaaaagactcgtcgcgtgtgcagctgtattctatggtttcgyggtgcatatgaagatatatccagtgacttacatccttcccataaccctccacctgcttccagatcgcgacaatgacaaaagcctccgtcaattccggtacactttccaggcttgtttgtacgagctcctgaaaaagctgtgtaatcgggctgtgctgctgtttgtagcagttgctggactcacgttttttgccctgagctttggtttttactatgagtacggctgggaatttttggaacacacctacttttatcacctgactaggcgggatatccgtcacaacttttctccgtacttctacatgctgtatttgactgcagagagcaagtggagtttttccctgggaattgctgcattcctgccacagctcatcttgctttcagctgtgtctttcgcctattacagagacctcgttttttgttgttttcttcatacgtccatttttgtgacttttaacaaagtctgcacctcccagtactttctttgggtacctctggcttactgcctcttgtgatgccactagtcagaatgccttggaaaagagctgtagttctcctaatgttatggtttatagggcaggccatgtggctggctcctgcctatgttctagagtttcaaggaaagaacacctttctgtttatttggttagctggtttgttctttcttcttatcaattgttccatcctgattcaaattatttcccattacaaagaagaacccctgacagagagaatcaaatatgactagtgtatgttccacaccctctgctactgtgttacattctgattgtcttgtatggaccagaagagagctttgggacattttttctgaacattctaagcattctagtgaaagttcccatgttccaacagaacttaaaagcaatgtttgccttatatataaaagggacacaataattgaggtccaccttctaggaaatcctaggactcgtttatttgggacatggtgggaataaaggtcacatattggaaaaaaaaaaaaaaaaaaaaaaaaaaaaaaaaaaaaaaaaaaaaaaaaaaaaaaaaaaaaaaaaaaaaaaaaa

SEQ ID NO: 692 - DNA, 906 bp, Homo sapiens
gaacaaatacagatgagacctccatcagctttttcttcctattgccacaaatgcctattggcgagggttggttggtatggtctggaacttcacagtactgtaagacgggttctgcaggatgacaggcttaggacaaggcgagagggaatcccctgtaccatgctggcatcacaatggacttttccagaaaccaaatccataatatccaaactaatggcagttttggtgtttggttccctggcaccagttactctgggagcagatgaagacagatgtctcttgcttgtgtgggagagcatatgccaccccaaaatatgcctcaacagcataaggattattttgagaaactgcagctacaggagaaactctgaaaacagagtataccagtttttgagggaaattgacatctataaaggaaatctccacttgtgagagtgtttccctctccgtaccaaaagagaaggatgactaaatcagaggaaactattatcaatggagaaggcacctactgaaatctgcataacaaacattactcttatttaccatacttgtcctgktcacctccccataactggcttcgcccacaatcttctctgkttttagktgaaaatgctttagaagctggagttctagatcacctctttcagaattactcawtttcccctgggtatctcctatgkatacmtgaagcatacatgttaacaaacttctgcttgtttttcttttgttaccctgttggtttgttatagtggttccaacccagaaattagaagggtagagggaaaatgattttttttctcccctccacttgaaatatgtatcttcctgctctatgaagttgtttggatgtcattaactcaccactctcaaatacataattagttctgcctacaaaaaaaaaaaaaa

SEQ ID NO: 693 - DNA, 1225 bp, Homo sapiens
ggcacgaggcctgggggagagtggatccaggtgaagggggcagaggttacctgtgcagggatcagtccatttattcctattttctctgacagctggatgaaagggactgggagttttcgtcctcttgaataagaactcgacaacagagtgggaactttctgtcttgtgatccattgcctggctttctgtatttgtctgaatgctttcacgggagtgtgtcgcactggagcacagaggacactcgatcgtgcggcgcgcagggcggggggccgccgctgcctccccgcgggatggctggcactgtgctcggagtcggtgcgggcgtgttcatcttagccctgctctgggtggcagtgctgctgctgtgtgtgctgctgtccagagcctccggggcggcgaggttctctgtcatttttttattcttcggtgctgtgatcatcacatcagttctgttgcttttcccgcgagctggtgaattcccagccccagaagtggaagttaagattgtggatgactttttcattggccgctatgtcctgctggctttccttagtgccatcttccttggaggcctcttcttggttttaatccattatgttctggagccgatctatgccaaaccactgcactcctactgaccactcttcaggaaaacgaaaacctgttctctccttcattgtgatgacattgatgagcaggaaggcactattcagagccttgttttgacagccctcatgccttaaggttagaggagtatctgtccatcactaagacaaatctctggagtcctggcttccagaaacaggattgccaaattgtccctgtggggctagattcttaccagcttaagaaggatattgctatcttcttagtacccgtaccttaggatttccaactgttttgaaagggaaatagtaacagtgatctgcttagagtggattttcactcaagtccttagtaagtggattttggggaaaaaagcacatgggcttctggttctttttgataatatataaaattattcattatgaggttgcagttgtttgcaaaggagaggcactcaaatttgaaaggttattttaatgtgataatttggaagacttactcagatgttggtcattgaccactctgtgcatatatttctgcagagctctgtgaaggcaatgagtgtcacttccctctgctctaataaagcaataaataataaaaaaaaaaaaaaaaaaaa

SEQ ID NO: 694 - DNA, 1852 bp, Homo sapiens
  misc_feature (1836)..(1836): n equals a,t,g, or c
  misc_feature (1842)..(1842): n equals a,t,g, or c
  misc_feature (1848)..(1848): n equals a,t,g, or c
attttgtgccacttaaaaaatttgatactggtgatggaatgtttctccagtgggttctttgtgctgccatatgttggttgccttggttgtcaatctgatattacattgtccaaagttttggccttttgcaatgcttgggggctgcatttgggcaacagggaacattgctgttgtcccaattatcaaaaccattggtttaggccttggaatcttaatctggggatcatttaatgccttaactggctgggcaagctcaaggtttggctggtttggattggatgcagaagaagtatcaaatccgctgctaaattacattggagctgggctatcagtacgtaagtgctttcatattttgtycatcaaaagtgaaataccaaataacacgtgttccatggataccactccattaataacagagcatgtgatcaacacaacccaagacccctgttcctgggtggataaactttctacagtacaccaccgcatagtgggctgcagtcttgcagtgatatctggagtactctatggatctacatttgtgccaatcatctacatcaaggaccacagcaaaagaaatgatagtatatatgcaggggcaagccaatatgatttagactatgtgtttgcgcacttcagtggcatctttcttacaagtactgtctactttctggcctactgcatagccatgaaaaatagtcctaaactatatcctgaagcagtcctaccaggattcctgtcaggagtactttgggctatagctacctgctgttggttcatagcaaatcactctctgagtgctgtggtcagttttccaataatcactgctggtccaggatttatagctgcaatgtggggtatcttcatgtttaaggaaataaagggtctacaaaactacctattaatgatacttgcattttgcatcatcttgactggagccttatgcactgctttttctaaaatctaacaatgacaaaaccagcaggtggcagcagtagttaagagaacgcgtctatcggacagcggagagatcatgctgagaaaagagtgcattttcatatagcaaatggatctcagccactgttggagtgggtaaatgatttttttccccaaaaatgtgagaatgaaggaagattgagtttcattcaagtataaaaatgaaaatttcttctgatgaactgtttatgaaggtagtactttactgggtgactaaaatgtctacattattatagcattacatacgaggatgctctttttaccacagtatgtacctagtgttgcataatctagaacacagtatagagtccatatacaaagaagttacagyccatatttctcacctattaccccagtgaagtgaggcagaaataccttgggcgaggagggagagccttaccttctaatggaattagattccaaagatatttggatcctttgtttcataaagtaaatgcatagttggtaactaaatgttaaaaaggccattttattattgttagccaaaacttctgtttatttcaagttaatatcgcccaactctacatcatctacccattttagctcataatgcttttgattatcgccagataaagtccattctcagagaacaaaaatttttcatcattgagaaaatgtgcataacataatacatacatacacaagtatattcacgtacataaatacacacagatatgttgctaaagtgagattgtaggttatcagtaacaatttaaaggaaacaaccactcttttgaatgtacaasttttttttctgaaatacacttttctaaaaccctcttaacggaggtttccgttttcttcytgttttaacggtggttnccatangcaaangaaa

SEQ ID NO: 695 - DNA, 2028 bp, Homo sapiens
ttttttttttttttttttttttttgtgtttcattttctgtttattacttgaaatcacggtgctcgtgtaggttttttttttttttttcaattttatgttttcatacatgaaactcacgccaggtgccgggacccccacagcccgaccccccgagggcgggtaatgctttcttgggcagcccttaccgggcagagggtggcgagccggttcctgcctggaggttccaccctcaaccagtggaggcacagacgttatttaaaaatcgttaaaaaacaaaacagaacacacatttaaataggtatccaagacagttcttcaaaaaacaaacccgccccttttactccttttttttctatttttttttcttttttttttggaaaaatgaaaacaaaacaaaacccaaaatccttgagctctaccctctgggacccctccctgcccaccctcccacaaaaaaatttacagcgctacagttataacacgtgatgttcacatctgaaaccattaactttcaacacataaagggggggagttgaggacctggggttcacctacgagaacaacggtgggggacaggcagagccaggacaagaccgacaggtggggtgaggaagggtccagacatctccattatcattaaaaaataaaaagtgagtggggaaaaaaatccaaaaactaccccattgaaatggccccagtaggggatttgtccctcccctctggagacagacacccctagggcaggggcactgagaggcagggggtccaaattagaccagcagcggaccccgccacgggggttaatgctacacggagttgtcgccccctgcccaggggattcacagctcagcaccccctcccatcctcgctgcaggagggrcccccagacagtcccaaatccacatccctcaggttgggccgggaaggagggctcggaggggggaactccccagcacccagccattctctcccctttttcaagagttccccaaccactattggctcagtcagaaaattaatagtctataaataccccaaactcaggcaggaggtcagaaaacacgggagtgggggcggaggaaacagcacagtccgccggctggggcggggcggagggcaggctgggggggtagttcccctctcccttcccgacaggaaagggtgccatgcccctgcacccaaaccccatggggacctcagccccagcctctgctaaaacagctttgctctccttgttaaagaaatgaaggraaatgcaaaaaaaagatcaagaaaagaggataggagtggaagagaaacagtcccctcgttggcttctgtgacctgttggcttgctgtagcccagtgggcgctgctggcctggggtggagaccccgaagtctgcactggggggtggggtgggttctgcgcactgcggcccctcccctcatctgtaaagtgcataatgacatatcgacatttttgacttaaaacctgaatagggtcgggggggaaaggaggcggcggaagggatggggcgcgtttctccgtctccttcactctccgccatccagagagactgctacatattggagctggggaaggttggcagggaggaccgacctggcgcagaggtgaaaggagacagacggaggaggmggaggaggaggaagaggagggcaggagtgaagggtgaaggaggtaggaagcaaagcccatgaagagtccaggaaaccacggtcagaactttttaaaaaaagaaaaaaataataaaaaagaagaaaagaaaaaaagacttctggctgggggagtggccgcctgccctccagggctgggccacgttctctccggggctctcggagtccccgccgccctgggctggggtgcgaggggcgagggtggccgatccgaagatcctaagccaccacgaactctgacttgatgtcagggttgacttctggcttccacacggagtcctcgaagtcgaggcccaagccggaggcctcgctgggtgccgccgcccccgctgctactgcgctctgccgaatt

SEQ ID NO: 696 - DNA, 556 bp, Homo sapiens
  misc_feature (402)..(402): n equals a,t,g, or c
  misc_feature (473)..(473): n equals a,t,g, or c
  misc_feature (536)..(536): n equals a,t,g, or c
  misc_feature (541)..(541): n equals a,t,g, or c
gaattcggcacgagcagctccaatatgtagcagtctctctggatggcggagagtgaaggagacggagaaacgcgccccatcccttccgccgcctcctttcccccccgaccctattcaggttttaagtcaaaaatgtcgatatgtcattatgcactcccccagccagaagtctttttttcttttcttcttttttattatttttttctttttttaaaaagttctgaccgtggtttcctggactcttcatgggctttgcttcctacctccttcacccttcactcctgccctcctcttcctcctcctcctcctcctccgtctgtctcctttcacctctgcgccaggtcggtcctccctgccaaacttccccccagtggcagaattcggggtctccaaccccaggcnagcaagcggcccactggggctacagcaaagcccaacaaggtcacaagaaagcccaaacggaggggggactngtttcctctttccaacttcctaatcctctttttccttgaatctttttttttgcattttccttncattntcttttaaacaaagg

SEQ ID NO: 697 - DNA, 1873 bp, Homo sapiens
  misc_feature (630)..(630): n equals a,t,g, or c
  misc_feature (1787)..(1787): n equals a,t,g, or c
tcgttatcaacaaccaggttggtttcaccacctctaatccgctggatgcccgttctacgccgtactgtactgatatcggtaagatggttcaggccccgattttccacgttaacgcggacgatccggaagccgttgcctttgtgacccgtctggcgctcgatttccgtaacacctttaaacgtgatgtcttcatcgacctggtgtgctaccgccgtcacggccacaacgaagccgacgagccgagcgcaacccarccgctgatgtatcagaaaatcaaaaaacatccgacaccgcgcaaaatctacgctgacaagctggagcaggaaaaagtggcgacgctggaagatgccaccgagatggttaacctgtaccgcgatgcgctggatgctggcgattgcgtagtggcagagtggcgtccgatgaacatgcactctttcacctggtcgccgtacctcaaccacgaatgggacgaagagtacccgaacaaagttgagatgaagcgcctgcaggagctggcgaaacgcatcagcacggtgccggaagcagttgaaatgcagtctcgcgttgccaagatttatggcgatcgccaggcgatggctgccggtgagaaactgttcgactgggscggtncggaaaacctcgcttacgccacgctggttgatgaaggcattccggttcgcctgtcgggtgaagactccggtcgcggtaccttcttccaccgccacgcggtgatccacaaccagtctaacggttccacttacacgccgctgcaacatatccataacgggcagggcgcgttccgtgtctgggactccgtactgtctgaagaagcagtgctggcgtttgaatatggttatgccaccgcagaaccacgcactctgaccatctgggaagcgcagttcggtgacttcgccaacggtgcgcaggtggttatcgaccagttcatctcctctggcgaacagaaatggggccggatgtgtggtctggtgatgttgctgccgcacggttacgaagggcaggggccggagcactcctccgcgcgtctggaacgttatctgcaactttgtgctgagcaaaacatgcaggtttgcgtaccgtctaccccggcacaggtttaccacatgctgcgtcgtcaggcktgcgcgggatgcgtcgtccgctggtcgtgatgtcgccgaaatccctgctgcgtcatccgctggcggtttccagcctcgaagaactggcgaacggcaccttcctgccagccatcggtgaaatcgacgagcttgatccgaaggrcgtgaaagcgcgtagtgatgtgttctggtaaggtttattacgacctgctggaacagcgtcgtaagaacaatcaacacgatgtcgccattgtgcgtatcgagcaactctacccgttcccgcataaagcgatgcaggaagtgttgcagcagtttgctcacgtcaaggattttgtctggtgccaggaagagccgctcaaccagggcgcatggtactgcagccagcatcatttccgtgaagtgattccgtttggggcttctctgcgttatgcaggccgcccggcctccgcctctccggcggtagggtatatgtccgttcaccagaaacagcaacaagatctggttaatgacgcgctgaacgtcgaataaataaaggatacacaatgagtagcgtagatattctggtccctgacctgcctgaatccgtagccgatgccaccgtcgcaacctggcattaaaaacccggcgacgcagtcgtacgtgatgaagtgctggtagaaatcgaaactnacaaagtggtactggaagtaccggcatcagcagacggcattctggatgcggttctggaagatgaaggtacaacggtaacgtctcgt

SEQ ID NO: 698 - DNA, 745 bp, Homo sapiens
  misc_feature (51)..(51): n equals a,t,g, or c
  misc_feature (724)..(724): n equals a,t,g, or c
  misc_feature (737)..(737): n equals a,t,g, or c
aattcggcacgagcaatgccatgctgctgatggagtttgtggagggcaccnagcacgacgtggacctggtgttgtttggtgggcggttgctggctgcctttgtctccgacaatggccctacgaggctgcctggcttcactgagacggcggcctgcatgcccaccgggctggcaccagagcaggaggcacagatggttcaggcagccttccgctgttgcctgggctgcgggttgctcgatggagtcttcaacgtggagctcaarctgaccggggctgggcctcggcttatcgagatcaacccccgcatgggtggcttctacctgcgtgattggatcctggagctctatggtgttgacctgctgctggctgctgttatggtggcctgtggcttgcgtcctgccctgcccacccgcccacgtgctcgtggccatctggtgggcgtcatgtgccttgtgtcccagcacctgcaggccctgagttccaccgccagccgtgagaccctgcaggccctgcacgaccgtggactgctacgcctcaatctgctggaggaggccctggtgcctggcgagtatgaggagccctactgcagtgtggcctgtgccggacccagccccaccgaggcccgtytccgcctgctgggcctctgccagggyctgggcatcgatgggcccagctamcctgttgcccacttcctgtctaattcaaataacactggggtaagggngggggaagcagtntgggtgga

SEQ ID NO: 699 - DNA, 468 bp, Homo sapiens
  misc_feature (453)..(453): n equals a,t,g, or c
tggaaatgaatgagtttctggtggctgctctaataaactgctacaagcttagtggttttaaataatacagatttattattttacggttctggatgtcaggagtccaaaatgagtcttaaaggactaagatcaaaatgtctacagggctggttcctgtggaagctccagggcagaatctgttgcttgtttctttcacttccagaggctgccagcattccttggcttctggctgcgtcactatgatctctgtttccatgatcacattaccttcccctctaatgtacttaaatctccttcagtttccatctttttttttagacggagtttcactcttgctgcccrggctgggagtggcaatggcacgatctcgggctcactggactttctgcctcccgggttcaagtgattcttctgcctcagcctcctacatgggctggggattacggacattgncccaccacccccaag

SEQ ID NO: 700 - DNA, 726 bp, Homo sapiens
  misc_feature (553)..(553): n equals a,t,g, or c
  misc_feature (624)..(624): n equals a,t,g, or c
  misc_feature (636)..(636): n equals a,t,g, or c
  misc_feature (692)..(692): n equals a,t,g, or c
  misc_feature (712)..(712): n equals a,t,g, or c
  misc_feature (716)..(716): n equals a,t,g, or c
ggcacaggagcgacccgggagaaggagggccamgatggcggaagcggaggagtctccaggagacccggggacagcatcgcccaggcccctgtttgcaggcctttcagatatatccatctcacaagacatccccgtagaaggagaaatcaccattcctatgagatctcgcatccgggagtttgacagctccacattaaatgaatctgttcgcaataccatcatgcgtgatctaaaagctgttgggaaaaaattcatgcatgttttgtacccaaggaaaagtaatactcttttgagagattgggatttgtggggccctttgatcctttgtgtgacactcgcattaatgctgcaaagagactctgcagatagtgaaaaagatggagggccccaatttgcagargtgtttgtcattgtctggtttggtgcagttaccatcaccctcaactcaaaacttcttggagggaacatatctttttttcagarcctctgtgtgctgggttactgkatacttcccttgacagtagcaatgctgatttgccggctggtacttttnggctgatccaggacctgtaaacttcatggrtcggcttttgtggtgaatgggatggttggctggtctatagntggcttcacagntttccttgctggaaaccaagccttcaaaccgaaaaccctactggtaatcctgtttnctggttactttggcatcaantggngattcttaac

SEQ ID NO: 701 - DNA, 1615 bp, Homo sapiens
  misc_feature (1560)..(1560): n equals a,t,g, or c
  misc_feature (1600)..(1600): n equals a,t,g, or c
gatggaagtttatttcyctctcccataacagtgcagtgatagtcagctggtccaggccaggcaaggggctggtccatgatgtcatcaggcacccaggttcctactgtcttgccatgtggccacagttagcaacaaaggaggctgtaaatttagtttctacttgggcagccaaaactctgaggaaggagattctgctagtaaaaaggagtgggggaagaatggccattgggagacaacaagcagactcaaccaggcctctttgttggcttcctttcctcctgctgcacatgagccttcgccgtgcatttggagccatgacagctgatagctccagacctgcatcctcctagcttgggggctctgaatgaaaggtttcttcccttccagttcgaatttggaaactcccaaagttctcaatggtttgttgtgagttccatgtcctcttggatcagtcactgtggccatgcatgtttggccacatgattaatccagtctgggtcatgaccttttcttcatccaaaacaaggtgatgggaagacaaaaacaatagctactacaaacaataggagtttataattatgtgctgatgtattcgaagatgtgttgacagtcgtgagtgtgtatcctaggaaaggcgagctggactctgtctccatggtggctctcaccccagggacctaggaacagcctgtcaccacacaattacttttataaccctggagatgaaaatctccttgtcctcaaaatacttccagaagaacaaccagatgggaaggaccttggttgggactctttccagttcacttggggcagagggaatttaatggctcacgtagctgaaaaggatgggctagattgggcttcaggctgcatcccaggactccaaacagggatctgtctctttggctctcagctctgctttcatttgagttggctttattcttgggcttcacagtgtggccccacagcaccagttattgataaaaagagctcccctttgctgacagaactgctggatttggttctcattggtccagacgaggaaggtatccagcctcaagtcatcattgtggccaggaagatggaatacaccaaatggacaggcctggcatgtacccacagagactgagagttggtgctggtggttgtggtggcagatgatattacctgaagaagggacgaatgggtgctgggcaggacaaagcatcagctgtccagttcaggcctctcctctttccctggtgtcttcattttcctccgtctccctgctgtcccttaccctctgcccaatctctcattactcctggtcttgggagttgccttctgaggatactccactgggggtacctgagcctggattagagggcagggggaggatattgcctagccaaagtgggtgttcaataaagaaccatttggagatggtcttctgtctggaactgcttcctttttgttttattatttttccccagatgagctgactgggccatggaactgcatccttatggttcccatagcaccttaccgaggcgcccttatcaatagagtttagttatgtanctgtgtcttgtctgaaccctactaactgtgagctcctgangagtcaggcctgagc

SEQ ID NO: 702 - DNA, 947 bp, Homo sapiens
ggcgtgacggcgctcagccatcccctgctctacgtgaagctgctcatccaggtgggtcatgagccgatgccccccacccttgggaccaatgtgctggggaggaaggtcctctatctgccgagcttcttcacctacgccaagtacatcgtgcaagtggatggtaagatagggctgttccgaggcctgagtccccggctgatgtccaacgccctctctactgtgactcggggtagcatgaagaaggttttccctccagatgagattgagcaggtttccaacaaggatgwtatgaagacttccctgaagaaagttgtgaaggagacctcctacgagatgatgatgcagtgtgtgtcccgcatgttggcccaccccctgcatgtcatctcaatgcgctgcatggtccagtttgtgggacgggaggccaagtacagtggtgtgctgagctccattgggaagattttcaaagaggaagggctgctgggattcttcgttggattaatccctcacctcctgggcgatgtggttttcttgtggggctgtaacctgctggcccacttcatcaatgcctacctggtggatgacagcttcagccaggccctggccatccggagctataccaagttcgtgatggggattgcagtgagcatgctgacctaccccttcctgctagttggcgacctcatggctgtgaacaactgcgggctgcaagctgggctccccccttactccccagtgttcaaatcctggattcactgctggaagtacctgagtgtgcagggccagctcttccgaggctccagcctgcttttccgccgggtgtcatcaggatcatgctttgccctggagtaacctgaatcatctaaaaaacacggtctcaacctggccacgtgggtkagcctgamcacttgggacactgcaaragatccacccacaacaacagatttctc

SEQ ID NO: 703 - DNA, 842 bp, Homo sapiens
  misc_feature (107)..(107): n equals a,t,g, or c
  misc_feature (147)..(147): n equals a,t,g, or c
gagcagcccgcaccggacaacttgcgagccatggggctggcgggatgcgtccggacgaaggacacacaggcactgctgtctgcaacacaagcaatggacctgcggangcgagactaccacatggaacggccgctgctgaaccaggancatttggaagaactggggcgctggggctcaacacctaagaccaccaatggcgggaactggttcaatgctcccgtgctcgggcctatgcccttctgctccaacacytcccggttttggtctggttacccggtatcctgtgcgtkactggctcctgggtgamctgttatccggcctgagtgtggccatcatgcagcttccgcagggcttggsctacgccctcctggctggattgccccccgtgtttggsctctatagctccttctaccctgtcttcatctacttcctgtttggcacttcccgacagccctgtttcggtcaccagactctgaacatgctacatcctgcccaagactgcacctctggaggtgcagggcacccttgagaagcccctcacccctaggccgcctccaggtgctacccaggagtcccctccatgtacacacacacaactcagggaaggaggtcctgggactccaagttcagcgctccaggtctgggacagggcctgcatgcagtcaggctggcagtggcgcggtacagggagggaactggtgcatattttagcctcaggaataaagctaaataaataaataaataaataaataaataaatagtatgattcttctatgaaatcaggtgaattttataatacgaaactcaccatgaaaatatgactttcaaatttcaaaaatcca

SEQ ID NO: 704 - DNA, 693 bp, Homo sapiens
  misc_feature (213)..(213): n equals a,t,g, or c
  misc_feature (674)..(674): n equals a,t,g, or c
cccacgcgtccgcagagatttaatgagcgtgggcctggaccttccccagatgctgccaggcagcccctccccaagcctcaaagaagcatttgctgaggatggagaggcaggggagggaggcgggaggccgtcactggagtggcgtctgcagcagctgctgccccagcacccgctcagcctgtcctggctgctcacctccccgcaggcaccggngcctttcctgccctctgtggtcatctgccacctgctggatcaagtgctttctcttttacactcccctgtccccaccccagtgcactcttctggcccaggcggcaagcaagctgtgaacagctggcctgagctgtcgctgtggcttgtggctcatgcgccattcctggttgtctgttgaatctttctggctgctggarttggagataggatgttttgcttcccactgcaggagagctgccccctttcacggggttggggaagggtccccctggcctccagcaggagcacagctcagcagggtccctgctgcccamccctctgagccttttctccccarggtatggctcctgctgagtttcttktccagcarggccttgamaggaatccagggagtarctcctggccagaaccagcctctgcggggcttgtgctctgsaaaramtctgctgctggggawtcangtctagaagggcaaagtat

SEQ ID NO: 705 - DNA, 970 bp, Homo sapiens
  misc_feature (781)..(781): n equals a,t,g, or c
tttttttttttttttttttttttttttccattcaagaccaatttactctcaaattttgccaacacagaaatattatccttaaagaaatgtgcatttaaatcttttaattcacttcatcctgtattttaaaataaatgttttccatatagattttccccttgggggggaaaagaattcagggtcttaggttccaggcagttcaaaaacagccacgcggttcttttttctccaccagaataccacaatagcagaacttaagaatcgggatatgaaaagggaggcgtggtcctggcagtggcccctggccggcaggaatacacagcaacacccaggcaggggcagcggctgcccccatgccagcctgcccatccctgtaatgacagcagggcaggagatgcagctgtggccctgggggcaggtgggctctgaggctgcaaacaccctgagtgccagtggtcccagagggggtgaggcctctatctgtacctttattccagccagcctcctggcacagggctgggcccacatcctggcctctgcatctggatcagggctggtgctggtcagcctggtcactctggccagtgctcacactggaagtccatgcacaggcgaagtcacctccttcccgtgttaaataacaagaatgccaacaccccacgcacgtgtcatctccagtgagcagacgtccaggcttcccgaagcttcctggctggaaaccgcgcagggccggcagcgccctctccaccaagggacacaccagcggcgcctcctccgcggnccgggcccccatcccgcggctcgcgcggccaggacgccccaggtcggagcctgcccccacaccgcacccggaggccagcagcccagtcccctaggccgcgcagcgccagcgagagcgaggctgcagggcgaggcccggtgaggcgctcgagaactggccgggaggagaagtcaggcggcccacccgcca

SEQ ID NO: 706 - DNA, 1568 bp, Homo sapiens
  misc_feature (12)..(12): n equals a,t,g, or c
  misc_feature (15)..(15): n equals a,t,g, or c
  misc_feature (19)..(19): n equals a,t,g, or c
  misc_feature (27)..(27): n equals a,t,g, or c
  misc_feature (47)..(47): n equals a,t,g, or c
  misc_feature (1548)..(1548): n equals a,t,g, or c
cagaaattcggncanaagncacggggnaagctggtgtgcgccggatnaaagatggcaaccgccgatgagattgtgaaactccatgctcgaccacatgacaaacaccaccaacgcgtcccatgtgcctgtgcagcccggctcctcagttgtgatgatggtcaacaacctgggtggcctgtcattcctggaactgggcatcatagccgacgctaccgtccgctccctggagggccgcggggtgaagattgcccgtgccctggtgggcaccttcatgtcagcactggagatgcctggcatttctctcaccctcctgctggtggatgagcctctcctgaaactgatagatgctgaaaccactgcagcagcctggsctaacgtggctgcagtctccatactgggcggaacggagccgggtagcccctgccgagccccaggaggcccctgattccactgctgcaggaggctcagcctcgaagcggatggcgctggtgctggaacgggtgtgcagcactctcctgggcctggaggaacacctgaatgccctggaccgggctgctggtgacggcgactgtggcaccacccacagccgtgcggccagagcaatccaggagtggctgaaggagggcccaccccctgccagccctgcccagctgctctccaagttgtctgttctgctcctggagaagatgggaggctcatctggggcgctctatggcctgttcctgactgcggctgcacagcccctgaaggccaagaccagcctcccagcctggtctgctgccatggatgccggcctggaagccatgcagaagtatggcaaggctgctccaggggacaggactatgctggattctctgtgggcagcggggcaggagctccaagcctggaagagcccaggagctgatctgttacaagtcctgaccaaagcagtcaagagtgccgaagctgcagccgaggccaccaagaatatggaagctggagccggaagagccagttatatcagctcagcacggctggagcagccagaccccggggcggtggcagctgctgccatcctccgggccatcttggaggtcttgcagagctagggtgtgtgactgcctcccttggcctcagctcctctcactgctgtgctgaggtggcctttgtcacttccttctgccttccaaccctcaccttcccccggcctggccccattggcccaccctctaagttgagcaggaaatcctccaccaagcttccagaactacagacagcacccagagtgagctggagtgggtccccatgcctctccagcatgccctttccctttgcaggagggtggagtccctgggtcatgccctcccctgccagctctgggcttcagagataaggcattttccttgtgcagcctttacctggcaatcctaatttggttttaagactccctgtgaaatgctttccgcaccttaaccccagtgagcgtgaaaaagaaagttaataaactataatacatggaagcaaaaaaaaaaaaaaaaaaaactcgagggggggcccggtacccaattngccctatagtgggtcttcga

SEQ ID NO: 707 - DNA, 1553 bp, Homo sapiens
  misc_feature (948)..(948): n equals a,t,g, or c
ttttttttttttttttttttttcaggcacctccaaacatattttctttatttcctccagagaacaggctttagtactgaggtccttgtaaacatttaacaaaactggtttaagaacaaactaaaagcatctatatccttgccctgtgttgctggggtgagtttatacaaggagaagttggaacaaatgcagtgggcacaatgaccttcttactcagttcaaagtaggtcttgggatgagagttccacacggccagtacagctgactttctgtgatttccaaggggtgcccaagacattaaacgccatggtccttgggaaggactgatgatgtttctgctcattgttgatcagggtcaaaccttttcactaaccgggactgctctttccaagaagtcagaggtcagaaagctggtagcgtcgtacaagaccgtctcgacagcatgtgtagatctgcttctcccatgtggctaccttgtacacagggtcacagtcagccccagtgagctcagtgacatagtctaagtcttgctggacaataaaacagcttccatcaccttggctagcaatgaatccatctctgacacttagcagggatagaactggtgctcctgatctgtggatgacttgtaccggagcccttggactcctcacatccagctgataaatgtttccatcttgagtcccagccaatagcaagaagccagagagaaaagtacagcagttgaaagcgtctgagccaataaagaggaacaccagctgcctgctctgtagtcccaagcactgaagtttcttatcttcccgggccaagagcagcattttggcctctgttccaacctcccgttcactgggcatctgctcaggggagccaaggtttatggagttgtcagcagcacccaccgccactccattgatagaagaaccacaatctgcaaggactcccaagcagnctgagcgcccacaatcccaaagtcgtgctgtcccatctcgagaagcagacaccacattcctcccccgatcaacgatggctgtatccaggatacctcctttktgacctttgaaggtcaccacgcagctagcatcttcagctgaccatatcttcagctgggcatccattcccccactcaggaccacaaggcctgatgggaaaaacctgcaacaattcacatcaaacacatgtccttccaatactctcctgagttctccattggaagcctgccagattttcatggtcccgtcagtactagaagacacaccaagacctcctctgctggaaatgtccaggcatgttatactctttgtatgaattctggaaaaagtagtatatggtgccaaaaacttagaagatgcattttcctttggacatgaaatatgaatgcttttcttgtttatttcattcacagtaaatccttctgaagctgtaacctctgggatgccatctaggccaattccttgacaagtcaggctgccatacaaagatggtttccctgggggatgacagctcagccaggcctccccttcatccttcctgagttgcgcccagtcgctctgaatc

SEQ ID NO: 708 - DNA, 2150 bp, Homo sapiens
actacggctgcgagaagacgacagaaggggggcggcgacggaggaggaggatggaggcggtggtgttcgtcttctctctcctcgattgttgcgcgctcatcttcctctcggtctacttcataattacattgtctgatttagaatgtgattacattaatgctagatcatgttgctcaaaattaaacaagtgggtaattccagaattgattggccataccattgtcactgtattactgctcatgtcattgcactggttcatcttccttctcaacttacctgttgccacttggaatatatatcgatacattatggtgccgagtggtaacatgggagtgtttgatccaacagaaatacacaatcgagggcagctgaagtcacacatgaaagaagccatgatcaagcttggtttccacttgctctgcttcttcatgtatctttatagtatgatcttagctttgataaatgactgaagctggagaagccgtggttgaagtcagcctacactacagtgcacagttgaggagccagagacttcttaaatcatccttagaaccgtgaccatagcagtatatattttcctcttggaacaaaaaactatttttgctgtatttttaccatataaagtatttaaaaaacatgaattgagtttctgtagatttctagttctcaactttagcctgaacgccaacacttgaaggtgtttttcatcctctgtatgttgaaggtggttatttgtatgtaggaacaggactgccatcccagctttgcatgccaaagaaataaagaacacactttaaagggcaaactgaagagatgagcgagcaaaggtgcccttcaggtctactgaaaagttagagtacaaaacaacactgttgatctggacaaaagaagaaaaattaccctttttgcttgtgttgtgacaacttcatttaatatggtttaaagatttatgagactgtcagctaaaagtcttttcacaagaatgtcaacagagaatggcatctcaaaatatatatatttctttkcacaatttgtgaaaccttataagccattttccccaggtacaatgtagttcctgctgatagaaaggaaatattttgtcaagagctttcatttaaaagctactacctccacaatcacccccaaacccagaaaatccccactggctcttgccagtctggttttcgtattgcagttattccaattgtatttgatctccctgataacgtattttcatgggtttgggtagaagatgctaatcagattagaagcaggaatagttatttgctgtctgtgaaattgagccttttggtgcgccacgtggtgccagatcaacacttctatccctctgcactgaccacgttgtgaactgggagaccaaatgcaagccatttcatggacatagcaatatacaaccaaactctgttccttggagttatattgtaaactcttgcaggtgggagagcagttcacctccttagctctgtttgccagctcttacagggtaaaataaacctggcaatttatcctcagtcctagtttgtggtttaatgttgctatcttaagcactggcatttgggcaaaacatgactgtgttctgtgggagaatccaaaggcattattcactctagttgagatagaattgggtggctaaacagggtgtgtggtacccaaaagattaaatgttacatgtccttttagtccttgaccaggtctagccttggcagaagcaagggagccactaagccaaactccctgtgcagacagaccatgtttcaaggctggaagtagtgccctggcaacacacaaaaggaacggtgaaatggtaggcaaagtgaacttggctctgctggcctctttggggtcacagaaattgctccttgtggtaatcttatattctgtcaggcacagggccaagaagctgtgtaacagacattactttgcttgcatctctttttcataccttttccctctgaggcagcttttgcttagaaaacagtcccttcactctgcctttcctcctaacttcctgtgcctcttcatgttctgctcaagctttttaaagcaacgaagctgttggagaacttaaatccttgcaactgagagataagctacttaaaggcggtagagatcttttttttttttttttt

SEQ ID NO: 709 - DNA, 1872 bp, Homo sapiens
ggctgagcgagccgctgagcgcggcgcagctgcggcgactggaggagcaccgctacagcgcggcgggcgtctcgctgctcgagccgccgctgcagctctactggacctggctgctccagtggatcccgctctggatggcccccaactccatcaccctgctggggctcgccgtcaacgtggtcaccacgctcgtgctcatctcctactgtcccacggccaccgaagaggcaccatactggacataccttttatgtgcactgggactttttatttaccagtcactggatgctattgatgggaaacaagccagaagaacaaactcttgttcccctttaggggagctctttgaccatggctgtgactctctttccacagtatttatggcagtgggagcttcaattgccgctcgcttaggaacttatcctgactggttttttttctgctcttttattgggatgtttgtgttttattgcgctcattggcagacttatgtttcaggcatgttgagatttggaaaagtggatgtaactgaaattcagatagctttagtgattgtctttgtgttgtctgcatttggaggagcaacaatgtgggactatacgattcctattctagaaataaaattgaagatccttccagttcttggatttctaggtggagtaatattttcctgttcaaattatttccatgttatcctccatggtggtgttggcaagaatggatccactatagcaggcaccagtgtcttgtcacctggactccacataggactaattattatactggcaataatgatctataaaaagtcagcaactgatgtgtttgaaaagcatccttgtctttatatcctaatgtttggatgtgtctttgctaaagtctcacaaaaattagtggtagctcacatgaccaaaagtgaactatatcttcaagacactgtctttttggggccaggtcttttgtttttagaccagtactttaataactttatagacgaatatgttgttctatggatggcaatggtgatttcttcatttgatatggtgatatactttagtgctttgtgcctgcaaatttcaagacaccttcatctaaatatattcaagactgcatgtcatcaagcacctgaacaggttcaagttctttcttcaaagagtcatcagaataacatggattgaagagacttccgaacacttgctatctcttgctgctgctgtttcatggaaggagatattaaacatttgtttaatttttatttaagtgttatacctatttcagcaaataaaatatttcattgcttawattaatccttattttttcaatttcaatatgatcacttacagtttccatcataatttttttttgcaacatagccatttcttttttaaattcattttgtgcaccagtaagtagattatcatgattcttctccaactcttccatactctaaaaacacaaaagacaagttaagttacaaaggaccacttttcatctcaggttctaaacttgtacaattaattttcaaaagtagtaatttttgaatattcaaatgctcatctatttgaaataaaaatattctaagtaatacatgaataccaaaatacctactaaaaaagaaaaaatataagacatgaataaaatgttataggaagtacaatgtagtatactttgcccaaaatgggtttcctgaactgttaaggtcaagataaaaaagactggaagtcccacatcagtaaaaaccatttctattaagctttccaaatatcaagcaataatctacttatgactaatagtgtgccatgaattcactagagggaataaaataatctatagtacaacctctttcacattatgaaaaataaaaattatgtctta

SEQ ID NO: 710 - DNA, 925 bp, Homo sapiens
ggggaaatgatgagaatccgatgttccttttgcacagtaaggcagttactgtgtttgccagtgttattggacatgctgagtaagacatggggattttctcccacagccagttctttgaccttatgttgtattctcatggtcaaatagaaattgacgatcaggtggaaggactccaatatctagcttctcgatatgatttcattgacttaratcgtgtgggcatccacggctggtcctatggaggatacctctccctgatggcattaatgcagaggtcagatatcttcagggttgctattgctggggccccagtcactctgtggatcttctatgatacaggatacacggaacgttatatgggtcaccctgaccagaatgaacagggctattacttaggatctgtggccatgcaagcagaaaagttcccctctgaaccaaatcgtttactgctcttacatggtttcctggatgagaatgtccattttgcacataccagtatattactgagttttttagtgagggctggaaagccatatgatttacagatctatcctcaggagagacacagcataagagttcctgaatcgggagaacattatgaactgcatcttttgcactaccttcaagaaaaccttggatcacgtattgctgctctaaaagtgatataattttgacctgtgtagaactctctggtatacactggctatttaaccaaatgaggaggtttaatcaacagaaaacacagaattgatcatcacattttgatacctgccatgtaacatctactcctgaaaataaatgtggtgccatgcaggggtctacggtttgtggtagtaatctaataccttaaccccacatgctcaaaatcaaatgatacatattcctgagagacccagcaataccataagaattactaaaaaaaaaa

SEQ ID NO: 711 - DNA, 1261 bp, Homo sapiens
gcccacgcgtccgcccacgcgtccggcggtgcggagtatggggcgctgatggccatggagggctactggcgcttcctggcgctgctggggtcggcactgctcgtcggcttcctgtcggtgatsttcgccctcgtctgggtcctccactaccgagaggggcttggctgggatgggagcgcactagagtttaactggcacccagtgctcatggtcaccggcttcgtcttcatccagggcatcgccatcatcgtctacagactgccgtggacctggaaatgcagcaagctcctgatgaaatccatccatgcagggttaaatgcagttgctgccattcttgcaattatctctgtggtggccgtgtttgagaaccacaatgttaacaatatagccaatatgtacagtctgcacagctgggttggactgatagctgtcatatgctatttgttacagcttctttcaggtttttcagtctttctgcttccatgggctccgctttctctccgagcatttctcatgcccatacatgtttattctggaattgtcatctttggaacagtgattgcaacagcacttatgggattgacagagaaactgattttttccctgagagatcctgcatacagtacattcccgccagaaggtgttttcgtaaatacgcttggccttctgatcctggtgttcggggccctcattttttggatagtcaccagaccgcaatggaaacgtcctaaggagccaaattctaccattcttcatccaaatggaggcactgaacagggagcaagaggttccatgccagcctactctggcaacaacatggacaaatcagattcagagttaaacartgaagtagcagcaaggaaaagaaacttagctctggatgaggctgggcagagatctaccatgtaaaatgttgtagagatagagccatataacgtcacgtttcaaaactagctctacagttttgcttctcctattagccatatgataattgggctatgtagtatcaatatttactttaatcacaaaggatggtttcttgaaataatttgtattgattgaggcctatgaactgacctgaattggaaaggatgtgattaatataaataatagcagatataaattgtggttatgttacctttatcttgttgaggaccacaacattagcacggtgccttgtgcagaatagatactcaatatgtgaatatgtgtctactagtagttaattggataaactggcagcatccctgaaaaaaaaaaa

SEQ ID NO: 712 - DNA, 1357 bp, Homo sapiens
  misc_feature (1334)..(1334): n equals a,t,g, or c
  misc_feature (1344)..(1344): n equals a,t,g, or c
  misc_feature (1349)..(1349): n equals a,t,g, or c
aaaatattcaagaagtgtaaaaaggggatcctggtgaacatggacgacaacattgtgaagcattactccaatgaggacaccttccagctgcagattgaagaagccggggggtcttacaagctcaccctgacrgagatctaaaggcctgcgggcacagctccccaggagttcagtgcaggtgtttctagatcttacggtttggcaactgcaggtaaccccagtcagccatgtcgccagcacaggtctatgtcgagggaatgggttccttgcargttggaggcggggytgcatctggcttggtggtagcatttaatctattgcattggtgtttttcagatgaaagagaaatccatataccattatgtttgaatttcctgatatatacaggatttaaagtgaaaactttattccaagagttaacagagtctctgggaagctttaggacatctgctacgttatttatcaaaatattgggatctctgccttgtgcctacagtgtcgtgggcctgctcgctagcagaagtcagaaaaggcgataggcttggctttaaggatttcgtgcccttgcctgaattcagtacaactccactgcctcacgttagcgggacgcacctgaagagtacggggggagccctctctcccttaccctctcactctccaccagatgtttactaaacagggcatgttactgaaatcttcctttgcgactttctcggacatatcaactgcctttctcatgaagaattttaatgggttacagtatgaaatcagttaagataaagctgcattgtatataagtgcaatatatttttgaaggtctgtaaatgtgtacatacatgtcttatataaatatataatatataaatatggtgtctgtgtacatatagtgaaratatgcagtaagagctaccttaaagactttccctagacaaaggttaagttattttttgatcgtgtataccaagcagatagaatactgtgcttagtggaacccgctaaaaacctttttctctgtttttccaaacacaggcattctgtakcatagcaaaaccttctcaaatgacagagattctgtttgctgttgagaatgttgttatttggatttctgcactgtttaacaaatgaagtaaaagaaaaacactactgcaatcacgtcttttgttatgctagtatcagtcagatgcacttagagtgaagaaacactgtaattacagcacacagattgcaagtattgcgtaccaagtgatacaactcgaaatgcagttctcatcttcctgttttgaggaatgattatttttttcacggctccgggccttcggtgcttttgattatcntgtatggttnaacanttctaggg

SEQ ID NO: 713 - DNA, 600 bp, Homo sapiens
  misc_feature (466)..(466): n equals a,t,g, or c
  misc_feature (513)..(513): n equals a,t,g, or c
  misc_feature (569)..(569): n equals a,t,g, or c
  misc_feature (585)..(585): n equals a,t,g, or c
  misc_feature (596)..(596): n equals a,t,g, or c
gcggacgcgtgggcgggaccgcagactcttagggcccctctctttggccatctgcctctaggtcccatcctggggcctgaagcgcttgttctctgcgctgggaaaaggggaacgatggagcgatccagcacccaaacttaccctgtccaggtctgagagtcactggagctaccagaagcatcatggggccctggggagagccagagctcctggtgtggcgccccgaggcggtagcttcagagcctccagtgcctgtggggctggaggtgaagttgggggccctggtgctgctgctggtgctcaccctcctctgcarcctggtgcccatctgtgtgctgcgccggccargagctaaccatgaargctcarcttcccgccaraaarccctgarcctartaagctgtttcgcggggggcgtctttttggccacttgtctcctggacctgctgcctgactacctggctgncatagatgaggccctggcagccttgacgtgacgctcagttccactgnaagaagtcatcctggcatggcttcttctggcctggtgatggacagaacacaatggnttacaaggacagtcanggccgcacctntgga

SEQ ID NO: 714 - DNA, 1022 bp, Homo sapiens
ttttttttttttatggtaagccaatgtttgtttttattttattggccattttgtcttcctacttctctaggtatagtgaacataggtgtgaataatgtccaggagttgattattgcagcagacatgctacagttgactgaagttgttcatctttgctgtgaatttctgaaaggacaaattgatccactgaactgcattggaatttttcagttctctgagcaaattgcctgccatgatctcttggaattctcagaaaactacattcatgtccatttcttggaggttcatagtggagaagagttcctggcacttacgaaagatcagctgatcaaaattttgcgaagtgaagagcttagcattgaggatgaataccaggtcttcttagctgcaatgcaatggattctgaaagatttgggaaaaagaagaaaacatgtggtggaagtgctagacccaattcgattccctttattacctcctcagagacttttaaagtatatagaaggagtatccgattttaatcttcgtgttgcattgcaaacacttctgaaagagtactgtgaagtatgcaratctcccaaagagaacaagttttgtagttttctgcagacatctaaggttcgacctcggaagaaagcaagaaagtacctgtatgcagtaggtggatatactcggttgcaggggggtcgctggagtgatagcagagccctcagctgtgtagaacgttttgacacctttagccagtactggaccactgtgtcttcacttcatcaggctcgaagtgggctgggagtaacagttctgggagggatggtctacgctattggaggtgaaaaggattcaatgatttttgattgtactgaatgctatgatccagttactaaacagtggacaactgtagcttcgatgaatcatccccgctgcggcttaggagtgtgtgtgtgttatggggcyatctatgctttgggtggatgggttggagctgagatagggaacacattgaacgatttgatcctgatgaaaat

SEQ ID NO: 715 - DNA, 2447 bp, Homo sapiens
  misc_feature (2315)..(2315): n equals a,t,g, or c
  misc_feature (2333)..(2333): n equals a,t,g, or c
  misc_feature (2400)..(2400): n equals a,t,g, or c
  misc_feature (2438)..(2438): n equals a,t,g, or c
gcagggctctcgctctgaaagccgtccactgcggtcctgtcgagcagggtcaggaggacacagtggcacccgaagtggcagcggaaaagccggtcggagctttattgggccccggtgccgagagggccaggatggggagcaggcccaggatacacccactagtgcctcaggtgcccggccctgtgactgcagccatggccacaggcttagctgttaacgggaaaggtacatctccgttcatggatgcattaacagccaatgggacaaccaacatacagacatctgttacaggagtgactgccagcaaaaggaaatttattgacgacagaagagaccagccttttgacaagcgattgcgtttcagcgtgaggcaaacagaaagtgcctacagatacagagatattgtggtcaggaagcaggatggcttcacccacatcttgttatccacaaagtcctcagagaataactcactaaatccagaggtaatgagagaagtccagagtgctctgagcacggccgctgccgatgacagcaagctggtactgctcagcgccgttggcagcgtcttctgttgtggacttgactttatttattttatacgacgtctgacagatgacaggaaaagagaaagcactaaaatggcagaagctatcagaaacttcgtgaatactttcattcaatttaagaagcccattattgtagcagtcaatggcccagccattggtctaggagcatctatattgcctctttgcgatgtggtttgggctaatgaaaaggcttggtttcaaacaccctataccaccttcggacagagtcagatggctgttctaccgttatgtttcccaagataatgggaggagcatctgcaaacgagatgctgctcagtggacggaagctgacagcgcaggaggcgtgtggcaagggcctggtctcccaggtgttttggcccgggacgttcactcaggaagtgatggttcgcattaaggagcttgcctcgtgcaatccagttgtgcttgaggaatccaaagccctcgtgcgctgcaacatgaagatggagctggagcaggccaacgagagggagtgtgaggtgctgaagaaaatctggggctcggcccaggggatggactccatgttaaagtacttgcagaggaagatcgatgagttctgagtgtcgggctgcccactggtgacaccgggatcgggctgagcaggagaacatcaccggctccagttcccctgatccattctcacagcctgaaacaagctcacccgtagcttacgcttggaagcaggactgggaacatccacgctatttattatcgaggagttttaaagtactgtaactttaaaataaataactacaaagcttctttgtccaaacgtcattattttatacttatatacacgcaggtgtaaaagtataaaggtgagcactagactgctcttagaagctctaatttttgttttctttggctagtactgtataaaaaacagaattgtgttttattggttttggatgacagaaaagtctggaataatgtttgttttcctcatttcttccttctagaacacagaatctaaaggggtrttagccagcctcgcctccctgccccacgtagagacacagagtgatgtgaggcgttggctttttctccaagaaggtacagatacctcagattcgggaaactcaaaatcaaaagacttagcttctaggataaatacttctgatgaaaaatccgctgaggagcataccccaaaccagacatatgcttaggattcatgctgagatatcaattggtttccccttctttttaaaatacgtccagttcttacccagttaacatgaagaaaccactgtctctagaagaaagcttgttttgcagtattagtgaatcactgaatagcttaagtatgactatctaagttataagttagtctttagtgggttttaaatagtttttctgacccttctgaaaaataactacataagtgcttcttgttgctgggtgagaaatactactttatagacagttttggttttctgtttgcagatatgattgatgtatttcaccaaaataaaatatttttatgtttataaagtgtaatttttaggttcacttagaatatattttatttaataagttaaaattcttttggcacactattaaatgcaaaaactcctttcaaaacaaaaaagaactaccttatattcaacatttaatgttcttggcctctcttttatgtctatacaatatactgagttcagtatgggtgtccaagagtgccctgtgtggggataggacatgtgcactccntcccggggttggggtacntgatttcccggacttccaggtggccccttttttgggtaggggcttcttgaggccttgccattcatanttgaatggtatgggagggggcctaaatccaaattcccnaatttttgg

SEQ ID NO: 716 - DNA, 865 bp, Homo sapiens
gttcacacgggttgcttcggaggaatccgccgtgcaaatctgtccgcccccttggccactgatcccccgaagagcttctgtcgccgctctaggaatacagacattgaagtttgggacaagatatttatctaacttctgtgtcaaaattagcgacctgctatggcaatgaagaaagaaactgaatttgtcattttcacctgaagaaaaatgatagacaaaaatcaaacctgtggtgtaggacaggattctgtgccctatatgatttgtctgattcacatactcgaagaatggtttggtgtggagcagttggaggactatttgaattttgcaaactatctcttgtgggtttttacaccactaatacttttaatacttccttactttactatctttcttctctaccttactattattttcttacacatttataagagaaagaatgtattgaaagaagctactctcataatttatgggatggtgcaaggaaaacagtggcaactctgtgggatggacatgcagccgtttggatggtaagcaaggatactttcacctttgtgttgccattcatgtgtgctgcattggaactgtgttaccattccattttattgattgagaagatactgaaaatataatagaagtgatatttactattccctgttacctgtttgcatgcattgtgcatatgtatgtgtctttcttaaaatgagttttcccatagacgttggtttccattaaacaaagaaccacgcagcactgtagactataagttgaaataagaaaatttatatttaaaacatctaaaagagtaagagactaaataaagctgtagaaaactgaaaaaaaaaaaaaaaaaaaaaaaaaaaaa

SEQ ID NO: 717 - DNA, 672 bp, Homo sapiens
  misc_feature (9)..(9): n equals a,t,g, or c
  misc_feature (14)..(14): n equals a,t,g, or c
  misc_feature (572)..(572): n equals a,t,g, or c
  misc_feature (623)..(623): n equals a,t,g, or c
  misc_feature (633)..(633): n equals a,t,g, or c
  misc_feature (636)..(636): n equals a,t,g, or c
  misc_feature (653)..(653): n equals a,t,g, or c
gcctcgcgntactntggggggatggttccatcatggcgtcaatgcagaaacgactacagaaagaactgttggctttgcaaaatgacccacctcctggaatgaccttaaatgagaagagtgttcaaaattcaattacacagtggattgtagacatggaaggtgcaccaggtaccttatatgaaggggaaaaatttcaacttctatttaaatttagtagtcgatatccttttgactctcctcaggtcatgtttactggtgaaaatattcctgttcatcctcatgtttatagcaatggtcatatctgtttatccattctaacagaagactggtccccagcgctctcagtccaatcagtttgtcttagcattattagcatgctttccagctgcaaggaaaagagacgaccaccggataattctttttatgtgcgaacatgtaacaagaatccaaagaaaacaaaatggtggtatcatgatgatacttgktgatgccactgktatcatcctcctagcagaagatagtcctactgagaaaatgagcactttgatcattcagtctttgaactttaaccntttgactggaartgacctataggcaatgragactacttycctttactgcanttttacycgnggngcawtctgggcgcatgntkgatcgytggtaatccag

SEQ ID NO: 718 - DNA, 574 bp, Homo sapiens
  misc_feature (454)..(454): n equals a,t,g, or c
  misc_feature (523)..(523): n equals a,t,g, or c
gtgggatgagggtgaaactgctattgccggcggctcctgttttaccgcgtcagcatgctggtgcatttatttcgggtcgggattcggggtggcccattcccaggcaggctgctaccgcccctccgcttccagacattctcagctgtcaggtactctgatggctaccgcagctcctccctcctccgggccgtggcccacctgcggtcccagctctgggcccacctccctcgagcccccctagctcccagatggagcccctctgcctggtgctgggttgggggagccctgctaggccccatggtactgagtaagcatccccacctctgccttgtggccctgtgtgaggcagaagaggcccctcctgccagctccacaacccatgtcgtggggtctcgctttaactggaagctcttctggcagtttctgcacccccaactgctggtcctgggggtanccgtcgtgctggccttgggtgcggcactcgtgaatgtacagatccccctgtcctgggcaaacttggtanaagtcgtgggccaagtacacaagggaccacgtaagggagttcatgattgaa

SEQ ID NO: 719 - DNA, 818 bp, Homo sapiens
  misc_feature (726)..(727): n equals a,t,g, or c
  misc_feature (760)..(760): n equals a,t,g, or c
  misc_feature (781)..(781): n equals a,t,g, or c
ggcagtgtgtggccatctaacgtgccatccagttcttcaggctgtcattctgtcagagcctggagtcgaggctgcgagggccctggctggctgggtgttgcctgagagttgcccaggggaataagacttttaagactagattttgtgctcagtgcctcattcctctgcgactttgcccatggacatgtcttagaaactgaagttgcttcagaacagccctgagaagggcaggggcaagggcctgacagaagaggaagtgctccttccagagggctcagccagagccccatgggtgtgctggtcagcaggagggcagtcggagcctcaagccatccatgcctctctctccttacaggtactctgatggctaccgcagctcctccctcctccgggccgtggcccacctgcggtcccagctctgggcccacctccctcgagcccccctagctcccagatggagcccctctgcctggtgctgggttgggggarccctgctaggccccatggtactgagtaagcatccccacctctgccttgtggccctgtgtgaggcagaaraggcccctcctgccagctccacaccccatgtcgtggggtctcgctttaactggaagctcttctggcagtttctgcacccccacctgctggtcctgggggtagccgtcgtgctggccttgggtgcggcactcgtggaatgttacagatccccctggttcctggggccanntggtaaaagttctgggccaattacacaagggancactaagggattttcatgganggattcccagaatttcagcaaccactggtttatccct

SEQ ID NO: 720 - DNA, 1059 bp, Homo sapiens
  misc_feature (978)..(978): n equals a,t,g, or c
  misc_feature (1058)..(1058): n equals a,t,g, or c
ctggatgacagagcaagactccatctcaaataataataataaggctagtatgactaaggagctaaattttaattttgttatasttcattttaatttagatagccatgtgtggctaagggctaccatattgagaagtgctgctaaagagcaagactgatttttctctctccccgctgacaggaggttatgagggagaggggattggggcctcttggggtttttagatctgacgctggtctgaaatctctacctgagggtaggagggagagtggggctctggaggagtgtgttattcacactcagagagtctgtgattggaaggtgcctgaacacccacttgcacctctccttttgttgtcgtttgcagtcttgaggatactggctaagcctctgcctacgcatgagtcctgttccttctcctctccaggtcttccctctttaaccaacatttccctctctgctgattcttcctttctgccttcaaatgcaagtccctgctacctccaaccaggcaacttttcaaatgaatgaactgaagcaatttctcccctttgtcacacactccctctgccacagaagacttgctttcttactcatagtgcccctttcctgaccggttcaggsgctggttcagagttcatcctttytaacattcttgtcactctgmccctattaatgasgtcttkgtygcaacgtctstcctcstgtagcttctgtggcggccytcttggctccatagmcctcctstgccttctctgcctsagstactygtttcatactcctsaactgtgagtgtcttctaaggcttgtttcctgactttttcctcactctacatcatcctccttgacagtacagctatgtttatgaccttagctaccacctctccacaaatgagtcctcgacctaaatctcttattctgatccttcaccagtggaaaggatagaaactagagcatagcttccataagattatgggncaaatagtccaggcacggtggctcacgcctgtaatcacagcactttgggaggccgaggtgggcagatcacggggtcaggng

SEQ ID NO: 721 - DNA, 2430 bp, Homo sapiens
  misc_feature (2)..(2): n equals a,t,g, or c
tntttttcctttttacaaaaacatgcatacatacacagggtatggtgggtcctaggaaagacacacacacacgcytcacacacacacgctcacacacacgcctcactcacacacatgctcacacacattttccttcttgaccccaggcctggacccccaaaagccttgaagactttgccagagcagcctcccctcctccatgtctgtatcttytctcccaccccttccccytcagtcaggctattcctatgtggggtgggaatcagagctatggtgggggaggccccagaaacagagaaggctccccgagtgggcagtggccgaggggtcccaggggtatsctgcgcttctgggggagatgaagggtttggcaccattggatcaggaagcacaggactcccagagcacccatctgctccaccagggcatcgccaggaggttgatgtaggggggcctctggcgagggtacggaccagatggagggctgccagtctcggctgtcagggagcttcgtctcagtgcccggtggtagagggaagcttccagagtcgtctgaggaagcaggtgagagggactacccctgcactcaggaatatgggacctcttggctccccactcccccctagcccctagagcctaggaagggccagcctgtctgaggccaagttcacatttctgtgtggagcctggggctgtgtgcaaagtctggggtttgcagagccaggaatagtggttaagggtgagcccgacggagccggagccagtcctcctctgtgcagtcctgaggaatgggggccacagccagggcccatactggaggggagaatctgttctcgagagccctgtgggggtcgccgcccagcccgtctcctctcagggtcctctccagttcccattctagacccagggattttctcacgctccctgggataactgtcaaagcaggcaggctgttctctggttccaactacttgcccacaggatctctaaagacccaggaatgggggctattgccaggggttagaagagaaccaggtcccaagggcatggtgggcgggcagatggttccagagccttagagattcataggttcttcctcctccaccagctgctccgagggcctatcttcagccaggatgcccacagagagggacgccagtgcggtcactgcctccacttcttctttgtcagcccctggcactctaggcacccaggagtctggacaggaggccaggcgctgcatgcagccccagtatttactgtgcacccggatcacggcctccagagagcggatggcattgaggttgggtttctgtttccagccttcttctgaaaggggatccaccctgttacccagaagagcagccacacaggcctcagaggcgtcacagatggctgtgaggtcatggccaccctccaaggccagcaccactgcgcctcctgccaggttcatcagttgctgcgtcatgtatccaaaacatttggcagaaacatggtagccacccagtggggccgggtgaccctcagcagcatcaaatccagcagacaccaggactaggtctggagagaactytcgggcgatgggcatcacgactatcctgaaagcagccaggtactcaggatcccccatgggggggtccagacctccagcccaggccacattgacattgaagccctcaccgctgccagcccctacctcatccacagccccactccccgggaagaagttgccgtcgtcatggcgatgcagggagatgtagagcacactggggtcttggtagaaggtttgctgggtgccgttgccatggtgcacgtcccagtctacaatgaggatcttgctggccttgctctgctgttgcagctgccggcaggcgatggccactgagttgaagaagcagaagcccatggctgttgaatgatctgcatggtgtcctgggggccgcaccacagcgaaaccattctttagctcacgagaagccactttgaaggcgaggtcagtgacactgccagcggcccagcgggctgcattggaggaatgaagctcattccagatggtgtcagtgtccaccccaaccccaccacagggcagcatcacaaacatccgctgtgccaggagccctgccagcttcccgttgtccagtttgaggcggctgagcgggttggtgccgtagaggagcacgtgccgctcagagtggaccgactgcagctcttccagggaggccttccggcctcggagacactcacactggctccggagcccccgctcctgcagccgggaccagatgctctggatgcggccggcgtgctccgggtgcctgctgttgtcaccgcaggagcactggtgcttcagcatgaccgagtcatagatcagccctgtggtgaagggcagggtcctggcaggggtctctgagctggagaggactcgggccc

SEQ ID NO: 722 - DNA, 1551 bp, Homo sapiens
  misc_feature (1467)..(1467): n equals a,t,g, or c
  misc_feature (1475)..(1475): n equals a,t,g, or c
  misc_feature (1520)..(1520): n equals a,t,g, or c
  misc_feature (1546)..(1546): n equals a,t,g, or c
ggcacgaggggagttkgcggacggtccctggctgggttctggaggccctgggaccgcggaagaggcttcagacgctgcagcgatgcctcgcccacggcgggtcagtcagctcctggatctatgcctttggtgcttcatgaagaatatttccagatatctcacagacattaagcctttgcctcccaacataaaagacagactgattaaaataatgagtatgcagggacagataacagattcaaatataagtgagattttacatcctgaagtccaaactctagatctacggagctgcgatatatcagatgctgctctcctgcacctgtctaactgtagaaaactgaagaaattaaatttaaatgcttcaaaagggaaccgagtttctgtaacttcagaaggaataaaagctgtggcttcatcttgttcatacctacacgaagcttctttgaaaagatgctgcaatctcactgacgaaggagtcgttgctcttgcactcaattgccagctgctaaagatcatcgatttaggtggctgcttaagtattactgatgtgtccttacatgcattaggaaaaaactgcccatttttgcagtgtgtcgacttttcagctactcaggtatytgacagtggtgtgattgcacttgttagtggaccttgtgcgaagaaattagaggagattcatatgggacattgtgtaaatctgactgatggggctgtcgaagctgtccttacttactgtcctcaaatacgtatattactcttccatggatgccccttgataacagatcattcccgagaagtgttggagcaattagtaggcccaaacaaactaaagcaagtgacatggactgtttattgatgcttttttgaagatgatcaatgctaggaaagcttatcaaaactactttcccaggaaaccatctatagagatttgcattctacttaatgttaacactatttttaattattttattgtcttaagttataactctcagagaattagctaagtcttggtatatacatggtttgtgctttactcttaaacatctttaaagtgctattattctatatctgttggatgagtcattatttttgaaatgataatcctagcatgaactctgatctrtggtgttggattctgtttcttaaataactttaaaattaactgttttcccttgagatttccttctcctatgtaggtatttgagctattgttctaagtttacctgtaagtataaaccttgggagaatctaagtaaacatatttctaaaagcatagttaccttcctattttctggctcttaccttcttggagtatttaaatgcccatttgccaaaagcagacctgaacatcaagcctgttaattcttcaaagaatttaggkgattkgtttccccggaaatggagtgacttattagccattcagcggtattaggaatacagaggctcttgcccagccacatccantccattgnttttaaggggactcctcccaggtacattttaaggcaccggtagcnttccctccctaggcaaattgcatccnaaagg

SEQ ID NO: 723 - DNA, 1396 bp, Homo sapiens
  misc_feature (54)..(54): n equals a,t,g, or c
  misc_feature (496)..(496): n equals a,t,g, or c
aactagtggatcccccgggttgcaggaatttggcacgagccggaagctgcctgnaagctggacagagccggttcctggaaagagctggttccctggcaggctggagggcaggagctggggccacgctggtctgggatagttgggcagggaggctgtctacctggtctccagaatggacggccctgtggcagagcatgccaagcaggagccctttcacgtggtcacacctctgttggagagctgggcgctgtcccaggtggcgggcatgcctgtcttcctcaagtgtgagaatgtgcagcccagcggctccttcaagattcggggcattgggcatttctgccaggagatggccaagaagggatgcagacacctggtgtgctcctcagggggtaatgcgggcatcgctgctgcctatgctgctaggaagctgggcattcctgccaccatcgtgctccccgagagcacctccctgcaggtggtgcagaggctgcagggngagggggccgaggttcagctgactggaaaggtctgggacgaggccaatctgagggcgcaagagttggccaagagggacggctgggagaatgtccccccgtttgaccaccccctaatatggaaaggccacgccagcctggtgcaggagctgaaagcagtgctgaggaccccaccaggtgccctggtgctggcagttgggggtgggggtctcctggccggggtggtggctggcctgctggaggtgggctggcagcatgtacccatcattgccatggagacccatggggcacactgcttcaatgcggccatcacagccggcaagctggtcacacttccagacatcaccagtgtggccaagagcctgggtgccaagacggtggccgctcgggccctggagtgcatgcaggtgtgcaagattcactctgaagtggtggaggacaccgaggctgtgagcgctgtgcagcagctcctggatgatgagcgtatgctggtggagcctgcctgtggggcagccttagcagccatctactcaggcctcctgcggaggctccaggccgagggctgcctgcccccttccctgacttcagttgtggtaatcgtgtgtggaggcaacaacatcaacagccgagagctgcaggctttgaaaacccacctgggccaggtctgaggggtcccatcctggccccaaagacccctgagaggcccatggacagtcctgtgtctggatgaggaggactcagtgctggcagatggcagtggaagctgccctgtgcaactgtgctggctgcctcctgaaggaagccctcctggactgcttcttttggctctccgacaactccggccaataaacactttctgaattgagaaaaaaaaaaaaaaaaactcgagactagctcgtgcc

SEQ ID NO: 724 - DNA, 540 bp, Homo sapiens
  misc_feature (294)..(294): n equals a,t,g, or c
  misc_feature (524)..(524): n equals a,t,g, or c
  misc_feature (532)..(532): n equals a,t,g, or c
gagccggcgggcggggcgggtaagatggcggccccgcggcgagggagaggatcctccacagtgctctcttcagttccccttcaaatgctgttttatctcagcggaacgtactacgccctgtatttcctcgccacgctcctgatgatcacgtataaaagtcaggtgttcagctatcctcaccgctacctggtcctcgatcttgctctgctgtttctratggggattctagaagcagttcggttatacctgggcaccaggggcaacctgacagaggctgagaggccgctggccgcnagcctggccctcacggctggcaccgcctcctctctgcccacttcctgctttggcaggccctagtgttgtgggcggactgggccctcagcgccacgytcctggcccttyacggcctggaaggccgttccttgcaggtggttgccatcgggggccttcaccaggtagttacgggacaaccgggattaccccacattggggggccttcctcctgggcctgaccaattccccanttgtaaanttcccatt

SEQ ID NO: 725 - DNA, 620 bp, Homo sapiens
  misc_feature (552)..(552): n equals a,t,g, or c
  misc_feature (620)..(620): n equals a,t,g, or c
attgccaacatgwttctaggaattatcattttgaagaaaagatacagtatattcaaatatacctccattgccctggtgtctgtggggatatttatttgcacttttatgtcagcaaagcaggtgacttcccagtccagcttgagtgagaatgatggattccaggcatttgtgtggtggttactaggtattggggcattgacttttgctcttctgatgtcagcaaggatggggatattccaagagactctctacaaacgatttgggaaacactccaaggaggctttgttttataatcacgcccttccacttccgggtttcgtcttcttggcttctgatatttatgaccatgcagttctattcaataagtctgagttatatgaaattcccgtcatcggagtgaccctgcccatcatgtggttctacctcctcatgaacatcatcactcagtacgtgtgcatccggggtgtgtttatcctcaccacrggaatgcgcctccctcamcgtcacgctcgttcgtgaccttacgcaaatttgtggagcctccatcttttnccatcttggtgactttccagaacccctttcaccctgtggggcaatgggctggggcaacttggtttgtn

SEQ ID NO: 726 - DNA, 359 bp, Homo sapiens
  misc_feature (322)..(322): n equals a,t,g, or c
  misc_feature (357)..(357): n equals a,t,g, or c
gccatggcttcattaccccagctgatggcggccccgacatcttcctgcacatctctgagtgagtcagcggcaggtctgggtggcctggctggggtgggcgcttccttggccctgtggaggtggggatggtgtgtgactctgatgggcgctgtgtgtgaggacgaatggctgggcctgtgtgactctgcctgtggctggtgctycwgctgtgctcctgtgtgtgtgttgggttkgggttgtgagactctacggagctgtgttgggggatgtgaagctgggggcgacacggtacttgtgattgtccctgggtgtgtctttgtgnaatgggtgtgtaaagttttgtgtgtcctgggcctngt

SEQ ID NO: 727 - DNA, 1407 bp, Homo sapiens
gagtggaggaggaagaggcggtagggggtacgggggctggtcccagaagatggcggaggcgggggatttctggtaggtcctactttaggacaagatgtggtaccgttgaagcgtcagtctttgattcacagacagttgagcttttcagctgggaagcctttccatttttttttttttaacggctttctgaacctatgaaaccatggcagaaggagagacagagtcacctgggcccaaaaagtgtggcccatatatttcatctgtcactagccagagtgtgaacttgatgattcgaggartagtgctattttttattggagtatttcttgcattagtgttaaatttacttcagattcagagaaatgtgacgctctttccacctgatgtgattgcaagcatcttttcttctgcatggtgggtacccccatgctgtggcacggcttcwgctgtgattgggttattatacccctgcattgacagacatctaggagaaccacataaatttaaaagagagtggtccagtgtaatgcggtgtgtagcagtctttgttggtataaatcatgccagtgctaaagtggatttcgataacaacatacagttgtctctcacactggctgcactatccattggactgtggtggacttttgatagatctagaagtggttttggccttggagtaggaattgccttcttggcaactgtggtcactcaactgctagtatataatggtgtttaccaatatacatctccagatttcctctatgttcgttcttggttaccatgtatattttttgctggaggcataacaatgggaaacattggtcgacaactggcaatgtacgaatgtaaagttatcgcagaaaaatctcatcaggaatgaagaaggcaaaaaatatcttttgtacagaaaagcaagatgaaaaggatgtgaaatggtagatataccaacaaaacttcagactgtaaaattgccaggatgcagttttccccttgattggcgtgtgtgtatatatggataaatatatatatacacacacacatattactgcaatctgtgattgcttcatctgtaaatcagttgtaaacctttacatatttgacttaaataactgtaagatatatatgtactacattaaaaagtgttgattaatagatgaaatttttaaattaattttttaaaacatgccatacattgtatcacaatgttaatgtgccaagatattgttcctgtcatgcagagtataagaatgctttgaacaatttgtagacttagtgaaataaaataagaggaaagccaaaaacaaacaaacaaaargcatatgggggagctgggtattttctctttagcttactgttgtgcctttttatttttcctatcacagccgttggggtttggggggccccaat

SEQ ID NO: 728 - DNA, 756 bp, Homo sapiens
  misc_feature (733)..(733): n equals a,t,g, or c
gccccactgcttgggatggggagttgcaacttcagtgtggaatttcctctttgaggagcctgggcttggatctatcctgatctggtgatgaagccatgattactttagacctagcccaggcttggaggccagctggaggaagaagggtctaaatcctggcctgtagagttagaactaccatttcctccccttagckgcccttgtatgacccggatttgckatgcaaaacaatctatcccaggttctgttctggttggctacattgttcagcaactcacaaaacgtagcacaaacattcattatggagaaagcatcaggactgttgagtaactcctcctttacttttttcctgctggctacagcatggggtgccctataggcaaagcccagctgaagaacagaatggagggctctgggaggaggcagctcactggagagcctacattccttacacaagtgcctaaagagagtgatgctaacactccatctgccctgtccattgccttcatatacagtctacttcgtgttctgtcaccctttggggargggagttctcctgggacagtgggctctgcatgttctccacttggatacattttggggctargatcarggcactattcctggagggtccagtcattcaccagcatttgcaaatgtccatagggagcaggtggcagcctctactcccagcaacaagtttgtgttctctccttttctctctttgcctcantctctccagttgggtttcagctg

SEQ ID NO: 729 - DNA, 1228 bp, Homo sapiens
  misc_feature (1169)..(1169): n equals a,t,g, or c
  misc_feature (1174)..(1174): n equals a,t,g, or c
  misc_feature (1204)..(1204): n equals a,t,g, or c
  misc_feature (1228)..(1228): n equals a,t,g, or c
gcccccgcctcgcatgatggctgcggtgccgccgggcctggagccgtggaaccgtgtgagaatccctaaggcggggaaccgcagcgcagtgacagtgcagaaccccggcgcggcccttggttgagcaatgtttaaagcgtttgaaaaacatgaatttggagggctcaattcaagacctgtttgagttgttttcttccaatgaaaatcagcccttaactaccaaagtatgtgttgtccccagtcagccagtggtggagttggtgttgatgaaggttttgggagcctgcaagttgttgctccgcttgttggactgctgctgcaaaacttttcttttgactgtgaaacatctaggtttgcaagagttcattattttaaaccttgtgatggttgggctggtgagcaggttatgggttctctataaaggtgtcttaaaaaggttgattttgttatatgagcctttgtttggattgcttcaagaggtcgctaggattcaaccaatgccttacttcaaagattttacctttccttctgatatcactgaatttttaggacagccatattttgaagcctttaagaaaaaaatgcctatagcttttgcagctaaaggaataaataaattgctaaataaactgtttttaataaatgagcagtcaccaagagccagtgaagaaaccttgcttggaatttcaaaaaaagctaaacaaatgaagatcaatgtacagaataatgtggwtcttggrcagccagtaaagaataagagagtcttcaaagaagagtcatcagaatttgatgtgagggctttctgcaaccagctgaaacacaaagctactcaggagaccagttttgattttaaatgttctcaatccagactaaagacaaccaagtattcttctcagaaagtgataggaactcctcatgccaaaagtattgtgcmaagattccgagaggctgagtccttcacacaactttctgaagaaatccagatggcagttgtatggtgcaggagcaaaaaactcaaggctcaggccatttttctgggtaacaaacttcttaaaagcaaccggcttaaacatctgggaagctcaaggtactagtttggccaagaaactagagtgcataaaacgtctatttggcaacacttcttcggggtcaggttccaaattcaagcntcatnggggcaggagtcccgataattttccggggncaagggaccccgggaagtgcgtgn

SEQ ID NO: 730 - DNA, 716 bp, Homo sapiens
  misc_feature (400)..(400): n equals a,t,g, or c
  misc_feature (626)..(626): n equals a,t,g, or c
  misc_feature (645)..(645): n equals a,t,g, or c
  misc_feature (655)..(655): n equals a,t,g, or c
  misc_feature (705)..(705): n equals a,t,g, or c
tcttacgcttcccagtatattcattgtctataccgctgcttctatcgccagtactttcgtcgttactgccgggatgttcggcgcaatgagcctgtacggttacaccacgaagcgcgatttaagtggctttggcaatatgctgtttatggcgttaatcggcattgtgctggcatcgctggtcaacttctggttgaaaagcgaagcattgatgtgggcagttacctacatcggcgtgattgtctttgtcggattgacggcgtatgacacgcagaaactgaaaaatatgggtgagcagattgatacccgcgacacgtcgaacctgcgcaaatattccattcttggcgcgttaaccttgtatctggacttcatcaacctgttcctgatgttgttgcggatcttnggcaaccgccgttaattctttttcaccatcactatcccggccatgtgtcgggatttttttcttactaaaaacgacacttaacaagtaccaggtataaaatatgccttatggacgagcggaaagcgttttctgtatccataaatgcaaaagttattttgttatgcgtgggttttaaatttattgatggttgaaatattaatattttttcctaaggaataactaaaanaatgggaatccatactccnccaaaaccangcaataaattaaatttttccacccacaaaggcccggatttttaaacggtnattatgggctc

SEQ ID NO: 731 - DNA, 685 bp, Homo sapiens
aaatttccagggactatgttcggagtgaactggagtttgcctatggagggaccaatgtatttagaacctctctctatgaatcggtttaccacagccttaataggtcagttggtggtgtgtactttatgctcctgtgctgaaaacaaagcagatttggctgttttcagctcacatgcttcctctgctagcacgactctgccttgttcctttggagacaattgttatcatcaataaatttgctatgatttttactggattggaagttctctattttcttgggtctaatcttttggtaccttataaccttgctaaatctgcatacagagaattrgttcaggtagtggaggtatatggccttctcgccttgggaatgtccctgtggaatcaactggtagtccctgttcttttcatggttttctggctcgtcttatttgctcttcagatttactcctatttcagtactcgagatcagcctgcatcacgtgagaggcttcttttcctttttctgacaaggtaattaataagagcctatgatactttatataaccttagaaagagaaaactttgatctaggaatagtaagttttgcagattacttttatcgttcatgttacacaacttcgtattttgttaagataggattttcattcactggatacctaggtatggcaatgcagggaatgaa

SEQ ID NO: 732 - DNA, 1376 bp, Homo sapiens
  misc_feature (9)..(9): n equals a,t,g, or c
  misc_feature (23)..(23): n equals a,t,g, or c
  misc_feature (35)..(35): n equals a,t,g, or c
  misc_feature (37)..(37): n equals a,t,g, or c
  misc_feature (53)..(53): n equals a,t,g, or c
  misc_feature (563)..(563): n equals a,t,g, or c
  misc_feature (1311)..(1311): n equals a,t,g, or c
  misc_feature (1360)..(1360): n equals a,t,g, or c
  misc_feature (1374)..(1374): n equals a,t,g, or c
ttctcaaanccattcagtgacangacacaagtcancngacagtcacggtcggnaattcccgggtcgacccacgcgtccggccaccgcatcctcctcggctcaggagatggagcagcagctggctgaacgggagtgtccccctcacgctgagcagaggcagcccaccaagaagatgtccaaagtgaaaggtctggtctccagccgccactagggccggctggggcagctggactcaccaggcctgggtcaggtggggaggggacaccaagggcccatttcctcccctctctacctgcagtgagttccagacctgcccgtcccctcaccagcgcctccccaccctgttggtactgttccagaaaaactgttactccccctcacccactccctccttccccagttgttcccttcagactcaggggctccaccaatgccatcccaaaacagggtcagacactgcccagcttccctccaggaggttcttgtctctgtgtaagggcttgtytccctcccagtttttcttttgctccacgtcattttgtcaggctggttataagccggangcagctttaaccagcccccagggatgattgtgaaggaggcccctccccttgtgaggagggggcactcctctccagcccctggtaccacagtcctcacgatggtgcagtgatttctagccaggcgtcaagatgcgctgctttccctctcctgcctcatcccttgttggcagctccagttcaggccgtggagggacgtgatgctgggctgtgtttactaaacccacgggttttcagcctcttaagcccagctccgatctccaattagttgagagcgctgggttgactaacctctggtatctgagcacagacagagggtgctgtgggtctgctgggtggcagaaatggttccttccggcttggcgttctctcctggccactcttcctgctgcctctgactactcagccttgttttcggtgtgtaggccccagctgcccactggaactgccggctaatgcttgctctcccaagatctttaactcctcctggctgcacctgggtagggatggtggcatcgatgcccctctgtctgctgaaggacctgttgctgcttctgtcttttcacccctccttggctgatgacccagagccctctgatgatggcattctcctggcaagagaaaaagacttaactagacttctgaacttgaacagtttcaggttatattttaatttttttttttttgtacaggttctgattctaatacatttcaacatgcttttgtcaaaaaaaaaaaaaaaaaagggcgnccgctctagaggatccctcgaggggcccaagcttacgcgtgcatgcgangtcatagctctacncc

SEQ ID NO: 733 - DNA, 686 bp, Homo sapiens
  misc_feature (657)..(657): n equals a,t,g, or c
cagttcttgtgtataatttaccagtatgttggtcaggaaacatgccagatccccacaaccttccaatagtggctggttggaagaaatacccactcttttttggtactgctgtatttgcttttgaaggcataggagtggtccttccactggaaaaccaaatgaaagaatcaaagcgtttccctcaagcgttgaatattggcatggggattgttacaactttgtatgtaacattagctactttaggatatatgtgtttccatgatgaaatcaaaggcagcataactttaaatcytccccaagatgtatggttatatcaatcagtgaaaattctatattcctttggcatttttgtgacatattcaattcagttctatgttccagcagagatcattatccctgggatcacatccaaatttcatactaaatggaagcaaatctgtgaatttgggataagatccttcttggttagtattcttgtgccggagcaattcttattcccgtttrgacattgtgatttcttcgttggagctgtgagcagcagcacattggccctaatcctgccacctttggttgaaattcttmcattttsgaraggaacattatatrttggtggycctgaaaaaatattctwtrcattcctgrrttttgtttgggctncttaattaggttccatattataccttttt

SEQ ID NO: 734 - DNA, 1340 bp, Homo sapiens
  misc_feature (1164)..(1164): n equals a,t,g, or c
  misc_feature (1226)..(1226): n equals a,t,g, or c
  misc_feature (1238)..(1238): n equals a,t,g, or c
  misc_feature (1243)..(1243): n equals a,t,g, or c
  misc_feature (1282)..(1282): n equals a,t,g, or c
  misc_feature (1311)..(1311): n equals a,t,g, or c
  misc_feature (1316)..(1316): n equals a,t,g, or c
ggagcgccggggcagggaggcgggcaccaggcgcgggtccctccgggcaggggaggtaggcctgggcctgacgccggccacgcagcggcgggagagtgagcactcgggcggcggcgtcctggagacccgcgagagatggaagcggcggcgacgccgrcggctgccggggcggcgaggcgcgaggagctagatatggatgtaatgaggcccttgataaatgagcagaattttgatgggacatcagatgaagaacatgagcaagagcttctgcctgttcagaagcattaccaacttgatgatcaagagggcatttcatttgtacaaactcttatgcaccttcttaaaggaaatattggaactggccttttaggacttccattggcaataaaaaatgcaggcatagtgcttggaccaatcagccttgtgtttataggaattatttctgttcactgtatgcacatattggtttaaaaagtcaacattaggttatagtgacactgtgagctttgctatggaagtgagtcttggagttgtcttcagaagcaagcagcatgggggcggttcatgaaggattcctggagagtaaagtgtttatttcaaatagtaccaattcatcaaacccttgtgagagaagaagtgttgacctaaggatatatatgctttgctttcttccatttataattctttggtcttcattcgtgaactaaagaatctawttgtactttcattccttgccaacgtttccatggctgtcagtcttgtgataatttaccagtatgttgtcaggaacatgccagatccccacaaccttccaatagtggctggttggaagaaatacccactcttttttggtactgctgtatttgcttttgaaggcataggagtggtccttccactggaaaaccaaatgaaagaatcaaagcgtttccctcaagcgttgaatattggcatggggattgttacaactttgtatgtaacattagctactttaggatatatgtgtttccatgatgaaatcaaaggcagcataactttaaatcttccccaagatgtatggttatatsaatywgtsaawattagtytatatattttataatgtaccactgtttgatgataaagtcgtgttcttggatttatggtttaaacatttaaaatttttactgngatttcctggaatcccatcactttgggaggcagaagtgggccggatcacctgaggcgggagntcaaagaccagnctggncaacataatgaaaccccatctgtactaaaaatacaaaantagccagcgtggtggcgggtgcctatatnccagntactaagaggctgaagcaggagaa

SEQ ID NO: 735 - DNA, 602 bp, Homo sapiens
  misc_feature (482)..(482): n equals a,t,g, or c
  misc_feature (508)..(508): n equals a,t,g, or c
  misc_feature (551)..(551): n equals a,t,g, or c
  misc_feature (576)..(577): n equals a,t,g, or c
  misc_feature (580)..(580): n equals a,t,g, or c
ggccagcaggaaaacagtgctgaaayccctacattcagtaatcattcagctctttaagccatggatcctggttttagaggacaacgaaagcagccaacagcggcattacccctggctagagagtgatactgtggtggcctcaagcattgtgcagctgttcactgactgtattgactcactgcatgagagttttaaagataagctgttgccaggtgatgcaggagccctttggttgcacctgatgcattattgtgaagcatgtacagcacccaaaatgccagagttcattctgtacgctttccatagcacgtaccggaaactgccatggaaggacctgcaccctgaccagatgctcatggaggccttcttcaaagtggaacgaggaagccccaagagctgtttcttatttttggggtctgtactctgtgaagtcaactgggttagtgtgctctctgatgcctggaattccagtccccacccanaaacccgcagcatgattgtctgcctncttttcatgatgattttattggcaaaggaagttcaactggtanaccaaacagattcacctttacttannctncttggacagacaagctcacttt

SEQ ID NO: 736 - DNA, 643 bp, Homo sapiens
ttttttgagatggagtcttactccagcctgggtgacaagaataaaacaccaccatctcaaaggaaaaaaaaaaaaaaaaaaaaaaaaagaactttcacattctttgggacacatcatttggctgcccacttgctttctgcattctttttttctctttaraattcttagcgtcaagttgggaatgacggaaacaccaatttatgtcccaaattcttcccctttctggcacactgctttattataggcggttcccaggtcttatgctgttatcattcaaactgcagattacaagttgcacagtcagcaggaatgaaaaggatcaacagagtcttttgttttttccagcaaatatcctgagtttccagttagccatgcagggaaacacagtcattttcatagtattcactgtggtggctttcctctggatcacatcccaggctgcctcaaacctgttggtatttgtggcggtcatcccagagtccaaggtttcttcttcgtcagaaagccttggttcctgttctgagaacagcattttcctatttgtttttctccagcagtgcaaagttcctttcccttttctgggttacactgcttcttttttttttttttttttatttttggtaaacagagtgagaccctgtct

SEQ ID NO: 737 - DNA, 1116 bp, Homo sapiens
  misc_feature (104)..(104): n equals a,t,g, or c
  misc_feature (1082)..(1082): n equals a,t,g, or c
  misc_feature (1103)..(1103): n equals a,t,g, or c
ggcgcgctccaggccggtcgctccaccccccggctcccgggactgtggactccacgaccctgtcctcggccctgtccgcgccgaagcagcccgggactgcgcangccccgcgtgccgacatgggaaagtctctttctcatttgcctttgcattcaagcaaagaagatgcttatgatggagtcacatctgaaaacatgaggaatggactggttaatagtgaagtccataatgaagatggaagaaatggagatgtctctcagtttccatatgtggaatttacaggaagagatagtgtcacctgccctacttgtcagggaacaggaagaattcctagggggcaagaaaaccaactggtggcattgattccatatagtgatcagagattaaggccaagaagaacaaagctgtatgtgatggcttctgtgtttgtctgtctactcctttctggattggctgtgtttttccttttccctcgctctatcgacgtgaaatacattggtgtaaaatcagcctatgtcagttatgatgttcagaagcgtacaatttatttaaatatcacaaacacactaaatataacaaacaataactattactctgtcgaagttgaaaacatcactgcccaagttcaattttcaaaaacagttattggaaaggcacgcttaaacaacataagcattattggtccacttgatatgaaacaaattgattacacagtacctaccgttatagcagaggaaatgagttatatgtatgatttctgtactctgatatccatcaaagtgcataacatagtactcatgatgcaagttactgtgacaacaacatactttggccactctgaacagatatcccaggagaggtatcagtatgtcgactgtggaagaaacacaacttatcagttggggcagtctgaatatttaaatgtacttcagccacaacagtaaaaactgggaaggagatggrtttaaagaaggaaatatctattgatatttcctattacttctycaatggaagrgggtatttcccaatagggagacccttaawttgaaccaaacctaaagtttacacttcttaggggtacngtttaaargtttgtggggccntgccgtttctttg

SEQ ID NO: 738 - DNA, 2431 bp, Homo sapiens
  misc_feature (2366)..(2366): n equals a,t,g, or c
  misc_feature (2383)..(2383): n equals a,t,g, or c
  misc_feature (2400)..(2400): n equals a,t,g, or c
gcacaggttctcsgtcgcttccctcttctctcgccgcctcctggcctccgcaccgacgcggcccgggctggagccgagccggggccgagctgcaggccggaccggagccggatctgtacccgctgagacgtggaaacatggaggcctgagccggtgtgcgccacctgggctgcggcggcgacagsgacttctcctgacccctctgccaccctcccatccgtccgcgggtccgtggagctggagcagatcccccagccggctgagacaggttgtcttttggaaatgcaggtttaaggacaaattatctgcttaagctagaagatgggatcgaatagcagcagaatcggcgatcttcctaaaaatgagtacttgaaaaagttatcaggcacggaatctatctctgagaatgacccgttctggaatcagcttctctcattttctttccctgcaccaactagcagtagtgagttgaaactcttggaggaagcaaccatttcagtctgcaggtcattagttgaaaacaatcctcgaacaggaaatcttggtgcactaattaaggtcttcctttctagaaccaaagaactaaaactttcagcagaatgtcagaaccacatcttcatttggcagacacacaatgctttgtttattatttgctgtttgctgaaagtgttcatctgtcagatgtcagaggaggaattacaacttcattttacttatgaagaaaaatctcctggcaattacagttctgactcagaagatcttttggaagaattgctgtgctgtttgatgcagttgatcactgatattccactcttagatattacatatgaaatatcagtagaagctatatcaacaatggttgktttcctttcctgccaactcttccacaaagaagttttgcgacagagcatcagccacaagtatttgatgcgaggtccatgtcttccatacaccagcaaacttgtgaagaccttattatataactttatcagacaagaaaagccacctcctccaggggcccatgttttccctcagcagtcggatgggggaggactgctttatggacttgcatcaggagtagcaacaggactctggactgtcttcacactaggtggtgtgggcagcaaagcggctgcctctccagagctttcttcccctctggccaaccagagtctcctgcttctgctggtgttggccaatctgacagatgcctcagatgcgccaaacccctacagacaagccattatgtccttcaagaacacacaagatagcagtcctttcccctcatcaattccacatgccttccagatcaactttaatagtttgtacacagctctttgtgaacagcagacatctgatcaagcaactctcctcttgtataccttgctccatcaaaatagtaatattagaacatacatgttggctcgcacagatatggaaaatcttgttttaccaattcttgagattctgtatcatgttgaagaaaggaattcacaccatgtgtatatggcccttataatattgttgatccttacggaagatgatggcttcaacagatccattcatgaagtgatactaaaaaatattacttggtattcagaacgagttttttatcccctatgtctggtctcttgtctacaactcagcagtcggcctgtactggaatccacaggacatccagctgttcaccatggattccgactgagggcaggatgctctcccacccggacccctccagccaagcagcccttcaagttcttttatttctgggtaacagaagtagacagacaggttacttggtgtatcttctgttaaagaggattgcacgagtgtgttttcctcacacactttgatttggagaattggtgctagttggcaatagataactcagcgtagatagtattgcaaaaaggggaggaaatacacaacaataataaatgtaaaaacctgctattcaacatgcagttttatttcgaagccaaaaatctagagctttcccaagatcctgttgccttaggcacatcacacttcaacagtgcacactatccaacagtgcacactattcaacagtgcacactattcaaaagcgtagactatttttttgcatgttcaagatatttgttttggtcttatgtgtgtgtgagagagagagattcctttgacattaaggagcatcaatgagaaaagatgatgaggcaggaattaataaagaaatgaagtcgtgtgtgtttggttgcctgtcagagggcacacaatttcataaacaccatgcctggacaatttgatattaatatttaacacctctgcatctttttccttaaaaaagaatatgggccagatacagtggctcacatttgttatccccngcacttttggggagccnagttagcagaatccccntggagcacaggaatctgaaaccagcttgggc

SEQ ID NO: 739 - DNA, 1227 bp, Homo sapiens
  misc_feature (939)..(939): n equals a,t,g, or c
  misc_feature (1134)..(1134): n equals a,t,g, or c
  misc_feature (1209)..(1209): n equals a,t,g, or c
  misc_feature (1213)..(1213): n equals a,t,g, or c
ggcacgtcaaccccttcctcccgtatatcagtgatacgggaacaacacctccagagagtggtatttttggatttatgataaacttctctgcatttcttggtgcagccacgatgtatacaagatacaaaatagtacagaagcaaaatcaaacctgctatttcagcactcctgtttttaacttggtgtctttagtgcttggattggtgggatgtttcggaatgggcattgtcgccaattttcaggagttagctgtgccagtggttcatgacgggggcgctcttttggcctttgtctgtggtgtcgtgtacacgctyctamagtccatcatctcttacaaatcatgtccccagtggaacagtctctcgacatgccacatacggatggtcatctctgccgtttcttgcgcagctgtcatccccatgattgtctgtgcttcactaatttccataaccaagctggagtggaatccaagagaaaaggattatgtatatcacgtagtgagtgcgatctgtgaatggacagtggcctttggttttattttctacttcctaactttcatccaagatttccagagtgtcaccctaaggatatccacagaaatcaatggtgatatttgaagaaagaagaattcagtctcactcagtgaatgtcgcaggccatttctaaaagtgctacagaggacagacagggttttgaggccaccctgattattgggatgcatctgcagcacatccaggacttgaatttcattacgagttcctaatagttgtatttctaaagatgtgtttcctagagaatgtacagccttatgacactgtagtgatgtttttataattttctaagtagatttttttatattaacaaattcatatacagaaaaaataaggtgttacaaaaaatggagagctcttatttttgtacagattctgtcgtttttkntttatttgtgtgagatttatggaaatacactaaatkagtaattcaggttcagtacatttattacaaagtgaaatcaggggatattcatttgtaaattttattcttagtgaatgaactgtatwattttttttatcaaggagagcacttataaaattcaatttataaagatcatatcccaaatcataaagatttagntgatcattaacactaagatactctgattttagccgaactaacaaaggcttctactgggagggcttatccacatgncagnactctaagtgaatc

SEQ ID NO: 740 - DNA, 1243 bp, Homo sapiens
  misc_feature (1001)..(1001): n equals a,t,g, or c
  misc_feature (1234)..(1234): n equals a,t,g, or c
ttcatgttttctgcggatcgtttggttttgcctgaggatttattccaaaagagcatagacaactcctgttctgcttttcatcatcagacttgttgtggaagagggattgaatcagctgccatataaagaatgcatggtgaccactccaacagggtacaagtatgaaggagtgaaatttgagaagggaaattgtggggtcagcataatgagaagcggtgaggcaatggaacaaggtttacgagactgctgtcgatccatacgaattggaaagatcctgattcagagtgatgaggagacacaaagagccaaagtatattatgccaaattccccccagacatttaccggagaaaagtccttctgatgtatccaattctcagcactggaaatactgtaattgaagctgtaaaggttcttatagaacatggagttcaacccagtgttatcatcctactcagtctgttctccactcctcatggtgccaaatcaatcattcaggagtttccagagatcacaattttaactactgaagttcatcctgttgcacctacacattttggacagaaatactttggaacagactaagttatttaagtaaaataattgtcttatgtaatattacaatcatgttttgattttctatttgttttactgattcacttgagggtggcagagaaaaatgtgttaaaatgctttttagttttggaagtgggtatatttgaggttatatctcayttagttatttgtttactgttggcaccgaattcaacaatgaagtatatgcaactcttacaaaacataaattttaataatattctaatgcaaattactgaaccctcagtgcattaaaattatttcctaatttatgagcctcttagtttggaggttgcttgaagccacaaataaaactcaaatgagagtcagttctttgtcccactgtagtttgcattttgtttagtttggttttagctctactaaggtttcacatatgtggctattgccnattcctctactgttttctttctgatactggacatgctagtaacttggagaggagaataaaagaatgtctcctggaattttacattcccattaatgtcctcattcaattggcagacctaggatgtatgggttaactctcaggccattatgtttttcatggstcatttcccaaactgcattgttggkargtgccttgctaagctgtaatgcagtaagragggtgggcattttagnaattggact

SEQ ID NO: 741 - DNA, 1000 bp, Homo sapiens
  misc_feature (995)..(995): n equals a,t,g, or c
  misc_feature (997)..(997): n equals a,t,g, or c
ggccccggggcgcagcgcgcacgcaatcgcgtttccggagagacctggctgctgtgtcccgcggcttgcgctccgtagtggactccgcgggccttcggcagatgcaggcctggggtagtctcctttctggactgagaagagaagaatggagaagcccctcttcccattagtgcctttgcattggtttggctttggctacacagcactggttgtttctggtgggatcgttggctatgtaaaaacaggcagcgtgccgtccctggctgcagggctgctcttcggcagtctagccggcctgggtgcttaccagctgtatcaggatccaaggaacgtttggggtttcctagccgctacatctgttacttttgttggtgttatgggaatgagatcctactactatggaaaattcatgcctgtaggtttaattgcaggtgccagtttgctgatggccgccaaagttggagttcgtatgttgatgacatctgattagcagaagtcatgttccagcttggactcatgaaggattaaaaatctgcatcttccactattttcaatgtattaagagaaataagtgcagcatttttgcatctgacattttacctaaaaaaaaaaagacaccaaatttggcggaggggtggaaaatcagttgttaccattataaccctacagaggtggtgagcatgtaacatgagcttattgagaccatcatagagatcgattcttgtatattgattttatctctttctgtatctataggtaaatctcaagggtaaaatgttaggtgttgacattgagaaccctgaaaccccattccctgctcagaggaacagtgtgaaaaaaaatctcttgagagatttagaatatcttttcttttgctcatcttagaccacagactgactttgaaattatgttaagtgaaatatcaatgaaaataaagtttactataaataataaaaaaaaaaaaaaaaaaaaaaaaaaaaaaaaaaaaaaaaaananaaa

SEQ ID NO: 742 - DNA, 1236 bp, Homo sapiens
  misc_feature (987)..(987): n equals a,t,g, or c
  misc_feature (1047)..(1047): n equals a,t,g, or c
  misc_feature (1060)..(1060): n equals a,t,g, or c
  misc_feature (1126)..(1126): n equals a,t,g, or c
  misc_feature (1130)..(1130): n equals a,t,g, or c
  misc_feature (1207)..(1207): n equals a,t,g, or c
  misc_feature (1210)..(1210): n equals a,t,g, or c
ggcacgagcggagatgagcggggcgtgggacgtgctgcggcgtcctagctggcttacagggcggcggcggggtgtgtgtcctctgttaagagtgctactcgcccggggttgatctgtgcatgccactcctgggtcagacggtgaggtcggcgtctgcgaggacgcggcggtggagtagaagggcagccggagacaggcccggcgccccttccgaggctagacggccccagcttcgcggggatcatggcattgctggtggaccgagtgcggggccactggcgaatcgccgccgggctcctgttcaacctgctggtgtccatctgcattgtgttcctcaacaaatggatttatgtgtaccacggcttccccaacatgagcctgaccctggtgcacttcgtggtcacctggctgggcttgtatatctsccagaagctggacatctttgcccccaaaagtctgccgccctccaggctcctcctcctggccctcagcttctgtggctttgtggtcttcactaacctttctctgcagaacaacaccataggcacctatcagctggccaaggccatgaccacgccggtgatcatagccatccagaccttctgctaccagaaaaccttctccaccagaatccagctcacgctgattcctataactttaggtgtaatcctaaattcttattacgatgtgaagtttaatttccttggaatggtgkttgctgctcttggtgktttarttacatccctttatcaagtgtgggtaggagccaaacagcatgaattacaagtgaactcaatgcagctgctgtctaccaggctccgatgtcatctgscatgttgctggktgctgtgcccttctttgagccagtgtttggagaaggaggaatatttggtccctggtcagtttctgctttgtcgaccaggctggaatgcagtggcacaatcatggctcactgcagcctcagcctcctgggctcaagcaatcctnctgcctcaacctccccagtagctgggactacaggtgcacaccaacatatctggctgattnttatattttttgnagagacagagttttgccatggtgctcaggctgatctcaaactcttgagctcaagccatctgtctgncctnagccttttcgaagtgctgggaatacaggcctgagccaccaacacctgggccagtaaatttcttaaatccctaacttnccntggtttctaattggccttaaccccgg

SEQ ID NO: 743 - DNA, 1161 bp, Homo sapiens
  misc_feature (960)..(960): n equals a,t,g, or c
  misc_feature (976)..(976): n equals a,t,g, or c
  misc_feature (1003)..(1003): n equals a,t,g, or c
  misc_feature (1012)..(1012): n equals a,t,g, or c
  misc_feature (1048)..(1048): n equals a,t,g, or c
  misc_feature (1066)..(1066): n equals a,t,g, or c
  misc_feature (1115)..(1115): n equals a,t,g, or c
gtctctctctctctctctctctctcccttgtgcccgctttctgccatccgcgctgtctcgtgtctccctttttccattaaatgcctcttttcttgcgggtctcatstcgggaatagtgcactacggggacatacctatccccaactatcctaggcccgagaaccagcccttgccttcgcgtaacaggcggagactcgctgaggcgagttgcacttctaattgggcgtgaggtcttgtcaatccccaagttcttccaatcagaagtccggtccatccagccttccgctccccattggcctgtgtggaggaagaggggtgggtaagccgaagtcgctgcgctcagtgcgcaggcgcgaagaagctggcaggggcacgagccgggggcgggtttgaagacgcgtcgttgggttttggaggccgtgaaacagccgtttgagtttggctgcgggtggagaacgtttgtcaggggcccggccaagaaggaggcccgcctgttacgatggtgtccatgagtttcaagcggaaccgcagtgaccggttctacagcacccggtgctgcggctgttgccatgtccgcaccgggacgatcatcctggggacctggtacatggtagtaaacctattgatggcaattttgctgactgtggaagtgactcatccaaactccatgccagctgtcaacattcagtatgaagtcatcggtaattactattcgtctgagagaatggctgataatgcctgtgttctttttgccgtctctgttcttatgtttataatcagttcaatgctggttatggagcaattcttatcaagtgggttggctgattccatcttctgttaccgaytttttgacttcgkcctcagttgcctggttgcyattagttctctcaccwatttgccaaagaatcaaagaatawctggatcaactacctgattttcctacaaagatgacctcctggncttggacttcagctgncttctggtcatggtcttgggtctttgnctaatcatnattttaagcttatctaaataactgggtttggactgntataaatacatcaacaanccgaacgtgccggaaaatgcttgggaccctggctttgaacacctcttanacgttttgcaacctatgaaatggccgggaaaagcccgaaaaaaacc

SEQ ID NO: 744 - DNA, 1459 bp, Homo sapiens
  misc_feature (25)..(25): n equals a,t,g, or c
gcggacgcgtgggaagacgacaganggggtttgaagacgcgtcgttgggttttggaggccgtgaaacagccgtttgagtttggctgcgggtggagaacgtttgtcaggggcccggccaagaaggaggcccgcctgttacgatggtgtccatgagtttcaagcggaaccgcagtgaccggttctacagcacccggtgctgcggctgttgccatgtccgcaccgggacgatcatcctggggacctggtacatggtagtaaacctattgatggcaattttgctgactgtggaagtgactcatccaaactccatgccagctgtcaacattcagtatgaagtcatcggtaattactattcgtctgagagaatggctgataatgcctgtgttctttttgccgtctctgttcttatgtttataatcagttcaatgctggtttatggagcaatttcttatcaagtgggttggctgattccattcttctgttaccgactttttgacttcgtcctcagttgcctggttgctattagttctctcacctatttgccaagaatcaaagaatatctggatcaactacctgattttccctacaaagatgacctcctggccttggactccagctgcctcctgttcattgttcttgtgttctttgccttattcatcatttttaaggcttatctaattaactgtgtttggaactgctataaatacatcaacaaccgaaacgtgccggagattgctgtgtaccctgcctttgaagcacctcctcagtacgttttgccaacctatgaaatggccgtgaaaatgcctgaaaaagaaccaccacctccttacttacctgcctgaagaaattctgcctttgacaataaatcctataccagctttttgtttgtttatgttacagaatgctgcaattcagggctcttcaaacttgtttgatataaaatatgttgtcttttgtttaagcatttattttcaaacactaaggagctttttgacatctgttaaacgtctttttgtttttttgttaagtcttttacattttaatagtttttgaagacaatctaggttaagcaagagcaaagtgccattgtttgcctttaattggggggtgggaagggaaagagggtacttgccacatagtttcctttttaactgcactttctttatataatcgtttgcattttgttacttgctaccctgagtactttcaggaagactgacttaaatattcggggtgagtaagtagttgggtataagatctgaacttttcatctgcagaggcaagaaaaatatttgacattgtgacttgactgtggaagatgatggttgcatgtttctagtttgtatatgtttccatctttgtgataagatgatttaataaatctctttaaatactaaaaaaaaaaaaaaaaaaaaaaaaaaaaaaaaaaaaaaaaaaaaaaaaaaaaagggcggccgct

SEQ ID NO: 745 - DNA, 1623 bp, Homo sapiens
cccccctcgagtttttttttttttttttttttttttttttttttttttttttttttttttccaaatcaccaatacatttatttgcgggagatgaggtcaaatcttaccatgaactttaaaactgggtaggactagagacactgatctgcccaacctctgggtattcacaactgcacaggtaaccagatcctgtacgcgaggcatcaccattaaacagatgagcattagatgaggaggacacattctgagtagttgcatgatttcccattcagaggcaggtgctgccctcatatcagaaaagtagtgttgagaaaaacacaggcagagcctggccatttgcctcctagcataggcctagacatgatggtggccacgtgccaggggaccacaccctatgtacaaagcaggagaatgatgctcccagctgagctgcaggatgggcgctgggctgactggaggggtagacggggtggggtctgaccccattagcctttccccatccaacctgggcccccataagccattctctggccctctgcacaagacagactcagcaaatctgcgaggtatggggattctgccaactccccacctcgcctcaccttccctaggtctgccgggtgacccaatccactgggtgcagccccacccccgctcaaccccacatctggacagacacatggcaaatatggaactgaagcccggctgggctggagcacatctggttgttgttgggttggagtcgtcttgcaggtgtcccaaggtggtcaggcctcacccacggtggccaggttgagaccgtgttttttagatgattcaggttactccagggcaaagcatgatcctgatgacacccggcggaaaagcaggctggagcctcggaagagctggccctgcacactcaggtacttccagcagtgaatccaggatttgaacactggggagtaaggggggagcccagcttgcagcccgcagttgttcacagccatgaggtcgccaactagcaggaaggggtaggtcagcatgctcactgcaatccccatcacgaacttggtatagctccggatggccagggcctggctgaactgggaacctggattctggtcgtttcccagcccccctggggtgtcactcacgctgtcatccaccaggtaggcattgatgaagtgggccagcaggttacagccccacaagaaaaccacatcgcccaggaggtgagggattaatccaacgaagaatcccagcagcccttcctctttgaaaatcttcccaatggagctcagcacaccactgtacttggcctcccgtcccacaaactggaccatgcagcgcattgagatgacatgcagggggtgggccaacatgcgggacacacactgcatcatcatctcgtaggaggtctccttcacaactttcttcagggaagtcttcatatcatccttgttggaaacctgctcaatctcatctggagggaaaaccttcttcatgctaccccgagtcacagtagagagggcgttggacatcagccggggactcaggcctcggaacagccctatcttaccatccacttgcacgatgtacttggcgtaggtgaagaagctcggcagatagaggacactgggg

SEQ ID NO: 746 - DNA, 603 bp, Homo sapiens
  misc_feature (56)..(56): n equals a,t,g, or c
  misc_feature (435)..(435): n equals a,t,g, or c
  misc_feature (484)..(484): n equals a,t,g, or c
  misc_feature (570)..(570): n equals a,t,g, or c
  misc_feature (580)..(580): n equals a,t,g, or c
caccctgatgcattaatgcctgatggccagttgggacggaggcaagacagtgggtntgactcattgggaagatttaaagaggaaggctgtgggattcttcgttgattaatccctcacctcctggcgatgtggtttcttgtgggctgtaacctgctggccacttcatcaatgcctacctggtggatgacaagcgtgagtgacaccccaggggggctgggaaacgaccagaatccaggttcccagttcarccaggccctggccatccggagctataccaagttcgtgatggggattgcagtgagcatgctgacctaccccttcctgctagttggcgacctcatggctgtgaacaactgcgggctgcaagctgggctycccccttactycccagtgktcaaatcctggattcactgctggaagtacctgagtgtgcanggccagctcttccgaagctccagcctgcttttccgccgggtgtcatcangatcatgctttggcctggaattacctgaatcatcttaaaaacacgtctcaacctggccaccgtggttaaggcttaacacttggganactgcaaaanaatccaaccaacacaacaaattt

SEQ ID NO: 747 - DNA, 1080 bp, Homo sapiens
  misc_feature (1015)..(1015): n equals a,t,g, or c
  misc_feature (1017)..(1017): n equals a,t,g, or c
  misc_feature (1025)..(1025): n equals a,t,g, or c
  misc_feature (1056)..(1056): n equals a,t,g, or c
  misc_feature (1066)..(1066): n equals a,t,g, or c
gtcggacccggaagtggcgccctgggctcgcggcggtgccgcggggatggcgggagccggagctggagccggagctcgcggcggagcggcggcgggggtcgaggctcgagctcgcgatccaccgcccgcgcaccgcgcacatcctcgccaccctcggcctgcggctcagccctcggcccgcaggatggatggcgggtcagggggcctggggtctggggacaacgccccgaccactgaggctcttttcgtggcactgggcgcgggcgtgacggcgctcagccatcccctgctctacgtgaagctgctcatccaggtgggtcatgagccgatgccccccacccttgggaccaatgtgctggggaggaaggtcctctatctgccgagcttcttcacctacgccaagtacatcgtgcaagtggatggtaagatagggctgttccgaggcctgagtccccggctgatgtccaacgccctctctactgtgactcggggtagcatgaagaaggttttccctccagatgagattgagcaggtttccaacaaggatgatatgaagacttccctgaagaaagttgtgaaggagacctcctacgagatgatgatgcagtgtgtgtcccgcatgttggcccaccccctgcatgtcatctcaatgcgctgcatggtccagtttgtgggacgggaggccaagtacagtggtgtgctgagctccattgggaagattttcaaagaggaagggctgctgggattcttcgttgtacgtgagtttatacaccccataactggccacgggcatggctctgctaacaggtgtgtcctcaacctctcagaccgcagctgctggcctgggacttcactacatggccctgccctacctgagtgctgcagccagctctccagagctccatagcgtgtccaagctgcttagcccttttcaggccatggctcatgtaaaaatggaactgtgtgtctagtacatgggggagatgaacttgaccaagccccactgggcctcatncntttgtggngggtgtggggctggtctttattgagctaatnactgcataantccttggcttactg

SEQ ID NO: 748 - DNA, 795 bp, Homo sapiens
gggaatagtgaaaaggctcagaccgaccgatggcaagatctgcaagcgtctcaaagcccaggcagaaagggacttttcttttattggaagaagtaaacatggctagaaagaaccacgttcagggaatgacgttgtgcccagcctttttttttttttttttttttttgtctccccacctcctgcaatacgcctttccaatctttattggaagtctctccctgcctacttcctaatttattcttatttgacagagggtatggaagacttgcaatttgaaaactggggaccagttccaaagtcagtaattgtgttaaccacgtgtataacagctctgctggacacccaagaaagccatgggaacgccaactggaaaggtccccttccccaggggagcctgcgaaggagaggttctgtagaatccaagcccacatttccaaagtcacccccaacgcgtcctctcacaccgtccactgtgcgtttgtatgtgtctgggatccagggcaatgtgaattttctttttatttgggagattgttcacggaaaacagatcttcttctctcttgtccacctattaattgtttacaatatttgtacatctatgcaaaatacttgaatgggccatggtgccttttttccttgttagtatttaattaaaaatgaattgtttgtcatttgcaatgttatctggtttggcagctctttattgtgtgtttgttgtaatgtcctactgctcagattagataggattcatgacgtggacttcagaaagagttcccacaaggatggtcagttcaa

SEQ ID NO: 749 - DNA, 476 bp, Homo sapiens
  misc_feature (380)..(380): n equals a,t,g, or c
gcggacgcgtgggcgaagccgctgcgctcgcgcccggatccctcaggcggctgcaggcttcagcctgcgctggttggtgaaacagagatgtcagaaaaggagaacaacttcccgccactgcccaagttcatccctgtgaagccctgcttctaccagaacttctccgacgagatcccagtggagcaccaggtcctggtgaagaggatctaccggctgtggatgttttactgcgccaccctcggcgtcaacctcattgcctgcctggcctggtggatcggcggaggctcggggaccaacttcggcctggccttmgtgtggctgctcctgttcacgccttgcggctacgtgtgctggttccggcctgtctamaaggcttccgnagccgacagctcctttaatttcatggcgtttttcttcatcttcggagcccagtttgtcmtgaccgtcatccaggcgattggctctccggctggggc

SEQ ID NO: 750 - DNA, 687 bp, Homo sapiens
  misc_feature (262)..(262): n equals a,t,g, or c
  misc_feature (597)..(597): n equals a,t,g, or c
  misc_feature (622)..(622): n equals a,t,g, or c
  misc_feature (653)..(653): n equals a,t,g, or c
  misc_feature (661)..(661): n equals a,t,g, or c
ggcacgagctcagctgagctgaagctggattattaaagtggattgtcactcagactctccgtgctacgcttatttggagactagaggagtgggagttgagcctggcttgaacctttggaaccagaaaagttggggagcaggtggaggaggccacactcctgggagctgatggttttaaatctggttttaaatctcttctctgtctcaagtccatgtctgaagtgggtgaagggtggactggatcctcaagcagaaggtcacnttctcccacccctagtcctccacctgggaaatggcctcaacggtcttccctctttccatccccagaatgggtgtcccgctctgccttcagagatcctgttctgcactgggccacyttcagagctgctctgggcagacaaagctgtttctcamcctcccaaaatcccttcccatcccctctcaggagctgcaaagagaagggcacagtctatatcttatcacccttcatcatccacttctcagcagtccctggtattacttggttgtggaacatattatcaggaaaaaagatttatccattgaaaaaattggaaaagtcaaagtctgggccgggtngcagcgggtttcacatctgtatttnccagcattttggggagggccaagggcaggtngggttcanttgagggtcagagtttcagggaccag

SEQ ID NO: 751 - DNA, 5141 bp, Homo sapiens
tcgatccacgcgtccgcggacgcgtgggccggacgcgtggggtttctcttccctctccattggaaatcytgctccggaggtccraaacacgtattttaagcgtgcccttcctcacctcctggagcacccttagaagtattgcctacttatccgggctgagaatccttcatttttgacctggcttttttttcgccctttgggagataaaggtccctctccaccctctactaacactctgcacccaaggccttatcctttggggtcaccagctccttggccatttctatgtgatttcccccacccatctgagttccagtttcctctgggctccaatctccagtccctggcggatctggtcagtcccacccctaggtggagtgaccagggggctctggcccaggattcccaaccctggaaggcagctccaaggcaggaagagaattgggcatcgggtacgaacctggcagctcaggagtcggggctccactcaccccacacaaaaagatgaaaaagcgcaaagagctcaatgcattgattggtttggctggggacagccggagaaagaagcccaagaaaggcccaagcagtcaccgcctgcttcgcactgagcctcccgactcagactctgagtccagctccgaagaggaagaggaattcggtgtggttggaaatcgctctcgctttgccaagggagactatttacgatgctgcaagatctgttatccgctctgtggttttgtcatccttgctgcctgtgttgtggcctgtgttggcttggtgtggatgcaggttgctctcaaggaggatctggatgccctcaaggaaaaatttcgaacaatggaatctaatcagaaaagctcattccaagaaatccccaaacttaatgaagaactactcagcaagcaaaaacaacttgagaagattgaatctggagagatgggtttgaacaaagtctggataaacatcacagaaatgaataagcagatttctctgttgacttctgcagtgaaccacctcaaagccaatgttaagtcagctgcagacttgattagcctgcctaccactgtagagggacttcagaagagtgtagcttccattggcmatactttaaacagcgtccatcttgctgtggaagcactacagaaaactgtggatgaacacaagaaaacgatggaattactgcagagtgatatgaatcagcacttcttgaaggagactcctggaagcaaccagatcattccgtcaccttcagccacatcagaacttgacaataaaacccacagtgagaatttgaaacagatgggtgatagatctgccactctgaaaagacagtctttggatcaagtcaccaacagaacagatacagtaaaaatccaaagcataaagaaagaagatagttccaaattctccaggtatcccaagcttaagagagraactccagcttgatccagtgctcttacaaacaaacctgrgagcaacaggcctccagagaccgccgatgaagagcaagtagagagtttcacatcaaagccatcagcattgccaaaattttcacagtttcttggagacccagttgagaaagctgcccaactaagacctatctccctaccaggagtttctagcactgaagatcttcaggatttattccgcaagactggccaggacgtggatgggaagctgacctaccaggaaatctggacctccctaggttctgctatgccagaaccagagagcttgagagcatttgattccgatggagatggaagatactcattcctggagctaagggtagctttaggtatctagcttcatcaggcatattttagaaatggactgcctaatatctatttacctaacaacaaaacaacccttacttacccatcagtcctctagtcctccaaactactgtagcagatactttgccaccttttaacttgtttgaagaagctatataaaagttatttttttaaagaagaagaccattttacttatgatgttcagaaatctatgatttcctacaaccagtaagatcttacattttaaaattgccagaaaaaaaattaaagccctctttttttctctttcctttttttgaggggaggagaccttatcttttaaagctgggaaatgtatatagagagagaataagccacttttatatttcacttaaatttgccttaaattagctgcactttatagagactcagaaaatgtcttttctttaaaagataggccttttctgtttgtaaatatttaaatgaaagaaagcattgtgcatattgtgtggaaagtaggaagaatggttttgaacaggatatgaacaaatgacttattaaaaattgctgatctggtgtaggtggcagctgaaactacatccatgtctccataaggyatccctcaaaggcccaggcgctgccagggggtttgtcctggtagctggaggaaccgatttcagggagtagacactggagacaatactgactccaggcatggctcatggaagtaggattctggttctttgttcctattccctcagctaatcccaacctgggaatcagagaagtcttggggatttttctcatttttagtactatttcagggtttatgagcataaaaagttatccattggggagctccattttccctgctgagtgagctagattgccttccccacccacccacttaagtctgtcttaaagccgtagctggctcccaccaccagtaccatctccatttgaatggcagggctaaattcccccagccattatctcacactgaccacccagagctttagaagagagctgtgcttctaattttgacccagaaaaccataccccttgagattttacctagaggctaaccaagagcctaatatgtttctctgggggatgactaaagccaaaaaggctgtgagatgaaacatgtgaaataatattcagtttccttaccattaccagctcagaagtagctagaggctttctacccaaaggatgccaaagtatagcagggcaggcctggagctagggccttcacatggtggtagcaagtttttcaaatctaatacaatcaagtacaatacttcctttaaatgcttctgtggacctggcatgaaagatccctagattgaaaggaataatacctccatgtctcctgtatgttgagtctagaattgctgtgttgttcttagaagcagtctttgggcaacaacttgaaaggggaaaaaaaaactacaaaaacttaactttggtataggccaagtcagggagaaagtagagaaagctgtcatgccacagacttctttagtggagatcatttcctttttaactttgttcaggttgcccttcaccatggatacagtccggtacccttaaacatttaagggctgttttttttttctttacatgatgttcagcttggtattaaccaaacttaaattttttttccagaagtattaaaatttagttaaagcaagatgaagtcttttcccatgaatgtgtccccttatctcattatagcttatgctcagtttcactttcttggaaaggttaaaacaaattagcctggcactttaggtaacttgaaaataactctcacccttctgactgccttccatccactctcaccccacacctttttttaatatatatacacccttacagattttctaacaaccaaataaaattctagcaataaattgaattatactgctatatttgtatatactgtaccataaatagtatgtctgtacctggaaggtatttttttgagaactgatttatatgaaatatacttgagggtaatgtagcttgtcctttttagtttcaaattcttattcataggcagatactttgaagacaccttaactctttgttgtgtgtattttcccttgcatcagataactatacatggagaaatccattttgttttttggtttatcttctgttcttcctaccttgtgcttgtctgactagtatcacccctgagccagtatacagtaccatcctctccccctaccaagtttggcagaggtgtttatactgcattctcagatctatgaatatttttgtcatcctgcctgagaaagtacatcttccaggcaaaagtagggtatcttgaactcctttcttctgagttgagcagactcactggcttaagcatcccataagcctattatttagtgtgaatttgggacttttatttgtatgttgtcttaacttactgagcctgtgacttgtatttagctgtagtcaagcctcaccagccatatctcatctctgagaggaagactggatagtgagtttggttttggttttggttttaaacccttttaccttttcagtctggcagctcctactgctgctttcctaagttactcaaagcactgcttcttggtccttgttttcttttgccttgtactatcttgtataatgtttactaaaagagcctccccataaatcagagaggcaaaaaggtagcatataaaaagaagaaccaaaagaagagaaaacctgacttctagatgactgtggtgtcatctaaaaggcagaggtgcctgaccctcaggaatgtgtatgatgcaacagagctgaagaatgggttcccttcacctactgctggccattgtcccttctgttggagattcctttctttatggttgctgttcataaccccttcaacacccccccttgctggtcctgccggtcacagttgaggattttggctgtgatgggctcatactcataatggcctgttgagttgtttttagtgacaggttttgtttgctgcacacctcattggcttgcttaccaacaccagctagaagtggtccctctttcatatccaaaccagaacacatttgggtattcctgagactttatagagcgtgtattgtttgttatacgaacctaacctaccttgttgttttctcatattaagaaatttaaatctactttgttttagtgaagctattttggtaatgtataagcaattttggttctgtttagggagaattcagggtttccatgacttgatttgagctttgcatatttcaaataagtaacacagccattttaatttagctaaataaaaaaatttcttttttctcaaaaaaaaaaaaaaaaaaaaaaaaaaaaaaaaaaaaa

SEQ ID NO: 752 - DNA, 622 bp, Homo sapiens
  misc_feature (592)..(592): n equals a,t,g, or c
  misc_feature (601)..(601): n equals a,t,g, or c
  misc_feature (611)..(611): n equals a,t,g, or c
gagggctccggccgcggagtgatggtggcctcagcgaagatgggccgggcagggaccatggcggtggcagcagaggtggcaggggcggggcggctggcggtagaggaggctgtggtcctcagggggctgtaggtggaggtatggctcgggccagcagcgggaacggcagcgaggaggcctggggggcacttcgggcgccgcaacagcagcttcgagagctgtgcccaggagtgaacaaccagccctacctctgtgagagtggtcactgctgcggggagactggctgctgcacctactactatgagctctggtggttctggctgctctggactgtcctcatcctctttagctgctgttgcgccttccgccaccgacgagctaaactcaggctgcaacaacagcagcggcagcgtgaaatcaacttgttggcctatcatggggcatgccatggggctggtcctttccctaccggttcactgcttgaccttcgcttyctcagcaccttcaaagcccccagcctacgargatgtggktcamcgcccargcacaccaacccccccttatamtgtgggcccaggcggccctttgatgntttcagtgnacaaacctgntggtccttctt

SEQ ID NO: 753 - DNA, 3762 bp, Homo sapiens
gccaccaaggagatttggagcccattttagaggcatctgttctatcttcccatcataaaaaagcggagtgcagtagcatgatctcggctcgctgcaacctccgcctcctgggttcaagcgattctcctgcctcgactacagagctctgaggaacatgaatacagtgatgaagctcctcaggaagatgagggctttatgggcatgtcccctctcttacaagcccatcatgctatggaaaaaatggaagaatttgtttgtaaggtatgggaaggtcggtggcgagtgatccctcatgatgtactaccagactggctcaaggataatgacttcctcttgcatggacaccggcctcctatgccttctttccgggcctgttttaagagcattttcagaatacacacagaaacaggcaacatttggacacatctcttaggttgtgtattcttcctgtgcctggggatcttttatatgtttcgcccaaatatctccttygtggcccctctgcaagagaaggtggtctttggattatttttcttaggagccattctctgcctttctttttcatggctcttycacacagtctactgccactcaragggggtctctcggctcttctctaaactgggattactctggtattgctcttctgaattatgggaagttttgttcctkggytttattawtctttctactgtaatccacaacctgsttcatctactgattgtcatctgtgtgctggggcattgcagccattatagtctcccagtgggacatgtttgccacccctcagtatcggggagtaagagcaggagtgtttttgggcctaggcctgagtggaatcattcctaccttgcactatgtcatctcggaggggttccttaaggccgccaccatagkgcagataggctggttgatgctgatggccagcctctacatcacaggagctgccctgtatgctgcccggatccccgaacgctttttccctggcaaatgtgacatctggtttcactctcatcagctgtttcatatctttgtggttgctggagcttttgttcacttccatggtgtctcaaacctccaggagtttcgtttcatgatcggcgggggctgcagtgaagaggatgcactgtgatacctaccagtctccagggactatgaccctaaaccagggcstgcggcacttgcgggcctccctgctggctactgatgccagtaccagaggagccccaaaactttgacagcctcgtgggctttgtgacggcccaggggctctgcgtggtacatgactgagaagagaaaaacaaaaataaatcatacctcaaaggatggagtgcatcaattgggagaaaaggagacatagcccaaaccctggcttattcttgggatctactgattgcgggctctgcaagacccttggcaaactggcttctgatccatatcatatttatttgtagaagatggcgaaacagtttagctggtggttctttcttctccctttctctctctctatgacaataatacaaaccaatttaagtgaacatttatatccgataaggggtgggagtgtgattttaaatgctcttttgggagaacaaagaaattaatgtaaataagatttctaactgtttaaataagactttatataaatgtttaaaacataggggtaagggagggagggagaatttttgtatagaatgaaacatgcaagtaccacacactgtttgaattttgcacaaaaagtgactgtaggatcaggtgatagccccggaatgtacagtgtcttggtgcaccaagatgccttctaaaggctgacataccttggaccctaatggggcagagagtatagccctagcccagtggtgacatgaccactccctttgggaggcctgaggtagaggggagtggtatgtgttttctcagtggaagcagcacatgagtgggtgacaggatgttagataaaggctctagttagggtgtcattgtcatttgagagactgacacactcctagcagctggtaaaggggtgctggaggccatggaggagctctagaaacattagcatgggctgatctgattacttcctggcatcccgctcacttttatgggaagtcttattagagggatgggacagttttccatatccttgctgtggagctctggaacactctctaaatttccctctattaaaaatcactgccctaactacacttcctccttgagggaatagaaatggacctttctctgacatagttcttggcatgggagccagccacaaatgagattctgacgtgtccaggtttctcctgagctcatctacatagattggtagacccttcctttggattaggaaagatgagttttacctctggtacactgtcttggtaagcctggatgtgacagacacctcggctctccttgaataagaaagccagcagaactcttaaagccagttgtagtacggagttgtcagcactcactgaacctcactttacagggataagagtggtgtggcattttaaatacaatggtatgttattgccagggagtgaggtacaagacgatggctcatgtcacaggcctacctgatacggtgtcagagaaagtggtggggaaaggatctggttcatggaattctgatcttggcccataggtgaaccaccaaaatagtgctcgagtcttaggttactgtcatcaaagacttgggatgactccattatatcctggggttgtgggtattagaactaaatatggaggtcctgagcatggggactggcgtcctcagtaggtgtttgggaatatgggaagggtctcctatttattcaatagagttttctcagttattttcctcccttgcccttgcaatctccagcaaaaggtgggatctaggaagaaagaatccagtgtagaagttgagaagaacttgaacgttttggttctggataaggtcactgtcctaggtgctaggtggaccgagcaaaagactcagtggatgaactggtgcagtgcctgacagaataaagaacagtattaatccctttgagaaagcatagtccagcaggacagtggccatttggacagaagcccacttagtttcttgggagcaacagcacgtatcagaagccagacttgctcttcggtcatgcactttgggatacagcgtataggtgcagccctgtcacaacaccaacagaagtagcagcctctgggtgcagtcacccacaccccaaagctggaaggatctggttcaacatagcacaaacccttaggaaaaatgaaattaacatcactgatgtgtaatccagtaaaatctccctttttcgggtgtgtatgtgggcatgtgcccatttctatgtgtgtgtctacgtgcagctcactaccaacagcctcatgtgcacttgacctgacagtgctcgctgagaactctcaccaggttggcgcctgaatgccttactctcagcagtcagaggcttgcttgctctgtgcagatttttaattttcttttttggccctaggctggttgggacctctacagcttcattctttcaccattaaatagtggcctttttcagtattttccctcttcccctttataaattatgctaaagccacaaagcacatttttggggatcatagaaggttggggttccagaaaggcatctgtgtgatggttccattgatgtgggatttccctacttgctgtattctcagtttctaataaaaagaaccaaatgaaatatgaaaaaaaaaaaaaaaagggcggcc

SEQ ID NO: 754 - DNA, 2455 bp, Homo sapiens
  misc_feature (2417)..(2417): n equals a,t,g, or c
  misc_feature (2424)..(2424): n equals a,t,g, or c
  misc_feature (2443)..(2443): n equals a,t,g, or c
gaggaatgatttttgtctgctctgcaacccataaaaccaaatcgatgttcttctttttggctcaaactgagcagggagatatctttaagatcactttggagacagatgaagatatggttactgagatccggctcaaatattttgatactgtacccgttgctgctgccatgtgtgtgcttaaaacagggttsctttttgtagcatcagaatttggaaaccattacttatatcaaattgcacatcttggagrtgatgatgaagaacctgagttttcatcagccatgcctctggaagaaggagacacattcttttttcagccaagaccacttaaaaaccttgtgctggttgatgagttggacagcctctctcccattctgttttgccagatagctgatctggccaatgaagatactccacagttgtatgtggcctgtggtaggggaccccgatcatctytgagagtcctaagacatggacttgaggtgtcagaaatggctgtttctgagctacctggtaaccccaacgctgtctggacagtgcgtcgacacattgaagatgagtttgatgcctacatcattgtgtctttcgtgaatgccaccctagtgttgtccattggagaaactgtagaagaagtgactgactctgggttcctggggaccaccccgaccttgtcctgctccttattaggagatgatgccttggtgcaggtctatccagatggcattcggcacatacgagcagacaagagagtcaatgagtggaagacccctggaaagaaaacaattgtgaagtgtgcagtgaaccagcgacaagtggtgattgccctgacaggaggagagctggtctatttcgagatggatccttcaggacagctgaatgagtacacagaacggaaggagatgtcagcagatgtggtgtgcatgagtctggccaatgtaccccctggagagcagcggtctcgcttcctggctgtggggcttgtggacaacactgtcagaatcatctccctggatccctcagactgtttgcaacctctaagcatgcaggctctcccagcccagcctgagtccttgtgtatcgtggaaatgggtgggactgagaagcaggatgagctgggtgagaggggctcgattggcttcctatacctgaatattgggctacagaacggtgtgctgctgaggactgtcttggaccctgtcactggggatttgtctgatactcgcactcggtacctggggtcccgtcctgtgaagctcttccgagtccgaatgcaaggccaggaggcagtattggccatgtcaagccgctcatggttgagctattcttaccaatctcgcttccatctcaccccactgtcttacgagacactggaatttgcatcgggttttgcctcggaacagtgtcccgagggcattgtggccatctccaccaacaccctacggattttggcattagagaagctcggtgctgtcttcaatcaagtagccttcccactgcagtacacacccaggaaatttgtcatccaccctgagagtaacaaccttattatcattgaaacggaccacaatgcctacactgaggccacgaaagctcagagaaagcagcagatggcagaggaaatggtggaagcagcaggggaggatgagcgggagctggccgcagagatggcagcagcattcctcaatgaaaacctccctgaatccatctttggagctcccaaggctggcaatgggcagtgggcctctgtgatccgagtgatgaatcccattcaagggaacacactggaccttgtccagctggaacagaatgaggcagcttttagtgtggctgtgtgcaggttttccaacactggtgaagactggtatgtgctggtgggtgtggccaaggacctgatactaaacccccgatctgtggcagggggcttcgtctatacttacaagcttgtgaacaatggggaaaaactggagtttttgcacaagactcctgtggaagaggtccctgctgctattgccccattccaggggagggtgttgattggtgtggggaagctgttgcgtgtctatgacctgggaaagaagaagttactccgaaaatgtgagaataagcatattgccaattatatctctgggatccagactatyggacatagggtaattgtatctgatgtccaagaaagtttcatctgggttcgctacaagcgtaatgaaaaccagcttatcatctttgctgatgatacctacccccgatgggtcactacagccagcctcctggactatgacactgtggctggggcagacaagtttggcaacatatgtgtggtgaggctcccacctaacaccaatgatgaagtagatgaggatcctacaggaaacaaagccctgtgggaccgtggcttgctcaatggggcctcccagaanggcaagnaaagggggggttttggggnaaaaaaattttt

SEQ ID NO: 755 - DNA, 650 bp, Homo sapiens
  misc_feature (352)..(352): n equals a,t,g, or c
  misc_feature (581)..(581): n equals a,t,g, or c
  misc_feature (610)..(610): n equals a,t,g, or c
ggcagagcccacattctactggaatgacctgctgcacttctgtgagcttcaaatctgagatgtgctttcatcctcccgtgtgtggcagggcgccttgttagtgtccaggcctcttggaatgtggtttggttcaggggtactgatggcccgagtgcttgcccacggcagaggaggccaggggtcagtacaggagccagtcctcgccaccctgttcctgaccatacagagtctgtcacctgcctgtgccctgattgtaccccatctgcaccgtgtctgcaccctgcctgcgccctgtctgtaccccatgtgcgccccatccgtaccctgcctgcgccatctgcgccctctycgnaccctgtctgtgtcgtctgtgccctgtctgtgccccgtccgcatcccgctgcgccctgtctgtgccccgtccgcaccctgctgsaccccatccatatcctgstctgctgctgcaccctctctgcaccctgtctgcgccgtcgtgcccgtctgcaccttgctgtgcccgtcacaccctgcctgcactctgctgtgcccatctgggcctctgacgccctactgtgccctgnctgtctaatagatctgcagcgctccgctntgtarcagccccgaccctaaggatgcttcatgaatagaca

SEQ ID NO: 756 - DNA, 1581 bp, Homo sapiens
ggcgcactgtcaccgagggcacataaatgtatgctcagccctcgtgatggcagtgggccagaacaggccgctgttcccatggtattatgggcatcttacatgcagcatatttgttaggctgtgttagcccgattctgccctccacccccgtcaaccctagagtttacccaggaccaaaagtaaacttaaatatcctctgtgtcatggcctcggcttacctaacatgttctacagatagatgttgttcaacaacagtaatgatacccttcaaagaagcttttgaaaagccaacgtgaatttccaaaagccaacactagagctgatgtgtgccctgcttgcctttattttcaaggtgttctgaagacgcagatcccgatattaacttaccaaggtggatcagtggaagctgctcaggcattcctgtgcaaaaatggggacccgcagacacctagatttgaccacctggtggccatagagcgtgccggaagagctgctgatggcaattactacaatgcaaggaagatgaacatcaagcacttggttgaccccattgacgatctttttcttgctgcgaagaagattcctggaatctcatcaactggagtcggtgatggaggcaacgagcttgggatgggtaaagtcaaggaggctgtgaggaggcacatacggcacgggratgtcatcgcctgcgacgtggaggctgactttgccgtcattgctggtgtttctaactggggaggctatgccctggcctgcgcactctacatcctgtactcatgtgctgtccacagtcagtacctgaggaaagcagtcggaccctccagggcacctggagatcaggcctggactcaggccctcccgtcggtcattaaggaagaaaaaatgctgggcatcttggtgcagcacaaagtccggagtggcgtctcgggcatcgtgggcatggaggtggatgggctgcccttccacaacacccacgccgagatgatccagaagctggtggacgtcaccacggcacaggtgtaaccgtccatgttccgtgtgagcagagtccctaccaacgggcaggtctgcatccggggagaatgcagctgcttctggcgacaatcctgctagtaaacactggtcttcggtgagcaacgaacactcgcctggcctgggaaactgcatgcccactttctgggaggggttagtgcaggtgccgtggacaaaggacaacatttctctggggctttttaacttttattcctaagactctaaaggcgttgatttcaaccctccttcactctggcttcttcaggcaacccacgtggtctcctgtgagaatcttctcgacagttacttatggggacacttgtgaacaattaactgccaggcagagcatgagaacaaacattcccaggccatgtaggataggatactccagactccagtcatcctcccccatccatggtttctgttactcatggtttcagttactcatagccaactgcagaccgaaaatactaaatgaaaaatttcagaaataaacaactcttaagttttaaaaaaaaaaaaaaaaaaaaaaaaaaaaagggcggccgc

SEQ ID NO: 757 - DNA, 1714 bp, Homo sapiens
  misc_feature (1691)..(1691): n equals a,t,g, or c
tcgacccacgcgtccgcccacgcgtccgccccgtgcacgggagccagctccgcagatgggcgcgcctggctgagcttgccgccctgtaggcttggcgctgggctctcggtttgttcttcatttttaaagaaggaagggtcatatgtttattgctaaactgtcaaaaaggaatatattctgattaaattattactcctcactttgagggtgtgagaattttagaagatttaaatgttctatataacacttagatttctgatattttggaagaagttagaagttaatgaaagcaaactcagttaccaattttctggaaaatatccatgtggtaatggtagactttttaggtggcaatttctaggtctgaaatatagcagaggaaagggcgctgaggcagttgcaggcaggcagccctgtacttaccctgtactcacctcatccgacagacgctgtggatgaggaggggcttggcggaggcgtgagcaccgatgtccctttgataacctgcactcaccaagatgaactatttgccgccctgtcttttcctgggttggggggtggcatctgatggtggcagagtgcctgttggttcgcccgtgggtctcatggttcagacagagggaggtggacggcagggatcagggagccaggagcgcgcctcagacttgcagcaaccattgtgatttgggttgttcggaatatttaaattactgatcagaagatgaaagtagcttttctcttgggaagtcttgcagcccgtgggagtgataccaggagcaacacagagctcagcagcggcgccaaggtgttccctgtttcctcagcacgtgagccttcaccgcctgcttcattcaggagccagtgcagcagtaatacagtctatacattgttctgttttcaaatttatcctgaggctttgttgagcataaatgattatacgataaaggtatccgttattttggaactcatttcagttgggatctcctgtatgcagagtgttgcatttagaggtttgagtcccatcttggtttcttgccgtgctgactgtagccttcaccttgacttgaatgaaggtctgtggttggaatgtgtgaggagccgctgaggtgttcaggaggtgctgcctggaggtcggtttcttcctgggtgttacgggcaactgctcacacagttgtttctctgtgaacatttccagtgtttaatccaaaatgaaaacccaccaatgcttttgctaacttcagtgccttttataaatcatttttaaatttcctgaacttgctttttgaggatatacagggatattaagtagacgcaggattgtttttgtttgtaaaaattctgaattgaaactttgttttaaaaaaaggcttctttctttcatatgacaagagataggtcaggaatattggaatcaagatttaaatgttaaaattcgattttgttacacagggtgtgttcatttgttttgtagcagacaagatctagatcccagacagaaacaacacatgctattctaaaaagccgcattttaaaaggcaccttggttctcaaaagaaatcagaatatggatattcgtagtgatgatctgttttctctaaaatcttaccatattgtctgtatatggttgtaaattcaaatggaaagtaaaacgttttggccctgaaaaaaaaaaaaaaaaaaaaaaaaaaatnactgcggtccgtcaagggaattc

SEQ ID NO: 758 - DNA, 408 bp, Homo sapiens
ggaagcttggctgaaaccatctgccttgtgacagggacacacaagatgctcagcgcattcaatgcaacgtcagggaaagccatttggactttaaacccaaactacttgtccaacggtaccttggctgccccagttgtggtactgccagacttggatgaagacggtgttcgagaccttgtggttctggccattggggaattgcagccagatctgtgctttctgctggtgtctggccggaccggaaatccagtgggtcgacctgtgaagtacaacatcgttgggagttgggaatctgaattggtcctcaggtttacatcaccacaaatggggctgtctacatcctgtttgggtttggaaatatacaagctgtcgcactgcggggacatttttgttccagggccaaaatcg

SEQ ID NO: 759 - DNA, 1914 bp, Homo sapiens
  misc_feature (384)..(384): n equals a,t,g, or c
agactgttctgtgtcctgtggtgggtttaacagcagcactcactctgcctgctagatgccagtagcaacctccttcataagctgtgatagccagaaatatccccagacattgtcaaatgtctcctgggggtaaaattgcctctggttgagaaccactggtatattgtctatgtctccagttagaagggcagttccatgagagtgaagaccccacgtccaagttcctcagggccctgatgacctcagcctggcattcactcttccatgcagctgatcctccccaaagccctggactgggcgcaggctacctgagaagcacatcaaagcgtttgttctacaggaccctcgtctgtgggcttgtgcagcttggggccagggatggtngcctactggcctttgcactgccagtacccacccaggctttgctttcagggtggtcagaaaatgattactgggggaacacatgacagaaaagcaggaagggggcctcttggtgctgtgagctgaccagtgcacagtgttggtccttctcgacagggatgacttctactttttggaagggagagttcagactttattagataccttaaggctggccctggggaaaaccgtggctggcttcaccatcctcctaataggaagaggcagtgaggagaacagtagtctggggaaggtgggagccccaactgaggggcctgcacccagcccctcagatccgcctcccctcccatgtcactccagctcttttgggatgatcacatggtgagaatctgctttgaagatatgaagggcttcatggaggcttccaaggcagactggtagtcctgcagcgggacctgggagcaggcaggggctgtgagctggcctcggcggatgagatcgcacagtgtgaggatcagctccttgaactggtctggactgtgatccttcttccactgggacaaccaaaagcctcgaagtttgagatccttaaaaatgagcaggctcacagaggctacgacgggctgcttggccatccccccataggttaccatggttcctccasgcgctaactgccgcagcagctctgtggagcttttcccaccaacacagttgagagcaagccgtggctggggcatgtccttaaagaagtttttcatttcgggccttcttagctcctcttctgtgatgacatgctcagcccccagactcttcagtctgtcactcagcttctggatatcaggtctgtctcggaccacattgatggttcttaggcccagggctgcggcgatctggatgaccgcttgccccactccgctgttggatgcattctggatgacagaatcccctggctgcagttgctcgaagtccatcaacatcctgtaggctgtgcagggattgacacccagggtggcagcgctctgaagagggatgtcactcggaacttggatcagtgcttcctcgctgaacacagcctcggtccgccaggttcctaaaccagcatttgctggaatcacccagtctcctggcttcagcccggtcacattgctgcccaccgctaccacctgtgcaacaccttcgttccctccaacagcaggcagttcaggaaggartccgtagtttccttggatcatatttatgtcagatggattgataggggccgccagcatcttcacacggacatctgatcctctcacagcagctagctccaggttcttgagttcgacgaccttggctggatccccgtggtgcccatagacaagcgcccggacccgggcaggctcggcggatgcggagtaggaggaggcggcaggtccgtgacagccagaagctgggagcagcccccgccactgccgggcgggggttcgcacccgccacagggtactgcagacccacatgctcgctccaaccaacacagagcctgacgctcgtgcc

SEQ ID NO: 760 - DNA, 2631 bp, Homo sapiens
  misc_feature (2619)..(2619): n equals a,t,g, or c
ggcagagccacagtgatagaatacgtgaagccctcagacctcaaaaaggacatgaacgagaccttcagggagaagttcccccatgtcaaactgacgctgagcaaaatcaggagcttaaagcgkgagatgcggagcctgtcggaggagtgcagcctggagcccgtgacggtggccatggcctacgtgtactttgagaagctggtcctgcagggcaagctcagcaaacagaaccgcaagctgtgcgctggcgcctgcgtgctgctggctgccaagatcagcagtgacctgcgcaagagcggcgtgaagcagctcatcgataagttagaagaaaggtttcgattcaacaggcgcgacctgatagggtttgagttcacagtgctcgtggccttggagctggccctgtatcttcccgagaaccaagtgttacctcattacaggcgcctcacccagcagttctagcagaggccccacagaaggctcagggcaccgaggtgcacttgccggcctgggaggtgtcccactgaagccccgcgcctcctcctgccagcacccccagcacctgctagcaggaggcacctggcctccgctggtgcagctttcctttttgcctctttgccatttccttggaaagagacgtcgctttcatccccaagtgcaccgtccctccgaggggatttctgagaattctcctgcatttttacataaactaaatgtgaggtttgttactggtatttttttcacgtgcctgagaccagcctggtaccaggaccttttgttcacagcgtgcagcagcgagccggctgcagtgygtctcccctggcctcgccttctgcaaaccaccgcagccaccacagcgtcagggtggagatctgggtttctagacctcactgaacacactgaaatggctgagtttaacttatttaggcattcatcttggagatgtggtttttcgggttccccagcagcatctcccgacaccaactgtgccgctggctccctgccacctgaagccgagctcctccagagctttctccgcccacctcactgcatcccaagtggagcttttggtgtccagttaggccagcgggagcagtctcctgatttattttgatctcattcttggactcttggacctctctgttcttcaagcatcgtgtcactgtgaaatcctaacgcccctgtgtcctacagaccgacggcacaacagacagctgcccatcccatgccatgctctaccctctgcctctcaccaggagacactctgggcctccaggacaattgctgcttgccggctcttatttttctaagcaatattgtgatggagaaaaataacatatttattgggatttggttttttgggtcttttttttttaagggaacaaaaaatggttaaatgaggtctgctgaagttgacttgaaaacacactkgaccctcaggcaggagggcactgaccacaccccacacaacctcaaagggtcagtgcgtcagtgccttttcttctgaggcaggaaacaggtgccatcttggccacctcggccagggcagcccaccatgctaaaaggaccccaaatggtggtcgttgtcccttctgtgcaggccagcagggccccatctctagtttttccacgtctgtctgaagttcttgcaacaaattctgcatggtccagcgctccagctagctgcctcatcaaaaacactgaataaccaaggactgctgagtttttcttcatggggggtcagctggtctcaaaactggccactgcctcagccaccaagctttttcctaccactaccttataaacctgcctggccctggaggggctctgggacgactttgtctctagcccattaatacaatacatcctatgctttctgtgcagactggtgcttccgcagaaaggagatgccaattctgctatcacagaactccaccagcaactccacccgaccccagcagtggtgcaggacagctgccagcacccacctggccctcctccttttccacagccactcactggggccaccaaaacccagagatggcaggtgtgtgggacagactggaggatgaggacaaaccaaagcctttgttctttcttattgtggagcgtccccttccatcaagcagcctgccctcaagccaaggatcatcccctggaacccagtatgcacccagaggggactcarcttcaaagctgctccaccatgctgggtcccaggcagctttcctctgaaaagcaacctctcctgccacccagatcccatctcaagagctcgcccatgttacgagcatgtaaaggactgacttcctagtaactgttgcagtttacaacctgccctccagggacacgtctccatggtttttyctacacatgaatgcgagaaatggctgataagcacagtaatttaagattgcgtattcatgtagtgagatttagtcattaaccaacccggtctttgtgatgtgtgaagccttcccttcagttatgtcccatttttatgatgccaaaagctgccactgtgtggtattcgaggattattgcaacaaagccagtagttaaaccaaaaaaaaaaaaaaaaaactcgagggggggcccggtacccaattcgccagagagtgncaatggcatcaa

SEQ ID NO: 761 - DNA, 2263 bp, Homo sapiens
  misc_feature (26)..(26): n equals a,t,g, or c
  misc_feature (589)..(589): n equals a,t,g, or c
  misc_feature (2141)..(2141): n equals a,t,g, or c
  misc_feature (2146)..(2146): n equals a,t,g, or c
aaccactttaaggaaactagaacagnattcaagaacacccatcacagtgcttaacaagatttaatgtacatttattcttaacatgtggaacatataaagattttatactgaataaatgatattcattaagccagaggaaaaggaggaatttacatcaagtttttttcttttttttttttttaaactacattatcttgaaatacaaatgtggattctcatcactgaaaaatctttgaagttgtgtttcttccttttagttgtatttttttcattttctcttttttgactgtactggtaaccattttctaaatcaatccatatataaccatttccacaccttgattcatgaagcaaattgtgatcagctgctctcctgaaatcgagcatgactttatacatacagaaacttgtacattaccctcttttttttttgtttttgttttttgtattttttctttctttttttggagatatggccctaatgaaaaaatatataaaataaaaataaaaaattatttaaatctaccatcacttcgtagttaccacatcatgaaaaagaaactaaaactttgtactaaaaaaaaaaaanaaaaagaaaagaaaaaaatgagggtatgtttaatgtacaacttctatatacatcacagcccataggcagtaaaaaaaatatttaaaaaatgatgaaaggaattgtgaagaactgtcacgtggaaggtcaaacgccgacagcaggcatgacgggagtggtgaggagcagtttccggatcgttgtcaggtatgtattctcaatcttaaaaaacattgtttttgctcccagcctaatggaaccatattcctgtggagaaaccagtatcatttcatagttttgactactgaccgacatacctccttgagcccctatacctgtatctgtagaaatttctattgcacagaactttgggtgatgggatgcagtttttttcattctctgaggagtaaaacgcataggaaatggataatttttcacctttttgactcagtgtggtgaaattttcgcatcttagcatcttttgccacaacttttttctttaaagtcaatttgcttcccccaaaaatgcaatacaacatgggaaagaacattaaaaagatctgtgaagaacaaaaagtgacctttgaatgcactagacagcaactttggttaaaaaaaagagaaaaaaaaaaccccaaaggatgtacttatacacacagacagcaaatattaatttcataactgttcaaattaattatttctttaattcccaattggtaaatagtgaatggggcagaggagcaaagattttcttttccttcttcctacgctggataaacaagaacagaaaacagccagttatatgtgaccctctaatcttcactcacacatgcttgccttctcacttatgtcataactgcccaatctgaaacagtacatcacagatgacagatgcaaccagagagttcaggacagctgatatcgagatatccagcaaccggccctcgtgcaaaaggaattccgagcggttttcgtccactctggccatggctagcaaagccttggccgccctgcacatcatgtctacgctaggtggttccaggggcgggggctgcatgtgcatgaggttgtgctggctctgctggtactgggccatcgtgaccccatcctctaggaagcttatcaagtttccaatgcttcctttctgcacagctatggcccttgctgctagtgcgtccccttgggcaaggttcgataaaagcgccatggacatttctcgacagactgggtttttgcgatccccaacgtacctaactaatgtagcatagaatttctcctgacgactaaatggaggagtggccaagatcaggtccacattattgtcctggatactgagtttacagagggtctccagcacaagtctctgaggcgacaggaccgagttgggtcccacagttggaaagggatcttgtgcctctgcagacgggcacaccatccagtgcagcaagccatccaaaattggcaagcagatgctttccgtgtaagcagacaagtctagctgcccggaaatgttggccaacgtgaccaacgtgttatccctcaagacctcgaggcagtcccaccaccactcatntttgntgcaggccacccccttgtcctcatcctcctctttctcataggtctgcggtgctcgctttctctctggatgctcgtggtgaagaagaatcagcttccccaggatcagcaccaggcctg

SEQ ID NO: 762 - DNA, 791 bp, Homo sapiens
  misc_feature (668)..(668): n equals a,t,g, or c
ggcacgagtggaactctcaaaggatccaatccttcctgccagacatcaggtctcttgtcacaatggatgcactccacttccagtcatgaaggccataagcagcacagatcacaaactttacctataattcgaggcaaaaatgcactttctaaccccaaactcttacagatgttagacaataccatgaccagcaactccaatgaaatagacatcgtgcatcatgtagacactgaggccaatatagctacggaggtttgcctcactattctggacctgttatccctcttcacacagactcatcagagacaactccaacaatgtgactgtcaaaattcattgatgaaaagggtctttgatacctacatgctctttttccaagtcaatcagtcagccacagcgctgaagcatgtgtttgcctccttgagactgtttgtatgcaagtttccttcagcgttctttcaagggcctgctgacctctgtggatcattctgttacgagtcctaaaatgctgtaaccacaggtcacggtcaactcagacagaagcctcagcccttctgtactttttcatgaggaagaattttgaatttaacaagcagaagtcaattgtccggtcccacttacaagtaagtgctgccaattttcattaatgctgttgttaaaaccactgnatctgtttcagcagtgcttaaagcctactgtcctcaggcaagccgtcactaactccttccaatagcgtcctccttaaagacgcccacagcattcagttcctgtttaataagtaaggggcacag

SEQ ID NO: 763 - DNA, 1062 bp, Homo sapiens
tgcagaagagttcgaaagtgaggtagaattcctttaagtgcagraagaagccttcaagttgtccaatcagcaagagtaagatgaccccatctgcaaactgggtgtccagattctgcacagacaggcccaggcggtccagcttctggttgacaaagttcacgatggcctctttcactgcgttcactttctccggagccagcttaaataattcatcaaagacgtcctttggaggctcgtccttgtctgtgctgtattcagtgagctgttccaccaacttctctgacttcagaccacttttggtgctctcgatagtgatgacctccacctgracgttggttgggagggagaggtcgggctggaagcgcttggccagggccacaaggaggtgcagggtagacaacaggtccttgttgaagatgctctccacgctccacttggcctgccactcctccagctgcagactccggttcacggcctccagcaccactgtgagcttgtgcttctggcttgtggctgtcagggcgatgtcctctgcttccagcttgagcgccgccagcytctggaataggtggtgtaggatgagcccgtcgaacatgtcctcytccaggctgcggaccacaatgtgctcggggagaagagtggcattgatccactccatcaacaccttctgcagttcttcaaatttggggtccttccgggaagtgggtggcaggtatttcttctttcctccttttgagagctcctcctccgctgggggctccacccccttggggagctgcagcaggtcgtacaagaactccggctccatcgcctcccaagcccaaccgctttccacgcaggaaaacaaaggcctactgagtgcaaagggtggtccctggattccgaatggaagcaagttccgggttcttctggggtcttcggggaccaggccgggaggcaggagccccgctgctcacttcctccaggcccgctcagccggcaggagcttcctcctctctggactctcggctgcacgcggaccgcgtgggtcgacccggaattccggacccggtacctgcacgg

SEQ ID NO: 764 - DNA, 689 bp, Homo sapiens
  misc_feature (635)..(635): n equals a,t,g, or c
  misc_feature (662)..(662): n equals a,t,g, or c
  misc_feature (670)..(670): n equals a,t,g, or c
ggcacgagctcggacattgaggtggagaaccggcccctgcctggccacacacagcttcgactgcctggctgccccacccccgtgtcttttggcctcctattttctgttgccttccccgtggatggagagcctgcatctacacgggcgacagttcgtcaccccttgatggggcagcctcttcccctcatcacagactatgctgttcagccacatgtgggcacgggggcagtgaaggtgactccagctcacagtcctgccgatgctgagatgggggcccgacatggcttgagccccttgaatgtcattgcggargatgggaatgacctctctctgcggggactggctgcagggtcttcaccggtttgtggcccgggaaaagataatgtctgtgctgagtgaayggggcctgttccggggcctccagaaccaccccatggtactgcccatctgcagccgttctggggatgtgatagaatacctgctgaagaaccagtggtttgtccgctgccaggaaatgggggcccgagctgccaaggctgtggagtcgggggccctggagctcagtccctccttccaccagaagaactggcagcactgggttttcccatattggggactggtgtgtctcccggcanctgtggttggggccatcagattccagnctaacctngttgttagaggaccatgtg

SEQ ID NO: 765 - DNA, 605 bp, Homo sapiens
tcaattactatttgactgactgactgaatgaatgaatgaatgaggaagaaaactgtgggtaatcaaactggcataaaatccagtgcactccctaggaaatccgggaggtattctggcttccctaagaaacaacggaagagaaggagcttggatgaggaaactgttcagcaagaggaagggcttctcacactttcatgtgcttgtggatcacctgaggatcctgtgaaaatacagatactgattcagtgggtctgtgtagagcctgagactgccattctaacatgttcccaggggatgctgatgctgctggccctgggactgcactgcatgcatgtgaagccctataggtctcagcagaggcccatggagagggaatgtktggctctggctgcccagggcccaactcggttcacacggatcgtsctgctccctggccagcctttggccacagcaccaccagctgctgttgctgagagagcttcttctctgtgaacatgttggctttcatcagccamcctggggaagcggaaagtaagctgccactawctttgtttccccacctcargcctcamawtttcccatggaaaaagggtgaatgtatataa

SEQ ID NO: 766 - DNA, 951 bp, Homo sapiens
  misc_feature (848)..(848): n equals a,t,g, or c
  misc_feature (856)..(856): n equals a,t,g, or c
  misc_feature (907)..(907): n equals a,t,g, or c
  misc_feature (926)..(926): n equals a,t,g, or c
gaattcggcacgagctcgtgcgccagaaattatagaagatttggccttctactctagtacagtagtatctctattgatgacctgtgtagaaaaagcaggaacagatgagaaaatgcttatgaaggtttttcgctgtttgggaagttggtttaacttgggagttttggacagtaacttcatggctaacaataaattactagcactcctttttgaggttttgcaacaggataagacctcgtctaacctacatgaagctgcttcggactgtgtatgctcagctctctatgccattgagaatgtggagactaacttgccattagccatgcaactttttcagggagtgctgacattggagactgcctatcayatggccgtggcacgtgaagatttagacaaagttctgaattactgccgtattttcactgaactatgtgaaacttttcttgaaaaaattgtttgtactccaggccaaggtcttggggaccttcgaactctggagctgctgcttatctgtgcaggccatcctcaatatgaggtagtgtttatgctattcaaaggccattattctccaagttgtgtgctgcatattatctatatttcattacctcgtgcccaaatttttattgttgagaaattacagtcttgtttttaattaatgtgatttcatctgttttggaatttttaaaaaaaattatatttgggtttctgcattgtgtccatttctgttttcttggcctcccaaagtgctgagattacaggcgtgagtcactgtgcccggscacctgcgtgtttttgtatgaaaaatkgaaatgcaagcaaaaggactggggtcaacctccacgtgtggntctgggcnagccatgaaaattctccctaactcagtttccccacccgtaaaatccatgangtcactactcctacttatnggtcaaaaatgccaaaaacccccaa

SEQ ID NO: 767 - DNA, 2385 bp, Homo sapiens
  misc_feature (2362)..(2362): n equals a,t,g, or c
  misc_feature (2364)..(2364): n equals a,t,g, or c
atattatcctgtacatgcaaatcactgaggagcagattaaagtatggacagccaacccccaacaatttgtagaagatgaagatgatgatacattctcctatactgttagaatagcagctcaagacttgttgctggctgtggcacagatttccagaatgaaagtgcagcagccctggctctgcmgcsactcgacatttacaagaagctgagcaaaccaaaaacagtggcactgagcactggtggaagatccatgaggcatgcatgcttgccctaggctcagtgaaggccatcatcactgacagtgtgaaaaatggcaggattcattttgacatgcatgggttcctgaccaatgtcatccttgcagacctcaacctctcagtgtctcctttcctcttgggccgggcactttgggctgccagtcggttcactgttgctatgtcccctgaactgatccagcagttcctacaggcaacagttagtggtcttcacgagacacagcccccatcagttcgaatttctgcagtgagagccatctggggttattgtgaccaactgaaagtctcagagagtacccacgtgctccagcccttcctccccagcatccttgatggcttaattcacctagcagcccagttcagctcagaggtcctcaacctggtgatggagaccctgtgcatcgtttgtacagtagaccccgaattcacagcaagcatggaaagcaaaatctgccccttcaccatcgccattttcctaaagtacagtaatgatcccgtcgtcgcctcactggctcaggacatcttcaaggagctgtcccagattgaagcctgtcagggcccaatgcaaatgaggctgattcccactctggtcagcataatgcaggccccagcagacaagattcctgcagggctttgtgcgacagccattgatatcctgacaacagtagtacgaaatacaaagcctcccctttcccagcttctcatctgccaagctttccctgctgtggcacagtgtacccttcacacagatgacaatgccaccatgcagaatggcggagagtgcttgcgggcctatgtgtcagtgaccctggaacaagtagcccagtggcatgatgagcagggccacaatggactgtggtatgtgatgcaagtggtgagccagctcctggacccccgcacctcagagttcactgcggcctttgtgggccgccttgtttccaccctcatctccaaggcagggcgggaactcggggagaatctagaccagattcttcgtgccatcctcagtaagatgcagcaggcagagacgctcagtgtcatgcagtccctgatcatggtgttcgctcatctggtgcacactcagctagaacctctcttggagttcctgtgtagcctcccaggacctactggcaaacctgctctagagtttgtgatggctgagtggacaagccgacagcacctgttctatggacagtatgaaggcaaagtcagctctgtggcactctgtaagctgctccagcatggcatcaatgcagatgacaaacggctacaggatatccgtgtgaagggagaggagatctacagcatggatgagggcatccgcacccgctctaagtcagccaaaaacccagaacgctggacaaacattcctttgctggtcaagatcctaaagctgatcatcaacgagctctccaacgtcatggaggctaatgccgctcgccaggccactcctgcagagtggagtcaagatgactccaatgatatgtgggaggaccaggaggaggaagaggaggaggaggaggatggtttagctggccaacttttatctgacattcttgctacaagtaaatatgaggaggattactacgaggatgatgaggaagatgaccctgatgccctgaaggatcctctctatcagattgatctgcaggcatatctcacagatttcctctgccagtttgctcagcagccctgctacataatgttttcaggccaccttaatgacaatgagaggcgagttctacagaccatcggcatctaaaaaggggagcctttctacatttgctccttctgggccagccgcaaaccattttgcagccctcactggccttgagatgcactttcttctcaacctaaagtggcatcttgacccttggcccttggcytcggcagtgacactgatgacaattcagaccaggytcaccggtgccgtcacttaggaatgctggaacaaaggacatttctcaaagttcccctgaagacatgccatctctagaaccttttttctccccgactctacccccacctctgttcctagagccctctgctggcgagtccagaaacattattgsccagaaggattatgngnttatggattattttgccccgc

SEQ ID NO: 768 - DNA, 1161 bp, Homo sapiens
  misc_feature (1058)..(1059): n equals a,t,g, or c
  misc_feature (1145)..(1145): n equals a,t,g, or c
  misc_feature (1156)..(1156): n equals a,t,g, or c
tcgacccacgcgtccgggcttatattcttctttatagtcttctgaacttggacaacaatttacttttatagttgtagaaaactgttaagctctgttggaacgcagttttgagaggaatcaatttgtgcagctcagttcggtactcatgtttgtttcccagcggtcacctttgtcccggtgtccaaggtgagcgggcaggcagaggtggacgacatcctcgcggcagtccgcccgaccacacgcctcgtgaccatcatgctggccaacaatgagactggcattgtcatgcctgtccctgaaatcagtcagcgcattaaagccctgaaccaggaacgggtggcagctgggctacctcccatcctcgtgcacacggatgctgcacaggccttggggaagcagcgcgtggatgtggaggacctgggcgtggacttccttacaatcgtggggcacaagttttatggtcccaggattggcgcactttatatacgaggacttggtgaatttacccctctctaccctatgctatttggaggtggacaagaacggaatttcaggccagggacagagaacaccccaatgattgctggccttgggaaggccgcggagctggtgacccagaactgcgaggcttatgaggcccacatgagggacgtccgcgactacctggaagagaggctggaagctgaattcggtcagaagagaatccatctgaatagccagtttccaggcacccagcggcttcccaatacctgtaacttttccatccggggaccccggcttcaaggccacgtggtgcttgcgcagtgccgagtgctgatggccagtgtgggggccgcgtgccactcggaccacggggaccagccgtccccagtgctgctgagctacggtgtccccttcgacgtggccaggaacgcgctccggctcagcgtgggccgcagcaccaccagggccgaggtggacctcgtcgtgcaggacctgaagcaggccgtggcgcagctggaggaccaggcctagcactggggccgcttcccaccccgcttctgggaagcccgtggcannggcacagggttgtcccttcaagtttccttcttgaagggcttgtgccaaggaatgactgtcttaatggcccccctctggcattttgntccttggaatngccca

SEQ ID NO: 769 - DNA, 670 bp, Homo sapiens
  misc_feature (670)..(670): n equals a,t,g, or c
gccactctgagctcacccttctgtctgcccgggccctaccccttcccctactctcacccttataatccttttcagcactaggtcttcccgtcacctccacctctctccatgacccggctctgcttacccagacccgaagcacgtgaggatccgatcccagttcctccaaggggcctgggtgctggggaggggtcaggtagtccagtgcgtccacctgtatccacctggggccctagctgggcccagctcctggacagtgtcctatggctgggggcactaggactgacaatccaggcagtcttttccaccactggcccagccctgctgctgcttctggtcagcttcctcacctttgacctgctccataggcccgcaggtcacactctgccacagcgcaaacttctcaccaggggccagagtcagggggccggtgaaggtcctggacagcaggaggctctactcctgcaaatgggtacagtctcaggacaacttagcctccaggacgcactgctgctgctgctcatggggctgggcccgctcctgagagcctgtggcatgcccttgaccctgcttggcctggctttctgcctccatccttgggcctgagagcccctccccacaactcagtgtccttcaaatatacaatgaccacccttctaaaaaaaaaaan

SEQ ID NO: 770 - DNA, 1351 bp, Homo sapiens
  misc_feature (1293)..(1293): n equals a,t,g, or c
  misc_feature (1301)..(1301): n equals a,t,g, or c
  misc_feature (1306)..(1306): n equals a,t,g, or c
cacgagtgtgaggggagagggagcagcctgcagggccaggcgctgaggatcacgcatcctgtgactctcccctgtcccccgccaccctctgaaccactggccaccatggctacttcaaagttgcccgtggtgcctggggaggaggaaaacaccatccttatggccaaggaaaggctggaggccctgcgcacagcctttgagtcgggtgacctcccccaggccgcctctcacctccaggagctgctggcctccacggaaagcatccgcctggaggtgggcgtcacgggcgagtcgggcgcgggcaagtcctccctcatcaatgccctgcgtggcctggaggccgaggaccctggcgcggctctcacgggcgtcatggagaccacgatgcaaccgtcgccctatccacacccacagttccctgacgtgaccctctgggacctgccaggagccggctctccaggctgcccggctgacaagtacctaaagcaggtagacttcagccgctatgacttcttcctgctggtctccccccgccgctgcggggccgtcgagacccgcctggccgctgagatcctgtgccagggcaagaagttctactttgtgcgcaccaaggtggacgaggacctggcggccacgcgcacccagcggccgtcgggcttcagagaggccgctgtcctgcaggagatccgagaccactgtgccgagcggctgcgggaggccggcgtggctgaccctcgcatcttcctggtgtccaacctctcgccggcccgctacgactttcccacgctggtgtccacctgggagcacgacctgccctcccaccggcgccacgctggcctgctgtcgctccccgacatctcgctggaggccttgcagaagaagaaggccatgcttcaagagcaagtcctcaagaccgccctggtgttgggcgtcatccaggccctgccggtcccagggctggcggccgcctacgatgatgcgttgctcatccactcactgcgtggctaccaccgcagctttggtctggacgacgactcgctggccaagctggccgagcaggtgggcaaacaggcaggtgacctgcgctcggtcatccgctccccactggccaacgaggtctcgcctgagactgtcctgcggctctattcccagtcgtccgacggcgccatgcgggtggcccgcgcctttgagaggggcatccctgtgtttgggacgctggtggctggcggcatcagcttttggcgctgtctacaccatgctccaaggctgsctcaacgaagaakggcttgargnacgcccancgtgntcccgcatcaaggscctggargatgacgagccccaaccggaagtc

SEQ ID NO: 771 - DNA, 2376 bp, Homo sapiens
  misc_feature (265)..(265): n equals a,t,g, or c
  misc_feature (474)..(474): n equals a,t,g, or c
  misc_feature (1846)..(1846): n equals a,t,g, or c
gcaaaaggctgaaggactcagctgtgctggaccagtcggccaagtactaccacctgacccacgatgagctcatcagcctgctcctgcagcgggagcgggagctgagccagcgggacgagcatgtgcaggagctggagagctacatcgaccggctgctggtgcggatcatggagacctcacccacgctgctgcagatccccccgggcccccccaaatagccttcctcaccctacccccaggagggttggcatggacctattgctgnctgccctctctcctcctgaactctctcatctgcagtggggcatcgtctgtcttgccttgtcactccttgctcctctccctcctgcctcaactggggctgctggaagggggccctctggattccctttggaggcatcaggttctgtgcacaacttgtgtgtctttgggagccctgggtctttcccacctgcctgktttcatatccctcanctttgggggccccagggaattggaactcttccccaagacagagcaggggtgaactgtagcttgatgcagtaatctgggacaagactggttgctagcacatactttattatcccccaaggatggtcagccatttcttcccacagccaaagccccatccccttcatttccctccagtccctggaggggcttctagtattactgggacaatgaccacgctgcctgtttgtctgtgagttacgggcaaccagcctcttcagcctcacacccattcccctgagagcaagaagcctgtgtggtctgggccagtctctgccatgtcctgagtctgcttcagtctggagctgtttgtggggcgagtgccatgtggacagtggtggatgatgtgtgtgcttcaggctgctccctgacccctctgacctttccacgagtgtcacatgggaatgtgtggggcgcaggggcgggtgcggagagagcacctttttgcttttcgagctcttgaccacctccaatgtgtaggtccctccaggctggggcttgggactgcttatgatttggggatcaagcctccatgtctrttcttgttgcctgtccagatgccaaaactctgtgttgctgcagggtttgaacttttggaaaccaattaaaatgtgcctttggtgggcggggtcaagagcccctggatgtcgacctctcccgctgtgtggcgtccccctcccacctgttgaatacatagggatggctctctcagggccctgggaatgggaatggacagcrctgctgtgggctgttcccctcccctaaagttaatctcttggtctggccaagttgctgctccctcaaccttcctgctgtcttcccctccctcaaccccaataggaggatcccaggataaacactgctgggcaggcgggcaggcaggcctggggctgccctgctcactctcattgtctggcctcaggacttagccatactagaccagtcagcttgcctggaagagggaggtcccactatgcctttgggagacacctatacttaggaaaaagcctttgttgtcctcccatccatccattaagctgctatctcagcctgtcccttctgccccaggggcttgcctggcttggctgcagtgcactttgaaatgaagtatctgtcctttggcccagcccctggtttgcttgtagaaaacatggtaggcttccccaaggcatctgcagggaactttggcagcttggggcaccctgaattagcaaaaatggggggtgatgaggtgctgaagaaggatacttaacagcttagtgaggaggcaagagctcctctgggaccaccacttcttcaggagagggcctgtgggcttgcttttggaaggcctcangcagacacgtgccctctgggtgatgtctgtctgctgccaggatggagcagaggagcgccacacatggaggaaagcccctgtaacgttacctaccttaaactccactcatcaaatctgagaaaagtatccactggtccccagggtttcagtcatgcttttgggggtcattgggtattagagaagtaagtatcttttctgagagagggggagtcaccccccctactggggattcctctgggctttattcactcccagccctggccctgacctttgtgggcctccctaatgcccagggcatggatggcttcagaggagtttttgaatcgaagcccagggtccttgttgatgtttcttctcckagccacacttggaggaaagttgcaggtgggttgggcagggagcaggcatggttctgctttgctgtttgtcttcctagttaaggctctttataaagagcttsttcttcatgttttaagcactttatgaagaataaaacattcatgtactgcaaaaaaaaaaaaaaaaaaaaa

SEQ ID NO: 772 - DNA, 977 bp, Homo sapiens
  misc_feature (970)..(970): n equals a,t,g, or c
gcatctacttaccgaggttttttaccaatggctgtggcgcccagctgtcttcctgctagccaggagcccatctcgctggccagctgcgccatggctgatctggttccagacttgcagcccattcttttctggatgtctaactccatcgagctcctgtactttatccagcagaaatgcccactctacatgcagagcatggaggagcagctggacatcacaggctcgaaggaatcgctgttctcctgcacgctgacggccagcgaggaggccatggcggtgctggaggaggtggtgctgtacgccttccagcagtgcgtctactatgtctccaagtccctgtacatctgcctcccggcactcctggartgcccgccattccagacggagcgccgtgagagctggtcctcggcccccgaactgcccgaggagctgcgccgcgtggtgtctgtgtaccaggcagccctggacctcctgcggcagctgcaggtgcaccccgaggtggcctcgcagatgctcgcctamctcttcttcttctccgggacactgcttctcaaccarctcctcgacaggggcccctccctgagctgcttccactggcccagaggtgtccaggcctgcgcccgcctgcagcagctcctggagtggatgcggagcgccggcttcggggcggctggagagcacttcttccagaagctctcctgcaccctcaacctgctggccacacccagggcccmsctcatccagatgagctggacagccctgcgggctgcgttccccgcactgagcccagcacagctgcaccggctgctgactcactaccagctggsctcggccatgggccccatgarcacctgggaaccaggggccmaggacagccccraggccttcargtcaraggatgttctggagtcctacgaaaaccccccacccatcgtcctgcccagcgacggcttccaggtggacttggaanccaactg

SEQ ID NO: 773 - DNA, 459 bp, Homo sapiens
gacccgccaacaagagggccacagtggcctgtggcaggaatgcaaccacggcatctgctccagcatcccctgccagaccacgctggcggtgactgtggcgtgcatggtgctggcggtgggtgtcggcgtggtgggcatggtgatgggactgcggattcggtgcgacgagggcgagtcgctgcggggccagaccacgagcgccttcctcttcctcggcggactgctgctgctgaccgccttgataggctacaccgtgaagaatgcgtggaagaacaacgtcttcttctcttggtcctatttttctgggtggctggccttacccttctcaattctcgcgggcttctgctttctgctggcagacatgatcatgcagagcaccgacgccatcagtggattccccgtgtgtctgtgactgcagcctgcctggggcagaataaaggaacggctttttttagcaaa

SEQ ID NO: 774 - DNA, 1110 bp, Homo sapiens
  misc_feature (280)..(280): n equals a,t,g, or c
gaagtgcatgagcaccagcgcgtcggcgctgctggcctgcgtgcgcgaggtgaaggtggcgcccagtgagctggcgcgcagccgctgtgcgctcttcagcgggcccctggtgcaggcagtgagcgccctggtaggcttcgccaccgagccgcagttcctgggtcgcgcggcagctgtgagcgccgagggcaaggcggtgcagaccgccatcctgggcggcgccatgagcgtggtgtcggcctgcgtgctcctgacccagtgcctcagggatctggcgcanaccccgacggggcgccaagatgtcggaccacagggagaggctgaggaactcggcctgcgccgtgtctgaaggctgcaccctgctatctcaggctttaagggagaggtcttcgcccaggactttaccgccagtgaattccaattctgtgaattagcaccccacccccataccccttcttccacccccagactaaaggaagatacttactctctgcccctctccatttataccaaagaaatcataggtgaaacccctaccctccccaacgttaaatgctcgagaggaatcttccacaaggcagggccatgcacgcaacctgcacacgcacttggagggcccaggtgtctctccaccagcccccatgcagtagggactggaagatatgtcatctgctggttgtgttatcactcccaccccctaccccagcccgtsttccggaatttctcaactaaatttcattattgggcaggaaggaggtcatgggttcatttcatttttgttttttgtgtttttaattaaaagaaaggttacctcagttttcactccttagacatggatgtagctacctttttttgtatgtctttttttttttaagcaatcgtgttgaattaggagtatacttggtgtggaaagagtatgaatttgccatgtgatttgcaaatggggggaagctactgtgagcgtgtgtttttttaatttacactatagagtgatttttttttcccccaacgtcaagtttttaccttgcatgtactggagtatttatttcatctattaaaatgttatgtttctcagaaaaaaaaaaaaaaaaaaaaaaaaaaaaaactcga

SEQ ID NO: 775 - DNA, 870 bp, Homo sapiens
tttttttgagagaacytgaacatttaatatggtcagcaccttgtaaggtgaaggtgtgttttttacacaaattataaataatgaaaaatatgcatttagaaaaagaagcagcagtccccttggcgggccggctcgaggactctttggttgagtggcaggtgaggccctgggtccagggtctgtcagagcccccctaggtcatctgccaggaaggccagcaggtagcggctgacatgtctgtcgatgatgacaggcgagaaaccgaggacgcgccgggtccctggcaggcccttggggtctggcggatagcagtacaggagcagggccagtcccacagcaaggcccaggccagccaggaagctcatgggtcccctgttactcagctcgccgctctggctgcccgagtctagctctgtgcaatctgagttctgcagagcgtggcggctgggcaggcggctgtgcaggggctgggcatggatatacagggctcggtagaactcctggcagtcccgctcamcgctccgctgcaggtggctcaggaggtcacaragccgcacacgcaaggatgccttggggttccggaacttttccgcctccttgttggtaaggatctgtgggtagtaacggttcagctggaggatgatcctgtccacctgctgctcactcaagcgcccatggcctgtcaggaaaggcgtgtcctgcaccaggcggtcacaataggtctgatctgtcatggcgacggacacagcgccgcccgcagtccccagcggtctgccccgccgcgcgtccgcccctcggtcagccgcccggtccaccagctccagcgatamgcccccggggccgtgctcgcccgccccttttggctaggcc

SEQ ID NO: 776 - DNA, 3167 bp, Homo sapiens
ttttttttttttttttttgacagatcttgacaatgtccttttaattgtactcttttcaaaaaatctcctttctcagttaaaaaagacaaggcatgatgaagacctgctctagcccatactgggsggtgatctcggtcctgggggaggccaggccggactcttccaaggcctcctccctgggcagtcccagcaatggggccagtggcagggcaggttctccctgccagaacccgatcctagcccttcagaaggactggacctctgtgtcccttcagtgggaagccaccttggacacacgcagtcattcaggtggacataaggccactcttctcgcccttgaccttgaggaactcagccatgctggagaaatacttctggttggcctcagccaccttcttctctgccgcctgtgggttcacaatctccaggccctggagtggggtgaaggccacgctggaggccgtgcccgaggagcggtcgcggatggtggacttcccgccatatacgacgctctgcttctgcagggtcgctgcagcgtcttggagatcctggccttggtggcctcgtttacctgtgtctgccgcacacgcccactgcccgacttgcccaggtggcccaggctgaatcccaggtcctcctggtaggcgtcctcctcgatctctccgaagctcatacggttggcctgcttccggatctccgtcagccccagccgctccttcatcttgcggtactgcggccgcctcgcttcttccgctgtccatccaggggcgcaggcagcggcttcacctgcttcacaggcggcggctcctgccacttgtcgaatttgcgctcgatctcatccttcagttcgtagcccaccttcccttctgtgctctcgtggaaactgtccacacgggctgccagtgtgcacttggcggccaccagccgggccgctttccgccgcagatccggtggcagggactgcacgatgtcactgtggtagatgtagccggtgtggggcagcactgaggtagacgagaagcccgacagcgtcttgcgctgggccccgagcagcatgatgttgcaggcgggcatcttggagaggttggtcaggccgccggccacacccatgatcttggcggccgtggatgccccgataatgatggacaggttgggtgcgatgaaggacatccgggactccacatactcgtagatgcggtgcttggaggcgttcagctccagcgccatgtcgcaggcctcctccagccgctccagctcctcctccgacagctgctgcccctgggtggtggaggcggtgacgctgacgaccatgatggtggcattggtgaggatctgctgcaggttctcattgttcttgcacttgtccaggctgttgcccagctccttgaccgtgcggatgtaatccagtgcattggggaccaaggactccagttcagggaatctctttgagtacttatcccggatgaacttatggatgatgttcagctcgttttcgatctccacggtcaggttgttggcatccacgatgacgcggtattcaggcgcggcctccactggtcccatcacttctgaagctttggcttgcttgctgatatactcctcaatcttcatcataatctcagcaaacatcttactatcccatagcttggcgatggtcttgactgaatccccggaaagatccagctgtgtctcctcctgcacatcctcgatcgctggctcctcttcttcctccccatagcttcctccttcctcctcttctgctgcctcttcgagatcagctaagagctcatctgccagagacatcccgaggcctctcctctccgcgcaccactgtttctagcgttagtcgctcaccgatgacgtctcactctcgcgccgttatagaggcaaagctactctctgattggtccccgctcgcgatgttcctggccgcatttgaaacaacaactttattagcacctggcactaggcggagagargcggtaagccgcgaggaggaaagggactcacgtcccgctgtggaccgatcctgctaagcagagaatcgctgtggccggacgacggggcgtcgagacaagaagaaagacgttggcaactcagaggactggttgcggcgttagacaagaaagcaaggcctttaagcagggattcggggtggacgtgggggtgggccgaagcgaaccggaaacaggaaactacaactcccacaaggcctagggccacgtcccgccgtcctcggctgctgagcctgatgggacaagtagttttgcgaacggcttaacctacagattgaagaggtcggaagctctgaggcccggggcttccggaggtcgcggagatggaattggagcagagagaagggaccatggcagccgtgggctttgaggagttctcagcgccgccagctcagagttggcgttgcctcccctatttggtggccacatcctggagagcgagctggagacggaagtggagtttgtgtcaggtggtctgggcggctcagggctccgggagcgagatgaagaggaagaggcagcccggggtcggcggcggcgccagcgggaattaaatcgcagaaagtaccaggcactaggtcggcgctgccgggagatcgagcaggtgaacgagcgggtcctgaacaggctccatcaggtgcagaggataactcggaggctgcagcaggaacggaggttcctcatgagagtgctggactcctacggggatgactaccgggccagccagttcaccattgtgctggaggatgagggcagccagggcacggatgcccccaccccaggcaatgcggagaatgagcctccagagaaagagacactgtccccgcccagaaggactcctgcacccccagaacccggcagcccagcccccggtgaggggcccagtgggcggaagaggcggcgagtgccacgggatggacgccgagcaggaaatgcgctgactccagagctggccccggtgcagattaaggttgaggaagactttggctttgaagcagatgaggccctggattccagttgggtttctcggggtccagacaaactgctgccctacccgaccctggccagcccagcctctgactgacgcatgcccaataaactgaccccacactcaaaaaaaaaaaaaaaaaaaaaaaaaaaaaaaaaaaaaaa

SEQ ID NO: 777 - DNA, 742 bp, Homo sapiens
gttttactgtttacaatgtggtttaatgagaattggaactagccctactattagcagacagcatcagggcggaggcccccagcccagaccccatggtcttccccatcccgaagtgggatggatttcctcatctgcatacacagcacttcgtcgatataaatggtgttctctttgacctggatctcctcctgcagggcaagctgtctgcgatgcagccctttcagctctgcctgagcttgggctaaagtttccttcaatcttgcgacattgtgggtgatctcttgaacctccttcattagcctatattgtgcgacatcacgacacagctccacgttcggccggtgtgtcctggtctccaagcgcgtatgagccaccttggctggcccttcttggtcaaggatggccttttcaagagctgtaatatttttctcctgggaagcaatctcttccatgaccttggccagatgatcagccagcttgtccctggcatcctttgtatccttcagcccattcttgaatgccgtgtccaccacatcacactgcttgcrcagatcattggctgtctgggacaggattcgatccaccagggctttcagcatcagggagttgttccgctgcttgtcagccttctccacattggtgctggagaagtccaaccagtcttccagactcacggagtttggctcaatcctcacggcgttctcagaatatctgatgtttggtgagttgttgttgagcgagc

SEQ ID NO: 778 - DNA, 1296 bp, Homo sapiens
ctccaatccaccacacacsagccttacccctctgctggcaagaggggacctgattcatcctcacgctaaacactcattctacccaactgattgagacagaacagaagataaactgaaacttctctgccttcccgctgcaagagtgaatgagcgatccctctcaactgactcaaaatgtttgcctcacccaggagatggagctctcgaaggccttctctggccagcggacactcctatctgccatcctcagcatgctatcactcagcttctccacaacatccctgctcagcaactactggtttgtgggcacacagaaggtgcccaagcccctgtgcgagaaaggtctggcagccaagtgctttgacatgccagtgtccctggatggagataccaacacatccacccaggaggtggtacaatacaactgggagactggggatgaccggttctccttccggagcttccggagtggcatgtggctatcctgtgaggaaactgtggaagaaccaggggagaggtgccgaagtttcattgaacttacaccaccagccaagagagaaaatcctatggttatccctgggaacgcagatcacctacatcggacttcaattcatcagcttcctcctgctactaacagacttgctactcactgggaaccctgcctgtgggctcaaactgagcgcctttgctgctgtttcctctgtcctgtcaggtctcctggggatggtggcccacatgatgtattcacaagtcttccaagcgactgtcaacttgggtccagaagactggagaccacatgtttggaattatggctgggccttctacatggcctggctctccttcacctgctgcatggcgtcggctgtcaccaccttcaacacgtacaccaggatggtgctggagttcaagtgcaagcatagtaagagcttcaaggaaaacccgaactgcctaccacatcaccatcagtgtttccctcggcggctgtcaagtgcagcccccaccgtgggtcctttgaccagctaccaccagtatcataatcagcccatccactctgtctctgagggagtcgacttctactccgagctgcggaacaagggatttcaaagaggggccagccaggagctgaaagaagcagttaggtcatctgtagaggaagagcagtgttaggagttaagcgggtttggggagtaggcttgagccctaccttacacgtctgctgattatcaacatgtgcttaagccaaaaaaaaaaaaaaaaaaaaaaaaaaaaaactcgagggggggcccggtacccaat

SEQ ID NO: 779 - DNA, 3751 bp, Homo sapiens
  misc_feature (2279)..(2279): n equals a,t,g, or c
gcatgaacgaaatgtggatccttcacctgtgggtgagtctaagcaccgcccaggtcagtcttcagctcctgctcctccacctcgtcttaacccctccgcctcctcgccaaacttttttaagtacctaaaacataattccagtggagaacaaagtgggaatgctgtgccaaagagcatctcctaccgtaatgccctgcggaaaaaacttcattcttcttcctctgtgccaaattttctaaaatttctggctcctgtagatgaaaataacacctctgattttatgaacacaaaaagggactttgaatccaaagcaaaccatcttggtgattctggtgggactcctgtgaagacccggaggcattcctggaggcagcagatattcctccgagtagccaccccgcagaaggcgtgcgattcttccagcagatatgaagattattcagagctgggagagcttcccccacgatctcctttagaaccagtttgtgaagatgggccctttggccccccaccagaggaaaagaaaaggacatctcgtgagctccgagagctgtggcaaaaggctattcttcaacagatactgctgcttagaatggagaaggaaaatcagaagctccaagcctctgaaaatgatttgctgaacaagcgcctgaagctcgattatgaagaaattactccctgtcttaaagaagtaactacagtgtgggaaaagatgcttagcactccaggaagatcaaaaattaagtttgacatggaaaaaatgcactcggctgttgggcaaggtgtgccacgtcatcaccgaggtgaaatctggaaatttctagctgagcaattccaccttaaacaccagtttcccagcaaacagcagccaaaggatgtgccatacaaagaactcttaaagcagctgacttcccagcagcatgcgattcttattgaccttgggcgaacctttcctacacacccatacttctctgcccagcttggagcaggacagctatcgctttacaacattttgaaggcctactcacttctagaccaggaagtgggatattgccaaggtctcagctttgtagcaggcattttgcttcttcatatgagtgaggaagaggcgtttaaaatgctcaagtttctgatgtttgacatggggctgcggaaacagtatcggccagacatgattattttacagatccagatgtaccagctctcgaggttgcttcatgattaccacagagacctctacaatcacctggaggagcacgagatcggccccagcctctacgctgccccctggttcctcaccatgtttgcctcacagttcccgctgggattcgtagccagagtctttgatatgatttttcttcagggaacagaggtcatatttaaagtggctttaagtctgttgggaagccataagcccttgattctgcagcatgaaaacctagaaaccatagttgactttataaaaagcacgctacccaaccttggcttggtacagatggaaaagaccatcaatcaggtatttgaaatggacatcgctaaacagttacaagcttatgaagttgagtaccacgtccttcaagaagaacttatcgattcctctcctctcagtgacaaccaaagaatggataaattagagaaaaccaacagcagcttacgcaaacagaaccttgacctccttgaacagttgcaggtggcaaatggtaggatccaaagccttgaggccaccattgagaagctcctgagcagtgagagcaagctgaagcaggccatgcttaccttagaactggagcggtcggccctgctgcagacggtggaggagctgcggcggcggagcgcagagcccagcgaccgggagcctgagtgcacgcagcccgagccacgggcgactgacagctctgcaggagagattgcaacaccatcccacactgtccaggccttaactgagagggacagaagacgctggaaggagagaaggaagcgggaagtgtgcttctcagggaggaaaccggcttgccagcaagtagattcttacgaactccaacttgcaattcagggggcatgtcccagtgttttttttgttgtttttagatactaaatcgtcccttctccagtcctgattactgtacacagtagctttagatggcgtggacgtgaataaatgcaacttatgttttcttgttggttcctttttgagtgtcactgtgtttgtaaagagcattcacaatacggtggaatttcaaaagctggaagagctcgagatcatgcctcargcaaaggcngtgggtccatcgttcttccgagagggtttgtgtggcgactacaccctcagcgtccctggcaaggtgcagtatgtctcgcccattcttgttatggaaacctaagatgatcattgggaagatcagtgatcttgggtcattgatccctggctcagaggatagcggtttccatcataaaccaagatgatgagttcagcctttatccctcgtggttccactagatgtaacttaaaggagttaacatttgaggactttgttctacatcagattttactatttgaatgtttaagatcactttattgaatttgaagatcatcaaattaaataaaatgatttatttaatttggatatcctgatcactgtcaagtgaaatggatctctctctttggtatttaaggaagtttgtctttaaaaaaaaaatagagtgttttcatacatttttgcttatcccataagtacagttgatcaaagtcatagtaggtaaatgctttatgggacagctgacaccttttagaccctaccaggtattgctagcatgtgagctgcagttgtggggtctgagatatttctttgtggtagtttcatacccatactatagagtcatgtatttatttttscctgttgtgtgatgtaatgcaatcatgttcctttgagtctccatcccttggaaatctgacttcttgcagaaggagtaggcacatcaagatattcaggggtgccccaagagtctgggactttcaaaaaaaaaagatcaggctgaaactgcagtcagatttatgacagctgacagtttttcagaggtcgcacacagtgactctcctctctcaggatgacgaggacctgtgccttcaacaagcaaaatgctgctcacggttgtcctgcttgcagccagtcactgtgtaaagcctctctgatgtgcacttaagagtgggttgctttctcacaaagatggggttctgtgcagtcacaggtcacttccttgacaacacaatcatttctgatctttatcactgtaaccacgtcttctattccataggagtttcttttgattctctcagttgcgggggcatctcttaatcctggggtaaaaggagagattgccatacttagactcactgtgagtctccccggccatttcacgaggagaccacagtgctgccaccagtgcctaaacaggtggctggcattcgagacttcctcctgttccctgggtcagaggatagcggtttccatcataaaccaagatgatgagttcagcctttatccctcgtggttccgctagatgtaacttataggagttaacatttgaggactttgttctgcatcagatcttactatttgaatgtttactgttggattttgggcatcttattactgttactcaaaaacattgactctgcatcaagaaagaaacaagaaagcaataaaacaagaaataattcatgctcacaaaaaaaaaaaaaaaaaaaaaaaaa

SEQ ID NO: 780 - DNA, 498 bp, Homo sapiens
  misc_feature (495)..(495): n equals a,t,g, or c
gaaatttagaaactgtatgtatagcttcatgtttttcataaaataggaatgaggacaaatgttgctcttcatcctaccagctgtttgttctttggtaggggatcatgagtggaaaaacaaaggcaagaagggctgccatgttttttagacgttgctctgaagacgccagcggtagcgccagtggcaatgctttgttatcagaggacgaaaatcctgatgcgaatggggtaactcgatcatggaagattattctaagtacaatgcttacactgacttttcttcttgtaggactcctaaatcatcagtggcttaaagaaacagatgttcctcagaaatccagacaattatatgccataattgcagaatatggttcaaggctttataaatatcaggccagacttcgtatgcctaaagagcaactggaacttttaaagaaggaaagccagaatctggaaaacaattttcgtcaaawtctatttttgatcgaacaaatanatg

SEQ ID NO: 781 - DNA, 589 bp, Homo sapiens
ggcacgagctggctcagggctacctccttccgcctaggacccccccttcggggcaagatggcctgtcggagccagagggcatctctctgaagcgggtcgctgtggtggaagatttctttgacatcatctactcgatgcatgtggagagctcagcggagccaggcaaagcccccaagcacgctgggcagaagaaaacctaccgagcgatcgcagagacctatgccttcctcccgagagaggccgtgacccggttcctgatgagctgtacggagtgtcagaagaggatgcactttaactccaatggcctggaacccaaagaaaacgagcctccatctccactggtctctgggattattgattacaacatgcccctcacctccacctacctgaagcagatgaagcttcgagtgatgaattcccaggagcagccatcctcactgtctccggcacctggcttcgtaaacactgttatcaccgtgctcatctgtgcccatgaagaatgaagcacaaaaccgcacaaacagccggaagcacagccccctggttttgtttcatacagaatggcactaaatccaggtcaccactaaaa

SEQ ID NO: 782 - DNA, 1493 bp, Homo sapiens
  misc_feature (22)..(22): n equals a,t,g, or c
  misc_feature (37)..(37): n equals a,t,g, or c
  misc_feature (1352)..(1352): n equals a,t,g, or c
  misc_feature (1451)..(1451): n equals a,t,g, or c
tttttctcttctctaacgatgntgaatcctctgaganagctctttaagctgatggcctctctgtttctgtcggtgttcacacttggccttccctttgccctctttcagtattatgcctacacccaattctgtctgccaggctcagcccgccccattcctgagcctttggtacagttagctgtagacaagggctaccggattgcagagggaaatgaaccgccttggtgcttctgggatgttccactamtatacagctatawcyaggatgtctactggaatgttggctttttgaaatactatgagctcaagcaggtgcccaattttctactggctgcaccagtggctatactggttgcctgggaacttggacatacgtgaccactcacccttggctctgcttacacttgggctgcaaaggagcaagaacaataagaccctagagaagcccgatcttggattcctcagtcctcaggtgtttgtgtacgtggtccacgctgcagtgctgctgctgtttggaggtctgtgcatgcatgttcaggttctcaccaggtttttgggctcctccactcctattatgtactggtttccagctcacttgcttcaggatcaagagccgctgttgagatccttaaagactgtgccttggaagcctcttgcagaggactccccaccaggacaaaaggtccccagaaatcctatcatgggacttttgtatcactggaaaacctgttctccagtcacacgatacattctaggctacttcctgacttactggctcctgggactactcctacattgcaacttcctgccttggacatgacctggactctccagggacaggttggaagccaacttaacccaggggtctgaaagtaaaaatacacattggaactgcctctgctgccctgggatcattactgtgtccattataatctttctctttctctttgaaagctggtcaggaatgggagaagtgtcagacactagagagccccttctggtcctggctagggcaaattttagacaactattttctctgtaagtgaagattgtcgtattccaagtctaaaatacacctggatctgtctagtcaatcaacatagcagagacagtcttaaacctaccattgacctgtgtgtaaatttaaatgtcaatttattgaagtgtaaatttcatcaaaggcattagctgacaggctggtaacagtccacacaagatggtataggcctgaacagtgtagtggcagtaataaagtgggaccattttttccaaatgcgcatgttctgatgtttttatgatgtgaggatttattgaaaactcaagttcgatactctcagtacatgaaaaaaaanaagaagaaaaaaaaaaagtttttgccgggtcctttggttcttcctgggtctgggctcgcctagggacctcgggatggccgcctatcgagggctcgcggnggcggtccggtgtttgcccagggtccaaggtctgtccgcttg

SEQ ID NO: 783 - DNA, 563 bp, Homo sapiens
  misc_feature (437)..(437): n equals a,t,g, or c
tgaatagcaagccaagaacttcagaatttaccttctaatgaacaagaaccagtgaagatttatgatgtggtaacatgaccaaagtatatttacaagattatgctagtcatgcttgcaaatagtttcaagtggagagaggtataagagaaattagggaaatatggtagaaatctgactattcagcaagaatgctgtggaaatgaaagatgcagaaaccaattggccaagttatatcaaatactctgagcacttcataaatacttgccagtcatatccaggaaaacacatatttatcttccagataatgtggttggggtatctggtarttttaaactttggttatgtctgtctgttcccyaggcyccgaaatatycactacctctttaatactgscctcttccttatcgcctggsgccttctcattgcaagatctcagntggctcggaatgtctggttcttcattgtaagcttctgttataaattcctctcctactttagagcatccagcacgctcaaagtttaagagcatttagccatcgctttttatctggaacctctcagat

SEQ ID NO: 784 - DNA, 1303 bp, Homo sapiens
aattcggcacatggggagaaatggtggtgcagcaagagagcaggaacctgaacattgccatcataaggccctccattgtgggagcaacttggcaggagcctttcccaggttgggttgataatataaatggacctaatggaatcattattgcgactgggaaagggtttcttcgggccataaaagctactccaatggctgtggcagacgtaattccagttgatacagtcgtcaatctcatgctagctgtaggatggtatactgcagttcacagacctaagtcaacattagtctaccacattacatctggtaacatgaatccctgcaattggcacaaaatgggagtccaagtcttggcaacctttgaaaaaatcccatttgagagacctttcaggaggccaaatgctaattttaccagcaacagcttcacatcacagtactggaatgcggtcagccaccgggcccctgccattatctatgactgctatctgcggctcactgggaaggaagcccagggatgacaaagctcatgaatcggcttttaagaactgtttccatgttggagtatttcatcaaccggagttgggaatggagcacgtacaatacagaaatgctgatgtctgagctgagtcctgaagaccagagagtattcaactttgacgtgcgccagttgaactggttggaatacattgaaaattatgttttgggagttaaaaaatacttattgaaagaggatatggctgggatcccaaaagcaaagcaacgcttaaaaaggctccgaaatattcactacctctttaatactgccctcttccttatcgcctggcgccttctcattgcaagatctcagatggctcggaatgtctggttcttcattgtaagcttctgttataaattcctctcctactttagagcatccagcacgctcaaagtttaagagcatttagccatcgctttttatctggaacctctcagatacctctaaaacagcaaactgtgattctcaagattagaaagtaacaaggaatatgcccaaactgtcaaatgtcacctgttatgtattcgtccctattccttaactatgtatttttatttcagtgagagaaggaaagttgtaaactagcccatagtcacctatattttagggaaaaaaatccaaattgtttcctaacattctattttatgcccttgcgtattaaacgtgaaagtactcccacttttctatatttagtttgtcttgtctcttctgtggatgtttcattttaaacttcagttaaatatggaaagaatgcatgggcagaggctg

SEQ ID NO: 785 - DNA, 2242 bp, Homo sapiens
tcgagtttttttttttttttttttttttttttttttttttttttttttttttttttttttttttttaggtgtcatttttactttatttaaggaaaaaagggtggggggacaacagtaattttcataatacacagtagacaagttagcactgcaaaaaaaagggctgtgtacttgccaccagtctgctttgcagcttttataattagtaaatttaatgcagtttgtcatttgtattactatttagcaaattaataattggcaaaattagggtaagtgtgctacaactaagacgaaaacctaaataacccataaaaagtcacttaaaataaaccataaatatgtggtgcgcattagtgtaacaaaaccatttttgtaaacattttctccaacgtaacatgtgcatgagaaaagagtaaaaaacactgcactcaatacagaaagggttactctgattttaatacagaaaggttattacttgtgaaagctctgactaaacctagagacatttttgktttgtttggaagagcactcctctaacagttcaatgttccttatgtaatggtgtcattgcaatactgttttcttgtgtaattttgccatattggcacttctgtggagaagttactaccctgtaaaaggggggaaaataattcctttcctaaaagaatctaaacatttcgacgactcccaatctttaacggagaaacttcactgggtccctgcatcaagctatagcaactcaatctggttgacaagggggtgaggctaagacgggaaggaaaaaagccaagtaaagcacagaccaggaagcccccgccgagaaggacaaagggtgttccaatttcagtaacttaagcccaacaatggattcaattcagttcaccacaaacaccaccagagtgcccaccgggtgcctggagctgcacaagcaagccaagcacaactcggtgtgagctcagacccctttaccacctatgggaaagccagcaagttctaagcacttggtaattcccaatgaaacaccatttgcatttttttttgtgtaacatttgacttacagacatggagcttcaagtctttggataatgttaagaccattatgccacatcctttgttctctgccttctcccacttagcatcagacattgagcatttcttcaaagacatctgcccaccttttactgttctccacctgtgcctttccttcttctcttgatatgtacacgagtgtgttcactgtggcatgtttcatcttatgaaaagcctaaacatggatataaattacaagcaggaatttaattctaactaaagtcctgtggcgatggaatccagcctacctcaaatccctttaaaggtaggattaatttttcaaccttctctaggttaactacaaaccagtaggcggctttggccttcagcactgctccaaactcatacaaatgaaacatccatttccatcttcttttacttccccaaaaagtaagcttctcagcttgtctttacaggtatacacaaaaccaccagctgctgtgtctgcattcatgagtggatgtacttgtcttaccagatgtttgtagctcaaaggagggcctttttcaaaaagatggaaccaggaacaggaaactgacaagaggtcagagtgggtgccaagtgggatgggaagcaaacaggtacaaatggctgctgtgtttaggtgggtgggagcagagggaaaatcccccattttcacaatatacaggaaaattaaccacaaaggaaaaagatcaagcctaaaaaacagcaagtttcttttgatgactgaggttaaagcagccataatgcagttatttccactcagaactcgacaagaggaaagtaagatggcaggactgtgacatggagtcctgatcctttcctgagacggtaatatccttacgggagcttgagtgatgaccatgaagccatgaaacaaattctttctcaagacatttattacaaatgtcatgaatatattcataaagtaaaattggtttaaaaaaacagagaacaagagagcaagtgagaaaacgagaaaagccaggacttcgatattacacctaaaacasaggatgcccactttatgaataagcagaattaactacattcttaaaayagttttagtgcattgcatttttagaaaagggaaactcccccacccccaagaaaaggttcctgcaacactgaacagtttgtgtgactattctaatgtaaccacctgtctgct

SEQ ID NO: 786 - DNA, 1077 bp, Homo sapiens
  misc_feature (117)..(117): n equals a,t,g, or c
  misc_feature (189)..(189): n equals a,t,g, or c
  misc_feature (694)..(694): n equals a,t,g, or c
  misc_feature (1046)..(1046): n equals a,t,g, or c
  misc_feature (1061)..(1061): n equals a,t,g, or c
tcacccagtgaagacactgtaagtctggaggtaggggacagcaatcagaggccctttggtcactgcacagttcctttaactgcaaccctaggctggcctgacccagctgctgcaggntggggaggggccatgggagggggtcagagcccacagcaggactgttgcataatccttggggcctggcttggnaatccaccctggttctgaagtttgtgctttgtgtctggttccttccttttctgccttctctcctgctttctagctctgggctttcccagctccgaagtcaatactgagatcccagatgtgtccagagacatcctgaagaggctcgggggtggaggagccttagtgtgtccacaaagggactcctgaaactgactgagagccagtggatttgccagcagtctgagcttctaccgagtcttcccccacctcaatccctgttgctatggagactaccaatggaacggagacctggtatgagagcctgcatgccgtgctgaaggctctaaatgccactcttcacagcaatttgctctgccggccagggccagggctggggccagacaaccagactgaagaraggcgggccagcctacctggccgtgatgacaactcctacatgtacattctctttgtcatgtttctatttgctgtaactgtgggcagcctcatcctgggatacacccgntcccgcaaagtggacaagcgtagtgacccctatcatgtgtatatcaagaaccgtgtgtctatgatctaacacgagagggctgggacggtggaagaccaagacacctggggattgcgtctggggcctccagaactctgctgtggactgcatcaggtctcagtgtccctatctgtaagatcaacaagaaacacggttaagggaggtcgtcactggggtgggagaagaggggctggtagaccgaagccttgtgcataaggattttttcccaggaaaagatagactttataaacagtgggagcccatgaacaaacatataaaagtagcaacagataatgaccaataactggttcantggctggagtattangggcctggggattgga

SEQ ID NO: 787 - DNA, 569 bp, Homo sapiens
aattcccgggtcgacccacgcgtccggctgaggcgggtggcatggcggagaaggatgacaccggagtttgacgaagaggtggtttttgagaattctccactttaccaatacttacaggatctgggacacacagactttgaaatatgttcttctttgtcaccaaaaacagaaaaatgcacaacagagggacaacaaaagcctcctacaagagtcctaccaaaacaaggtatcctgttaaaagtggctgaaaccatcaaaagttggatttttttttctcagtgcaataagaaagatgacttacttcacaagttggatattggattccgactcgactcattacataccatcctgcaacaggaagtcctgttacaagaggatgtggagctgattgagctacttgatcccagtatcctgtctgcagggcaatctcaacaacaggaaaaatggacaccttccaacacttgctccctggcaacccctaatatttgggatctctcaatgctawttgccttcattagcttgctcttatgcttccacttggtggattgtgtctcctggctggtatgggg

SEQ ID NO: 788 - DNA, 858 bp, Homo sapiens
  misc_feature (634)..(634): n equals a,t,g, or c
cactatcgaagtagcctgcagtaccggtccggaattcccgggtcgacccacgcgtccggcgggtggcatggcggagaaggatgacaccggagtttgacgaagaggtggtttttgagaattctccactttaccaatacttacaggatctgggacacacagactttgaaatatgttcttctttgtcaccaaaaacagaaaaatgcacaacagagggrcaacaaaagcctcctacaagagtcctaccaaaatacctgggatatagtaatcactcaatgaatataaactgcacttactggcatgctcaaggratgggctattaagcaaggtatcctgttaaaagtggctgaaaccatcaaaagttggattttkttttctcagtgcaataagaaagatgacttacttcacaagttggatattggattccgactcgactcattacataccatcctgcaacaggaagtcctgttacaagaggatgtggagctgattgagctacttgatcccagtatcctgtctgcagggcaatctcaacaacaggaaaatggacaccttycaacactttgctccctggcaacccctaatatttgggatctctcaatgctatttgccttcattagcttgctcgttatgcttnccacttggkggattgkgtcttcctggctggwatggggagtgattctatttgtgtatctggtcataagagctttgagattatggaggacagccaaactacaagtgaccctaaaaaaatacagcgttcatttggaagatatggccacaaacagccgagcttttactaacctcgtgagaaaagctttaccaccatgcaggaacagacttttggtgatgaggaggaag

SEQ ID NO: 789 - DNA, 1485 bp, Homo sapiens
  misc_feature (158)..(158): n equals a,t,g, or c
  misc_feature (749)..(749): n equals a,t,g, or c
agctggcatcaggggccggcctggaggtcagcgtgcagggcccgttcctgagtgtgtccgtcctgctgcctgagaagttcctcacccacacccacggcctcctcgggacactcaacaacgaccccaccgacgacttcaccctgcacagcgggcgcgtncctgcccccaggcaccagtccccaggagctgttcctgtttggggccaactggaccgtgcacaatgcgtcctccctgctcacctacgattcctggttcctggtccacaacttcctgtaccaacccaagcacgaccccaccttcgagcccctcttccccagtgagaccaccctcaaccccagcctggcacaagaggcagccaaactatgtggggacgatcatttctgcaactttgatgtggcagccactgggagcctgagcacgggcactgccactcgggtggcccaccagctgcaccagcgtcgcatgcagagcctgcagccagtggtgtcctgtggctggctggccccacctcccaacggacaaaaggagggcaacaggtacctggcgggttccaccatctacttccactgtgacaacggctacagcctggccggggcagagaccagcacctgccaggctgacggcacctggtcctcacccaccccgaagtgccagccaggacgcagctacgcggtgctgttgggcatcatctttgggggcctcgcggtggtggcggcggttgcgctcgtctatgtgctgctgcgccgcangaagggcaacacgcacgtytggggtgcacagccctgatgggagcagcttggctgtgagcaccaggccaagactcctgagaacaggcagcccagtcctgcgactyccgcatccccaggaccagacacctgggacctggatacttgatacctgggcatttaaccccctactctgtcatctcagaccccaggcaggaggcccagtgttccaacacccaagccccgtgctagcagcgctccgtgctcttccccaaatactcacggctctaattccccaaacctgaaacttcataccctgggattctaatacctatgtcctgagccctgacactcccacacctgagcctcagattccaatagctcactccctagagcctgacgccggggcccctgacccctgagcctcagattccaatacctcactccccagagcctgatgccggggcccctgacccctgatctacggaggcctgctcccggaccgtgcgggcaccagtgcagtgctgccttggttcctggacccctgggcccatcctgggaccccagatggggtaaggagaggccccagaaccccaaagcagacagcgagacccccagcggcagaggcctccctcggcactccaggcttataatttcgaactcttctggaaggtcactcaggaacaccctccctgcctgtgcaaagagaaaacaagcgccttgtttccttmaaaaaaaaaaaaaaaaaaaaagatttcgg

SEQ ID NO: 790 - DNA, 977 bp, Homo sapiens
gcagattgggccttgcgatggatagcagatagaaaatctacttttggggaaagagtggtggcctttgctgctgtrgaaggagttttcytctcrggatctttkgckgctatattctggctaaagaagagaggtcytatgccaggactcactttttccaatgaactcatcagcagagatgaaggacttcactgtgactttgcttgcctgatgttccaatacttagtaaataagccttcagaagaaagggtcagggagatcattgttgatgctgtcaaaattgagcaggagtttttaacagaagccttgccagttggcctcattggmatgaattgcattttgatgaaacagtacattgagtttgtagctgacagattactkgtggracttggattctcaaaggtttttcaggcagaaaatccttttgattttatggaaaacatttctttagaaggaaaaacaaatttctttgagaaacgagtttcagagtatcagcgttttgcagttatggcagaaaccacagataacgtcttcaccttggatgcagatttttaaaaaacctctcgttttaaaactctataaacttgtcattggtaaatagtagtctattttcctctgcttaaaaaaaattttaagtatatcctttaaaggactgggggtttgctcaaaaggaaatccaaaacctattctaaacaatttgcatttrtataattttcctgtttaacaacaagrgtgtgaccyaaakgcttttgtcttgtcactgaaataaaagatggcattatgtggttaagagcatggggcgaggggtcagacatgagtctaaggttctgcccttactccagtgtgtgacccttggcaagtcagttaatcttggtaaacctcggtgtacttatctttaaaatgggagtaatagtaggtcctaaattcatagagtggatattaggattaggatgcaaaaataaatgcttaaccaacactaa

SEQ ID NO: 791 - DNA, 1088 bp, Homo sapiens
  misc_feature (894)..(894): n equals a,t,g, or c
  misc_feature (1075)..(1075): n equals a,t,g, or c
  misc_feature (1080)..(1080): n equals a,t,g, or c
gtggacttatctgcccagccatgtggaagaaggaaggctctcatgtagatgtctacgtgtacatagcgcctcaaagtgaggattatacactacacatcaattcccctctgacgtcttagtggaaagtttccattgagccctaatgctccctagaagtatgtcacatcctgcccgcggaggggcccacccagggccccattctggttaccctcttcatgctcgaggttgtgccctccaggtgcatctcagctcggagaggggccctcagggtcgcakcttgctctgtccatcatccagcatctgcctcctcactttgtgaataacagggcacatwgatatcttcactggtgagatttgctggtggtaaaagcatattatctggctctccttcctctcgcttcctctctcgcacctgagcgtacgcacctgcccgggcccggctccctcctcctctcccctccctctttccccgcccggccgcgggagcctcgtggctgcgtcaccgccgcccccccagacaagatggacaccgcggaggaagacatatgtagagtgtgtcggtcagaaggaacacctgagaaaccgctttatcatccttgtgtatgtactggcagtattaagtttatccatcaagaatgcttagttcaatggctgaaacacagtcgaaaagaatactgtgaattatgcaagcacagatttgcttttacaccaatttattctccagatatgccttcacggcttccaattcaagacatatttgctggactggttacaagtattggcactgcaatacgatattggtttcattatacacttgtggcctttgcatggttgggagttgttcctcttacagcatgccgcatctacaagtgcttgtttactggctcccgtganctcactgctgacggctgccattagatatgctgtcaaccggaaaatttgttggcagattgtttgcagggttggtttttgtgggtgacgttgcacactgtgtgcaattccatccagccttgggtgtgggttgaagagagcagatagtccaatggggggagcaccaaatttgggttgggagcangctgncccaccgg

SEQ ID NO: 792 - DNA, 670 bp, Homo sapiens
gtaaagggtgcatttggaataattcaaaataatctttcttatttgtccgtaaactctaacttatcttctttcttcaacttctaaacagagcagtctgaatgccagaatggataaccgttttgctacagcatttgtaattgcttgtgtgcttagcctcatttccaccatctacatggcagcctccattggcacagacttctggtatgaatatcgaagtccagttcaagaaaattccagtgatttgaataaaagcatctgggrtgaattcattagtgatgaggcagatgraaagacttataatgrtgcactttttcgrtacaatggcacagtgggattgtggagacggtgtwtcaccatacccaaaaacakgcattggtatagcccaccrgaaaggrcmggtwtttctcttattttaacttcygtcttcttcacctggttaataatagacaaaacgacgtaatgattgcccaattacatgtaagcaggtttgttggttctctctctccttaaagaaataaatcgtgtatcttctctttctactgccttctctccccaacttctttgcattaccatggtactcatcaatattggttggatgaggaacttttcttatcttgggaaagccttaatggctttttttttttcttatttactcactcattaaaataaa

SEQ ID NO: 793 - DNA, 421 bp, Homo sapiens
  misc_feature (50)..(50): n equals a,t,g, or c
  misc_feature (372)..(372): n equals a,t,g, or c
  misc_feature (387)..(388): n equals a,t,g, or c
ggcacgagaaggcctggaaagagcccttcctggttaaagtgccacttttntaggaaaacatttctgtgagcatggcactggatgcaaacatttttaggcccttttctttgttgtggcttgatctcactgcctccttgggctgctgtaaatggcagtatttgctgcctgccctcctcccagtgcagccctgacgctataaggaacagtgatgggcagagctggggaaagacgcacagtacactcttgtttctgacttgcaacaaggaagcagtcaggcattttgtgtctttgtggctctggatctgtgcttttgcactaatttttaaatataggttttcatttctcctactacagcagaatttgagcaatagnttctgggtaggaaannctaagactgtgtgtgtgtgtgtgtgtgtgtgtg

SEQ ID NO: 794 - DNA, 440 bp, Homo sapiens
  misc_feature (284)..(284): n equals a,t,g, or c
gatatttatgttgtttgtagaggatttcctatccccaggacctggccyaggctgagagaagctgtgtggagtgsaagatggacattgaggaagaagggcaggtgtggtctcacccagaatggttcctgctgcttccgcggtgcccaggcttttctcacggcctmtgmtgggttctcccctgggtgctgtggatgcatcctgcctgctggaaattctgtgctctctgtttccatccctttgtcgtggtaatgaccgtatacctctcccctgtaccctcctctgcntgctctccgtgcaggcccctctccctctggttgtcccatcagcatttccccacagctcgttgttcctccttcctcttttctggtgacctttctactgattgcattgtacctctttccctgatattaaagatgtttttaacgactacaaaaaaaaaa

SEQ ID NO: 795 - DNA, 2665 bp, Homo sapiens
ggcacgaggcccttgtcccccacgacggccacgtccccctatggagggggccacgcccttgccggtcaaacttcacccaagcaggagaatgggaccttggctctacttccaggggcccccgacccttcccagcctctgtkttgaggttgccgggggtaggggtggggccacacaaatytccaggagccaccactcaacayaatggccctgcctcccaccgctttatttctttcggtttcggatgcaaaacaaaaaattttaaaagaaaatgtgacttcaaaggaaaagaacaaatttccaaagacttgggggagtgaaggcagagcctggtgcagatggacgaggtctgcagacggagggcagaggtggtggaaggggccaggggctgcaggcctccccctggaactgggactggtctcggtctgctgacgtcagggtcagctcccccgcggagctgacttcagcagcccacagctgtggggcttcagcagccacaccagcccagcccagcccagctctcgatacgtttggtctttcatgctgaaaaataaataataaagcctgtcccgtgtctactgcctcccccaactgcacagacgccagcctctaggcctgactgccagggaggtggaaacactggccaccagcccggcagcccctacaggccccccagatgggctgcctcagtcgtcctctgagagctgcagatcctccagctcgtcctccggcccctgggccagctgctgcagctccccaggggccagccccgcctctgcgtctgggtctccatcccaagaccattcaccctccgagttgctgctgtcctcctcgccctcctcctcgtcctcttcatcgtcttccaccccatgccgagtgctcaggggcctcagtatccctctctccgagaatccctcggtgtcgtcctcttcagagctgttcaggtcaaagaggtctttaaattgcttcctgtcctcatccttcctgtcagccatcttccttcgtttgatctcagggaagttcaggtcttccagccgctctttgccactgatctccagctggatctcccggtcacgcagcttgcgccagtggctgtagtacaaggtcargggtgtcccctcttcccgggtcagcttctcccaggcttccactgcctgctgctcagagacgccgaaggaaaccctctggcggcggctgcagatgtatgccgagttctcctgaaccttcccaagcagctgctgcacctgccggcagtagttggccaccttgcactcccggaggaacgacttcagctgcaggaccacaggcagcaccagctccgggaagccgatgcagtgtgcctggctgtgcaggtactccagggtgaggtcgtacagctgctccaccaggccgtcccggtacgccttctcctgcaggttgacattggacagcttcaggatcacggagaagttgatgggcttggagctcatgcgccctggcttcctgttgaagtcgacctgctggaacatctccaggatgaaaggcagcaccgggatgaaggcccccgagctccccgagagcagcgtcagggcacggatgcagtgcattcgcagcgggtagaagcgggcagtggggatgagcttgatacagccaatgatgacttgggcaagggggtagaccaagggctggaggsttcgctggggcccgcagtgctcaggacccggcaccacaggaagaggcagtgcacatactgccagttgtacacagactggtatgtttccttcttgcgggtggtcatggcgttgcgcaggtgtatggcgagctggcggatgtagaggaaggcgtgctggtaggccacacccggctccagggccagcagctccgtcaaggtccactgcatgaaactgatgaaggggagggcaccaggcgaggtgaacttgcagttcctcacatacgtgatgtacatttgcttgaggacggggccaaggaaagtgtccttcttgtgccggcagactctgctgaggaccaggaaagccagcacccgcagagactcctccccagtgctccatacgaccaccattctcttgagcagcatgcggcactgcttggggaaggtcaggaagcagggcaccagcacgctgatgtgccgcagcacggccgccaacaccgtcgtctccgacagacaggacaccagctgtatggccgagcccaggtaagccttgatgtccacacgaagcttcccccagagcgggctgctggacggctgcagcatcctgctgctatcctttgccacctttccaaacagcagcttctggagacagccaatgaggtctctgatgcagaaggtaaccagagcattgaatgcagcactgtccgtgacctggaatttgttggcctcagcactttcctggtcccctcgggtggtggccacagctgctcggaacgcctgtaccacttcatggaacagctttggagtgaggcgttgctttgctgcctgcttccatctctcaaccatggcgacggtcacaggaacagaattcttcttccccttcagccctctggggactctgtccccatcttctccttcctccgctccatcctcctcctcactggcttcctccagcacatctggcagggagtggaacggcccctcttcctcctcagagctgtccgagtcgctgaagtttac

SEQ ID NO: 796 - DNA, 644 bp, Homo sapiens
  misc_feature (569)..(569): n equals a,t,g, or c
  misc_feature (600)..(600): n equals a,t,g, or c
  misc_feature (627)..(627): n equals a,t,g, or c
  misc_feature (632)..(632): n equals a,t,g, or c
ggcacgagggcaccatctgcggaatcggccggatctgtatggccccttctggatctgtgccacgttggcctttgtcctggccgtcactggcaacctgacgctggtgctggcccagaggagggacccctccatccactacagcccccagttccacaaggtgaccgtggcaggcatcagcatctactgctatgcgtggctggtgcccctggccctgtggggcttcctgcggtggcgcaagggtgtccaggagcgcatggggccctacaccttcctggagactgtgtgcatctacggctactccctctttgtcttcatccccatggtggtcctgtggctcatccctgtgccttggctggcagtggctctttggggcgctggccctgggmctgtcagccgccgggctggtattcaccctctggcccgtggtccgtgaggacaccaggctggtggccacagtgctgctgtccgtggtcgtgctgctccacgccctcctggccatggggctgtaagttgtattcttccagtcgctgcctccggagaacgtggctctccaacccaaaatcacattntggcctcaaaaaatcggggtgttccctaacntgcggaattccttggccccttctaagnaaggnccggggttccaa

SEQ ID NO: 797 - DNA, 1633 bp, Homo sapiens
  misc_feature (1599)..(1599): n equals a,t,g, or c
aattcggcagagcatagtctttcaaatttggacatttaaaaaagaaacttttactgtagtcatgaagtagtatcaaagtttaccacaagtttgtattgagagaagaacaaacaatatatgctaatatgaaaaacagctctacttagaaagctactgcttgggttttcttattaggcatagttctccagactgagttggttttactcatctacatgatttttccttgccttatggaacagaaattcaggcccactcgaattcagttattttagggctctttaaaatccagtatttgtgatttaaatgatgcggagggactttcattacctgtgtctttgcttatttctctctggccctcagaacaccccaccctgacctttaggggaaattgacagaggcagagggtttcacctgcctcaattgtcaccagccctgttacattcttccttccaagccttagcctcacagggaccttctcattattgaacaawtgccttcaaagcagtagaatagcccaattgttatggagattaaagataccgattgcaaaactcctgtaaataaaatcttcactgacaaacccagtttcttttcataggcttttcttctgtaatctctttctggcagaacatctcatgttttgatgttagagattcagttaccaaccacagtaaataaagcaaaataataatagaaaaatagtatagaactcaccctaaaaacaaacattggccaaccatgtttattttttgtctctctttgcactcctgagaattgataggggaagaatgtaccacctctaattcaggtgatttctgattagcaagctatggaaagtcttcaggttgagttttagccagttcacgctcccctaaatggcatggaatagactattttctgttttaagaaaaaatagaacaatggcactaaatgcttgactgaatgtttgactaaatgttgactgaatcatggataggaaagattgggcagaaaagacagccactgcctccagacacaggatgccacaatcctgggcaccatcattattccatacaaccttagggtcatttttagggtttagaactttctcaatagggtttcaagattttgaaaagtgtcttccaattctgatctccgtagatcctgttatgggaattaacctttttggaaggggattcttgttcttaaagatgaaattccctactttctttcctggagggaatcagtatgggcagagggaagaggagatggcgattctgacctgtgtgtctcatgtcacctaacacctatggggtggcatgaaacttgagctttaaaacacaccaggggccaggcacagtggctcatgctggtaatcccagcactttgggagaccgaggtgggtggatcacctgaggtcaggagttcgagaccagcctgccaacatggcaaaaccccgtctctactaaaaatacaaaaatcagctgggtgtggtggcgggcacctgtaatcccagctacttgggaggctgaggcaggagaatcgcttgaacctgggaggcagaggttgcagtgagccgagatcaggccattgtactctagcctgggtgacaagagtganactccatctgaaaaaaaaaaaaaaaaaactcgag

SEQ ID NO: 798 - DNA, 1140 bp, Homo sapiens
  misc_feature (179)..(179): n equals a,t,g, or c
  misc_feature (182)..(182): n equals a,t,g, or c
  misc_feature (978)..(978): n equals a,t,g, or c
  misc_feature (1078)..(1078): n equals a,t,g, or c
gacgcagactcatgcacgcacacaggaggactgaagacctgaaggggctggcttttggagtgttgaggtcaacgtggaggtaccaggccaccatgctcagtctcaagctgccccaacttcttcaagtccaccaggtcccccgggtgttctgggaagatggcatcatgtctggctaccgncgncccaccaagctcggcttttggactgtgtcctcaagctccttcagatgascaacgagacggtcaamatctggactcacttctgcccacctggtacttcctgtggcggctcctggcgctggcggcggcccggcttccgtgcggagccgtaccactggccgctgctggtcttcctgctgcccgcctgcctctaccccttcgcgtcgtgctgcgcgcacaccttcagctccatgtcgccccgcatgcgccacatctgctacttcctcgactacggcgcgctcagcctctacagtctggtttcctggagctggaaagccctgggctcagtaaggtcctccgcacaggagccttcgcctatccattcctgttcgacaacctcccactcttttatcggctcgggctgtgctggggcaggggccacggctgtgggcaggaggccctgagcaccagccatggctaccatctcttctgcgcgctgctcactggcttcctcttcgcctcccacctgcctgaaagctggcaccaggacgctttgattacatcggccacagccaccagttattccacatctgtgcagtgctgggcacccacttccagctggaggcagtgctggctgatatgggatcacgcagagcctggctggccacacaggaacctgccctgggcctggcaggcacagtggccacactggtcttggctgcagctgggaactactcattattgctgctttcacagccaacctgcttcgggcccccagtacatgccctctgctgcaaggtggcccactggaggggggtanccaggccaaacaacagtgaggccccatccctgaaccctgtcctggagggggcaraggcmaggccccagtgctgacggaggagcccagatttgggcctaantcaggtgggggacgcatcttagcctggtaaccaacagggggctttaggagagagggcacagg

SEQ ID NO: 799 - DNA, 1452 bp, Homo sapiens
gcccacgcgtccgggcgtagaaagtgcttcctggagcgcagacgaggtcatgaatcatgtgacggtggcttgaggaggaacctgtctttaaagctgtccctgaagtgacagcggagagaaccaggcagcccagaaaccccaggcgtggagattgatcctgcgagagaagggggttcatcatggcggatgacctaaagcgattcttgtataaaaagttaccaagtgttgaagggctccatgccattgttgtgtcagatagagatggagtacctgttattaaagtggcaaatgacaatgctccagagcatgctttgcgacctggtttcttatccacttttgcccttgcaacagaccaaggaagcaaacttggactttccaaaaataaaagtatcatctgttactataacacctaccaggtggttcaatttaatcgtttacctttggtggtgagtttcatagccagcagcagtgccaatacaggactaattgtcagcctagaaaaggaacttgctccattgtttgaagaactgagacaagttgtggaagtttcttaatctgacagtggtttcagtgtgtaccttatcttcattataacaacacaatatcaatccagcaatctttagactacaataatacttttatccatgtgctcaagaaagggcccctttttccaacttatactaaagagctagcatatagatgtaatttatagatagatcagttgctatattttctggtgtagggtctttcttatttagtgagatctagggataccacagaaatggttcagtctatcacagctcccatggagttagtctggtcaccagatatggatgagagattctattcagtggatcagaatcaaactggtacattgatccacttgagccgttaagtgctgccaattgtacaatatgcccaggcttgcagaataaagccaactttttattgtgaataataataaggacatatttttcttcagattatgttttatttctttgcattgagtgaggaacataaaatggcttggtaaaagtaataaaatcagtacaatcactaactttcctttgtacatattattttgcagtatagatgaatattactaatcagtttgattattctcagagggtgctgctctttaatgaaaatgaaaattatagctaatgttttttcctcaaactctgctttctgtaaccaatcagtgttttaatgtttgtgtgttcttcataaaatttaaatacaattcgttattctgtttccaatgttagtatgtatgtaaacatgatagtacagccatttttttcatatgtgagtaaaaataaaatagtatttttaaaaatatagtttgagcactgtataggtcctttttttgttcagactttttccaaaaatctaaacataattaatatactctttcagccacatgaataaataatgagtgtttcttgtaaa

SEQ ID NO: 800 - DNA, 882 bp, Homo sapiens
  misc_feature (820)..(820): n equals a,t,g, or c
  misc_feature (829)..(829): n equals a,t,g, or c
  misc_feature (843)..(843): n equals a,t,g, or c
  misc_feature (856)..(856): n equals a,t,g, or c
gcttggttttctctcattatgccttttgcaacggttatcttttttgtcatgatcctggatttctacgtggattccatttgttcagtcaaaatggaagtttccaaatgtgctcgttatggatcctttcccatttttattagtgctctcctttttggaaatttttggacacatccaataacagaccagcttcgggctatgaacaaagcagcacaccaggagagcactgaacacgtcctgtctggaggagtggtagtgagtgctatattcttcattttgtctgccaatatcttatcatctccctctaagagaggacaaaaaggtacccttattggatattctcctgaaggaacacctctttataacttcatgggtgatgcttttcagcatagctctcaatcgatccctaggtttattaaggaatcactaaaacaaattcttgaggagagtgactctaggcagatcttttacttcttgtgcttgaatctgctttttacctttgtggaattattctatggcgtgctgaccaatagtctgggcctgatctcggatggattccacatgctttttgactgctctgctttagtcatgggactttttgctgccctgatgagtaggtggaaagccactcggattttctcctatgggtacggccgaatagaaattctgtctggatttattaatggactttttctaatagtaatagcgttttttgtgtttatgggagtcagtggctagattgattgatcctccagaattakacactcacatgttaacaccagtctcagttgggaggggctgatagttaaaccttattgggtanctgtggccnttagccatgccccntaggccatgcccngggagcttctcaagggaaggtgttca

SEQ ID NO: 801 - DNA, 817 bp, Homo sapiens
  misc_feature (802)..(803): n equals a,t,g, or c
ggcacaggccaggtcgtgccagcatccgccggacgccggaagtggttctccgcccctgccactgggccatggagactgtggcacagtagactgtagtgtgaggctcgcgggggcagtggccatggaggccgtgctgaacgagctggtgtctgtggaggacctgctgaagtttgaaaagaaatttcagtctgagaaggcagcaggctcggtgtccaagagcacgcagtttgagtacgcctggtgcctggtgcggagcaagtacaatgatgacatccgtaaaggcatcgtgctgctcgaggagctgctgcccaaagggagcaaggaggaacagcgggattacgtcttctacctggccgtggggaactaccggctcaaggaatacgagaaggccttaaagtacgtccgcgggttgctgcagacagagccccagaacaaccaggccaaggaactggagcggctcattgacaaggccatgaagaaagatggactcgtgggcatggccatcgtgggaggcatggccctgggtgtggcgggactggccggactcatcggacttgctgtgtccaagtccaaatcctgaaggagacgcgggagcccacggagaacgctccaggagggcctgtccatcctcgctgtcctttccctgttctccccctgccccccgtctctatcctctgtggccttcagctaatttctgctcccctgagattcgtccttcagccccatcatgtgctttgggatgagtgtaaataaaacggggctgtggcttgggaaaaaaaaaaaaaaaaaaaaaaaaaaaaannaaaaaagggggggg

SEQ ID NO: 802 - DNA, 890 bp, Homo sapiens
tctagaactagtggatcccccgggctgcaggaattcggcacgagcggcggcggtggcctttggggccgaagtgggcgtgcggctcgcgctgttcgcggccttcctggtgacggagctgctccccccgttccagagactcatccagccggaggagatgtggctctaccggaacccctacgtggaggcggagtatttccccaccaagccgatgtttgttattgcatttctctctccactgtctctgatcttcctggccaaatttctcaagaaggcagacacaagagacagcagacaagcctgcctggctgccagccttgccctggctctgaatggcgtctttaccaacacaataaaactgatcgtagggagcatttcccaccaacggccacagcagtcggtcagtgtcctcttgagcaccttcctgaagctgcagtgtcatttgctgtttgccctaaaaagccacgcccagatttcttctaccgctgcttccctgatgggctagcccattctgacttgatgtgtacaggggataaggacgtggtgaatgagggccgaaagagcttccccagtggacattcttcctgtatgaatatcatatggactctaccctatgcttgttttcacatcattgaatttaacctagaaagctagtagggatgggaaaatctgactactcttgtttctacaatttggaaaatccccccttctttagtaactccacagtttaacaagtctgagccttgactatttgggtaaatattacagaacagaaaggtagtttaccttcatgagatttgcacatttaattgttatattatttgcctagatcctgcaatcttgtactagcaataaaaatacctttaacgaagaaaaaaaaaaaaaaaaaaaaa

SEQ ID NO: 803 - DNA, 1071 bp, Homo sapiens
  misc_feature (1033)..(1033): n equals a,t,g, or c
  misc_feature (1053)..(1053): n equals a,t,g, or c
  misc_feature (1057)..(1057): n equals a,t,g, or c
  misc_feature (1070)..(1070): n equals a,t,g, or c
gatgaatttcagcatatttcttcaagaaatgtctctttttaaacagcagagccctggcaagttttgtctcctggtctgcagtgtgtgcacattttttacgatcttgggaagttacattcctggggttatactcagctatctactgttactgtgtgcatttttgtgtccattgtttaaatgtaatgatattggacaaaaaatttacagcaaaattaagtcagttctgctgaaactggattttggaattggagaatatattaatcagaagaaacgtgagagatctgaagcagayaaagaaaaaagtcacaaagatgacagtgaattagacttttcarctctttgtcctaagattagcctcacggttgctgccaaagagttatctgtgtctgacacagacgtctcagaggtatcctggactgataatgggaccttcaacctttcagaaggatacactccacagacagacacttctgatgatcttgaccgacccagtgaggaagttttctctagagatctttcagattttccatctctagaaaatggcatgggaacaaatgatgaagatgaattaagccttggtttgcccactgagctcaagagaaagaaggaacagttggacagtggtcacagaccaagcaaagagacgcaatcagcagctggtctcacccttcctctgaacagtgaccaaacctttcacctgatgagcaacctggctggggatgttatcacagctgcagtgactgcagctatcaaagaccagttagagggtgtgcagcaagcactttctcaggctgcccccatcccagaagaggacacagacactgaagaaggtgatgactttgaactacttgaccagtcagagctggatcaaattgagagtgaattgggacttacacaagaccaggaagcagaagcacagcaaaataagaagtcttcaggtttcctttcaaatctgctgggaggccattaatctaggaatcagcttgcaacagagcacaaaaaacaccaaaaaaatttcaaacmmgaaaaaaanaaaaaaaaaaaggggggggncccntttttaaaggggnt

SEQ ID NO: 804 - DNA, 778 bp, Homo sapiens
  misc_feature (754)..(754): n equals a,t,g, or c
  misc_feature (763)..(763): n equals a,t,g, or c
  misc_feature (766)..(766): n equals a,t,g, or c
  misc_feature (770)..(770): n equals a,t,g, or c
gcggccgcggtaacctggctgctcggggagccggtgctgtggctgggctgccgcgccgacgagctgctgagctggaagaggccgctgcggagcctgctcggcttcgtcgctgccaacctgctgttctggttccttgcattgactccatggagagtatatcacctgatttccgtcatgatacttgggcgtgttattatgcaaataataaaggatatggttttgtctagaacaagaggtgcacagttgtggagaagcctcagtgaaagctgggaagttatcaattccaaaccagatgaaagacccaggctcagccactgtattgcagaatcatggatgaatttcagcatatttcttcaagaaatgtctctttttaaacagcagagccctggcaagttttgtctcctggtctgtagtgtgtgcacattttttacgatcttgggaagttacattcctggggttatactcagctatctactgttactgtgtgcatttttgtgtccattgtttaaatgtaatgatattggacaaaaaatttacagcaaaattaagtcagttctgctgaaactggattttggaattggagaatatattaatcagaagaaacgtgagagatctgaagcagataaagaaaaaagtcmcaaagatgacagtgaattaactttccactctttgtcctaaratacctcacggttgtgccaaarttactgttctgaccaactccccaagttacctgacgatatggactccaccttcnaaggaaccnccncaanaactccta

SEQ ID NO: 805 - DNA, 594 bp, Homo sapiens
  misc_feature (552)..(552): n equals a,t,g, or c
ctgcaggaccatgatggatcctcggccctcatgctggcctgtcaccatggcaacgtggacctggtgcggctgctcctggcacacccagcctgckacagcagcctgactgacaaggctggccgcacagctttgtccatcgctctgaagtcacccacccatatggaaattgctgggcttctgagagcccacgcggacagggcaggtccctggggctgtaggggctgcagaagaactggccgtggggaacaaaagccttcttctctggactcctccctcgcccttgaagagggcagaggtcacaggccagagagccacccttctagagaagaaactatgtcaaatatgcacatacattcctgttgtataattctgctcattaggatgctttgtagtttttgccttaggccaagcctgaaaactacacgggcttcagagcagggttcaagtgcaagtgaagggtacgtcgtgtcatccaaacatccaaaacatcttcagccttgaattcctcatgactctaacctctgtaacattgtgtagcaagcaagcaagcangagcacattagcacatagaaaagcaatactttttacatggaa

SEQ ID NO: 806 - DNA, 1686 bp, Homo sapiens
  misc_feature (1652)..(1652): n equals a,t,g, or c
gagggtctctgcggccgtagcggccggggctgcggtagccactttagatttgggcaaggactttagattcgggctctgttctgtttccgccgtcctgcttcctgccgaggctggcccaggcagccgcgcttcgaaggacgccgccgggagctgcggagcatgcgtggagtggcagtgctaacggctggtgtctcgcactgttggcctgtgaaggtacgtgaagctgaaagcctggaatggctggaaaggggtcatcaggcaggcggcccctgctgctggggctgctggtggccgtagccactgtccacctggtcatctgtccctacaccaaagtggaggagagcttcaacctgcaggccacacatgacctgctctaccactggcaagacctggagcagtacgaccatcttgagttccccggagtcgtccccaggacgttcctcgggccagtggtgatcgcagtgttctccagccccgcggtttacgtgctttcgctgttagaaatgtccaagttttactctcagctaatagttagaggagtgcttggactcggcgtgatttttggactctggacgttacaaaaggaagtgagacggcacttcggggccatggtggccaccatgttctgctgggtgacggccatgcagttccacctgatgttctactgcacgcggacactgcccaatgtgctggccctgcctgtagtcctgctggccctcgcggcctggctgcggcacgagtgggcccgcttcatctggctgtcagccttcgccatcatcgtgttcagggtggagctgtgcctgttcctgggcctcctgctgctgctggccttgggcaaccgaaaggtttctgtagtcagagcccttcgccacgccgtcccggcagggatcctctgtttaggactgacggttgctgtggactcttatttttggcggcagctcacttggccggaaggaaaggtgctttggtacaacactgtcctgaacaaaagctccaactgggggacctccccgctgctgtggtacttctactcagccctgccccgcggcctgggctgcagcctgctcttcatccccctgggcttggtagacagaaggacgcacgcgccgacggtgctggcactgggcttcatggcactctactccctcctgccacacaaggagctacgcttcatcatctatgccttccccatgctcaacatcacggctgccagaggctgctcctacctgctgaataactataaaaagtcttggctgtacaaagcggggtctctgcttgtgatcggacacctcgtggtgaatgccgcctactcagccacggccctgtatgtgtcccatttcaactacccaggtggcgtcgcaatgcagaggctgcaccagctggtgcccccccagacagacgtccttctgcacattgacgtggcagccgcccagacaggtgtgtctcggtttctccaagtcaacagcgcctggaggtacgacaagagggaggatgtgcagccggggacaggcatgctggcatacacacacatcctcatggaggcggcccctgggctcctggccctctacagggacacacaccgggtcctggccagcgtcgtggggaccacaggtgtgartctgaacctgrcccaamtkgcccccttcaacgtncacctgcagacaaagctggtgcttttgggaaagg

SEQ ID NO: 807 - DNA, 554 bp, Homo sapiens
  misc_feature (361)..(361): n equals a,t,g, or c
  misc_feature (416)..(416): n equals a,t,g, or c
cttggtgagagaagaagcccagaaaatgagtagtcttttaccaactatgtggcttggagctcaaaatggctgtttgtatgtccattcatctgtagcccagtggaggaaatgtctccattccattaaacttaaagattcgattctcagtattgtacacgtgaagggaatcgtgttagtagccctggctgacggcacccttgcaatctttcacagaggagtggatgggcagtgggatttgtcaaactatcacctcttagaccttggacggcctcatcattccatccgttgcatgactgtggtacatgacaaagtctggtgtggctataggarcaaaatctatgtggtgcagccaaaggccatngaaaatagagaaatcttttgatgcacatcccaggaaggagagccaagtgcgacanttgcgtgggtgggggatggcgtgtgggtctccattcgcttgggattctacggtccgtctctatcatggcacacacttattcaacatctacaggatttgggacattgagccttatgtaagcaaaatgtttaggtactgg

SEQ ID NO: 808 - DNA, 1510 bp, Homo sapiens
gagccgggaccgtgccattgtactccagcctgggtgacagagcgagattccgtctcaaaaaaaaaaaaaaaaagcccacctgaaagcctgtctctttccactttgttggcccttccagtgggattatcgagcatgttgttttttcatagtgcctttttccttatttcaagggttgcttctgagtggtgttttttttttttttaatttgttttgttttaaaataagttaaagrcagtccagagcttttcagccaatttgtctcctactctgtgtaaatatttttccctccgggcaggggagccagggtagagcaaaggagacaagcaggagtggaaggtgaggcgttctcctgcttgtactaagccaggaggctttaagctccagctttaagggttgtgagccccttgggggttcagggaactgcttgcccagggtgcagtgtgagtgtgatgggccaccggggcaagagggaaggtgaccgcccagctctcccacatcccactggatctggcttacaggggggtcggaagcctgtcctcaccgtctcgggggttgtggcccccgccccctccctatatgcacccctggaaccagcaagtcccagacaaggagagcggaggaggaagtcatgggaacgcagcctccagttgtagcaggtttcactattcctatgctggggtacacagtgagagtactcacttttcacttgtcttgctcttagattgggccatggctttcatcctgtgtcccctgacctgtccaggtgagtgtgagggcagcactgggaagctggagtgctgcttgtgcctcccttcccagtgggctgtgttgactgctgctccccacccctaccgatggtcccaggaagcagggagagttggggaaggcaagattggaaagacaggaagaccaaggcctcggcagaactctctgtcttctctccacttctggtcccctgtggtgatgtgcctgtaatctttttctccacccaaaccccttcccacgacaaaaacaagactgcctccctctcttccgggagctggtgacagccttgggcctttcagtcccaaagcggccgatgggagtctccctccgactccagatatgaacagggcccaggcctggagcgtttgctgtgccaggaggcggcagctcttctgggcagagcctgtccccgccttccctcactcttcctcatcctgcttctcttttcctcgcagatgataaaaggaatctggcattctacacctggaccatttgattgttttattttggaattggtgtatatcatgaagccttgctgaactaagttttgtgtgtatatatttaaaaaaaaaatcagtgtttaaataaagacctatgtacttaatcctttaactctgcggatagcatttggtaggtagtgattaactgtgaataataaatacacaatgaattcttmaaaaaaaaaaaaaaaaaaaaaaaaaaaaaaaaaaccccggggggggccccgggccccaattccccccaa

SEQ ID NO: 809 - DNA, 2044 bp, Homo sapiens
gtcatgcagtgcgccggagaactgtgctctttgaggccgacgctaggggcccggaagggaaactgcgaggcgaaggtgaccggggaccgagcatttcagatctgctcggtagacctggtgcaccaccaccatgttggctgcaaggctggtgtgtctccggacactaccttctagggttttccacccagctttcaccaaggcctcccctgttgtgaagaattccatcacgaagaatcaatggctgttaacacctagcagggaatatgccaccaaaacaagaattgggatccggcgtgggagaactggccaagaactcaaagaggcagcattggaaccatcgatggaaaaaatatttaaaattgatcagatgggaagatggtttgttgctggaggggctgctgttggtcttggagcattgtgctactatggcttgggactgtctaatgagattggagctattgaaaaggctgtaatttggcctcagtatgtcaaggatagaattcattccacctatatgtacttagcagggagtattggtttaacagctttgtctgccatagcaatcagcagaacgcctgttctcatgaacttcatgatgagaggctcttgggtgacaattggtgtgacctttgcagccatggttggagctggaatgctggtacgatcaataccatatgaccagagcccaggcccaaagcatcttgcttggttgctacattctggtgtgatgggtgcagtggtggctcctctgacaatattagggggtcctcttctcatcagagctgcatggtacacagctggcattgtgggaggcctctccactgtggccatgtgtgcgcccagtgaaaagtttctgaacatgggtgcacccctgggagtgggcctgggtctcgtctttgtgtcctcattgggatctatgtttcttccacctaccaccgtggctggtgccactctttactcagtggcaatgtacggtggattagttcttttcagcatgttccttctgtatgatacccagaaagtaatcaagcgtgcagaagtatcaccaatgtatggagttcaaaaatatgatcccattaactcgatgctgagtatctacatggatacattaaatatatttatgcgagttgcaactatgctggcaactggaggcaacagaaagaaatgaagtgactcagcttctggcttctctgctacatcaaatatcttgtttaatggggcagatatgcattaaatagtttgtacaagcagctttcgttgaagtttagaagataagaaacatgtcatcatatttaaatgttccggtaatgtgatgcctcaggtctgcctttttttctggagaataaatgcagtaatcctctcccaaataagcacacacattttcaattctcatgtttgagtgattttaaaatgttttggtgaatgtgaaaactaaagtttgtgtcatgagaatgtaagtcttttttctactttaaaatttagtaggttcactgagtaactaaaatttagcaaacctgtgtttgcatatttttttggagtgcagaatattgtaattaatgtcataagtgatttggagctttggtaaagggaccagagagaaggagtcacctgcagtcttttgtttttttaaatacttagaacttagcacttgtgttattgattagtgaggagccagtaagaaacatctgggtatttggaaacaagtggtcattgttacattcatctgctgaacttaacaaaactgttcatcctgaaacaggcacaggtgatgcattctcctgctgttgcttctcagtgctctctttccaatatagatgtggtcatgtttgacttgtacagaatgttaatcatacagagaatccttgatggaattatatatgtgtgttttacttttgaatgttacaaaaggaaataactttaaaactattctcaagagaaaatattcaaagcatgaaatatgttgctttttccagaatacaaacagtatactcatgaaaaaaaaaaaaaagggcggccgctctagaggatccctcgaggggcccaa

SEQ ID NO: 810 - DNA, 482 bp, Homo sapiens
agcacaactatgttggtggagaagtctctgagtgtcattttgcttgttgtagctctggctatgctgattattgatctgagaatgaaatctttcttagctattccaaacttagttatttttgcagttttgttatttttttcctcattggaaactcccaaaaatccgattgcttttgcgtgtttttttatttgcctgataactgatcctttccttgacatttattttagtggactttcagtaactgaaagatggaaaccctttttgtaccgtggaagaatttgcagaagacttycagtcgtttttgctggaatgattgagcttacattttttattctttccgcattcaaacttagagacactcacctctggtattttgtaatacctggcttttccatttttggaattttctggatgatttgtcatattattttcttttaactctttggggatccataccaaattaaatgactgccataaagtaa

SEQ ID NO: 811 - DNA, 845 bp, Homo sapiens
  misc_feature (514)..(514): n equals a,t,g, or c
  misc_feature (758)..(758): n equals a,t,g, or c
  misc_feature (800)..(800): n equals a,t,g, or c
  misc_feature (822)..(822): n equals a,t,g, or c
gaacaactgtggtgaaactgagcaagacacagagaaaatgaaaaaaatcctggaagtggttaaccaaatccaggatgaagaacgaatggtacaatctcaaaagagttctagtcccctttctagcaccaggagcaagaggtctactctgttgcctccagaggcatctgagggaagtagtagctttttgggaaaactcatgggcttcattgctaccccattcatcaagctttttcaattaatttattaccttatggtagcaatcctgaagaacattgtctatttcctgtggtgtgttaccaagcaggtgattaatggcatagaaagttgcctttaccgcctgggctcagccaccatctcatacttcatggccattggggaagagttggtgagcattccctggaaggkgctcaaggtcgtggccmaagtcatcagggctctyctccggatcctttgttgtctgctgaargccatttgccgagttytgagcatccctgtccgwgtccttgtggatgtngccactttccctgtgtacaccatggkcgctattccaattgtttgcaaggacattgcactgggccttggtggcactgtctcactgctctttgacactgcttttggtaccctgggtggcctatttcaggtggtttttagtgtctgcaagcggattggctacaaggttacttttgacaattctgggggagttataaactcaaaaaactaatagtatccagtcacagtgaatttgaaagctggaatantttgtctttgacaatgggtttctgttcactgtcattgagcangagatttggccttggtggggangtctgcttgtttttggcaaaaaa

SEQ ID NO: 812 - DNA, 1188 bp, Homo sapiens
  misc_feature (539)..(539): n equals a,t,g, or c
cggacgcgtgggcggacgcgtgggcggaatctacaccttcccggccagcggtacaactgcagaactgcaggagactatctttctagacaaggcagttgaggaggagggagcgcttgagggggactggcctggcgtgcactccgcacctcggggacattattgcgcgtggaacggctgcttttggaaggcacaacttcctgaatggaccatgactcccaccaaagatccctgtctctgattcaccaaacagcttcaaccctgaaaccaggacgagaagttgacaacatctgagtggacagctaattgacctaagacttcagaccaggcctgtatgatctcctgtctaaacattcttagagtattatatttactttggggactattggccttgtctgctttgactcagattataggatatataacctggttaatgtttcygtacacatgatggccacctatgtatatacacttgacttttcagggtctctgctggggatggaaaaatagttcattagccaaactctcctaaagtgtggcanatggaggcagtctctcagattgctggatttgtcaccatcttagggccatctcaagatcattacatgctacttgttgcaccagagattgatttttctgacactccaaatgttaccatatacttacatcagttccctccaaatgtcactttccaaattcaaattcagcttctaaagccaggccatattttcattctgtgcttagtaataagccctaagtctcacccttccccaccgcccccaggtctatctatcagtaagccaattagggacaaattctctaacttatctagaacacaracttaattcctcatcttttccaggtccctgcacattcctggcctcccaccgktactgtcataactggcaactgaatgtccaaaggagaaaaagcaaagcagattgtgccagcacgtctcatttgttatatatcatgcttatgcaggcctttgtaaggcctgcagtaaaaccaatccatggctcactcatgttttaaacaacttacctattcaaactattatgaatgaatagttaagagatacattttggtatgtggcattgggccacacccaccaactcaaggatgggcacatagtgtaaatagctggcaaaatagctggcaaattgaagggcgcttttttttttttttttt

SEQ ID NO: 813 - DNA, 1150 bp, Homo sapiens
  misc_feature (1123)..(1123): n equals a,t,g, or c
  misc_feature (1126)..(1126): n equals a,t,g, or c
  misc_feature (1128)..(1128): n equals a,t,g, or c
tcgacccacgcgtccgccagggacaagtggtgaagcatacaagagaagtgctttgattcctcctgttgggtttacaggctgtgcatttggatcagctgctatttggcaatatgaatcactgaaatccagggtccagagttattttgatggtataaaagctgattggttggatagcataagaccacaraaagaaggagacttcagaaaggagattaacaagtggtggaataacctaagtgatggccagcggactgtgacaggtattatagctgcaaatgtccttgtattctgtttatggagagtaccttctctgcagcggacaatgatcagatatttcacatcgaatccagcctcaaaggtcctttgttctccaatgttgctgtcaacattcagtcayttctccttatttcacatggcagcaaatatgtatgttttgtggagcttctcttccagcatagtgaacattctgggtcaagagcagttcatggcagtgtacctatctgcaggtgttatttccaattttgtcagttacgtgggtaaagttgccacaggaagatatggaccatcacttggtgcatctggtgccatcatgacagtcctcgcagctgtctgcactaagatcccagaagggaggcttgccattattttccttccgatgttcacgttcacagcagggaatgccctgaaagccattatcgccatggatacagcaggaatgatcctgggatggaaattttttgatcatgcggcacatcttgggggagctctttttggaatatggtatgttacttacggtcatgaactgatttggaagaacagggagccgctagtgaaaatctggcatgaaataaggactaatggccccaaaaaaggaggtggctctaagtaaaactgggattggacagtagtggtgcatctggtccttgccgcctgagagccccaggagacatcggctagagtgaccatggctatgctcccgtctggaagatgccagcatctggcctcccactgttttcagctgtgtcccccagtccgtgtctttttagaatgtgaatgatgataaagttgtgaaataaaggtttctatctagtttgtaaaaaaaaaaaaaaaaagggcggccgcnctngnggacccaagcttacgtacgcgt

SEQ ID NO: 814 - DNA, 595 bp, Homo sapiens
  misc_feature (40)..(40): n equals a,t,g, or c
gccaggcacggtgtcagcaggcaacatggccgagagcggnggcctccgggcggcgccgtgtccgcgaccgcgtaccctgacacccccgcggaattccctccgcacctccaggcgggtgcgatgcggcgccgcttttggggcgtattcaactgtctgtgcgccggcgcgttcggggccctggccgccgcctccgccaagctggccttcggcagcgaggtgagcatgggtttatgcgtcttaggcattattgtgatggcgagcaccaattctctgatgtggaccttctttagccggggcctcagtttctccatgtcttcagccattgcatctgtcacagtgactttttcaaatatcctcagctcggccttcctggggctatgtgctgtatggagagtgccaggagtcttgtggtggggargagtgttccttawtctctgcgggacttcacctaatccacaggaagctcccacccacttggaagccccttccacacaagcagcagtagcaaccacttggctaagacggaccagctggaaagatcatgatggttgggcccagctttgggatgtcaagtgggaattgtgttcctaagggg

SEQ ID NO: 815 - DNA, 2110 bp, Homo sapiens
ggtctgccacaattctttctgcagctcctgaggaagtgatgggagtagacagattcacagtgaacaagagatttgggagaccaagtgggcataaaactacgtcttggcctctatttggaaatctgaatgatggaattattatgtttgtwaaaagtaccaaaaagccaagggttaattcatttaggttctctctgttttccagcaaatggaactctgatttaaacagctggggatgaaattcctcaagatgattattcctgaaagtgtggatgcgctggatgcgcagggaacatcaggaaaaggccacggggctctgaacagccccggtccagacagcagcctgtacatccatcccaggacacagcccagcccctccccacaccatacaaggtatcagaaaagtctaggacctatcatttcatcagagacatgatcagaaaagaaactgcttctgccccatttcttgttttggagattactccatctgtccatcaaaagaaacctgtaaatatgaaagaacaaaggttatttcctggagaaaagacaatttattcaacaccaacragggactcatcatatgggcacaactctggtgtccttctatggagaaaacctcaagtaaagttttattctgcctttgaaaatgcttccaaaagtagaccctgtccccacacaggtcaagactacagagaaggctttgtagaaatgtgtcacctatgtacacctgctacttacacatttcctcttttggaaaaatgagatacttagaataacaagaaaattaagacatactggcctggtgccagcagatggcttttctatagacaaactaggttagtgtggaagatataggttaaaataaactatgctgttttatttatcttcccaacctgattggcagctagacttttttagggtctcatttaatggccctgtttttttcattattatatttaatgatagggcaggatttcgtatgcaagctcttgtttctcaggctgcctgcagaagaagtcgctataaattatctgttgtctacatggtacaaggcccattgactcatctgatgcttgttttgttaatttctttaatatttttatcacggggcagtgggagggcttgggcttttagccacagctgttttaagacttctgatctcctgccctgcaggaataggtgggaagtcattgaatttttacactatagtaatttgcattcccacataagtttgagtgttacgaaaacattcctttaaagggatctgtgctacacaaaatatgccaggacctcacagacaaagccattgctagaaatgtcattccaatgatcagatctggaaacaggctgccataaccacttttccttcttgtagactcagctcacctgtatatttaaactgttcttggcatcttgaaacacctatttctactcaggtactcattgtcctgttactgattcacctttctgatccttttcaaccagttttcccccaaggggggaaattttacttaacctctagtatttgaacaactcaatatttgaattgttgccccatttgcttttacctgtactgtattcttggtcatctcaaatggcgtctaaacccagctactttgcattccagaagtttccattccctccaattccacctaatttttcatctgtcctagttactggctctttcttcatgtcttatttctcttgctttgggagcttaaaagattttacaagacctaattttgggttccttccttggagccatagttaccctgccaagaagagtagaaaatgggttcaactcctgtttcgctccaccaacacctctgtgagtctcatcatcagctgagcgatgatgccttacaggttgcatagcactggaactttcctagagtaacggctctgctgccagggtttctctgggctcattcttccactgacttaattatgatctatgcctaacagagccccagtacaactattttgcagaatggctgttaccctagaattactatagcacatattgagatatagttgtactccctagtagataggaactgaccccaacaataaactttgataataaagaaaaaaaaaaaaaaaaaaaaaaaaa

SEQ ID NO: 816 - DNA, 515 bp, Homo sapiens
gggcacgagcaaagggcagggcgtgtctaccacccaccagcccactggggtcccccttcctcgccgaggcctccggagcatgggtctgctggcccttcctttctttgccatcttagtcatggacagaggctggcccaggggcacctggcttcctgtgacctccgggagactccatgctgggcaaggcagagtgacccttcccctggcaggcgggggcatgaggctgccacggggaacacaggtttccttgcamctkgccctttaccctgtcagctttgctgttttcatgtgctctgacgccctcccattaggtgcatccaagctgcaatgcccacttcctcctggcaggggggacccgcaggcaccttctgctcagaggtgcacttgtctggtggccctgctccttcctggtactgttgacctttctgtgtgtttgttttaaatctcttgcatggtaaatagctgcattttgttactgataagagtgagtttaaatccactgtcatatcttttga

SEQ ID NO: 817 - DNA, 898 bp, Homo sapiens
  misc_feature (882)..(882): n equals a,t,g, or c
  misc_feature (890)..(890): n equals a,t,g, or c
tcgccgcacaagggctcctacctgtacagcctgaaggcccaccacgtcaagcaccactttgcacatcagaagtcaggatttggtatcagcactaaattgtgggattactgtttccacaccctcactccagagaaaccccacctgaagacgcagtgacaactcccaccccctccgtcctgccctcagcccggccctggccccttcccgacccccacccgccattcagaccccattaagaaggttggcttggccaggcaggatgggctgtgtccggccctgcagcctagtggaaggtgctgagggggccctgaggcaggaccgccctcctgacccctggtaggagggtcacatccacttggtggccaggtggcccttggtgacccacttcttcctggagcgtccctgctagagctcagcccacaggactgcttcaggccgtggccacaggtagcagccgcaaggggaaatgaagaaaactgagccctcgtggccacctgtgtcacccttgtgccttagcctcatgggctgcctaggagctgcctgcacggcacagytcgctttcacagtcagaagtgggtctgtgggatctgtggtccctgtcctccctgctgtcccttctggggaggctttggtggctctraggtggacaaagagctctcgcaagaagagacagcgtgatgcctcccacagtccaccccagaccctggggcaagcccctcttggccctgcagcttgcctgcgtcgttgggcccagggtggctggcaaggagtcccagctgcttgctttaggacctcgcagtttttcttgccgtccctcccctgcctccagaatcacagcccttctccccaaggaggctgaggaggcttctccaccagtggcantcccaacncgtccctg

SEQ ID NO: 818 - DNA, 770 bp, Homo sapiens
  misc_feature (366)..(366): n equals a,t,g, or c
  misc_feature (699)..(699): n equals a,t,g, or c
  misc_feature (708)..(708): n equals a,t,g, or c
  misc_feature (737)..(737): n equals a,t,g, or c
  misc_feature (767)..(767): n equals a,t,g, or c
atgctcaagtggatgtacatcccagcaagtaacaacaacaccccaatccatggcttttatatctattatcgacccacagacagtgacaatgatagtgactacaagaaggatatggtggaaggggacaagtactggcactccatcagccacctgcagccagagacctcctacgacattaagatgcagtgcttcaatgaaggaggggagagcgagttcagcaacgtgatgatctgtgagaccaaagctcggaagtcttctggccagcctggtcgactgccacccccaactctggccccaccacagccgccccttcctgaaaccatagagcggccggtgggcactggggccatggtggctcgctccagngacctgccctatctgattgtcggggtcgtcctgggctccatcgttctcatcatcgtcaccttcatccccttctgcttgtggagggcctggtctaagcaaaaacatacaacagacctgggttttcctcgaagtgcccttccaccctcctgcccgtatactatggtgccattgggaggactcccaggccaccaggccagtggacagccctacctcagtggcatcagtggacgggcctgtgctaatgggatccacatgaataggggctgcccctcggctgcagtgggctamccgggcatgaagccccakcagcactgcccaggcgagcttcagcangtagcgcantcttgggtgtgggcggcagtatgggacanccagaaggattgctgggctgcttggggggntct

SEQ ID NO: 819 - DNA, 737 bp, Homo sapiens
  misc_feature (1)..(1): n equals a,t,g, or c
  misc_feature (49)..(49): n equals a,t,g, or c
  misc_feature (513)..(513): n equals a,t,g, or c
  misc_feature (648)..(648): n equals a,t,g, or c
  misc_feature (680)..(680): n equals a,t,g, or c
nacaggcaccagcattcactaacaatggcggtgttttcggcgacgtttntacgcttatcggttcactgacggcagttgcgctgtaccgttatcgctttcgtggtaagccgttcgttagcggaatgctgtttgtggtgatgatgtcaccagatatcgtgatggcgatttcgctgctggtgctgtttatgctgctgggtattcagcttggcttctggtcgctgctgttctcgcatatcaccttctgcctgccatttgtggtggtgacggtgtattcgcgcctgaaaggttttgacgtgcgaatgctggaagcggcgaaagatctcggtgccagcgaatttaccattctgcgaaaaatcattctgccactggcaatgccagcggtggcgrcgggctgggtgttaagctttaccctgtcgatggacgatgtggtagtttcttcgttcgtcaccggaccaagttatgaaattctgccgttaaaaatttattcgatggtcaaagtcggcgtatcggggnagttaacgcgctggcaaccatattactggtgctgtcgctggtgatggttattgccagccagcttattgctcgtgataaaacgtttagatgtctaaataaaacaatgaaggacaacacaacatgcctcacaatccnatccgcgtggtcgtcggcccgggctaactaantttccacatcccagggaagttttcaattcaactggcacgaattttttccacggatgg

SEQ ID NO: 820 - DNA, 1034 bp, Homo sapiens
  misc_feature (116)..(116): n equals a,t,g, or c
gcggacgcgtgrgacaaagcggagaacgctggtgggcctgttgtggagtacgctttggactgagaagcatcgaggctataggacgcagctgttgccatgacggcccagggggctgngttggctaaccgaggccggcgcttcaagtgggccattgagctaagcgggcctggaggaggcagcaggggtcgaagtgaccggggcagtggccagggagactcgctctacccagtcggttacttggacaagcaagtgcctgataccagcgtgcaagagacagaccggatcctggtggagaagcgctgctgggacatcgccttgggtcccctcaaacagattcccatgaatctcttcatcatgtacatggcaggcaatactatctccatcttccctactatgatggtgtgtatgatggcctggcgacccattcaggcacttatggccatttcagccactttcaagatgttagaaagttcaagccagaagtttcttcagggtttggtctatctcattgggaacctgatgggtttggcattggctgtttacaagtgccagtccatgggactgttacctacacatgcatcggattggttagccttcattgagccccctgagagaatggagttcagtggtggaggactgcttttgtgaacatgagaaagcagcgcctggtccctatgtatttgggtcttatttacatccttctttaagcccagtggctcctcagcatactcttaaactaatcacttatgttaaaaagaaccaaaagactcttttctccatggtggggtgacaggtcctagaaggacaatgtgcatattacgacaaacacaaagaaactataccataacccaaggctgaaaataatgtagaaaactttatttttgtttccagtacagagcaaaacaacaacaaaaaaacataactatgtaaacaagagaataactgctgctaaatcaagaactgttgcagcatctcctttcaataaattaaatggttgagaacaatgcataaaaaaaaaaaaaaaaaaaaaaaaa

SEQ ID NO: 821 - DNA, 629 bp, Homo sapiens
  misc_feature (540)..(540): n equals a,t,g, or c
gcgaattattggttgggggaaacccacgaggggacgcggccgaggagggtcgctgtccacccgggggcgtgggagtgaggtaccagattcagcccatttggccccgacgcctctgttctcggaatccgggtgctgcggattgaggtcccggttcctaacggactgcaagatggaggaaggcgggaacctaggaggcctgattaagatggtccatctactggtcttgtcaggtgcctggggcatgcaaatgtgggtgaccttcgtctcaggcttcctgcttttccgaagccttccccgacataccttcggactagtgcagagcaaactcttccccttctacttccacatctccatgggctgtgccttcatcaacctctgcatcttggcttcacagcatgcttgggctcagctcacattctgggaggccagccagctttacctgctgttcctgagccttacgctggccactgtcaacgcccgctggctggaaccccgcaccacagctgccatgtgggccctgcaaaccgtggagaaggagcnaggcctgggtggggaggtaccargcagccaccagggtcccgatccctaccgscagctgcgagagaaggaccccaagtacagtgctctcc

SEQ ID NO: 822 - DNA, 682 bp, Homo sapiens
  misc_feature (600)..(600): n equals a,t,g, or c
  misc_feature (660)..(660): n equals a,t,g, or c
attttgctcatcaacctcattatagaacatatgatttgtgatacagatcctgaacttggaggagcagtccagcttatgggcctgcttcgaactttagttgacccagagaacatgctagccactgccaataaaacagaaaagactgaatttctgggtttcttctacaagcactgtatgcatgttctcactgctcctttactagcaaatacaacagaagacaaacctagtaaagatgattttcagactgcccaactattggcacttgtattggaattgttaacattttgtgtggagcaccatacctaccacataaagaactacattattaataaggatatcctccggagagtgctagttcttatggcctcgaagcatgctttctkggcattatgtgcccttcgttttaaaagaaagattattggattaaaagatgagttttacaaccgctacataatgaaaagttttttgtttgaaccagtagtgaaagcatttctcaacaatggatcccgctacaatctgatgaactctgccataatagagatggttgaatttattagagtggaagatataaaatcattaactgctcatgtaattgaaaantactggaaagcactggaagatgtagattatgtcagacatttaaaggattaaaactgaganttgaccaccaaagagaaggcaa

SEQ ID NO: 823 - DNA, 988 bp, Homo sapiens
tgtctgcaggtccaaaggcaccgtcctgagttggaaaaagatgaatcagacccagtccctccctggagttgctcagaggtctggaggagaaaggcatagagagaacagccccagcccaggtgggaaggaggcagaaactcggcagcctgtggtgattctcttgggctggggtggctgcaaggacaagaaccttgccaagtacagtgccatctaccacaaaaggggctgcatcgtaatccgatacacagccccgtggcacatggtcttcttctccgagtcactgggtatcccttcacttcgtgttttggcccagaagctgctcgagctgctctttgattatgagattgagaaggagcccctgctcttccatgtcttcagcaacggtggcgtcatgctgtaccgctacgtgctggagctcctgcagacccgtcgcttctgccgcctgcgtgtggtgggcaccatctttgacagcgctcctggtgacagcaacctggtaggggctctgcgggccctggcagccatcctggagcgccgggccgccatgctgcgcctgttgctgctggtggcctttgccctggtggtcgtcctgttccacgtcctgcttgctcccatcacagccctcttccacacccacttctatgacaggctacaggacgcgggctctcgctggcccgagctctacctctactcgagggctgacgaagtagtcctggccagagacatagaacgcatggtggaggcacgcctggcacgccgggtcctggcgcgttctgtggatttcgtgtcatctgcacacgtcagccacctccgtgactaccctacttactacacaagcctctgtgtcgacttcatgcgcaactgcgtccgctgctgaggccattgctccatctcacctctgctccagaaataaatgcctgacacctccccacaaaaaaaaaaaaaaaaaaactcgagggggggcccggtacccaattcgccctataaaggt

SEQ ID NO: 824 - DNA, 476 bp, Homo sapiens
acagaaggggaggcgccttggacgcggagccgtgggacgagggcggcgatggcgtcccatgtagagtgccgtcctctgggagtgtttgagtgtgaactctgtaccttgacagctccgtacagctatgtgggacagaagccccccaacacccagtcgatggtcctcctggaggaaagctatgtcatgaaggatcccttsacctccgacaaggacagattcctggtcctcggctcgtgctgcagtttgtgcagcaggctggtgtgtgtgggcccggaatgcagtttattctactccagagattctgcctyccttgtgtccgggagaacatcaatgcttttcctcaggaaattcggcaagacttggagaaaaggaaagctccatcaaagaggacccccagccagcccggttctyggacgtgartgcaactggggctaggtcatcgggcggaccctkcacagarctyctgggccagcctg

SEQ ID NO: 825 - DNA, 2520 bp, Homo sapiens
ggggcggggcggagccttgattcccagtgccataacttctgggggaaacctccgtctcccgtccctatggtgaccacagcagcagagggggatccttccatgccccaggcaggctggcatcagggccacacaggggccaggagcaggggtctcggagtccacarctcccggccccagtggtgggctcagggctcctgggcgccatgggtctcaccacagcctcgccagggaacaggaccatagggagtccttctccccatctctagccacccacaggccagcagagcacacagccccaccctcgcacaggcacctgtggtctcccagtaaccaagccccagcccaggggccactgcagacagcagctgggatctgcagagggatctcagcagcgagcaggcagctggcgaggagaggtgcgtgtgagggaggggtggccctctcctcagtaggaggaagtaagagggtatctaggccaatttattcagctggaaatcaatctgtccagggctggaccaggcgcctccccctcgatacagctcctggctgaagaggtcatcagagcagcagctgtccccaggccagtgtcacgtcactgcgtacagttcctcccgatcgttcttgcagatctgatagtggcaggggaatttctgcgagcaggcccagggctcggcgggctggtcaggtggcggcagcagcaaggctgcgctcccggccagcaggatgtgccagatgctgtgggtgtagtagtagttgtcgctagtcatcatggaggtgtagatggcgatgcccacagaggccatagagacgccgggcaggaggtagaaggcccagcgctgccacgaggtggggtagcactggcgccggtgcccgcagcggtaagcccacatggaggccatgatcacgaaggcaaagaggcagggccccagcatgttccacatgcccctgcggtccagctgcaaggacatggcgatgaccagtgtacccagaagaaacagcacgtatttcaggactgtcttgagccgtgccatgcacaggatggtgacccagatggccgccccggagcccaagaagtcgcagtactgcagcgtgtcgtagctgaggatgcacagcaccgcctccccgggctggtcgcaggcgtggtagaacgtggagaagaacatggtgtaggcgtagacggaggcctccaccaggaagaatcgccgcactgagacggcgatgggggccaggaacatgaggttgctgagcgtgagcagcagtgtggccgccctctgctgggccaccgtctgggctgtgctgttgtccgtgcagctccacccacgccagcctgccttgcagctgcagctggcatacaggtagctgtgtctgcggagcaggaggcactggccatagggtccacaatcgttcaaacagggcaccaggtacaaggtggtctccacgtggaccacagcctgctcacagtcctcagcattctcagggcacatgagctgcagggagaggtaccagttgtctgtctctgggtaggggatgatgaggttggccctgcgagaccaggcgctcagagacaaagggtagccctggaagaaggctgtggtgcagttgagcgaagtattgaagccaaggaagggcgaggcagcattcacgcaggccactacgacggtctcgttccgcatctctgtcttgttggcccgcagggagatggtgagggaacccccgctgtccatgccggtgttcaggcgcagccgcatcacggagggcgtgtccgaacacaccctcaccgagaccctgtccaggggctggaagtgcaccgacaccacgtccatgtcctcccgcgtgactgggtagtttgtgaggcagaaggggctgcggtccaccctgccactcctgcccaggtcctggtggtcggggctcggggacagcagaccagaggaggcattgaagctctggttttggstgctctgcagaaggggctggayggtcacgctccgtggcctgcaagctgtgagggcagctacagcactgaaagccactgtcccgaggggccccaccaggctctcagctgtyacttgcagccaccggtcccagggcggtgagggcagcagcaggcggcagggccagggggcaccggtgcaggtgagcaccttctggaagttgctaggcagggtgaccgggcccacggtkagacgcacggggcagcccaggctcccattggacacgcagtcccgcagctccagcagaagctcccgcgtgtaatcggggacaaagaccttgaggtagctgggatgggagaggagggtctgaggaaggggcacgtccggctccatgatggaaatctcgaccacccgcgtgaccagcagttcaggctggaagacgtaggcacaggtgggagccaagcccttcaactcgatcttctgggatgaggggggcaggtggkcggccacgaaccagtccccgggggccgggtggraaacgttgacggaggcattgcttctcggtgcggtgctcagcggcaccccgacc

SEQ ID NO: 826 - DNA, 942 bp, Homo sapiens
  misc_feature (22)..(22): n equals a,t,g, or c
  misc_feature (33)..(33): n equals a,t,g, or c
  misc_feature (942)..(942): n equals a,t,g, or c
aatggtgggtcccccgggctgncaggattcggncacgaggatggggagaaggactccctatggtcctgttccctggcgaggctgtggtgagacccatggcgcccaggagccctgagcccaccactggggccgggagctgtggactccgagacccctgctcctggcccctgtgtggccctgatgccagcctgcctggggcatggaggatccccctctgctgctgtggtcaccatagggacgggagacggaggtttcccccagagctgatgggcactggggatgcaggctcccgccccgcccctccctttttcctggctctggagccttgggtccctgagaagagcttccttggactggggtgctctgctgctctgggggtttggcccagaaggaacccctacccagccctgtccacccaccccagcgttcctgggcccccctctgggagcttcctcttggtcccaggagctgcggtggtgtctgccccctgcactgggctctgtgccctgtgggtgttcaggagactggactgtctctgctcctcatgcaaaccttgtgggggaagcaatgaccaggagcagcacctggcccctccctgaggcctgtgagtgtctcggatccgccctggagaagtgagtggctgagacccgggtggggccctcctacccttggctctgggggcttcccttctgggtcttgtccgggatatggccttcctgaaggtcttacctcccccagccgccctgcacttgaccaccaaagcaatctctaagcttataaaggagaaacatrtatatatggggttttttggagtaaaggaaaattctaagatattaagacatatttttatgtagatctgatctatctgtgtttggtgaatttaatattctacattgatttttcaaactaaaaaaaaaaaaaaaacctgggggggggccccgn

SEQ ID NO: 827 - DNA, 1850 bp, Homo sapiens
  misc_feature (17)..(18): n equals a,t,g, or c
  misc_feature (25)..(25): n equals a,t,g, or c
  misc_feature (519)..(519): n equals a,t,g, or c
agaggcttggaaagctnngtgtctngggaaaaaaaggcctttgagcatatgggtccagccactcagaagtgcaggggccatgcttggtgttccaataagtgaatggaagcagtggtggtagctacactgggcagagttggcagggtgctggttcactctgcccagccctgaatgtgtgccttaaaggccccctacaagggccscatacgacagagcttttaactggtgccttccctgtacccgcagcagccacaagtgggcccagactattgcagcctcccataaacatgtgagcatgttctgagtgtgccatgatgtgagtggacctggctggaatcttcggagagcgactgaggtgttcaaatcgaatctcccaggaggcttccttccagccccctattctggtaactaccaggaggcttccttccagccccctattctggtaactaccaaaatccctcgggtgcaagtktaggggtagagatggaaggatgagaggtgaaattgaccttttgaaangcaaagctctggctcacaggccccaaactaccagcccgtatctagcatatccccaccctccacccacttacctcctccaacaaaggagtcaactcagttgaaaaaactggtcctttggsctatccatgggtcaaagtccacctctcctgggggsctggaraggmctgagcctacggaaaggggataccttcccactcagcactgcttcacacaggccccctgcctggggctctccaaggagccttcttcasccacttccagctccacttctgcaaggttaagtcaagtgagaacgatragaaatagggagatggtgtctccttaagtccttgatctgcctgtctgtggaatgggaggttggattagctgcgctgaggtcccatccacagctggtgctcagctgcttgaaggggagactccctcctctgtaacttctttctgggggatyggggtgggcagtacctatccccagtcccctcctagcttgactttagtggtttccaatgtagaagttaacaaagtatgccccattcctgtgacaaaagcacaaccattctgaagttactggagcatgggctcagctcatcctccctctggccccttctcccatggggacatctcggcccagcacccctatcccatttccagagttcttccttccccatytgggccttcataaaatgcaggggaagccagactggtctcaggagcgctaaagcccttccgtggggggtcgtctttctgggactagccctgctgtttaggacctgggaccacaatggggtacctgccgagggggtccccaagagatccaggctgtcatgtgatttatggtggcatgtgttgtgtatttgttggctacttgtgtcttgaaatctagaattatttcacgcagaattgtcactgtttgtcaggaagagaaaatgggctagtggaagcccagtcttgagttcttgtcttgttaccatttaaaattgacatttaattttcaaatcactgttggtgcctaatcacttaagttattaatttattctgttgtattcttttttttaaattgtaacatatttatccggtgggtgggacaggagtgtgttcaagtgggtcatgtttttgctgtggtgacacatggtacaggcttggagcttgcaggtccctttctactgtggtgttggagcaggacaataaagtccactagaaatgcaccccaraaccagctgccgtgtccatcttgtcttgaggggcttggtggtggaacccgttctcactccagtctgttccaatttttgctttatttggaaataattgggtatttttcttggctgtgaataaga

SEQ ID NO: 828 - DNA, 761 bp, Homo sapiens
  misc_feature (3)..(3): n equals a,t,g, or c
  misc_feature (209)..(209): n equals a,t,g, or c
ccntgcgctcttggaaaggctccctaggcaatggccgagtctctgctccacccggctctcaggagcgctgctctctccatctgatcgccctccatcctccccattccctccggttccgggmtctcccttcgctccaagcctcaggccaccggcttggatggacgctccgaggctacccgtgcgtccaggggtcttgcttccgaattggncctgctctttgtctacgcagatgattgccttgctcagtgtgggcaaagattgcaaatcttactgctgtgatggaamcacgccctactgttgctcctamtacgcttatattgggaatatcctctcgggcactgcaattgcgggcattgtttttggaataatatttatcatgggggtcattgctgggattgccatatgcatctgcatgtgcatgaagaacacagggcgaccgcgtgggcatcctcaggacgactcacatcaacaccgtctcctcctatcctggamcaccaccctacggtcacraccacgagatggaatactgtgcagacttgcctcctccatactcccccaccccacagggtccagcacagcgttctccaccccctccttatcctggaaacgcaaggaaataatctatctcccagaacagaacatgtgccaatgggcgatcttgcctggaataaaatgcctctactcagaaacaggcaggaaagaattgctccaaggaatactttttggggtcagataatgtgtcaggtggaatatccctgcta

SEQ ID NO: 829 - DNA, 1266 bp, Homo sapiens
  misc_feature (1258)..(1258): n equals a,t,g, or c
ttgcagcctgcgtgctgggcggcattagtttgctcggtggttccggtgcgatcattggtgcggtactcggcgcatggttcctgacgcagatcgatagcgtactggtgctgttgcgcattccggcatggtggaatgattttatcgcgggtctggttctgctggcggtgctggtgtttgatggacgcctgcgttgtgcgctggaacgtaatctacggcggcaaaaatatgcccgctttatgacgccaccgccatccgttaaacccgcttcgtcaggtaaaaaacgggaggccgcataatgcgtattcgctacggttgggaactggctcttgccgcactgctcgttattgagattgtcgcatttggtgcaattaacccgcgaatgttagatctcaatatgttgctgttcagcaccagtgactttatctgcattggcattgtcgccctaccgctaacgatggtgattgtcagtggcgggatcgatatttcgtttggttcgaccatcggcctctgcgccattgcattgggcgtactgtttcaaagtggtgtgccgatgccgctggcgatactcctgaccttactgctcggcgcattgtgcgggctgatcaacgccggattaattatctataccaaagttaacccgctggtgattacgcttggcacgctgtatctgtttgccggaagcgctctgctgctttccggtatggccggagcgacggggtacgaaggtattggtggattcccgatggcgtttacagatttcgctaacctggatgtgctgggactccccgttccgctgattatcttcctgataatgtctcctcgttttctggctctggctgcataaaacccatgccggacgtaatgtgtttttgattgggcaaagccccgcgcgtggcgctttatagcgcgattccagttaaccgtaccttatgtgcgctctatgccatgacggggctggcgtctgcggtcgccgctgtgctgctggtatcgtattttggttcagcacgttccgatctcggtgcgtcgtttctgatgcccgccatcaccgccgtggtgcttggcggggccaatatttatggtggttccggttccattatcggcaccgccattgcggttttattagtgggatatttgcaacaaggtttgcaaatggcaggagtgccaaatcaggtgtccagcgccctttccggtgcgctacttatcgtcgttgtcgtaggtcgttccgttagcctgcatcgccagcaaattaaagagtggntggcgcgt

SEQ ID NO: 830 - DNA, 701 bp, Homo sapiens
  misc_feature (571)..(571): n equals a,t,g, or c
  misc_feature (600)..(600): n equals a,t,g, or c
  misc_feature (636)..(636): n equals a,t,g, or c
  misc_feature (653)..(653): n equals a,t,g, or c
actccgtctcaaaaaataataataataaaaaagtatagtgtgcctggatgcagttttgtttttatttatcctgcttggggatcataaagctttatcagttttggaaagttctcagcctatatttatttaactgttccttctgccccatcttcctcccttcttctaagactccagttacgtatgtattaggcctgttcaccacttcccacaagtatcttatgttctttgctgtattttccatactctttgtctctgtttttcagcttagagtttttattctgtcctgtattacagttcaaagaatgttccttctgctaaatctaattgtagttaacccatatgctaagtacttaatttcagttattgtatttttaagttttaaatttccatttcattctttcttatagattccagttctttgatgaaagtctctattccacccatcaagtctgtgtctgataacaccaatatctgggtcattagtggctccgtkttgttgtgtctgtkttcccctcctgagctcaagggatccacctgcctcgacctcccacagtgctgggattagtgggangagccacagcacctaagtatgtcttgggnaatttaaatgagaccgagaggcagacattatcttgnaaatcccatatccagantcctttctgcaaaaatggaaaacagggaggggtaaaggcatggtactc

SEQ ID NO: 831 - DNA, 894 bp, Homo sapiens
  misc_feature (849)..(849): n equals a,t,g, or c
  misc_feature (853)..(853): n equals a,t,g, or c
  misc_feature (860)..(860): n equals a,t,g, or c
  misc_feature (863)..(863): n equals a,t,g, or c
  misc_feature (893)..(893): n equals a,t,g, or c
ggaagaagaagaagagcatgatcggcatgtccaccaaggcagtgctctggcgctgcttcagcaccgtggtcatctttctgttcctgctggacgagcagacgagcctgctggtgctggtcccggcgggtgttggagccgccattgagctgtggaaagtgaagaaggcattgaagatgactattttttggagaggcctgatgcccgaatttcagtttggcacttacagcgaatctgagaggaaaaccgaggagtacgatactcaggccatgaagtacttgtcatacctgctgtaccctctctgtgtcgggggtgctgtctattcactcctgaatatcaaatataagagctggtactcctggttaatcaacagcttcgtcaacggggtctatgcctttggtttcctcttcatgctgccccagctctttgtgaactacaagttgaagtcagtggcacatctgccctggaaggccttcacctacaaggctttcaacaccttcattgatgacgtctttgccttcatcatcaccatgcccacgtctcaccggctggcctgcttccgggacgacgtggtgtttctggtctacctgtaccagcggtggctttatcctgtggataaacgcagagtgaacgagtttggggagtcctacgaggagaaggccacgcgggcgccccacacggactgaaggccgcccgggctgccgccagccaagtgcaattgaattgtcaatgagtatttttggaagcatttggaggaattcctagacattgsgttttctgtgttgccaaatcccttcggacatttytcagacatctyccaagttcccatcacgtcagatttggagctggtancgcntacgaanccnacaacgtgtgaacatctgtcttggtcaaana

SEQ ID NO: 832 - DNA, 2516 bp, Homo sapiens
attttcataatcatacycagaagcaaactctcaagcagcaagcatatgcagctagtttaccccattatmcmcttaaaaattttatatttaccttagagctttaaatctctgtaggtagtttgtccaattatgtcacaccacagaagtaaggttccttcmcaaagatcccaagctagcagatctcccagtcacgacgttgtaaaacgcggccagtgcctagcttataatacgactcactatagggagagagctatgacgtcgcatgcacgcgtaagcttgggcccctcgagggatcctctagagcggccgccctttttttttttttttttagatttacttatcttactttattcataaataagaattttcctaagtgcagtgaggggtaggagacatggaaacctttctcatacttataggtgatattaaactgaaatatataactgccttttgggaacagtattttttctgttttctatgaattacccataagcatagcaaaaccaagataaatttaaatttaatattgttaaagagcactgttcaagataaactttcatgtatatcacagtatagcattatacaatgattttacgtaaaaatatttagaagcacagtgatgattttaagaagccataaaacattttaatgaaatataagaaagtcatgaatatttatgtggatatgtatgttgcaaatttaaggtaaatcaacataggataaacacagaagattacatacaaaccctacatattttatttctggtgaaacatataaacactttcctactatagtacaaaatcaattagttcctctaccagcactaaagacttgtcatctaaatatattcattttaggggagaaaaaaatgcttcacatttttctaaaataaagactgcaataaattagtgctttaaaaaatatatatatataggatatagatcctaagaaaataaaactaaagtataaaaaatgaatagcatttcttttcctgccatcatatcctttcttatctcattcctacatagaatgaatgataagctaaattatttagacatgtatggtgactgaaagcaatgtcttcaaggaaacagcttcttgtttagcctcttactctaccatacttagagtaaaaatcaaaggatattttagaaatatcttgtaactattgttgtagcaataatctgtcttgttagaacaacacaataaaaatgacctagagaattccatgaacaatgatacttggattacaagagagctaaaaatcagaggctattcctgtgtgcaaactatttttaccagtctaaatactatatggtttaccactgaacacccaagtttgactgaagtgaacatttgctactatcagtaaaaaactccctctcttacaggaatggcagaaatatagacatttagtcatcaaaaatggcacaatgtacatcacacaaatgattatattatggttcataaggaaaacagccacaattttgatcagagaaatgttaatacatatgaagccttaaaacagcaacatggcggggaaggagagggaggcgggaacctaatgcatttgaattaaaggaaacaggcaatatttggtcgatgtaaacaatgctatttaacgagtgctttatctactttactgaaatacggaaatacttatgtacacgatttaaatgtgcacaagacttgggcttttttcttctagactatgtacatcattcagcacacaattcaaaaagttctggtgtattcaacacactcccagtaagattatgttacactgaaacatataatattaaactttcaagagactgcttttgatgctaaggagtaatctatttttacaagaatgctcaatggtggtgatttctagaatatctttttcaatatcaccaaaaataagataaaatttattttaaaattatgatttagaggtagagctgaaattatttatttaaattataggaaagaaagacataaaatcattgtgagagaataatggtgaaaaacattcttgcctaagagtctccatcttctttggctatagttgttgtttcaagttgaaacagcatcactagtattgctgccttcgaacattttgtttctggaaaaaagcctttccaaattcatatgtactgatcataatggcacaagcaggagcaattttaattaagcgaggaattaggcctgaaaataatccggaaaatccatttttagcaacaatgttcttcattataatccaggttgacatatgcaaaggcatagaaattttatgactttcatatgtccaaagttgtgtctgcttttgtgtttttactacatcaaatggtaaagttgcaacagcagcaaaagaaccagacaatgcccctgaagtaaagttgatcataaatgttggctcatataaaccagatttctcacataacccggacgcgtgggcggacgcgtgggtcgacccgggaattccggaccggtacctgcaggcgtaccttctatagtgycacaaaaagctttta

SEQ ID NO: 833 - DNA, 1624 bp, Homo sapiens
  misc_feature (883)..(883): n equals a,t,g, or c
gggcacccaccagcggcgccgacctcagcgcgcacctatgggctcgctaccaggacatgcggagactggtgcacgacctcctgccccccgaggtctgcagtctcctgaacccagcagccatctacgccaacaacgagatcagcctgcgtgacgttgaggtctacggctttgactacgactacaccctggcccagtatgcagacgcactgcaccccgagatcttcagtaccgcccgtgacatcctgatcgagcactacaagtacccagaagggattcggaagtatgactacaaccccagctttgccatccgtggcctccactatgacattcagaagagccttctgatgaagattgacgccttccactacgtgcagctggggacagcctacaggggcctccagcctgtgccagacgaggaggtgattgagctgtatgggggtacccagcacatcccactataccagatgagtggcttctatggcaagggtccctccattaagcagttcatggacatcttctcgctaccggagatggctctgctgtcctgtgtggtggactactttctgggccacagcctggagtttgaccaagcacatctctacaaggacgtgacggacgccatccgagacgtgcatgtgaagggcctcatgtaccagtggatcgagcaggacatggagaagtacatcctgagaggggatgagacgtttgctgtcctgagccgcctggtggcccatgggaaacagctgttcctcatcaccaacagtcctttcagcttcgtagacaaggggatgcggcacatggtgggtcccgattggcgccagctcttcgatgtggtcattgtccaggcagacaagcccagcttcttcactgaccggcgcaagcntttcagaaaactcgatgagaagggctcacttcagtgggaccggatcacccgcttggaaaagggcaagatctatcggcagggaaacctgtttgacttcttacgcttgacggaatggcgtggcccccgcgtgctctacttcggggaccacctctatagtgatctggcggatctcatgctgcggcacggctggcgcacaggcgccatcatccccgagctggagcgtgagatccgcatcatcaacacggagcagtacatgcactcgctgacgtggcagcaggcgctcacggggctgctggagcgcatgcagacctatcaggacgcggagtcgaggcaggtgctggctgcctggatgaaagagcggcaggagctgaggtgcatcaccaaggccctgttcaatgcgcagttcggcagcatcttccgcaccttccacaaccccacctacttctcaaggcgcctcgtgcgcttctctgacctctacatggcctccctcagctgcctgctcaactaccgcgtggacttcaccttctacccacgccgtacgccgctgcagcacgaggcacccctctggatggaccagctctgcaccggctgcatgaagacccccttccttggtgacatggcccacatccgctgagggcacctttattgtctgggacaggccctcagcccctcctgccccatccacccagacaagcaataaaagtggtctcctccctgwraaaaaaaaaaaaaaaaaaaaaa

SEQ ID NO: 834 - DNA, 1203 bp, Homo sapiens
  misc_feature (1)..(3): n equals a,t,g, or c
  misc_feature (16)..(16): n equals a,t,g, or c
  misc_feature (44)..(44): n equals a,t,g, or c
  misc_feature (1098)..(1098): n equals a,t,g, or c
  misc_feature (1191)..(1191): n equals a,t,g, or c
  misc_feature (1194)..(1195): n equals a,t,g, or c
nnncggggatgggaanttatgctcctctgggttaagaccaggsncagctggaaaaagtggaattggcacaggcaacatctttyttttyagatgtttgaggtcacccagaggagataacagtctgtcaacatagagccctcaaagttwaaaagcagtagccaggcaagacttgtgtcttttcagggctcttccaggctctaagagtgtgaaattcagacagktttttaaaaatcaaaataaaaggagagtagttcttacaggcagaaactcttagagctcacaaattggaaacaactgcaaacttcagagtaaattcatagcttccaaatacaaatgttcacattgtccctccgctatttttacacaaatgcattcaggtgaagacagcaacacacattgggaaaggacatctgcttcctattttagtcccagaatcacttttgcttctagtcccaactgttccctctccccaatcccaaccttatccatgtaacagtatgaatttcctggcccagagacctaaacaagaagtcacgaatatacctacttttggttgcacttgccatttcaatgcttaggaaaacagagtggtcagcaatgaccacactggagatgagagaaaccattttcggggagagatttaagctggactctgcccctgctcttggtaagtggtgtctccagttgctgcagtgcctggaaccaaactctgcctttcctcaattgcctgatatgctttcttcttgaacttccgggtgccgtagatggccaaggtgataacaacagccagaatggtggtgacccccactgtgaccccagctgcagcccctcctgacagaccaccaccatccccatggatgacattcatggccctccgcagctctatcggttctcccagcctccactggtgggtctgggagtctttaatccaggatctcgcattctcagaattggtcactatgacagtattggtggcagcctgactcatgaggggtggccggtgaaaggtgggagcctggcagggggcagggaccctyctgkgaagagcccggatttgacgcaataggacacttggcatcatcgctgatgagggctggntgctggctgaaagcccccggggcactttttcagagacggtgccctaaatctctggatatagcaggatctaccagggggttcccaactggcagnttnnggaacccg

SEQ ID NO: 835 - DNA, 662 bp, Homo sapiens
  misc_feature (586)..(586): n equals a,t,g, or c
  misc_feature (638)..(638): n equals a,t,g, or c
  misc_feature (653)..(653): n equals a,t,g, or c
gggagtgggtgcgcgggaggcgagtgagccgggcgccgggccctgggggctcggcgggacggggasycagggctgccaggcgcccagctgtgcccagatggatgggacagagacccggcagcggargctggacagctgtggcaagccaggggagctggggcttcctcaccccctcagcacaggaggactccctgtagcctcagaagatggagctctcagggcccctgagagccaaagcgtgacccccaagccactggagactgagcctagcagggagaccgcctggtccataggccttcaggtgaccgtgcccttcatgtttgcaggcctgggactgtcctgggccggcatgcttctggactatttccagcactggcctgtgtttgtggaggtgaaagaccttttgacattggtgccgcccctggtgggcctgaaggggaacctggagatgacactggcatccagactctccacagctgccaacactggacaaattgatgacccccaggagcagcacagagtcatcagcagcaacctggccctcatccaggtgcaggccactgtcgtggggctcttggctgctgtngctgcgctgctgttgggcgtagtgtctcgaagaggaagtggatgtcgccaangtggagttctgtgtnccagcagtt

SEQ ID NO: 836 - DNA, 2694 bp, Homo sapiens
  misc_feature (258)..(258): n equals a,t,g, or c
  misc_feature (925)..(925): n equals a,t,g, or c
ggcgccgcgccgagcgaatctcggagtcggtgggtgcagatggcggcggcagttgtggtggcggagggggacagcgactcccggcccggacaggagttgttagtggcctggaacaccgtgagcaccggcctggtgccgccggctgcgctggggctggtgtcttcccggaccagcggtgcagtcccgccaaaggaagaggagctccgggcggcggtggaggttctgargggccacgggctacactcggtcctggargantggttcstggagktgctgcagaacgatctgcargccaacatctyccctgarttctggaatgccatctcccaatgcgagaactctgcggatgagccccagtgccttttgctactccttgacgcttttggcctgctggagagccgcctggatccctacctgcgtacctagagctgctggagaaatggactcgcctgggcttgctgatgggcactggtgctcaggggctgcgagaagaagtccacactatgttgcgcggagtcttgttctttagcacccccagaaccttccaagagatgatccagcgtctgtatgggtgcttcttgagagtctatatgcagagtaagaggaagggggaagggggcacagacccggaactggaaggggagctggacagccggtatgcccgtcgccggtactaccggctcctgcagagcccgctgtgtgcagggtgcagcagtgacaagcaacagtgctggtgtcgccaggctctggagcagttccatcagctcagccaggtcttacacaggctcagtctgctggagcgggtcagtgccgaggctgtgaccaccaccctgcaccaggtgacccgggagaggatggaggaccgttgccggggcgagtacgagcgctccttcctgcgtgagtwccacaagtggatcgagcgggnggttggctggctcggcaaggtgttcctgcaggacggccccgccaggcccgcatctcccgaggccggcaacaccctgcgccgctggcgctgcacgtgcaaaggttcttctaccgcatctacgccagcctgcgcatcgaggagctcttcagcatcgtccgagacttcccagactcccggccagccatcgaggacctcaagtactgcctggagaggacggacyagaggcagcagctgctcgtgtccctcaaggctgccctggagactcggctcctgcatccaggcgtcaacacgtgtgacatcatcaccctctatatctctgccatcaaggcgctgcgcgtgctggacccttccatggtcatcctggaggtggcctgtgagcctatccgccgctacctgaggacgcgggaggacacagtgcggcagattgtggctgggctgacgggggactcggacgggacaggggacctggctgttgagctgtccaagaccgacccggcgagcctggagacaggccaggacagtgaggatgactcaggcgagccagaggactgggtcccggaccctgtggatgccgatccagggaagtcgagctccaagcggcgttcatcggacatcatcagcctgctggtcagcatctacggcagcaaggacctcttcatcaatgagtaccgctcgctgctggccgaccgcctgctgcaccagttcagcttcagccccgagcgggagatccgcaacgtggagctgctgaagctgcgctttggcgaggccccaatgcacttctgtgaagtcatgctgaaggacatggcggactcccgccgcatcaatgccaacatccgggaggaggatgagaagcggccagcagaggagcagccaccgttcggggtctacgctgtcatcctgtccagtgagttctggccgcccttcaaggacgagaagctggaggtccccgaggatatcagggcagccctggaggcttactgcaagaagtatgagcagctcaaggccatgcggaccctcagttggaagcacaccctgggcctggtgaccatggacgtggagctggccgaccgcacgctgtctgtggcggtcaccccagtacaggcggtgatcttgctgtattttcaggaccaagccagctggaccctggaggaactgagcaaggcggtgaagatgcccgtggcgctgctgcggcggcggatgtccgtgtggctgcagcagggtgtgctgcgtgaggagccccccggcaccttctctgtcattgaggaggagcggcctcaggaccgggacaacatggtgctcattgacagtgacgacgagagcgactccggcatggcctcccaggccgaccagaaggaggaggagctgctgctcttctggacgtacatccaggccatgctgaccaacctggagagcctctcactggatcgtatctacaacatgctccgcatgtttgtggtgactgggcctgcactggccgagattgacctgcaggagctgcagggctacctgcagaagaaggtgcgggaccagcagctcgtctactcggccggcgtctaccgcctgcccaagaactgcagctgacacatcgcccgcccgcccgcccgcccgccaggcgctgccctgcaggtgctctcgtcctcccgtgccagcccccgcccgcccgtgtcccagaatgcactgctgaggagcatgcccacccccacccccgcagtgtgcagattaaagcaagtcagatcatcaaaaaaaaaaaaaaaaaaaagggcggccgc

SEQ ID NO: 837 - DNA, 1989 bp, Homo sapiens
gcggcacgagagagagagagagaactagtctcgagtttttttttttttttttttgggcgggggggaggtttatgaagttytgctctttgaaccacagctttattatggtcctttacactggagacagacacagagacactgttcagaagatgaactaaactcagcagtggtctggtatcaagagctttctgatgttttacagcctgaatttggagggataacgatctgctgtgcctttgcagtcactgcttagcccaaagtaatagtacttttgataataactcactctgtgcgatattcctgaataagtccatctcaaaagtttgggattttcctcctcttaactttcttaatatttggacatgcagttgtcgccaaacttgggtattcatggaatttctagtaaatgaaatacctatactttgatactgaagactgccaaatacataggaattttctttcttaaaaaacagtaatgaagactatatctcctttcccagcactgaatgttttactagcactgggtgctcaccatgcaactgaagaaaatgtggaaactcaaaaggtcaggacagacttccaagcacttgcaactgatgttactgtcttcaattttaataattacacatatttgtatatttcagagaagtttttaatatttctctgtccactttttataagctttaaaatgattttctctgccttgagatttgcatcaagaaaaagcacctctcttcacctgaaagctttgaagactagagacacgctttacacgttttaacaagtatattgagtccacgtttggtagcatcagttgttgagttaaaaagaaaattattgcatttgatctggatggattttaaaagaatataatgttcaatattaaaaggataattcacatttgccaccataatgktcttttttatgtaaaaagaagaacttggagacattaacatgaaaaagtcttttatcattagctcatgtatttgaggaagagcagctgtctttttatatgttttttgacaaatcatattgtattcttttgtacaaaaaagaactacttgtattctagaagaaatatgaaatgcttaatttataagcgggctggagattttttccaatattgttttctttgaaaatgaaaggggatcatctattttagttttggggtctgggaactttttgaaaatttaatttgtggaccaatgttttgtgaaagctaaagagggcaggggttaaaatagggcttgaatttctcattctgtatagaccagcaaacttccctgtgcaaggcaagtttacatcacaaatccaagaatgtttgcatcctaaatgctagtttgcttcagcccctagttaacctcaggacttggtttgcatataaaaggtagacagctgatatgttttcatgaataaatattgtcagccagaaaaggttggtgtcaggtaatgcatatttttttaagctttgttttatatttatttttcatttagtttttattgggaatggttttcaaagaactctcagttctgcctaggtgtttttgggggagccctgttttccatagtgtaattccatttaagaggttgtctaaaagtctttttaattaatagaaagattttaatatccaagagtagtcaaattaaggatataaacgatataaactttccacaccttcctgtcgtgacagataaaagcacagaaaggacaacccttgaaatcatgtaacgttggtcatttcaatattttgtacctgttttaaattctgttagtgtatttacttcattgtaaatatttttgagggtacctttgtattttgcttttgaccttggttctgtgatttggatgtcaacaacttccctaaaaagcaccagtgtgttaggttctaatgtcatgacccaatttgtgttattcatctttaatcctgttttcagtctctatgtgtacagcagtatttttaataaagaatkacagagataaaaaaaaaa

SEQ ID NO: 838 - DNA, 762 bp, Homo sapiens
  misc_feature (112)..(113): n equals a,t,g, or c
  misc_feature (115)..(115): n equals a,t,g, or c
tgggacctttctccaggttaattagccatctgtcctactccagagttgacctttggactccacagaagcacttacatgtgggcccctcaccttaactatgggggcaggagtnnangtcccatgactgaggctctggagctggagacagtgaagttgatcctgaataaatcagaggcaggctacagtcccaaaccctgctaggacctctagtcaagcagacaagttctttcctcactccatgctgcaggggcacaggcccagggtctggcaacaaacaggagcagctgtggtcactggggcctggagcctgctggacatgacatcatgcgggcatgcccctactgtgtccctctgtgctagtagactgtgcaggtgcctgtgtactcggagcaggagtaccagctttatctccacgrtgatgcttggactaaggcagaaactgaccacctctttgacctcagccgccgytttgacctgcgttttgttgttatccatgaccggtatgaccaccagcagttcaagagcgttctgtggaagacctgaggagcggtaytaccacatctgtgytaagyttgccaacgtgcgggytgtgcaaggcamagaccttaagataccaagtatttgatgytgggcacgracgasggcggaaggaacagcttgagcgtctctacaacccggaccccagagcaggtggcagaggaggagtacctgctacaggagctgcgcaagattgaggcccggaagaaggagcgggagaaacgc

SEQ ID NO: 839 - DNA, 1058 bp, Homo sapiens
tgttccgggggcgmgtggctgcagcggggcccgcgtggtgcctcctgaggcggcccccggatgaagagatctgggaacccgggagccgaggtaacgaacagctcggtggcagggcctgactgctgcggaggcctcggcaatattgattttagacaggcagacttctgcgttatgacccggctgctgggctacgtggaccccctggatcccagctttgtggctgccgtcatcaccatcaccttcaatccgctctactggaatgtggttgcacgatgggaacacaagacccgcaagctgagcagggccttcggatccccctacctggcctgctactctctaagcrtcaccatcctgctcctgaacttcctgcgctcgcactgcttcacgcaggccatgctgagccagcccaggatggagagcctggacacccccgcggcctacagcctgggcctcgcgctcctgggactgggcgtcgtgctcgtgctctccagcttctttgcactggggttcgctggaactttcctaggtgattacttcgggatcctcaaggaggcgagagtgaccgtgttccccttcaacatcctggacaaccccatgtactggggaagcacagccaactacctgggctgggccatcatgcacgccagccccacgggcctgctcctgacggtgctggtggccctcacctacatartggctctcctatacgaagagcccttcaccgctgagatctaccggcagaaagcctccgggtcccacaagaggagctgattgagctgcaacagctttgctgaaggcctggccagcctcctggcctgccccaagtggcaggccctgcgcagggcgagaatggtgcctgctgctcagggctckcccccggcgtgggctgccccagtgccttggaacctgctgccttggggaccctggacgtgccgacatatggccattgagctccaacccacacattcccattcaccaataaaggcaccctgaccccaaaaaaaaaaaaaaaaaaaaaaaaaaaaaaaaaaaaaaaaaaactcgagggggggcccggt

SEQ ID NO: 840 - DNA, 1427 bp, Homo sapiens
  misc_feature (378)..(378): n equals a,t,g, or c
  misc_feature (1256)..(1256): n equals a,t,g, or c
  misc_feature (1282)..(1282): n equals a,t,g, or c
  misc_feature (1298)..(1298): n equals a,t,g, or c
ggcagagcagcaggcagcgctctctgccctctgctacatccggagtcagctggagaacccagagtccccccagacctccagccggcctccactggcccccctgagcgtagagaacatcctgacccatgagcagcgctgcgcagcgttggtgagcgccggctttgacctcctgttggacgagcgctcgccatactgggcctgtaagsggactgtggctggagtcatcctggagagggagatcccgcgtgccaggggccacgtgaaggagatctacaagctggtggctctgggcaccggcagcagctgctgtgctggctggctggagttctcgggccagcagctccacgactgccatggcctggtcatcgcccgcagccntgctgaggttcttgttccggcagctcctgctggccacacaggggggccccaagggcaaggagcagtccgtgctggccccccagccagggcccggacccccattcaccctcaagccccgcgtcttcctgcacctctacatcagcaacacccccaagggcgcggcccgtgacatctacctgccccccacctcggaaggtggcctcccgcacagcccacccatgcgcctgcaggcccatgtgctcgggcagctgaagcctgtgtgctacgtggcgccctcgctctgtgacacccacgtgggctgcctgtcagccagcgacaagctggcacgctgggccgtgctggggctgggtggtgccctgctggcccacctggtgtccccactctacagcaccagcctcatcctggtgccgccctggggcctccctcccgtctctgcaaggcctcctttctccgggcctttcaccasgcggccagggctgtggggaagccctacctcctggccttgaagacctacgaggctgccaaggctgggccctaccaggaggctcgcaggcagctgtctctcctcctggaccagcagggcctgggggcttggccctcgaagccactggtgggcaaattcagaaactgaagccagcctcggcgggaccgaggtcccggagccaagctgtacccctgctgggggagtgccctatctgaggagcgttgtggggagaacatgggttgtgcggggtgaaactggggctggagggaaggaggagcctgctgtggttgggaggcggctgctgcacgtttgggcttgaataaagaagtatttctggtaaaaaaaaaaaaaaaaaaactcgagggggggcccsgtacccaattcgccctatagngagtcgtattacaattcactggccgncgttttacaacgtcgngactgggaaaaccctggcgttacccaacttaatcgccttgcagcacatccccctttcgccagctggcgtaatagcgaagaggcccgcaccgatcgcccttcccaacagttgcgcagcctgaatggcgaa

SEQ ID NO: 841 - DNA, 1680 bp, Homo sapiens
  misc_feature (306)..(306): n equals a,t,g, or c
gccccggaaacgtttctttcctacgcagccgctcctgccgccgtggtcgctggagctttgcctctctaggccggcagcgcctctcctccatggtcctgtctgtcagcgctgttttgggagcccgccggtgaggccgggccacgctcagacacttcgatcgtcgagtctgtcactgggcatggcgggtcagttccgcagctacgtgtgggacccgctgctgatcctgtcgcagatcgtcctcatgcagaccgtgtattacggctcgctgggcctgtggctggcgctggtggacgggctagtgcgaanagcccctcgctggaccagatgttcgacgccgagatcctgggcttttccacccctccaggccggctctccatgatgtccttcatcctcaacgccctcacctgtgccctgggcttgctgtacttcatccggcgaggaaagcagtgtctggatttcactgtcactgtccatttctttcacctcctgggctgctggttctacagctcccgtttcccctcggcgctgacctggtggctggtccaagccgtgtgcattgcactcatggctgtcatcggggagtacctgtgcatgcggacggagctcaaggagatacccctcaactcagcccctaaatccaatgtctagaatcaggccctttggacatcctgctgacacttgggccccttaacaccttgggctgctcagaccctccagatgaggtccagcccagatctgagaggaaccctggaaatgtgaagtctctgttggtgtgggagagatagtgagggcctgtcaaagaaggcaggtagcagtcagcatgacagctgcaagaatgacctctgtctgttgaagccttggtatctgagaggtcaggaaggggacctctttgagggtaataacakaattggaaccatgccactcttgagccacaatacctgtcaccagcctgttgttttaagagagaaaaaaaatcaaggatatctgattggagcaaaccacttctttagtcatctgtcttaccyccctgggacagctgttacctttgcagtgttgccgaatcacagcagttacctttgcartgttgccgaatcacagcagttctgttggagaaacgcttggtttccggatccagagccacagaaagaaatgtaggtgtgaagtattaggctgctgtcagggagaggatggcagatggaggcatcaagcacaaggaaaatgcacaacctgtgccctgttatacacacgttcatgtgcacccaagaacctatgactttcttccagttccttctaccaggtccccatcctgctgccagctctcaacatagcaggccataggacccagagaagaatcccagygttgctcaaagtctaaccatcataaagacactgcctgtcttctaggaatgaccaggcacccagctcccactggactccaattttttttcctgccttatttagaattctttggcgggaagggtatgatgggttcccagagacaagaagcccaaccttctggcctgggctgtgctgatagtgctgagggagataggaatttgctgctaagatttttctttggggtggagtttcctctgtgaggggcttgcagctatccttcctgtgtatacaaatacagtattttccatgaaaaaaaaaaaaaaaaaaaaaaaaaaaaaaaaa

SEQ ID NO: 842 - DNA, 842 bp, Homo sapiens
  misc_feature (767)..(767): n equals a,t,g, or c
  misc_feature (781)..(781): n equals a,t,g, or c
  misc_feature (810)..(810): n equals a,t,g, or c
  misc_feature (833)..(834): n equals a,t,g, or c
gcagctccctgcaaaaacagaaccaataaaagaacgagcagttcaaccagcacccaccaggaagcccactgtaattcgaattccagccaaaccaggaaaatgtttacatgaggatccacaaagtccacctcctctccctgctgaaaaacctattggaaacactttcagtacagtatctggaaagctcagtaatgttgagagaactagaaacttggaatccaaccacccaggtcaaacaggaggttttgtgcgagtacccccaaggttgccaccgagacctgtgaatggaaaaaccattccaactcaacagcctccaaccaaggtgccccctgagagaccacctcccccaaagctttctgcaaccagaagatctaatragaaactgccttttaatcgatcctcttctgacatggatcttcagaaaaaacaaagtaacttggcaactggactctcaaaagccaagagtcaagtttttaaaaatcaagatccggtgctaccccctcgtcccaaaccaggacaccctctctacagtaaatacatgctgtctgtgcctcatggaattgccaatgaagatattgtctctcaaaaccccggagaactctcttgtaagcgtggggatgtacttgtgatgctgaagcagacggaaaataattacttggagtgccaaaagggagaagacactggcagagttcacctgtctcaaatgaagattatcactccacttgatgaacatcttagaagcagaccaaacgatccaagccacgctncagaagcctgttgnacagtggtgctcctcatgctgtcgttctncatgattttcccagcagagcaannggatgatt

SEQ ID NO: 843 - DNA, 3333 bp, Homo sapiens
gggctgcaggaattcattgacgacgacaacgttaacgtcgacccttttaattggacttcctactattcctgtcatgctgatattaggcaagatgattcgctgggaggactatgtgcttagactgtggcgcaaatactcgaataaactacaaattttaaatagtatatttccagggataggttgtcctgttcctcgaattccagctgaggccaatcctttagcagatcatgtctctgctactcgaatcttgtgtggagcccttgtctttcctactattgctacaatagttggtaaattgatgttcagtagtgttaactctaatttacaaaggacaatcttgggtggaattgcgtttgttgccataaaaggagcatttaaagtttacttcaaacagcagcaatatttacgacaggcacaccgcaaaattctgaattatccagaacaagaagaagcataaaactgacttctggttgttctgcagttctctcatccttatgaatctgttgtgttgttttgattccatcattaatgcacttgtggagacttgtgataagctgctgctcctatattttttaagaaatataataaagcacttagggcaggggaaatcatctcggtaatcatggaacctaaggatgtgatttgttttcattgtttgtatgtactacttttatggcagtcatatgaaccattatcttagcatggtaaacctgggttttgttcatattttctccagacagaaatgcaaagatcaaactgtgcaaatattaaaaaaatgcacatgctgttttattcaaatgcctcttttgtacatgttcatgtttagtgttttctcagaatcagcaactcaaggtactatgaggatttttctcactgacataatttgattacatactaaataagaggatatgttaatatgaggaaatgtaaattaaattagttataaataaataaccaaaaatgtatgtaaacattcaaatgattatctgaacaaatgagattttgtggtgttttctttaacccatgtgatgtcctccaaaatgtgtagggtaaaaattcacagggcttccagatcactttttcaatattaaattttatttacataatgttgacatctcatacttcatgaagtaattttgactcatgcagtcgtgtgtgtgtgtgtgtgtgtgtgtgtgtatttgtgtgtttcagtgtttcatcaggtccttccatctctgggagttttttcaacccatatttctagaaattacagctgccagtttatagtagtttgagcagaggatgatttgcaaaaataaaaataaagttattttactctcctcttgcattgattcagttattgagatattcgttgatcacctcctatttcccaggcactgtgcagagtgctgtaggacatagtggtgaacaagacagacttggtccaagctcttacagagttgacagtctagtttcagcacatagaaaaccagcagtgaataaaccaaggtgaggccttgagctctttgtttttatattaatgaggagaaaagtatgaaaacaagaagtcttaagtaaatattgaggtcattgtttttggcttaagtttattatagaaaatcaacactaatgtttttagattttaattgtcctattsatgaggctagcaccttaatcactgtttagttttgtattcatttttaaaagcaattattgaagccattttcaatagattggccattttaatgttcagcaacctgaatggttatttttgttaattaaaattaaatttttaagagatattttcaaaaccctatttattttcttgttcacagtaatgcatgtcaataataaatgtttccccttactgataagcggccactttaggagtgtagcaaatatagattgagctatgttagtttgcaataatatatgttaactttagtaattaaagactggtttctatagtatgaatgtcttaattttgagttatatgatgtttatttgaatgactgttgaacattcaaatttgtattatttggagatgaagatttgactaacagtgagccttattaagaacactactacagttctgaaggggaaatataacatctatggttatatattttaaaaacttagattataggctgtaattataaaatatattggcttttgttttcaatgtgaaagatacattaaatggacacatatcttgcaaaattttgttgtatagaacagtttttaggcagcctttactaaagttatgcaaacacacagttccccatttactacattaatgcccttgacagggagtagctgcttggttttataggtattagggctcatgaaggccggggaacaactctaatccttttggggcaggagggagggtttttttagggttgcggggagggaactgcaagtgcctgaggaccagagtggcctctagccccgaattgaacacttttaaacctaaagagccttattattattagctcgagaaataccacatgccagtcttcccaggaaggtgacctgcctgaccatgaagcaacaaaagagcataggcagacttaaagttggatagacctgggttcaaatcatagttcagctttcaataactgtatgtatgattttggctaaaggatttgactttctctcaactgcagttttcttaatctttgaaatgcaaataatgtttatctcagaagactatttctaggattaactgagagattaaaggaacagcagcacttaggctcaaaatcgcccctacaaagcagtagttgtttcttaattgctaagtaatctgtttgcactctaggaaaagtaaatggagaggtaaaagaaaggcattggggacaaatgaaagagatgatgtagatttttcggatgggtgggtatattttattttccagtttattttcatatttctttactgtgttatttctggaaactttaatgttttaaacctcttttataaaattcaatgacgactactagaattctattcttttcaaaagttaacttatctccaaagtggctgaaaatattgtttaccattacatgattatgaaatgactgtgaagaatataaaattaaacttagtgacttaattagtcactgccttgctaactttgctgtaatttttttaaacgtcttgtttttaatatagcaaactatctcaatactggctggattaggttaaataaagaatttttatgttctctaggtgtactttgttaaatctcaaaacattctgtacatacataattttttttaatcacagttatcgagatactagtttttgtaagtaaaagtaatctgaatttaaaaaaaaaaaaaaaaaaa

SEQ ID NO: 844 - DNA, 869 bp, Homo sapiens
gtggggtagttgaataaaattgggcagctaaatttttcagttccatgtgcctcccaaataaaaaacagaaaataagtagtttttgtgaattgacttgcagacaaagtagaaactgtgctgcatgatgttattttgtaaacagatgacattttctgaccaggcacatgccatccaattttctgtcaatcacactgttgtataaagcagcagaactgaaggggaaaaatgattgttgtatacactgaattgctttgcatggtctcatttgagataattgatgtaagaatcctgacttttttatatttggaaacatcaaataaaaatggaaaaaatgatcatggctttaaaaaaaaaacaaaaacacacacacatgaactcagatttgcaaaccaggtttctgaaactttgggtaaggtgtatgcttttaactttgaaatgtataaacacccagcggaaacgtatacctttcagtgcatagtgcattgtgtgcttaccctgggttgtttaaacttgtgttcaaatattccccctccaagtgaaagcctgtcgggaattccacagtaacacctttactgttctcccattgatgatcatatacgttacctcttcctagcggtacatttgtatgatccttactactggaattaccgggttaaaaggaaatgcttaccactaagatgtcagtattctcctcatggatattttcartctcaatgttgccagtctaatagtatagtatgtggttgctttactgctgttctccccacccccgtggagttgtgtcattattttaatgaatgtgagctcttgacttactctagaattctaatacagatactttctgcactaaaaaaaaaaaaaaaaaaaaa

SEQ ID NO: 845 - DNA, 1889 bp, Homo sapiens
  misc_feature (26)..(26): n equals a,t,g, or c
  misc_feature (57)..(57): n equals a,t,g, or c
  misc_feature (1295)..(1295): n equals a,t,g, or c
  misc_feature (1370)..(1370): n equals a,t,g, or c
  misc_feature (1844)..(1844): n equals a,t,g, or c
aactaagtggatcccccgggcacatnatgttgatactgttcgccatagcgttgctgntgtgtctgggcgaactgacgtgccagttcatcctgctgcatcgcatcgatttcatcatcgttgtactgatcgccagaatcgtactgattgcgctgggcttcacgggctttttcttccgccgcacgctgtgagggcagcttaataccgtaagacgccagttcacgacgagttggcacgcggatacgtttcggtcgtggcaactgcggaccaatcccctctttgacctgaggacgcggtccaccgctatttgccagactgaagactggcgcggcaacggttgcggcagccccgtcgccagtgtcgcttttttcacgccagatgccagcggggaaacagcggcagcggcttctactggaggtactgctgcaacagaaggtgctttcagcgaagatttgatcggttctggttctttaaccggttctggaatcggttgataccaggccgcaagttgttcacgttcacgggctcgcttctcttcaacttcttcaaagtagtaaagcggcggacgcgcgggttttgtctcttctacaacgggttcagctccacaacaggctgctgttcaacgggttgcgsctgttggtacaacgggytctkarcggctggctgctgataagtttgctcagtctggtatgtagactgtgragcaaaagtggattgctgctcttcggcttgccaggcgttacctgccaccggttgttctggcgcaggggcataatacggctgttgcgcaggttgttcagctgcaggtgcataatacggctgctgcggctgtactggttgttgcagcggctcattatattgcactgcagctgcgcatattgtgactgctgtgggtaaccttccggtgcaggagcaataaccggctctcccgtttgtggacccggtacaggctgccaggctactgtaggttgcgcaggtggaacatcaacagaggcaacaggcggcgtctgagtcacaggttcaaccggcgcagccagctttgtgtcgccgtggtagcagcagctgctacagcgacaggttcggtaattggcgcaccgtttaataatggatcgtattcgtcatattctggctgcgttgcacgrttgcccgaaaatagacgtcgtccgggtcggcagccacaccgcgtgcagtgtaggtaatctcttcgtcatcatcccatccgctttaccggagaacaacgcagcgtctgtttgccgccccatcggattaatgaatttttccgccaaccgttttaacgnacctaagccgccgcgaagaatacgggcacggcgtgattcatgctgtttgcccgtgattttcatcttcatactctncgtcgtcttcatactcatcttcatcgacccaggtatcatcgcgacgggtacgattactggcgaaggtgagaatgtttaaaatccagccgccgagtttttcagcaatgtcacccatgaccaaccggtgaacaacgtcaggcccgctgcccaaacgcagagcagcgcaatagttcccccgctactgtgtagcagtggttgtarcstagtgcttagtaarctgccmatgacgccaccggaggcaaaataccagataycgtcagcgttgattgccgccagaccacaggaggtaaggatgagcgccaaaacgccaatgatgcgtagcgaaacggcaaaataatcaatgkmytcgtcgctggactgatgacgccaggcaaaccaacaaccgccgacaataatgacgggaatggtgtaagccattcacgccaaaaataaagaacagcgtatctgccaaccacgcaccgggcatcccacctnaattatggataggttcatgccaggccgtttgcgaccagctggggt

SEQ ID NO: 846 - DNA, 396 bp, Homo sapiens
attaaatcaaatgatattgacatattatgagggagaagaagtcaatgctggaaggattgggctaacgctagtagtagctggaatggtgggctctattctttgtggcttatggctggattatactaaaacatacaacttcttcatgactggttacctccctttgggttttgaatttgctgttgaaatcacttaccctgaatctgaaggtacttcatctggtcttcttaatgcttctgcacagatatttggaattytgttcacattggctcaaggaaagctcacatcakactatggtcctaaggcagggaacatttwtctctgtgtctggatgtttatasgcatcatattaacagcattaatcaagtctgatctgcgagacacaacataaatatagga

SEQ ID NO: 847 - DNA, 2044 bp, Homo sapiens
  misc_feature (1980)..(1980): n equals a,t,g, or c
  misc_feature (2035)..(2035): n equals a,t,g, or c
ggaccgctaagtccctgacacctgacaagaaagtaaagccaaaagtcagctgaagataatggccatggagatgtctgtggagagccgtaaaagccaatcatggctgaggatgcctgcagaatctctgcccatgagaactctgaggcctcctttcctttggctgtggtaagccctctgggaaaagagcagctacccaccaccagccgcttgatggcattggaacgaatgggaattgtaagcgactatgagaaaatccgtacctttgccgtagcaatagtaggtgttggtggagtaggtagtgtgactgctgaaatgctgacaasatgtggcattggtaagttgctactctttgattatgacaaggtggaactagccaatatgaatagacttttcttccaacctcatcaagcaggattaagtaaagttcaagcagcagaacatactctgaggaacattaatcctgatgttctttttgaagtacacaactataatataaccacagtggaaaactttcaacatttcatggatagaataagtaatggtgggttagaagaaggaaaacctgttgatctagttcttagctgtgtggacaattttgaagctcgaatgacaataaatacagcttgtaatgaacttggacaaacatggatggaatctggggtcagtgaaaatgcagtttcagggcatatacagcttataattcctggagaatctgcttgttttgcgtgtgctccaccacttgtagttgctgcaaatattgatgaaaagactctgaaacgagaaggtgtttgtgcagccagtcttcctaccactatgggtgtggttgctgggatcttagtacaaaacgtgttaaagtttctgttaaattttggtactgttagtttttaccttggatacaatgcaatgcaggatttttttcctactatgtccatgaagccaaatcctcagtgtgatgacagaaattgcaggaagcagcaggaggaatataagaaaaaggtagcagcactgcctaaacaagaggttatacaagaagaggaagagataatccatgaagataatgaatggggtattgagctggtatctgaggtttcagaagaggaactgaaaaatttttcaggtccagttccagacttacctgaaggaattacagtggcatacacaattccaaaaaagcaagaagattctgtcactgagttaacagtggaagattctggtgaaagcttggaagacctcatggccaaaatgaagaatatgtagataatggactgggatatattgtatttctcatgttaaagcctcttcccttgaaattaaaaaaaaattttaactgataaaacttagggcaacattaattaatgtatattcttacctgaattgttatactttttgaaaatcctgtgacttgcctgtttctccccgctccaacgaaatcattaactctcctaaaatgtgtttcattctagtaagaaaacctcaaaggatattgtaggatataaatcttacttgaaaacatagctgttgaaatgttttggccttttggagtgggggaaggacaaatctgatcctgtaatctttttctttccagtaatcccttgtgtctgttgcatgaggacatggacaataaagtagtatatgatcctcagatacagggagaaggacaaggcatacagcttattgattagagctggcaagcatctgctcattatgtttggaattgctttctataagaaaattgcccactactactaacttgatcaacaatgaattcaaaatagttaacctatgaaataacatcctctcaaatgtttgctgatgaagtacaagttgaaatgtagttattggaaaagtctgtaacctgtggatcatatatattcaaagtgagacaaaggcaaataaaaagcagctattttcatgaatagacaaagttgrtttcagggargtattaaattattattctgcacccgaacmagggamcrgganattwtttgcatctgtgggacatatatctgggagttactattactttactggaagngccaagggc

SEQ ID NO: 848 - DNA, 2124 bp, Homo sapiens
ccgctctagaactagtggatcccccgggctgcaggaattcggcacgaggtggaagcagcaccatcggggagacaagcaatcgtagtcgagatcgggatcggtatagacggagaaatagtcggagccgaagtccaggtcggcagtgtcgtcaccgtagccgtagctgggatcgtcgacatggtagtgagtcgcgaagtcgggaccatcgtcgtgaggatcgtgtgcattacaggagtcctccacttgccactggttatagrtatggacacagtaagagtcctcatttcagagagaagagcccagtcagggagccagttgataatctgagtcctgaggagcgtgatgcccgcacagttttctgtatgcagttagctgcccgaattcggcctcgagatctggaggactttttctctgctgtaggcaaggttcgcgatgtacgtatcatytcagatcggaactcacgtcgttctaagggcattgcctacgtggaattctgtgaaatccagtctgtgccactggccattgggctgactgggcagcggttgctgggagtgcctatcattgtacaggcttcacaggcagagaaaaaccgactggcagccatggccaacaacctgcaaaagggcaatggtggaccaatgcgcctctatgtgggttccctgcacttcaatatcactgaagacatgctccggggcatctttgagccctttggtaaaattgataatattgtcctgatgaaggactcagatacaggccgctctaaaggttatggtttcatcacgttctctgattctgagtgtgcccggcgggccctggaacagttgaatgggtttgagcttgctggtcgacctatgagggttggccatgtgactgagcgactggatggtggcacagacatcacttttcctgatggggaccaggagctggatctgggatcagcaggtggacgttttcagctcatggcaaaactggcagaaggcgctggaatccaactgccaagcactgctgctgctgctgctgccgccgccgccgcccaggctgctgccttgcaactgaatggagcagttcccttgggggccctgaatccagcagctctgactgctctgagtccagccctgaaccttgcctcccagtgtttccagctctccagcctctttaccccccagaccatgtaaatcagtggcacagtatactgcctccttgtgcctctggatcctgccacttcacatctactcttccatggccccatttctccattttgtggaccaagccatcctgagggcatggacattgtctctgaggaaattggggccacccttaagataccaagaaaagctcctgcccatggtcccactggaaatggactctgctgagcaaagccaccagttgaagagaacagaatccacacctgcattgaatacctgtttctccatgtgtatcgtctctgagattaccttcttgccctttccaacaccttagtgattcctcaatttctcccccattgggaaggccatagggcattaactgaaggaactgacctctctccttttcctgtacctttaacctttagtctgtcaaggaaaacccttaggacctctgaatcaagaggactgagtttgtgggtgaaccttgaaggtgctctttctgctacaagggccctgggagatagcatggacgtgcattgagaagccagcctcagaccttagcttgaagcagcttgaggccagacctactgtagcctcagcatcttgctaggaggcatggaagtgatctatcctgccaggaggcctcagagtgatctgtcctgccaggaggtgtgagagtgatctgtcctgtgaggcatttaggggctttcaggaatttagtaaaaggtggagtatgcctttccagtatcttccatcttcctttgtatacttgtccttcctcccatttcctccctttggcccgaggtaggaggatggagggaggctgctactctaccacttcctgtgtgcctctactgtggcctcaaccctggcaattatagctactcccatcccttacctgggcatgtgtgagcccttctcactggattttatacccttgtgtctgtgtacctcggccgcgaccacgctaagccgaatt

SEQ ID NO: 849 - DNA, 1463 bp, Homo sapiens
tttcgagctctgcaccgaggagctgccctggacttgagtcccttgcatcggagtccccatccctcccgccaagccatattctgttggatgagcttcagtgcctaccagacagcctttatctgccttgggctcctggtgcagcagatcatcttcttcctgggaaccacggccctggccttcctggtgctcatgcctgtgctccatggcaggaacctcctgctcttccgttccctggagtcctcgtggcccttctggctgactttggccctggctgtgatcctgcagaacatggcagcccattgggtcttcctggagactcatgatggacacccacagctgaccaaccggcgagtgctctatgcagccacctttcttctcttccccctcaatgtgctggtgggtgccatggtggccacctggcgagtgctcctctctgccctctacaacgccatccaccttggccagatggacctcagcctgctgccaccgagagccgcactctcgaccccggctactacacgtaccgaaacttcttgaagattgaagtcagccagtcgcatccagccatgacagccttctgctccctgctcctgcaagcgcagagcctcctacccaggaccatggcagccccccaggacagcctcagaccaggggaggaagacgaagggatgcagctgctacagacaaaggactccatggccaagggagctaggcccggggccagccgcggcagggctcgctggggtctggcctacacgctgctgcacaacccaaccctgcaggtcttccgcaagacggccctgttgggtgccaatggtgcccagccctgagggcagggaaggtcaacccacctgcccatctgtgctgaggcatgttcctgcctaccatcctcctccctccccggctctcctcccagcatcacaccagccatgcagccagcaggtcctccggatcacygtggttkggtggaggtctgtctgcactgggagcctcaggagggctctgctccacccacttggctatgggagagccagcaggggttctggagaaaaaaactggtgggttagggccttggtccaggagccagttgagccagggcagccacatccaggcgtctccctaccctggctctgccatcagccttgaagggcctcgatgaagccttctctggaaccactccagcccagctccacctcagccttggccttcacgctgtggaagcagccaaggcacttcctcaccccctcagcgccacggacctctctggggagtggccggaaagctcccgggcctctggcctgcagggcagcccaagtcatgactcagaccaggtcccacactgagctgcccacactcgagagccagatatttttgtagtttttatgcctttggctattatgaaagaggttagtgtgttccctgcaataaacttgttcctgagaaaaaaaaaaaaaaaaaaaaaa

SEQ ID NO: 850 - DNA, 536 bp, Homo sapiens
acccctgcaggtaccggtccggaattcccgggtcgacccacgcgtccgcccatttttccggttgataatgcaatagataatgkraaagaaattcaagttgcattgyytatcttaatggcagcttatgcaatggcggaagcgtttatgtcaacaggagttggagcttctcttatcctaattgcattaaaagtaggaattactgctaaaactgttgcagttataggagctattgtcacatcaatattatcaatagcaactgggacaagttggggaacatttgcagcctgtgcacctatttttttatggctaaatcatatagttggcggaaatattttattgacaacagcagctattgcaggaggagcatgttttggagataatataggacttatttcagatactacaatagtaagttctggtatccaaaaagttgaagttgtaagaagaattagacaccaaggtgtatggtcagcattagttttattatcaggaataatagtatttgctattgttggatttacatggatttacccttc

SEQ ID NO: 851 - DNA, 1837 bp, Homo sapiens
ctggataacctaccagggattcctttcccagtggacgctcacgacttatttagatgtacagcggtgcctggaatatttgggctatctaggctattcaatattgactgagcaagagtctcaagcttcagctgttacagtgacaagagataaaaagatagacctgcagaaaaaacaaactcaaagaaatgtgttcagatgtaatgtaattggagtgaaaaactgtgggaaaagtggagttcttcaggctcttcttggaagaaacttaatgaggcagaagaaaattcgtgaagatcataaatcctactatgcgattaacactgtttatgtatatggacaagagaaatacttgttgttgcatgatatctcagaatcggaatttctaactgaagctgaratcatttgtgatgttgtatgcctggtatatgatgtcagcaatcccaaatcctttgaatactgtgccaggatttttaagcaacactttatggacagcagaataccttgcttaatcgtagctgcaaagtcagacctgcatgaagttaaacaagaatacagtatttcacctactgatttctgcaggaaacacaaaatgcctccaccacaagccttcacttgcaatactgctgatgcccccagtaaggatatctttgttaaattgacaacaatggccatgtatccgcacgtgacacaagctgacctcaagagctccacgttttggcttcgagcaagttttggtgctactgtttttgcagttttgggctttgctatgtacaaagcattattgaaacagcgatgatataaaaagaaatactgtccctaccaaaaacaaatacttttatgtacattctgaatgctttaagttctgctagaattattgagatatttatacatgcagagttactttattaatatttgtaattcatgcataagagtattttaatgatagttataactgcagtattggctagcatatggaaagaaaacagctaacagccaaactaaaatggctaaattccagaggccaaaagggaatattttgtaaatatatgtacatattcaggcaagatatggtctcccaagctgagttctagaaatgatgtttctagacatttctaagtggtattgttagtgctcacttggctcactcttctaggtttaagttagcccagagattgtatttactcatggatcactttatttatttcacatttactcagaatgatcctttgggttctataaggacataaggtacaatttgccattgtctctccatttttaaaaacatacaagtcagtgtcagcttaccaacatgacattttttcagtcagttgtggtaggccagccttgaagccatcgcacagtctagaaacttgtgtagctgagtgtgcagctcacctttaagggtgaagttaggtaaaagcaattagcagaggcgttatctatgtgattatgttgcttccttgtcagtatgttgaattttatagccctttcaatgaaataaaaaaaaaatttgtatattaccaatgtttttagtttaaataaagagtcacccttactactgttgaatttcatcccaagtgtaaatcattctataatggctgtgtctgttatagtatattacagtaactgcatgtgtcaccaagtgttctatatcaggctaggataacctagaggcagtaattttttaaatgataaaataaatctaatgaatataaactctcatgataaacctattttttccatcatcagccttttcaagtatttaaataaataactgctgtgtactgtgatcttgagttcttttgtcatctaaagtaaatatttctgtacagataaaaaa

SEQ ID NO: 852 - DNA, 1517 bp, Homo sapiens
  misc_feature (144)..(144): n equals a,t,g, or c
gttgagtctttgggtgtgcttttaatggtctctctgcctcttccttaggtgtcaggctgctctacctgtttctagacgctcttcctttcccccttccaaacctcttttcttccttgctgctttcctatcttctgtggctagganatcaggtaatcaagcctgtgttttctgtaatgagtaagtgggttgccagcgaggtctctgtggatgctcctgtgagtcaagtgcatgagctttagtgcatggactttggggtcttggttcccacagcttatatgttttgggggctgctttcttgctctttacccacattctgtgtcatgagtgtgccgggtaggtggcctcctgcccgatggaggctgagcatcttggcagtgtccatcatgccttgcgtgtgcctggcctctttgctgcagatactatggacccgcagctcatcccctgctcaccacctggcctctccttttctctgtgtgcagatctggcagtgtggtggggttctggaaacacacccatgttcccatgttggccatgttttccccaagcaagctccctactcccgcaacaaggctctggccaacagtgttcgtgcagctgaagtatggatggatgaatttaaagagctctactaccatcgcaacccccgtgcccgcttggaaccttttggggatgtgacagagaggaagcagctccgggacaagctccagtgtaaagacttcaagtggttcttggagactgtgtatccagaactgcatgtgcctgaggacaggcctggcttcttcgggatgctccagaacaaaggactaacagactactgctttgactataaccctcccgatgaaaaccagattgtgggacaccaggtcattctgtacctctgtcatgggatgggccagaatcagtttttcgagtacacgtcccagaaagaaatacgctataacacccaccagcctgagggctgcattgctgtggaagcaggaatggatacccttatcatgcatctctgcgaagaaactgccccagagaatcagaagttcatcttgcaggaggatggatctttatttcacgaacagtccaagaaatgtgtccaggctgcgaggaaggagtcgagtgacagtttcgttccactcttacgagactgcaccaactcggatcatcagaaatggttcttcaaagagcgcatgttatgaagcctcgtgtatcaaggagcccatcgaaggagactgtggagccaggactctgcccaacaaagacttagctaagcagtgaccagaacccaccaaaaactaggctgcattgctttgaagaggcaatcattttgccatttgtgaaagttgtgttggatttagtaaaaatgtgaataagctttgtacttattttgagaactttttaaatgttccaaaataccctattttcaaagggtaatcgtaagatgttaacccttggtatttagaaaattaaaaccttataatatttttctawmaaaaaaaaaaaaaaaaaaagggcggccgctctag

SEQ ID NO: 853 - DNA, 1430 bp, Homo sapiens
cagtctcagttggagggctgatartaaaccttattggtatctgtgcctttagccatgcccatagccatgcccatggagcttctcaaggaagctgycactcatctgatcacagccattcacaycatatgcatggacacagtgaccatgggcatggtcacagccacggatctgcgggtggaggcatgaatgctaacatgaggggtgtatttctacatgttttggcagatacacttggcagcattggtgtgatcgtatccacagttcttatagagcagtttggatggttcatcgctgacccactctgttctctttttattgctatattaatatttctcagtgttgttccactgattaaagatgcctgccaggttctactcctgagattgccaccagaatatgaaaaagaactacatattgctttagaaaagatacagaaaattgaaggattaatatcataccgagaccctcatttttggcgtcattctgctagtattgtggcaggaacaattcatatacaggtgacatctgatgtgctagaacaaagaatagtacagcaggttacaggaatacttaaagatgctggagtaaacaatttaacaattcaagtggaaaaggaggcatactttcaacatatgtctggcctaagtactggatttcatgatgttctggctatgacaaaacaaatggaatccatgaaatactgcaaagatggtacttacatcatgtgagataactcaagaattacccctggagaataaacaatgaagattaaatgactcagtatttgtaatattgccagaaggataaaaattacacattaactgtacagaaacagagttccctactactggatcaaggaatctttcttgaaggaaatttaaatacagaatgaaacattaatggtaaaagtggagtaattatttaaattatgtgtataaaaggaatcaaattttgagtaaacatgatgtattacatcatcttcaaaaatagatatgatggattctagtgaagaccaaaattacttctgtttactttctatcaggaagcatctccattgtaaatatgtatttacatgtttattacaaagacccaaatgaaaaatttttagtccattttttgcatagcctaaagataaaataggaataaaagttctatatttatggattttctgtatataaaactggtttctaattataacttaagtccattaagtaaaatctgtattgccactttaaatgtaaactaaattatttgggagaaacttcaaccactgatatgagataagcaatgagaatagggaagtgtataacatcacagtttttgatgtattacaaaaatcaaccactctataaaataaattttttttacttttggtaatatttgcaaatgaataattaatttattagggtaaagaacttatactaagttgt

SEQ ID NO: 854 - DNA, 1723 bp, Homo sapiens
aaggtcaacaatagggtccccaaggccatcaatgccatcaagcccttctaccaagtccgatggrcatcatcagtacaaggatatccctaacccattaattgctggaataagtaatgtactaaataccccaagcagtgcagcttttcctactgcatctgccggaagtagttctgtaaagagtcagcctggtttgctgggaatgcctttaaatcagatcttgaaccagcacaatgctgcctcctttccagcaagtagtttactctcagcagcagccaaagcacagctagcaaatcaaaacaaacttgctggtaacaacagtagcagcagtagcaattctggagctgttgccggcagtggcaacactgaaggacatagcactttaaacaccatgttccctcctactgccaacatgcttctcccaacaggtgaagggcaaagtggtcgagcagcactaagagataagctgatgtctcagcaaaaagacgcattgcggaaaagaaaacaaccacctacgacagtgttgagtttgctcagacagtctcaaatggatagttctgcagttcctaaacctggacctgacttgctaaggaagcagggtcagggttcatttcccatcagttcaatgkctcagttactacagtctatgagttgtcaaagctctcacttgagtagcaatagtaccccgggttgtggggcctcaaatactgctttgcttgctctgctaaccagctgcattttacagatcccagtatgaactctagtgttcttcagaacatacctttaaraggggaagccgtgcactgccacaatgcaaacactaactttgttcacagtaacagtccagtccccaaccaccatcttgcaggtttaataaatcagattcaggctagcgggaactgtgggatgctcagtcagtcgggcatggctttaggaaattccttacatcccaatccayytcagtcaagaatttcaacgtcctccactccagtgataccaaacagcattgttagcagctataatcaaacaagttctgaagcaggtatggttttattagaaaaaagtacccaaaggtactaaacttttctacttttttaaaaaatttgtaccaaaatatttattatgataagaaatgatcctttccccattgtgaaattctcttcatttctttagtatttataattttatttacagaatgctagggatttgtctattgggaagattaacagctaagaggatttcatgtgtttccattatttgttgtcaatctgtgtcattttgaatattgttcgactttcacttggttttataaccattggactccaaactgcaaaataagccatacgaggcagggtttcctggtttgtgagacatgtccttggtctatgccaatataaaagccatctccctagcttttgtttgtattcaggtaaatgaagtttatcttggaaaaatccaaaaaggcaaaaataaatggattttttttcttgctgctgaacagaagtaggtgaatggataggaaaaggtaactagaagttgtacgaagtagaaggctgtcttctaatgtgttttcttatcctagtttgctatccttattatttgtttgagaaaactcaaaaatggatattggctactcccttttaaaaaaaaagctaataatttaagctttctaataaaaaaaaggcttgaaaacctgaaaaaaaaaaaaaaaaaaaaaaaattactg

SEQ ID NO: 855 - DNA, 1655 bp, Homo sapiens
  misc_feature (1378)..(1378): n equals a,t,g, or c
  misc_feature (1444)..(1444): n equals a,t,g, or c
  misc_feature (1521)..(1521): n equals a,t,g, or c
  misc_feature (1606)..(1606): n equals a,t,g, or c
  misc_feature (1648)..(1648): n equals a,t,g, or c
agtctggagccggcgcgtaggagcgggcggccgggctgtgccctctcctactcctcaccgcgcgmgcggggaaccagtarccgcggctgcttcggttgccgcggtcggtggtcgttatggattctccatgggacgagttggctctggccttctcccgcacgtccatgtttcccttttttgacatcgcgcactatctagtgtcagtgatggcggtgaaacgtcagccgggagcagctgcattggcatggaagaatcctatttcaagctggtttactgctatgctccactgttttggtggaggaattttatcctgtctactgcttgcagagcctccattgaagtttcttgcaaaccacactaacatattactggcatcttcaatctggtatattacatttttttgcccgcatgacctagtttcccagggctattcatatctacctgttcaactactggcttcgggaatgaaggaagtgaccagaacttggaaaatagtaggtggagtcacacatgctaatagctattacaaaaatggctggatagtcatgatagctattggatgggcccgaggtgcaggtggtaccattataacgaattttgagaggttggtaaaaggagattggaaaccagaaggtgatgaatggctgaagatgtcataccctgccaaggtaaccctgctggggtcagttatcttcacattccagsacacccagsatctggcaatatcaaagcataatcttatgttcctttataccatctttattgtggccacaaagataaccatgatgactacacagacttctactatgacatttgctccttttgaggatacattgagttggatgctatttggctggcagcagccgttttcatcatgtgagaagaaaagtgaagcaaagtcaccttccaatggcgttgggtcattggcctcaaagccggtagatgttgcctcagataatgttaaaaagaaacatactaagaagaatgaataaatttacgtgatgagctctacaaggccaaaaattttttttcttatctacctgttatattgtgctaattttctatgtatgtgatgtgaaatgaagactatatatatggaatggaggtgacagaaagaaagaaattctttgtttgagggagacttcccctttctggattgtatttgtagagtgttacgagtgtatcatgtgattatgctttaccggtataagagattctgttgtgattatttgaatagttttatattaataaaagaagacmaaattttttaaatgttagaaaaagcagatctgtcattgcaaagtaacaaaaattttaagcttttaaaaatgtaagatttttcgtatttttaaaatttgaatctattttgagctttagntcagcagaattaaatttttacttgacattatcattaaaattgctaggtatggagaacaattcctgntttattttgaacactgagaaagaggtaaacttttcctaaaacactttatattataaaccgaaaaataaattgctagnttatattttaagatattaacatcatattttttaataatacctacatcaaatgggaaaatatctgaaatttttttttcattagcanggatttttctactagaaagtagtttaactactttcattttanaaccaga

SEQ ID NO: 856 - DNA, 1329 bp, Homo sapiens
tttactccaggtagatttccacaatatgcaaagtggtggtggggtcaagacagatgacaccagcactttaaactctttgtgtgggtatgcgtgggtgtatgtttgggaagaaaaacaaaggtgcagactatcttcctttttttcttcttcagcctccatccctggcctcctcccctcacacacactggacttggtacaaaatgtcggtgtggtcctagatgaagcattggggtgggggagggagagggagctttgtgttaagtgcctactggaaatgcactgtggggttttttcctgtatgggaaaccatttatgccaagcttttccccatttcccatatttatctcatctggttagctgcctctgcttccagctttgtgtaattctctttgccagctgcacaaagctgattttttccaaagtctaaagactgagctcacctggctagattgttgtgtgttttgttgaattttttcataatgtaatgccgtatttattgtttttaaaatgaaaggaatactaataagtcttaaaagttccttcatgcataagatttttttccagttactgggcttaactggtgtacattaattagatgtccatactgtattttgtttgcattaagtaattttctttttgacttagtatccggcacacaaagtgggttagtactacagtatttgcgttactttaagtactaagtatgcaggtttcctggtaccattgagttgctgctattaaagctcacacacgaaatggctaaaagttacaagtgtgcaaattatgactgcgtgagccttagaaaataaaatgtataaagggcaacacatgasctgtcaaacagtgttaggagtgtgtttatatgtacagagttgtgcatagcaatcgttttatttaagttgatatgtagtctactcacatttycattatttagcaattttgtacaaaaatagcmattaatttgtaaacactgccagaatactttctagctgctttgtaattttttaagagtgttattttgtttttgtttttctgttctttgttgtggctcttgttttcatttttgttgtacgtgtagatctgtaaataaaattgcagtatttaaagcttaagctttcaggaaaaagaaaataagaattcagtgtgtgcatgacaactcgtgtgtatgagaaggagggatatgaaggaagatggcttgcagagtaagtcgggtggcaattgtcagggtgtgatcttaccacttcaaatgggtgtaatttgaataaattttgtatggtaaaggatcaataaaatgattttttttaagaaaaaaaaaaaaaaaaaaaaaag

SEQ ID NO: 857 - DNA, 1592 bp, Homo sapiens
  misc_feature (1218)..(1218): n equals a,t,g, or c
tcgagttttttttttttttttttagtttaaaaaatatttattatagaaatgtacatttaattagttttaaggaatgtacctgaccacagtgttaatatatatttcttcaaatttgcaaactttacacctttaagatatctacaaagatgatagtttatttacaagttttacaagaaatgatcacttcacaatactgttgacacagttacgattgaatcttcttctcactttttatttcactctgtacttatagaaagaacagagagtatgggtgaagttccatcccagtgccagggaaagcccgtagagcagaatcagaggtgcaaatggatacagaagaattactgtatttttcaaaaatggcaatgcactgtatcccaggaaagttacatagatataatagccaactgcaaccaaccataaggtatttccaactaaatatccaataaatgtgtctgtcaggataacatggttgatgaaaaaaagctggataaaatgcaaaatgaccaggagtggataaaaagcattgagatgcacatcaaaagcatagccccattccacatcatagtctctgctctgtcgtttcactaaatacttgttagagatgaaccacattaaagttgctatcagaagaccaacgcctacacaatctatgagtacaacccaaaggagaagctttattgtctcaaagaatcccatgtccagcacaaagccaaatcctatagtggacacacagagccagatacttaacaggaccaagaaagcagggtcatctctggcccactggtccttcgtctgttttcgataatgaaaatttctgtaaactctctgtggggatgtgaacaggtagagcatctgccaggcagcaaattcaaagtccatttgccgaaagcggaaaagccttctcagatatttgtagcgtttcgctccggctgtgtgtcttgccgcatccctggaattcaagactccgttcccctgcactaaggaattcactgaagtactcggtaacatcttcctagatggaagaaaaacatttcttttacacgtattctgaagaaacwtttggctaccgacactcctcttctgagttatttggcagggaggtcactttccatgttcttcccaaccctagagaaaggccaggagtcaaaagcaaatgcagttagttctgaggcgggtcttggggcttgggaaccgcagactgcaacctcaggcaangcaacagcccacccttctgaatcacctaataacacttatccaggggcagctaccattacagagacagggatgatgtgactgccccatgactccgaggatagtgatagagccaagattggaaatctgactcgaaattccgtgctcttaaccaccaagcttttaagaaaatgcctaagaaagcagtttcagccggttagaacagtgttactgaagaggtcaaataaatggcctattcacacagatcagcgcactgccagcaagcttctcggtcactagaatgagattaaaaaaccaagaaaaactccgatccctagtgttttacatccggaatagttcagcagagggagcggtagcgtcggagtccagtccaaccg

SEQ ID NO: 858 - DNA, 681 bp, Homo sapiens
  misc_feature (518)..(518): n equals a,t,g, or c
ggctttacggctgcgagaagacgacagarggggagacatggccggcgaaggagatcagcaggacgctgcgcacaacatgggcaaccacctgccgctcctgcctgcagagagtgaggaagaagatgaaatggaagttgaagaccaggatagtaaagaagccaaaaaaccaaacatcataaattttgacaccagtctgccgacatcacatacatacctaggtgctgatatggaagaatttcatggcaggactttgcacgatgacgacagctgtcaggtgattccagttcttccacaagtgatgatgatcctgattcccggacagacattacctcttcagctttttcaccctcaagaagtcagtatggtgcggaatttaattcagaaagatagaacctttgctgttcttgcatacagcaatgtacaggaaagggaagcacagtttggaacaacagcagagatatatgcctatcgagaagaacaggattttggaattgagatagtgaaagtgaaagcaattnggaagacaaaggttcaaagtcctttgagctaagaacacagtcagatggratccagcaagytaaagtgcmaattyttcccgatgtgtgttgccttcaaccmtgtctgcmgttcmattagaatccctcaataagtgccagatatttccttcaaaacctgtctcaa

SEQ ID NO: 859 - DNA, 1659 bp, Homo sapiens
  misc_feature (1544)..(1544): n equals a,t,g, or c
  misc_feature (1626)..(1626): n equals a,t,g, or c
  misc_feature (1648)..(1649): n equals a,t,g, or c
gggaagtggtggtaagggaatgactgtatttccactagcatattatgcctgcatttcttgctttagattgtgaaagtcaccatggatatccatttgaatgaaatggctggagacatcttggtttttctgactggccagtttgaaatagaaaaaagttgtgagttactttttcagatggcagagtctgttgattatgattatgatgttcaagataccaccctccgatggcttgttaatattgccgtgttatggatcaatgacaacagatcaacagaggargatatttttgccaccaccacctggaattaraaaatgtgtcatatccaccaatatttctgcaacgtctttgacaatagatggaatcagatatgtggtagatggtggcttcgtgaagcagttaaatcacaaccccagattagggttggacatcctggaggtggttccaatttcaaagagcgaggcattacagcgaagtggccgagctggcaggacttcttcaggaaaatgctttcggatctatagtaaagattttkggaaccagtgtatgcctgaccatgtgatccctgaaattaagagaactagtttgacatctgtagttctgaccttaaagtgccttgccatacrcgatgtcataaggtttcccyatttggatccacctaatgagagacttattttagaagctcttaaacaactttaccagtgtgatgctattgacaggagtggccatgtcaccagattgggtttgtctatggtggagtttcctttgcctccacatctgacatgtgcagtaataaaagctgcttccctggattgtgaagatctactacttccaatagcagcaatgttgtctgtggaaaacgtcttcattagacctgttgatccagagtaccagaaggaagcagaacagagacatcgagaattggcagctaaagctggaggatttaatgactttgcaactttagctgtcatctttgaacaatgcaaatcaagtggagctccagcttcatggtgccaaaaacactggattcattggaggtgcttattttctgcatttcgtgtggaagctcaacttcgagaactaatcaggaagcttaaacagcaaagtgattcccaaaagagacctttgaaggccctaaacatgaagtactacgaagatgtctttgtgcgggctatttcaaaaatgtagctcgaagatctgttgggagaacgttttgcacaatggatggtcgtggaagcccagttcacattcatccttcctcagcacttcatgaacaggaaaccaaacttgaatggatcatttttcatgaggtattggttaccaccaaagtctacgcaagaattgtatgcccaatccgttatgaatgggtaagagacttgttacccaagttgcatgaatttaatgcacatgatttgagcagtgtggcccgacgtgaagtgagagaagatgcaagaaggagatggacaaataaggaaaatgtaaagcagctaaaggatggaatatcgaaagacgtcttaaagaaaatgccaaagaagaaatgatgacnaatccatatctgatgcmcggggytcgtttccttgagagaaagccwcagaggacccggaaccagtgaccacaccggaaagggnaaccaggctaaggggggggaannccccccaatt

SEQ ID NO: 860 - DNA, 1949 bp, Homo sapiens
  misc_feature (1905)..(1905): n equals a,t,g, or c
  misc_feature (1907)..(1907): n equals a,t,g, or c
  misc_feature (1924)..(1924): n equals a,t,g, or c
cggtccggaattcccgggtcgacccacgcgtccgcccacgcgtccgcccttctcccgagagttgcgagaaactttcccttgtccccgacgctgcacgggctcgggtaccgtggcagccgcaggtttctgaaccccgggccacgctccccgcgcctcggcttcgcgctcgtgtagatcgttccctctctggttgcacgctggggatcccggacctcgattctgcgggcgaratgcccctgggacacatcatgaggctggacctggagaaaattgccctggagtacatcgtgccctgtctgcacgaggtgggcttctgctacctggacaacttcctgggcgaggtggtgggcgactgcgtcctggagcgcgtcaagcagctgcactgcaccggggccctgcgggacggccagctggcggggccgcgcgccggcgtctccaagcgacacctgcggggcgaccagatcacgtggatcgggggcaacgaggagggctgcgaggccatcagcttcctcctgtccctcatcgacaggctggtcctctactgcgggagccggctgggcaaatactacgtcaaggagaggtctaaggcaatggtggcttgctatccgggaaatggaacaggttatgttcgccacgtggacaaccccaacggtgatggtcgctgcatcacctgcatctactatctgaacaagaattgggatgccaagctacatggtgggatcctgcggatatttccagaggggaaatcattcatagcagatgtggagcccatttttgacagactcctgttcttctggtcagatcgtaggracccacacgaagtgcagccytcttacgcaaccagatatgctatgactgtctggtactttgatgctgaagaaagggcagaagccaaaaagaaattcaggaatttaactaggaaaactgaatctgccctcactgaagactgaccgtgctctgaaatctgctggccttgttcattttagtaacggttcctgaattctcttaaattctttgagatccaaagatggcctcttcagtgacaacaatctccctgctacttcttgcatccttcacatccctgtcttgtgtgtggtacttcatgttttcttgccaagactgtgttgatcttcagatactctctttgccagatgaagttatttgctaactccagaaattcctgcagacatcctactcggccagcggtttacctgatagattcggtaatactatcaagagaagagcctaggagcacagcgagggaatgaaccttacttgcactttatgtatacttcctgatttgaaaggaggaggtttgaaaagaaaaaaatggaggtggtagatgccacagagaggcatcacggaagccttaacagcaggaaacagagaaatttgtgtcatctgaacaatttccagatgttcttaatccagggctgttggggtttctggagaattatcacaacctaatgacattaatacctctagaaagggctgctgtcatagtgaacaatttataagtgtcccatggggcagacactccttttttcccagtcctgcaacctggattttctgcctcagctccattttgctgaaaataatgactttctgaataaagatggcaacacaattttttctccattttcagttcttacctgggaacctaattccccagaagctaaaaaactagacattagttgttttggttgctttgttggaatggaatttaaatttaaatgaaaggaaaaatatatccctggtagttttgtgttaaccactgataactgtggaaagagctaggtctactgatatacaataaacatgtgtgcatcttgaacaatttgagaggggaggtggagttggaaatgtgggtgttcctgtttttttttttttttttttttttttagntntcctttttaatgagctnaccctttaacacaaaaaaagcaggg

SEQ ID NO: 861 - DNA, 1750 bp, Homo sapiens
gattcggcatgaggcacgcagccaacatggctccagtggagcacgttgtggcggatgctggggctttcctgcggcatgcggctctgcaggacatcgggaagaacatttacaccatccgggaggtggtcactgagattcgggacaaggccacacgcaggcggctcgctgtcctgccctacgagctgcggttcaaggagcccttaccggaatacgtgcggctggtgactgagttttcaaagaaaacaggagactaccccagcctctctgccacggacatccaagtgcttgcactcacataccagttggaagcagagtttgttggggtgtctcacctaaaacaagaaccacagaaggttaaggtgagctcatcgattcagcacccagaaacacctctgcacatttctggtttccatctgccctacaagcctaaacccccacaagaaacagaaaaaggacactcagcttgtgagcctgagaacctggaatttagttccttcatgttctggagaaaccctttgcccaacatcgatcatgaactgcaggagctgctgattgacagaggtgaggacgttccaagtgaggaggaggaggaggaagaaaacgggtttgaagacagaaaagatgacagcgatgacgacgggggtggctggataacccccagtaacatcaagcagatccagcaggagctggagcagtgtgacgtccccgaggacgtgcrggttggctgcctgaccacagacttcgccatgcagaatgttctgctgcagatggggctgcacgtgctggcggtgaacggcatgctgattcgtgaggcccggagctacatcttgcgctgccatggctgtttcaagacaacgtctgacatgagccgagtgttctgctcacactgtgggaacaagaccctgaagaaagtgtccgtgaccgtcagcgacgacggcaccctgcacatgcacttctcccgcaaccccaaggtgctgaacccccgcggcctccggtactcgcttcccactcccaaagggggcaaatacgccatcaacccccatctcaccgaggatcagcgcttccctcagctgcgactctcccaaaaggccaggcagaaaaccaacgtgttcgcccctgactacatcgccggggtgtcaccctttgtcgagaatgacatctccagccgctcagctaccctgcaggtccgggacagcaccttgggagctgggcggagacgcttaaatcccaacgcttccagaaagaagtttgtgaagaaaaggtgaagagcgagttcccgcaggcaaattggatgggcgtctggccgccgtggagttccggtgacccatttccccagccgtgtcgtctccaggaccacccgatggaaataacaggcgggcttcacggtgcggctctgtccgcccatgccccgctgggtctgcagggaactggactgtcccatggcctgtgagcaccggagcgcctggctgcctgccaaggaagtgcaattgcataaaaacagaaagaacaacgccctggagccaatcttcaagaaaggaatttccaaaggataatatttttctaataaatgcggctgcaacctcctgtgcatttaattaaataggccaaatttttgctgcttaggtcatctcaaggctgatacttgagctgtgtgcccagagatcatgcatttagatttatatttttgccagaaaatacaaggttataataaaactaagaactaccaaaaaaaaaaaaaaaaaaaaaaaaa

SEQ ID NO: 862 - DNA, 1205 bp, Homo sapiens
  misc_feature (294)..(294): n equals a,t,g, or c
gaaggactgcacagaggccttccttgtgagccgcctctgaactagctgcactaggacaggtgccaaatgtgcatcgtgtgggttttgccgtctgtttggcaggcggctgcttttccctgctgcttggtggcttctctgccctcgctcttgagtgcaccttcggttcctcccacagttgggcaaatgagccaaactaccttcatggggtactgaccgatctctccttgacttaggctcaagctgggccatgccagagtggagccagtgaacactcagctccagaagggcccaggncactgagtccgtggtaattctgcaaggctgggtcagagccagggtgtggtgccactagggttgtctccgtagcctatttctatagctggccactggggttggcagtgaacagtaatcacacttgttttgtgaattgaacaggaagatcccagtgtctgagtgaactaacagtcctgctttcagccaccatttgcacaagacacccagcactgaaagtcccgctgccaggagcaagggatcctttggaagcacccgccctttgtgccttgttgggggaaaccggtgacgcagaagtgagtgtggatacaccagagtttgcattggaaggaatgagtgtcacgtggggagggaaggggccagtggaccttttgtaagctttccactcaataaaatgaacctgtatggcaaatacttgaaatggaactcactccttccactttccccctttcttctgtcccaggaaatagatcatcttttgaaaagactcttgtctaggaaaagttgtgtccttttcctaatttaacgtgttctttcttaatgaagttttaatttatttttgttgagattttgctagatggcttttgcatcccctgtagatggtgagtgttggcggtgatgtccrtctcggcgttcggaggccccacggtcccgaggctgggccggggccccccagggtggctgtgctgctgcctgtaggagggtgcgggttgtgctgtcatcctcgggtttgcacgcccttttttaggagcctgtggacatctgtggttttgtactttggggcttcaggggaggtgtttaactttctagtgattgatgattgtcaggttttgaaataccaaagcttttttgttctgtttttaaataaatatctttcaaactttcaaaaaaaaaaaaaaaaaaaaaaaaaaaag

SEQ ID NO: 863 - DNA, 471 bp, Homo sapiens
  misc_feature (65)..(65): n equals a,t,g, or c
  misc_feature (393)..(393): n equals a,t,g, or c
  misc_feature (442)..(442): n equals a,t,g, or c
  misc_feature (471)..(471): n equals a,t,g, or c
ctgtaaccttttcacgcgctatctgctaaaaatgttgccgatgtgaagtaaacatggatgtagtnacctgacgtgccaggcgaggagtgagtgtgaaagcgragaagsaggaaactgccgcgaccatgaaagackttgccctcaaggsaaaagtctctacagcgaccgtctcccgagcattaatgaatcccgataaagtctcccaggccacccgtaatcgggttgaaaaagcggcccgggaagtgggttatttaccgcagcctatggggcgcaacgtcaagcgtaatgaatcccgcaccattctggtgattgtcccggatatctgcgatcccttctttagcgaaattattcgcggtatcgaagttacggcggcaaatcacggatatctggtgntgattggcgactgtgcgcatcaaaatcagcaggaaaaaacctttatcgntttgatcatcaccaagcaaattgattggn

SEQ ID NO: 864 - DNA, 2297 bp, Homo sapiens
  misc_feature (2115)..(2115): n equals a,t,g, or c
gcggccgcgggagcttcccgggcctggccgtggaaccaggcagcaacctggacatggaagatgaggaggaggaagagctgaccatggagatgtttgggaacagctccatcaagtttgagctggacatcgagcccaaggtgttcaagccgccgagtagcacagaggccctgaatgacagccaggagttccccttccccgagacgcccaccaaagtgtggccgcagacgagtacatcgtggagtactcactagagtatggcttccttcgcctgtcgcaggccacccgccagcgcctgagcatccccgtcatggtggtcaccctggaccccacgcgggaccagtgcttcggggaccgcttcagccgcctgctgctggatgagttcctgggctaygatgacatcctcatgtccagcgtgaagggcctggccgagaacgaggagaacaagggcttcctgcggaatgtggtgtcgggcgagcactaccgctttgtgagcatgtggatggcgcggacgtcctacctggccgccttcgccatcatggtcatcttcacgctgagcgtgtccatgctgctgcggtactcacaccaccagatcttcgtcttcatcgtggacctgctgcagatgctggagatgaacatggccatcgccttccccgcagcgcccctgctgaccgtcatcctggccctcgtcgggatggaggccatcatgtcggagttcttcaacgacaccaccaccgccttctacatcatcctcatcgtgtggctcgcggaccagtatgacgccatctgctgccacaccagcaccagcaagcggcattggctgcgggaaccccaggggctgggcctggcagggtgggacctgcagccccgatgccctcaccccgccccgcaggttcttctatctctaccacttcgccttctatgcctatcactaccgcttcaatgggcagtatagcagcctggccctggtcacctcctggctcttcatccagcattccatgatctacttcttccaccactacgagctgcctgccatcctgcagcaggtccgcatccaggagatgctgcttcaggcgccgccactgggccccgggacccccacggcgctgcccgatgacatgaacaacaactcgggcgccccggctacagcccctgactctgccggccagccccccgccctgggccccgtctcgccyggggccagcgggagtcccgggcctgtggcagcggcgcccagctccctggtggccgcggcagcctcagtggcagcagctgccggtggtgacctgggttggatggcagagaccgctgccatcatcacagacgcctccttcctgtccggcctgagcgcctccctcctggagcggcgtccagccagcccgctgggccctgctgggggcctcccccacgccccccaggacagtgtccccccgagtgactccgcagcttctgacacaactcccctgggggctgcggtaggcgggcctagcccggcctccatggccccaacggaggcgccctcggaggtggggtcctgagccgcacagctgagccgcctctgacccctgctggctgggcctgaccttcccgagcccgtgggggtgggggaggccagccacctccttcctctgggactgcccagcctgtgtcgggggctttcagggtttcgtggggtttgcccggaaggcggctttcctccccctggtgtgaggtcgcgcccgaggcttgtacccgctagtgaggtgtttgagctggtcagcaaggagagggggtggggttccgcggaaggttctggaggggtcttggtaggtctgcagtgaaccgtcctgaggatggagtggggtcccatggtgcaggtctctgagcaaggcggaggtgtggaggagaggccggcttggggtggggcctcgcgccctagtgccggccggcctcagcccggctctgcctggtgctccctgcagtgccttctccatggccccgccctccccgcgtgtgcgccaggcctggggtccccgggagagcagagcttgcgcctcgggcatagggacgtggggtgcaggcgccaacatcagtggcagcagccagggccgtggtccagtcccactcggggatggagtnggccggcggccaaaccagtcactcggggaggaatgcggaggagcgctcattccattctatttaattgcagtgtacaaaattgtgtttgtatatagaataaactgtctgttgacagcgaaaaaaaaaaaaaaaaaaaaaaaaaaagggcggccgctcgcgatctacggacgcgtgggtcgacc

SEQ ID NO: 865 - DNA, 2892 bp, Homo sapiens
cttccttgaattctttgcgtggggcctgttgacaactccaatgttgactgttctacatgaaacattttctcaacacacattcctcatgaatggtctcattcaaggtgtaaagggcctgctctcttttttgagtgccccactcattggtgccctgtctgatgtgtgggggaggaagccctttctcctcggcactgtattctttacctgcttcccaatcccactgatgaggatcagcccatggtggtattttgcgatgatttctgtgtctggagtcttctcggtcacgttttctgttatatttgcctatgtagctgatgtcactcaggagcacgagcgaagtacagcttatggatgggtctcagccacctttgsggctagtcttgtcagcagcccggccattggagcatatctttctgccagttacggagacagcctcgttgtgctggtggccacagtggtggctcttctggacatctgcttcatcttagtggctgttccagaatctctgcctgagaaaatgagaccggtttcctggggagctcagatttcttggaaacaagcagacccttttgcgtcgttgaagaaagttggaaaagattctactgtcttactaatctgcatcaccgtgtttctttcataccttcctgaagctggacagtattcaagtttttttctctatctcaggcaggtcataggttttggatctgttaaaattgcagcattcatagctatggtaggaattctgtctattgtggctcagacggcctttcttagcatcttgatgagatcattaggaaataagaatactgtcctccttggcttgggcttccagatgctccagttagcctggtacggttttggatcacaggcctggatgatgtgggcagcagggaccgtggctgccatgtccagcatcacgtttccggcaatcagtgccctcgtctctcggaatgcagagtcagatcagcaaggagttgcccaggggatcataactggaataagaggactatgcaatggcctggggccagcactgtatggcttcatattctacatgttccatgtggaactgactgagttgggcccgaaattgaattctaacaacgttcccctgcagggagctgtcatcccaggcccgccgtttttatttggggcatgtatagtccttatgtcttttctggttgccttattcattcctgaatacagtaaagccagtggagttcaaaaacacagtaacagcagcagcggcagcctgaccaacaccccagaacggggcagtgatgaggacattgagccactactgcaagacagcagcatctgggagctctcttcatttgaggagcctgggaatcagtgcactgagctgtaaactcggcagaaagtgggattctgcatacgccatctctgagagccatggagggagccacacccctggtgacttcatggtgctggatgggagacgctagcggcatccttcagggccaagtttgataaataccaccgccatcattctgctcatcctcctcctgtttttttttttctcttacattctttttttttttcctgtttatacattagaacaagataagatttgaaatacttccttgcaaataatgtgcaactcccaaggtgaaactcaaatagaaaaagtcatctctctggtagaaaggatggctttcctgtaatgactatagagtaagagtggcagcaatctttccatgcccttttcagcagaaggcacagaacagtagcgggactgccatctctggcaagatttcaggtaaagaatctcttcttaatttctaccttcctgtttctctgaatcagcccataggtgttgatgagtggccactcttaaagagtcactcagtatcagggatctactgtctttgttcaaaggtcaaataaaaacctagtctccttttattctactttctattcttagctagaatgaaactcagcatatatacacttctggacataataatattgaatagtaattacctttactagatgaaagaaattttcattacaaacttaaatcatgtaaaactcaacaactcagattcctggacctggtgtcctggttgggtccaaggtgattttacagaagaaaaaaacaactcaagcattctggtggcaacatagagattgtaggctgcttctaagaaagttattaacaatttggaaattcctaagtaggatgagagttagtaactggatacgagtgaagtttatatccaagttcagactcaaaggcattattatgatttgcttcttcccatgtcttccatgtcctgcttctcaaagtttttctcatccatcacactcctgccttaactgctctgagtatgcatttgttttcaattcatctttatttcaatctgtttaacttttgaatcgcatgggaatacgcacattaagttcctttctaaaataaggttttatgaagctgagtttcacgataagtgtcttgctattttttgagatgttttatggacaaagaaaactttacagatttatatgtattttgctgcaccagtaaatggaccattaactagggcccacctttaacagagcacccctttgaaagttttataggtatgaaatatatgtagatatttgtaaagggttttaattttttttttgatggggtgctgtgtaaatcttgtatttataaatgtaatgaaggtattgacagaaaaaaatatatacaacttttataaaggattgtgtactgactgaatacatttaaaagaaaatatattttgaaacctgttctgctatgaacagagataacatatctttttactatgctattggtttttaggttaagcttcctaatgcataataaatttacagtggttamttttaaaaaaaaaaaaaaaactcgag

SEQ ID NO: 866 - DNA, 756 bp, Homo sapiens
gcgtgcaccagccagacctcatgaactcaggaaggtgcttgtccaggagttcctggttgctgtgcccttcacaggcaaagactgcattycttcctcagctgycagtgaggtgctgssaggattccctgtagaactktcaggccagtttatgaactggttggmaccygtgtcctcytcctggcccaggmaggagaaccatgagcaggcagaaggagactttgcaaagtgccttccccagcatgtgtgccctctgcccttcagagcctgcagatakkaggggtggcaaggacactgttctcaatgagcagaacctccaagacacccaaagctgcctgtttgccacctggccctatgcctgccccgttttctccctcaaggccttcacccatgctagggcagtcacctggaatgtcctttccattacccctgctgtaatgcccagcacagaacttgatggcaggcctttgcatggtagcctgaagcgatctcacccttctaactgggtttgccacaggcacactggctcatgcttacctgtgctgcctgtggttatagttatgcgaattgtggttttacatccctaaaacagaagggcacggtgtccaggggatagcacccagcccaacttcagtgtagacctgagctgggagggaacctgttagtctccccacctcttccctgaagagacaggcacccctcccagccgtggtcaacggagggagtggcacttctgccttgagtccccaggggaaaaaa

SEQ ID NO: 867 - DNA, 933 bp, Homo sapiens
gtgctttccggcgctctgccttccggtgcgtcgtttacgccagtttgaaccaaagacgcccaaggttgaggccgagttccagagcatggggtctcggttgtcccagccttttgagtcctatatcactgcgcctcccggtaccgccgccgcgcccgccaaacctgcgmccccagctacacccggagcgccgacctccccagcagaacaccgcctgttgaagacctgctggagctgtcgcgtgctttctgggttggggctgatgggggcgggcgggtacgtgtactgggtggcacggaagcccatgaagatgggataccccccgagtccatggaccattacgcagatggtcatcggcctcagcattgccacctggggtatcgttgtcatggcagaccccaaagggaaggcctaccgcgttgtttgaaagtaccaccagtgaatctgtcttctgtctctgtccctttccccgtgacacacagagcaggcatggaatttaatgggtgttctggacagacacttgtacatggacagacatcactactgtggatactacaagactgaaaagaaaatcgtatgttgtcattctctggctatggagtgtttgtggccttcacagatttcacaggaaccaataaatccctcagagaagtaaaaaaaaaaaaaaaaaggtckttattaamggcgcagctatcccttagtaaggtatttacttgactgcgtcgttaaagcgtactggaactgggtcgacttatcttagaaccctttcactggtatacaagcccagatcttctaattgcccaagcaagggccttccggtaaacgggtgtttggtcgaaaaaccccggtttttctttggtggccaacatgcttgcatgtcgccaattgcggtctgatctggggtagctacacctttaccttaaaaaaagcggttat

SEQ ID NO: 868 - DNA, 553 bp, Homo sapiens
gctagggctactgctcgtcttcctgggcatcctttgggtgaagatgggcaagccctcagcgccgcagagksggaggacracatgaagttattgccagtggactgtgagagaaaaacagatgagttctgtcaggccaagcagaaggcagccttgctggagctgctgcatgaactctacaatttcctggccatccaagctggtaattttgagtgtggaaatccagagaatctaaaaagcaaatgcattcctgttatggaagcccaagaatatatagccaatgtgaccagcagctcctccgccaagtttgaagccgcactgacctggatactgagcagtaacaaggacgtgggcatctggttgaaaggagaagaccagtctgaattggtgacgactgtggacaaggtggtctgcctggaatctgcccacccccgcatgggtgttggctgccgcctgagccgggccttgctcactgctgtcaccaacgtgctcatcttcttctggtgcttggcttttttgtgggggctcctaattctcctaaaatatcggtggcgaa

SEQ ID NO: 869 - DNA, 1356 bp, Homo sapiens
tcgacccacgcgtccggttttttatgcaytwgagtcttggatcaagtaygatgtacaagaacgycagaaatacttagcacagytactwaayagtgtrmgattaccattgytgagtgttaagtttctcactagactatatgaagcaaatcatcttattcgtgatgatcgcacttgtaaacatcttttgaatgaagccctaaagtaccactttatgcctgaacatagactctctcatcagacagtcttgatgacacgacctcgctgtgctcccaaagtactttgtgcagtaggagggaaatctggactctttgcctgtttggatagtgtggagatgtactttcctcagaatgactcttggattggtttggcacccctaaacattcctcgctatgaatttggaatatgcgttttagaccaaaaagtatatgttataggtggtattgcaactaatgtgcgtcctggcgtcactatcagaaaacatgaaaattcagtggaatgctggaatcctgatacaaatacttggacttctctagagagaatgaatgaaagccgaagtactcttggagtagtagtacttgcaggagaactttatgccttaggtggttatgatggacaatcttatttacaatctgtagagaagtacattcccaaaataagaaaatggcaacctgtggcaccaatgacgacaacaagaagttgttttgctgcagcggtattggatggaatgatatatgccattggtgggtatggtcctgcccacatgaacagtgtggagcgttatgatccaagtaaggactcctgggagatggttgcatccatggcagataaaaggattcactttggcgtgggtgtcatgctaggctttatttttgtggtgggtggacataatggagtctcacatttgtccagcattgaaagatacgatcctcatcaaaatcagtggactgtgtgtagaccaatgaaagaacctagaacaggagttggtgctgctgtaatcgataactacctttatgtcgtcggtggtcactcagggtcttcctatctgaatacagtgcagaaatatgatcctatctcagatacgtggctggattcagctggcatgatatactgtcgctgcaactttgggttaactgcactttgacaaatgtgaactctcggaaatagtatggtggtgaaacttgtactgcatgaacatccggatggcccagttttctgaaacccacaagctgcattgctttctttttaacttgaagtagcatgaaggctcaaaagttttgttgggtacttttaattgagaagtagttttggttgctcttgattacacagtaaatcaataatcaaaaaaaaaaaaaaaaa

SEQ ID NO: 870 - DNA, 703 bp, Homo sapiens
gcaaacattggacatctctgacatattttttctcgttttcagcttttcggatgatcccttatcccttggaaaaggggcacctattttatccttacccaatctgtacagaaacagcagaccgagagctgcttccatctttccatgaagtctcagtttacccaaagaaggagcttcccttctttattctctttactgctggattatgttccttcacagccatgctggccctcctgacacatcagttcccggaacttatgggggtcttcgcaaaagctatgattgacattttctgctcggcagagttcagggactggaattgcaagagtattttcatgcgtgttgaagatgaactggaaatccctccggcacctcaatctcaacatttccaaaactgaactcatcacccctcttcccccaccaccaaaactgctcctcctcctgtattcctracctccgccatccaccccgttgctcaagcsggaaactcggcagcccttccaaactcttccctctctcactccccacatcccatcgtctcggccttcacaatctgtcagttctaacctcctaagcaactaggccttcagtaaatgtgattcacctcttctttccctccttttcccaaaagcatccctcttagtctaggtcctttgttggtttcttggcttgaacttctggccataagtcttaacttggggctccc

SEQ ID NO: 871 - DNA, 1239 bp, Homo sapiens
  misc_feature (456)..(457): n equals a,t,g, or c
  misc_feature (1128)..(1128): n equals a,t,g, or c
  misc_feature (1166)..(1166): n equals a,t,g, or c
  misc_feature (1186)..(1186): n equals a,t,g, or c
  misc_feature (1206)..(1206): n equals a,t,g, or c
  misc_feature (1218)..(1218): n equals a,t,g, or c
gttggtgctgccatccactaaggagaccttcaggttcaagctaactccaaatcctacgaagcccttctcttctgctctgtggctggcagcccagctcttgtaacaaaggcatggaaattgacagcagctatagccacaatctgaggaatggcagacaagaaacagcagagtaggcctcaaggagtcactgaagaacccagggctcctctttttagctcagagccatttagctgaaattgatgagtggatggtctttaagtcattctcccttgattggtcagtggcctgtcacagataactggcttgggagctgcctccatgctcctgagggtcttcttggtggttgtcacacagtgtggctgctgagtggggacaggctccttgtgaatggtgtgctctgtctaacctctctcattcccgccctcccgactcaccgacgtgcatgctgcccacatnncccctgcccaagacaccccctgcacccccatctgctcccctcgtgggcagcaggtgcctatgccttgtctacctttctgctcctcatccctacagtgagggagactctgatgtggactcggagctggaggaccgtgttgacggggtcaagtcctggttgtcaaaaaacaagggaccttccaaggcagcttctgatgatggcagcttaaagagttccagccccaccagctactggaagtcccttgcccctgatcggtcagatgatgagcacgaccctctcgacaacacctccagaccgcgatactcccacagttatctgagtgacagcgacacagaggccaagctgacggagactaacgcatagcccaggggagtggttggcakccctctcaccccagggcctgtggctgcctgggcacctctcccaggaagtggtggggcaccggtctcccccacccgactgctgatctgcatgggaaacaccctgaccttcttctgtcaggggcactttycaggctatgggtgkctgatgtctccacgtggaagaggtgggggaaagaggagkttctgaagagaactttttgstcctytgkctcaaaawgscagactcttggcttctacccctgtgtcaccgtgggccagtggcaaggtggcctggcactgcatggaagncaagcacgttgaccttccttctcagcttccctgctcanggacggtgggacagggttgnctactgggacactcttaagntgcttgggtccnttggggaaggattgggggaag

SEQ ID NO: 872 - DNA, 1429 bp, Homo sapiens
  misc_feature (3)..(3): n equals a,t,g, or c
tgnccaggtaactttacacttacaatgaattcatggattttgttagcagcattggctttctcaaaaggacaaactcaatatcgttataaaatataattcgtgatcacaaattatacaaaaatcagtagaaacagttttttatgttcagattaaaaaaaaaaacttgggataattttaratttacaraaaagttgcaaagatacatggagagcttctgtgaccactcacccagttcccccagtgttaaccttttatttaaccatgaagcatttgtcagaagctaagtaaccagcaatggcaattactattaacggaactttgactttatttttcagattgtactagttttttaattaatgtcatttttcttttccaggatccaatctaggataccacactgaattagtcgtcatgcctaattagcctctggtctgtgatagttccacagtctttctttttcataaccttgacagttttgaggagtactggtcaggtgttttgtagaatattcctcaatttgggtttgtctgatgttttcctcatggttagagtggggttatagatttttaggaagaataccagaggtgaaggtccttctcactgcatcatgtcaggagttacatgctatcagcttgatggtgtattaactttggacacttggttaaggtagtgtgtgttggttttttgctgctgaaaattactgttattttccctttccatacttctgttctttggaaaacagtcactaagtccagtcatgggaggtggtgggtgggaaagattacattcaaccccctggaagtgggaatatccatatgtagtatttggaatttttctatatggaaaatttgtttctccctcccaccctaatttgtttacatcagtatggactcatgtatattttgtattttgggtaacacagtatttattttgttgcttaagttgtccagcttggctattaggagttctgccaggttggctactatgtccctttgatgtgcccatccttttgatttttgagcacttcttactttctggcactacaagatgctccaggttcatcttggatattccctgccccaaccctagaatccctagaatcaacccctgctccaaagagccctggttccttttgttggagaatcatacttagaaaccaagatctgggcattagatgtgcttgttgctactgggatgtcactgtttgtagcagagttgagaaatatgtatgtatattaatccatgcatatgtacacatctataattatttatgtgtgtacaaagctaaacatgagtttgtactgccgtcttcaactcaaaatttgtcccaaaattttgtggcatatgtttagattttaaagttgatattttccctattgacagaataaactcattaaaagagcaaaaaaaaaaaaaaaaaaaaaaaatt

SEQ ID NO: 873 - DNA, 805 bp, Homo sapiens
ttttttttttttttttttttttttcttttaacgttataattttatttcaaagaaaacagaaacagaacaaaaacaacctttgcatttgagggaggagattattttacagttttggaaaagaataagaacaattgtatcaggaaacaaatgattatgacagaaactcgcatccgacagctgcagtgaatccacgaggacacagaccatgctggtggccacagcagggccacaggtgaatccacaaggaaacacagaccatgctggcagccacggcagggccacagggcacggtctccatgtgttaatgtttaatgtcagcattttcatatggacagaaatcacgaagaaatcctgcaaaaatggcatcaatatgaacaaacccttgttataaaaagcaaaatattgataggaacaatatcttccagcgtgtgcgtttcacatttaggctttactgtatgaaactaagtcaaaattagaagcactggctatctccaccgacatatattttaactgaatataaacttcaaggcttttcttaaccataggcttaagaggatttcttttatgcagaatgtgaccagagcaacaaatacacctaaactgtttgaagatgggaaatttatacatgaaatgagctagcaggcttcctttggtatggggacactgttattctaaaattaaaaaaaaaaaattgaatggaagtggactgcttcaagatggtaacacttgtagctgcaatttttagcccagtagagaatgaaatggaaaggcagctacatgctgactgcacaagcaggtgcacccc

SEQ ID NO: 874 - DNA, 2229 bp, Homo sapiens
  misc_feature (262)..(262): n equals a,t,g, or c
  misc_feature (1358)..(1358): n equals a,t,g, or c
agctcactaagggaacaaagctggtgctccaccgcggtggcggccgctctagaactagtggatcccccgggctgcaggaattcggcacgagaggaagcggcgcacggtggcctcgggtgccacctgctgcaggtcggccatcttgaagtcgtaggtggctgtgtagcccacgttggccagtgtggtctcacacatgtagaaagtcccgtaagagccgtggaagagctcctccacgaactccagcaggccgatggcgatcttngcccgccaaggcgagcacagcaccgactgcacctacgggcgcgactgcagggccccgtgtgacaggctcatgaggcagtgcaagggcgacctcatccagcccaacctggccaaggtgtgcgcactgctacggggctacctgctgcctggcgcgcccgccgacctccgcgaggagctgggcacacagctgcgcacctgtaccacgctgagcgggctggccagccaggtggaggcccatcactcgctggtgctcagccacctcaagactctgctctggaagaagatctccaacaccaagtactcttgatggggcagtgaggggcctggccacccttcctggagctggccaggtgccagggtccarccctccctcaaggaatcctgtcagaagatgtgaaatgcaactgtgttgcaaaatcactcccctaccgtcagggctctggattccagcaccacagacatgagaccccagctcggagcaaaggcggacatggacatcccggcaggagagtcctccaagggggtttgttactctgaagaacgtaatgtcaataaacagcttttatgtaatgcccagggctgagcaccctgagcccccatcgatgctgtgtgtgggacccttcgccccgctgtggatccacccagcccaggcactcaggctggggttgagcccctgaatccttcctggcgargyrgccctcargtgttagtccaaggtgaggtctattgcagagtgcctgcccttcaacccacacacacctctgaagccgccagggcagttccccaaacacagcggcttctgaaacagtcaatgaccagtaccccccaaacctgggctgtgcacaacagaccaagaaaaaggtgttccagtaagaaaacagatatatgcggtattttaaaaactgattttacaaaatccagccatgagatgtacaactcattccctaggaaacagcccaggaatggccatcttctccagccccgtacgctctccccagtagcccagggcacccagcaaccatcccctaggagaacaggcaaggaccctcgtgggaagatcccaccacagcaacacctttcttcagggcgggctctgntccgcaatgtgtgagtcaagacaatccattccattcaagaccaatttactctcaaattttgccaacacagaaatattatccttaaagaaatgtgcatttaaatcttttaattcacttcatcctgtattttaaaataaatgttttccatatagattttccccttgggggggaaaagaattcagggtcttaggttccaggcagttcaaaaacagccacgcggttcttttttctccaccagaataccacaatagcagaacttaagaatcgggatatgaaaagggaggcgtggtcctggcagtggcccctggccggcaggaatacacagcaacacccaggcaggggcagcggctgcccccatgccagcctgcccatccctttattccagccagcctcctggcacagggctgggcccacatcctggcctctgcatctggatcagggctggtgctggtcagcctggtcactctggccagtgctcacactggaagtccatcacaggcgaagtcacctccttcccgtgttaaataacaagaatgccaacaccccacgcacgtgtcatctccagtgagcagacgtccaggcttcccgaagcttcctggctggaaaccgcgcagggccggcagcgccctctccaccaagggacacagcagcggcgcctcctccgcggcccgggcccccatcccgcggctcgcgctgccaggacgccccaggtcggagcctgcccccaccccgcacccggaggccagcagcccagtcccctaggccgcgcagcgccagcgagagcgaggctgcagggcgaggcccggtgaggcgctcgagaactggccgggaggagaagtcaggcggacgcgtgggcggacgcgtgggtcga

SEQ ID NO: 875 - DNA, 633 bp, Homo sapiens
  misc_feature (593)..(593): n equals a,t,g, or c
  misc_feature (606)..(606): n equals a,t,g, or c
ttcctttttttttttctccagatcccacgtttcgctcttgttgcccacagctacttacttcattccccatgggtcacgtcattcatccacattaaccaatttcctcactccaagctcttttctagagataatctccagtccctgtgcagaaactgtcattgcactttctgctgaaatggcagtttcttctcagcaaggtgagattatggaatccagaatcttttttcaggggtcacatgcccatttccccacttgcatgaatgtcgacactgcagccacagttttggccgtaaatgtgaatttggcaagtaaccactgttcccagggaaatgtcccaatcagaagaagattatctgggacactgatactgacagggagatgggacattctgagggacccggaggcagggtgccacctcctcaacttccctgagggctgcctaggaatctgtttcctcttcattctggaattattcttcctctttatgggctgaccaaaaacatgggaaccttcacaaagtccactgttaacagcttttwtttttgtggargtkgarggacatggaggacgtttttaaggccaaagtttatttngagttggggacanttttgtggttttttttttttgaggaag

SEQ ID NO: 876 - DNA, 1177 bp, Homo sapiens
ggcagagctgacgttccccccagcttagaccctgagtcgttttcccccgtttcccggctgaattaggttcttcttctccacaggtgtgtgcagtggcctcagggatccggaaagtctaggactgaacttctcctaacatccagtaatggggacctggaacctgggcgtactagagtgccgcgcgtagggctccaggtcgctggcttctgcgctttcttcctctccaaagttgagtatctcctatctgtgtcctcatacatactgccgcctgaggtgccatggcccccaagccgggggccgagtggagcacagccctgtcccatctggtgctgggagtggtgtctctgcacgcagccgtgagcacagccgaggcaagtcgaggggctgctgctggcttcctgctccaggtcttggctgccaccaccacgctggccccagggctgagcacacatgaagactgccttgctggagcctgggtggccaccgtcatcggccttccccttctggccttcgatttccactgggtgaatggggaccgctcctctgccaacctgctcctgggaggaggcatggtgctggcagtggctggcggccacctcggccctgaggccktctgtggctggtcaggcaatgctgttggtggtcgcagtgaccatcctcattgtagctgtcttcacggccaacacttatgggatgtgggggggggcgatgctgggtgtggcaggcctcctgagccggctggaggaggacaggctgctgctgctaccgaaggaggatgtctgtcgctgggccttggctgtaggcagctgggcttactgccgggccctgcatacacagcgcctccagtgggagtgacagttggatacagccaggcagggtttctgccctgccgaacactttccctcccacctgcctgctcctggcgccttctccctaggggtagactcttctgcctactgaagtgggtttgctgcacattgactggtcaggggcagagtctgggtgctgtcctttggccacgtgtggggacttgtctagaccagaatgaaagggacagggtcccagacacgtttgggggtcctgattctgggctggacacggttgtggatccagagaagaggcctagtctccaataaatcttaggaattttgcaggaawaaaaaaaaaaaaaagtttt

SEQ ID NO: 877 - DNA, 755 bp, Homo sapiens
ggtaacaacaaaatttgttcggacatcaacaaataaagtaaagtgtcctgtatttgttgttaggcatagcatggaaaacctttttgaaaagaataaaatccgagcatccatatcttataagtggactccagaaggaagacgcttggtcactggagcttctagtggggagtttaccctgtggaatggactcactttcaattttgaaacaatattacaggctcacgacagcccagtgagggccatgacgtggtcacataatgacatgtggatgttgacagcagaccacggaggatatgtgaaatattggcagtcgaacatgaacaacgtcaagatgttccaggcacataaggaggcgattagagaggccaggtttatacacaatataccattttctgtagtccctattgtcatggttaaattattctctaagtgtattctgggtgcagagatgcatgggctctgtcagtttctgggaaactttctgcaccctataaacacaatatttttctttgttttcacacattcaccattttgctggcacctttctgaagtagtgttgtcccggtatcagcctttgcaatatgttagagatgtactgtctgccgcattttgcactggttttctcttttcatttatgattaataatgtgtatacgttattcctttttattatctactgtgtaagacaagaatatttcattccaaataaagaattcagtctttaattatgcaactgaataaaatctaaagcctaaa

SEQ ID NO: 878 - DNA, 556 bp, Homo sapiens
gtttagcacaaagaaaagccatcttggtgcaaagaggctttaaattactatggactggcagtcaatcaaaatccaggaattgatgtctgatgatcagagagaagcaggtcggattccacgaacaatagaatgtgagcttgttcatgatcttgtggatagctgtgtcccgggagacacagtgactattactggaattgtcaaagtctcaaatgcggaagaaggttctcgaaataagaatgacaagtgtatgttccttttgtatattgaagcaaattctattagtaatagcaaaggacagaaaacaaagagttctgaggatgggtgtaagcatggaatgttgatggagttctcacttaaagacctttatgccatccaagagattcaagctgaagaaaacctgtttaaactcattgtcaactcgctttgccctgtcatttttggtcatgaacttgttaaagcaggtttggcattagcactctttggaggaagccagaaatacgcagatgacaaaaacagaattccaattcggggagacccccacatccttgttggtttt

SEQ ID NO: 879 - DNA, 608 bp, Homo sapiens
  misc_feature (561)..(561): n equals a,t,g, or c
  misc_feature (596)..(596): n equals a,t,g, or c
  misc_feature (602)..(602): n equals a,t,g, or c
aaaaatgggatgaaccttggtataaccaaaaaacagaacatcaaagaaatagcagtaagattctgagatttatttcagacttccttgcttttttggttctctacaatttcatcattccaatttcattatatgtgacagtcgaaatgcagaaatttcttggatcattttttattggctgggatcttgatctgtatcatgaagaatcagatcagaaagctcaagtcaatacttccgatctgaatgaagarcttggacaggtagagtacgtgtttacagataaaactggtacactgacagaaaatgagatgcagtttcgggaatgttcaattaatggcatgaaataccaagaaattaatggtagacttgtacccgaagaccaacaccagactcttcagaaggaaacttatcttatcttagtagtttatcccatcttaacaacttatcccatcttacaaccagttcctctttcagaaccagtcctgaaaatgaaactgaactaattaaagaacatgatctcttctttaaagcagtcagtctctgtcacactgtacagattagcangttccaaactgactgcactggtgaggtcccggcanccaacnggcacc

SEQ ID NO: 880 - DNA, 528 bp, Homo sapiens
  misc_feature (511)..(511): n equals a,t,g, or c
agatttttttatatgtttattttatctctgtcttttctgacagtctttatatttgcattcgttatcacccacgtcattcttcgttcacagcaaacaggattcctaaatgcccttaaggacagtcctgcaagcgtcctggaggctgtggtgtgcttcttctctgtctggtccatcgttggcctctcaggattccacacctacttgatcagctccaaccagacaacaaatgaggacattaaaggatcctggtcaaataaaagaggtaaagaaaattacaatccctacagctacggaaatatcttaccaactgctgtgttgcccgtgtgggcccatctcaccaagcctgatcgacagaagagggtacatccagcccgacacgccgcagccagcagcaccctccaakggcatcaccatgtacggggccacgcatcacagatgacatgggtgcagcacgcccctgtgcagagcgagcccagcttcaccagcgamgagctgcacctgcccggggaancctgggcctggggcaag

SEQ ID NO: 881 - DNA, 723 bp, Homo sapiens
ttttttttccawgtacwtgaaaaatccattctcttggtgtcactacmagtctgcttagttttaagtgaaattccttttatgtctacttggtttttacttgtgtcaacatttagtatgctacctcttctatwgaaggatgaactcctaatgccctctgttgtgacaacaatggcattttttatagcttgtgtaacttccttttcaatatttgaaaagacttctgaagaagaactgcagttgaaatccttttccatttctgtgaggaaatatcttccatgttttacatttctttccagaattatacaatatttgtttcttatctcagtcatcactatggtgcttctgacgttgatgactgtcacactggatcctcctcagaaactaccggacttgttttctgtattggtgtgttttgtatcttgcttgaacttcctgttcttcttggtatactttaacattattattatgtgggattccaaaagtggaagaaatcagaagaaaatcagctagctgtattcctaaacaaattgtttcctaaacaaatgtgaaaatgtgaacagtgctgaaaggttttgtgaactttttgctatgtataaatgaaattaccattttgagaaccatggaaccacaggaaaggaaatggtgaaaagtcattgttgtctacacaaaataaatgtatatggagaccaaaraaaaaaaaaaaaaaaaaaaaaaaaaaaaaaa

SEQ ID NO: 882 - DNA, 1092 bp, Homo sapiens
  misc_feature (882)..(882): n equals a,t,g, or c
  misc_feature (927)..(927): n equals a,t,g, or c
  misc_feature (1071)..(1071): n equals a,t,g, or c
  misc_feature (1078)..(1078): n equals a,t,g, or c
gggaactggcatttgacacgagctcagctgatgttcgttgttctgtctttaagtgtctgccaatgattttggacaacaaactgagccaccccatttttagagcagctccttccagctctcagatacagtctccacgacaattcggagaaagtgagggtagcttttgtkgacatgctgttgaagatcaaagctgtgagggctgctaagttttggaaaatatgtcccatggagcacattctggttcgtctggaaactgattctcgacctgtgtctcggcgcctggtgagcctcatctttaattctttcctgcctgtgaatcagccggaggaggtctggtgcgagcgctgtgtcaccctggtgcagatgaaccacgccgctgccaggaggttctatcagtacgcccacgaacacaccgcctgcaccaacatagcaaagctgattcacgttattcgtcattgcttaaatgcctgtatccagagggcagtgagagagcctccagaggacgaggaggaagaggacggaagggagaaggagaatgtgactgttctggacaaaacactgtcagtaaacgatgttgcatgcatggcaggtttactagaaatcattgtgattctctggaaaagtattgacagaagtatggaaaataataaagaggccaaactttacacgattaacaagtttgcctctgtgcttccagagtatctgaaagtatttaaggatgatcgctgcaagatccctttattcatgctaatgtcctttatgccggcctctgctgtccccccattcagctgtggtgtgatttccacgctgagaagccgggaggagggcgctgtggacaagagctactgcactttgktggattgcctctgctyctgggggcangtggggcacattctggagcttgktgacaactggcttgccacagancatgcccargccaagarcaacacagcttctaagkaaggtgcagatccatgacacacgcccagtcaaacctgaattggcattggtctacattgagtatctgctgactcatccaaagaaccggagkgttgtttttgtcttgagaanttacctntttgaaccctgaac

SEQ ID NO: 883 - DNA, 2991 bp, Homo sapiens
  misc_feature (11)..(11): n equals a,t,g, or c
  misc_feature (50)..(50): n equals a,t,g, or c
  misc_feature (88)..(88): n equals a,t,g, or c
  misc_feature (110)..(110): n equals a,t,g, or c
  misc_feature (254)..(254): n equals a,t,g, or c
  misc_feature (258)..(258): n equals a,t,g, or c
accttaaggtngcccaaaaggctttttggccaggcccttctaggaagggnattcctttccttaatatccccagtccccaacttaggcnttatggatccaggatttccaancttaattggcactaggtatcctaaatactcaggggaatcctttttggctccactatatttactttaacaggatttccctttcccacwtacatacaccwtcatggctargaamccmccaagtttttcttctatcccccactaaanttancaggtttcaccaacttgaawttataggggactatggggaaaaccrgagaagtatatggaagaaggaagaagtgtgaataggtcctacagaattttacaatcactttgccaagacaactataaatactatgaataattacttgaaatcaggttgtgtagaatctatagttctcttaaaaacaagttttgattctcaatattgcatttttataccaaataaaaggatttagatctaacgtattttagtagcatacttactacctgcagactaaattcatttctcaagtactctaaaaaacttcaaatagaacaaactttatgagatgctataacttatcacaaaagaaatattagcatttataaaattaagataataaaatgtaaaagctaaaaaccaaaatttgccattcatatttaaatataacatagaaaaagttatgtggataatatgaaaataaaattgtttaggtgaacaattcacttgaagacactcactgtttctccttctgagtaactaaccattatagctttttattgatgaaacatcattatctcacatctgaaattctttggctggaatgttttagtaacataagacactcctgtatataacaactctgacagaacagaggagttgcaaaataaaaaaagtaggagtcatattttaaagcatttgataaatttttaaataaattttttaaaatgtaaagccaatctatcaccaaaaatggcataaatgtaaacacaagctaattttataatccactgctattttaaataaaataatttggggttcattattttgcctttttagttttgtatttagcatagaagtaccttctattgccactaaagacatcacattagttttaaaaatggaaaagaaaaaacaaaatgcaacaaaacttatgagtttaatttgtgaattttagaactaagaattacaattttctgttactattgtaaaatgggattatctgaccacatagttaacattttaattacatcaaaaaaaatttaaattttttttttgtatttttaaaaataaagcaaatttatgtacttgtaaatactttttaaagaccaacaaatgcacttcttaatctactgcctttatacaaagattaaaaggaaaaaaaagctttatggctccagcacccaagattgagaacaaaaaatacctcaaataaatatttataacttgcaaaaaaaagctaaagatgtttgaaagattaaatgaagaaacattctgaaactagaacccatttctttagcttttctctcccagactttccattctatatactacagttgtagagatgtcctcatttgactcaggtgacacttttttccatactgtctcttttaaagcaagttcttgttggagactttcatagtccaatggtccaaaggaatgcctttgatcaccaccttctcttcgaggatcaagtttttttgcaaagtgtctcaaattatcatagttatggaaattacacagagaaacaagatcgtgacaaaagtgaattcccttaacactgttgcccatcttatccagaggaggagaccagcacatcatacccataacattggggacaactaaaagaatgcccccagcaactccagattttgcaggaagaccaacatggaaagcaaactgccctgagaagtcatacatgccacaggaatgcatcaaactcaatgtatttcgaactgcttcagggctcagtactctttcaccagtaattgggcagaaaccaccattagccagtgtcgcagccatcacactggctgattcacaagtcacttcaatggagcacagctggaagtagaagtctaatataccaaccatgtctgtgccttctggaaaacacttcttttcttttaagtaatatcctattgcaaaatttcgatctccactttctctttcagactgaaacgttgcattactgaatccaacatattcattaccagccatcttattcaaaaactgcatgacatagtcaaatttttcagcattatttactccttgctttattagtgaagtcacaacaattgctccagcatttaccataggattatgtggtttatcatcttcattcaaaaatagtttgttgaatcttagtccactcggctcttttccaacatatcgatgcacatattcagttccaagatcattaacagcaatggcatatttcaaaggttttacacaggactgaagacagaagggaactttggtatctccagtagaatgcctctgtccatctactgtacaaacagacacaccccacaaatcgggactgaatttggccagttgaggaatataatctgcaacctttcctccagactgctttttagcactttcatataactcatcaatgtgtgaggtaaaagacataaagtcaggaatcacaaactttcttctaaatgcttgtgtcaacaaaacaatgttgctctgaacacattttttaaaaagatctttgtctagcatgacaccatctgatgttgtttgaagagttaatcttaacatatccatacactctttcaacctgggatcagacgttcgcaatcctgtagatttgagtgctgtaataaatttatgaacaggtattttctcttgtccttcagcaattgtatagaacagcaaatcttccaagctaggtaacagaccctgttttattttattttcacctgaggccaccagctctttgccctcgctgttgccaaacgcgtccgc

SEQ ID NO: 884 - DNA, 2155 bp, Homo sapiens
  misc_feature (2125)..(2125): n equals a,t,g, or c
  misc_feature (2152)..(2152): n equals a,t,g, or c
  misc_feature (2154)..(2154): n equals a,t,g, or c
ggcacgagccttccggcgcggggagggcgctgaagatcggggccgctcggccgcaccgcctccagcgccgcgggatgtagcgcgggggaccgcggcccccagcagagcccgcctgcccggcttgtctaccatcagagggagatctctgccccctggggctgagagaccccaacctttccccaagctgaagctgcagggtattgaggtaccagccagatgtcttcccacaaaggatctgtggtggcacaggggaatggggctcctgccagtaacagggaagctgacacggtggaactggctgaactgggacccctgctagaagagaagggcaaacgggtaatcgccaacccacccaaagctgaagaagagcaaacatgcccagtgccccaggaagaagaggaggaggtgcgggtactgacacttcccctgcaagcccaccacgccatggagaagatggaagagtttgtgtacaaggtctgggagggacgttggagggtcatcccatatgatgtgctccctgactggctaaaggacaacgactatctgctacatggtcatagacctcccatgccctcctttcgggcttgcttcaagagcatcttccgcattcatacagaaactggcaacatctggacccatctgcttggtttcgtgctgtttctctttttgggaatcttgaccatgctcagaccaaatatgtacttcatggcccctctacaggagaaggtggtttttgggatgttctttttgggtgcagtgctctgcctcagcttctcctggctctttcacaccgtctattgtcattcagagaaagtctctcggactttttccaaactggactattcagggattgctcttctaattatggggagctttgtcccctggctctattattccttctactgctccccacagccacggctcatctacctctccatcgtctgtgtcctgggcatttctgccatcattgtggcgcagtgggaccggtttgccactcctaagcaccggcagacaagagcaggcgtgttcctgggacttggcttgagtggcgtcgtgcccaccatgcactttactatcgctgagggctttgtcaaggccaccacagtgggccagatgggctggttcttcctcatggctgtgatgtacatcactggagctggcctttatgctgctcgaattcctgagcgcttctttcctggaaaatttgacatatggttccagtctcatcagattttccatgtcctggtggtggcagcagcctttgtccacttctatggagtctccaaccttcaggaattccgttacggcctagaaggcggctgtactgatgacacccttctctgagccttcccacctgcggggtggaggaggaacttcccaagtgcttttaaaaataacttctttgctgaagtgagaggaagagtctgagttgtctgtttctagaagaaacctcttagagaattcagtaccaaccaagcttcagcccactttcacacccactgggcaataaactttccatttccattctcctagctggggatggggcatggtcaaacttagccatcccctcctcagcaaggcatctaccggcccctcacagagacagtactttgaaactcatgttgagattttaccctctcctccaaccattttgggaaaattatggactgggactcttcagaaattctgtcttttcttctggaagaaaatgtccctcccttacccccatccttaactttgtatcctggcttataacaggccatccatttttgtagcacacttttcaaaaacaattatataccctggtcccatctttctagggcctggatctgcttatagagcaggaagaataaagccaccaacttttacctagcccggctaatcatggaagtgtgtccaggcttcaagtaacttgagttttaattttttttttttcttggcagagtaatgtaaaatttaaatggggaaagatatttaatatttaatactaagctttaaaaagaaacctgctatcattgctatgtatcttgatgcaaagactatgatgttaataaaagaaagtacagaagasacttggcattcaaaraaaaaaaaaaaaaaaaaaaaaaaaaaaaaaaaaaaaaanaaagaaaaaaaaaaaaaaaaggggaanana

SEQ ID NO: 885 - DNA, 821 bp, Homo sapiens
  misc_feature (1)..(1): n equals a,t,g, or c
  misc_feature (9)..(10): n equals a,t,g, or c
  misc_feature (56)..(56): n equals a,t,g, or c
  misc_feature (725)..(725): n equals a,t,g, or c
  misc_feature (775)..(775): n equals a,t,g, or c
  misc_feature (797)..(798): n equals a,t,g, or c
naagatgtnnttaaccctcactaaagggaacaaaagctggagctccaccgcggtgncggccgctctagaactagtggatcccccgggctgcaggaattcggcaccactttgtatgtatagtagccttttgccctcatcacaacttagtgtgaggtatgtgttcctgtcctaattctacagagaaggaaattggaattcagtgagttcatgttcttacagctagtgactggtcgatccasaattagagcacmggtccgtctgactccaaaacctatatgtgcttttcactataccacaataacaacgaatatttgttctgtacaattcacaactctttggtctaccttattattattattattattactaccactacttacatcttcactagtcagtargtacagccwagattatcacgacccccatttcactggtagggaaactgagactcggaagcttgcccaagatcacacagctggtaagtggaggagaaccaggacttcagacagacttcctgactccagatcttttttttctttccatgacatcacattgctgccttaattcatttgcacaatgcatgattgtatggccagtgttcactgacacctttcctacagaagtatcaatgagcccaggcattacgtagagccatgtggagaagaaaataattcatacctttcagaggagcttccattttagtgggggttgatacaaagcacccngaaagtaaatgccttgagaatagttcacaagttaagaatttaaaatatanggccgttgtttccataatgaanncccataaatttgggccataaaac

SEQ ID NO: 886 - DNA, 882 bp, Homo sapiens
  misc_feature (867)..(867): n equals a,t,g, or c
gcttccttgtaggaaatgaccttcactctgggtttaactggagtggcatcacctcccagggagacagttacttcctggaggargtggtgtttcctccacccataggtgccctgccccatcctcatggtggcagcaaatcagcatgtgctggggagaccctggggtagcagccactgacctcacacctggaggaagctgtgtgaccgattcatgagcttatgcctgaagacagagcaagcactccccgcaccacgacgatgacgttcacttgtwttgwgtttttcgatctcttcaacgccttgacctgccgctctcagaccaagctgatatttgagatcggctttctcaggaaccacatgttcctctactccgtcctggggtccatcctggggcagctggcggtcatttacatccccccgctgcagagggtcttccagacggagaacctgggagcgcttgatttgctgtttttaactggattggcctcatccgtcttcattttgtcagagctcctcaaactatgtgaaaaatactgttgcagccccaagagagtccagatgcaccctgaagatgtgtagtggaccgcactccgcggcaccttccctaatcatctcgatctggttgtgactgtggcccctgccgtgtctcctcgtcaggggagacttttaggaggccgcagccttccatcaccggatcagtttttcctcttaggaaagctgcaggaacctcgtgggctccagggacccaggcccacatccatccagcgttcccgctggctgtgggacagacagggaggggcctgtacagaaacaccacactgtttattaaatcacaatgatttttattaaaaaaaaaaaaaaaaaaaanaaaaagggcggccgc

SEQ ID NO: 887 - DNA, 1101 bp, Homo sapiens
  misc_feature (930)..(930): n equals a,t,g, or c
tcgacccacgcgtccgcccacgcgtccgcaaccccctctttaaaatgcaaaatggcccttccctaaaataacacacaaccacaaccgcagctggctctgcacgaaggccatgctgcagctcttttcttcggaagtcgattttcctccgtggaatttggctgggcttgtggtagcgtttgagactctgcaagagcacgtccacgccaaccagtctctggtcaccgactggctcgcaaattccccatttaaggaaaccagcaggcctctgttatgaaactcggggaaggaatgtgaattatgctccatgcggaggctcctgctcctgcacgttttccagccttttccatgggccacggtggagcatttggggaaggcctgtgtggattcccccccaagtccagactgatgcccctgataccttctcaggaggtggcggagggtctgggctctgtccaggctcctaggggtggggacgtgcaggtaaagcaaggcgtctgccgcagacgcgggagccttccctgggctggctgccagcaccttggagtcccaggctgccaggaaaagttcacccacacccgggctttgctggcgaagggtgagtcatatgatggccgggctcgggccctcagcagacaccaagtgtgttcccagagcagccgctcagcgcctgtaacctggaacaggccagcytttcggggsctcagttttctcatctgcctaatgggaatagcaattcccaccttccctgtgttggttgggttctcactagatgcacaggagacagcagcttkagagggactgtttggararctgttccatgtgacacccctcttaccctgtccccacggggccggaggagcaggggcttggtgatagcagctgggcgcagtcagcctctgcagggaagagggcatgtttggttcgaggctnytatgccctcattcttgttgatcttgtcacagcccctctggaaggtggagatggtactcgctcaggaacgataccactcaaggaagcatggccccctggatggggtggcccttggtgcacctgaggctcctgaggctgcagagcaccatggtgggggaggaggcggctgtg

SEQ ID NO: 888 - DNA, 1313 bp, Homo sapiens
  misc_feature (1249)..(1249): n equals a,t,g, or c
  misc_feature (1268)..(1268): n equals a,t,g, or c
  misc_feature (1283)..(1283): n equals a,t,g, or c
  misc_feature (1291)..(1291): n equals a,t,g, or c
  misc_feature (1295)..(1295): n equals a,t,g, or c
caacaccccatctctctctctctaaaaaaagagaactggccgtgagctattgtgcccagctgggatcttgacaaagacactatttctctcctttcacctgtgctgtgtatttttccctcgcctagttcccagacctcactgctatatgtcttctccctggcaggcaggatgacgcaaaacacggtgattgtgaatggagttgctatggcctctaggccatcccagcccacccacgtcaacgtccacatccaccaggagtcagctttgacacaactgctgaaagctggaggttctctgaagaagtttctttttcaccctggggacactgtgccttccacagccaggattggttatgagcagctggctctaggggtgactcagatattgctgggggttgtgagttgtgttcttggagtgtgtctcagcttggggccctggactgtgctgmgtgcctcaggctgtgccttctgggcggggtctgtggtgatcgcagcaggagctggggccattgtccatgagaagcacccgggcaaacttgctggctatatatccagcctgctcaccctgrcaggctttgctacagctatggctgctgttgtcctctgcgtgaatagcttcatctggcaaactgaaccctttttatacatcgacactgtgtgtgatcgctcagaccctgtcttccctaccactgggtacagatggatgcggcgaagtcaagagaaccaatggcagaaggaggagtgtagagcttacatgcagatgctgaggaagttgttcacagcaatccgtgccctgttcctggctgtctgtgtcttgaaggtcattgtgtccttggtttccttgggagtaggtcttcgaaacttgtgtggccagagctcccagcccctgaatgaggaaggatcagagaagaggctactgggggagaattcagtgcccccttcgccctctagggagcagacctccactgccattgtcctgtgagcygccaaagaccccacggggtgcccgcatgtccctgtctagggcagcccagggcccccactcctggctcctcacacttgcctcccctatggccgctctccagaccctcctcctttcttctccccacatccgcacctgctgttcccactctggggttctcaagtccatgaacagatattgttgcattttccacaatgctgattaaacataataaacaatccagaaaagcaraaaaaaaaaaaaaaarggcggccgctctaaaaggatncctcgaaggggcccaagcnttaagcgttgcatgngaagtcanaagncttttccctaatagtgaa

SEQ ID NO: 889 - DNA, 557 bp, Homo sapiens
  misc_feature (549)..(549): n equals a,t,g, or c
ttcggcacgaaggagactgtaaacaaagatatttgtgaaaagggaacaattcagcaaatgataggaatctttaaaaatataataagcaagcctaatgaaaaggaagaagccattgttttggaaatccagtctgatatattacttatcctatctggcstttgtgagaatcacattcaaaggaaggaaattttcggaactgaaggagtagatatygttcttcatgtgatgaaaacagaccccaggaagttacagagtggcttaggctataatgtacttctttttagtacattggacagcatttggtgctgtattttgggatgttatccctcagaggattattttcttgaaaaggaaggcatttttctccttttggatttgttagcattgaaccaaaaaaattctgtaatctaatacttgggaataatggttgaattttgtgaataatcccaaaactgcagctcatgtcaatgcttggcaagggaagaaggatcagacagctgctagtcttttaatttaaattgtggaggaaaggaggaaaaagaactaggngtaaaacg

SEQ ID NO: 890 - DNA, 1765 bp, Homo sapiens
gagaaaacaattctgaccggagaatgctgttacctgaaccccttacttcgaaggatcataagattcacaggggtgtttgcatttggactttttgctactgacatttttgtaaacgccggacaagtggtcactgggcacttaacgccatacttcctgactgtgtgcaagccaaactacaccagtgcagactgcyaagcgcaccaccagtttataaacaatgggaacatttgtactggggaccgggaagtratagaaaaggctcggagatcctttccctccaaacacgstgctctgagcatttactccgccttatatgccacgatgtatattacaagcacaatcaagacgargagcagtcgactggccaagccggtgctgtgcctcggaactctytgcacagccttcctgacaggcctcaaccgggtctctgagtatcggaaccactgctcggacgtgattgctggtttcatcctgggcactgcagtggccctgtttctgggaatgtgtgtggttcataactttaaaggaacgcaaggatctccttccaaacccaagcctgaggatccccgtggagtacccctaatggctttcccaaggatagaaagccctctggaaaccttaagtgcacagaatcactctgcgtccatgaccgaagttacctgagacgactgatgtgtcacaagctgttttttaaaatcatcttccaattctatacttcaaaacacacagttgctcaatgtcaaactgtgatgacaaatattacgtttatctagttagaagctaatgttttgtacattttttgtatgaggaagtgatgtagcttgccctgatttttttttttttttttttggtcagctttaatatatttatgccagaattttaaaaccaacaaaattttcttgttcaagcgtgcattgaagaaccacatttattcaatggttgaygttgttttgtgatatttgtacacaaattttcttttctcagttttataaacacagaatataacaattcactttaaacttttattaccacagttgctgcctcctccagaatttttgaattttaataaaaggcaaacttttgagctgcaggaaggacaatgttggttaataataaatctcaaagtcaattgtagaaaaaaaattgtcttcaaaaagaatgttgcactctgatctcttaacaaattgttacgttcaaagtttaaagtgatatattaacaragtcacctagttatacaaacaattgtcagagaattctggatttggagggtattggggttatatgattctttcttagataatggcctctactaaataactcaagatctttctggaatgtcttctggcaggcaggtgccactgtcagcttttctccaaaaagcagccaacatcagcctcccctgtcaactcaacagttttgtatctcatattatatggactttatatgaaaatgaatattttacagtttgcacagtattattttacagaaaaggaatcagagaatctacaacatagggccccagaacaacagtttcactttgtggcttttaattattctagaattttaactgcatctcatttttctagcatggtgagaactaatatgtaactcctttgattgaaggagctcttttgtccgtacctatcagaatgttttcttgacacttccatgttggctcttctcagctttttttgtacatattttttttttctaaagagaagaaaaagttatcacaaaatgtaaaaaaaaaaaaaaaaaaaaaaaa

SEQ ID NO: 891 - DNA, 1167 bp, Homo sapiens
ctatgtaactgcaagatgctgctcgccaacacagcaacaccaggcatttcaattaaataattttattgggggaaaaaaaccactttgagcaccaaagcaagaaaagtgtattattcaatcagtttcccagatcacatgccaagaacacaatgctcactgtggtgcctggcagacggtccacaaccagcgggtgcgttcagcttgaatggaccggggtcccacagtgtttgtgccacaagtcaatggccttgctcacgatcgcgtctgagctgtcctggggaatattttccagaaactttgttatcttctctgcactgttcagtgccataacttttattttaaaggttaataaaatttcgacagctacaaaaactaggatcttacaggatccactcacaactttatcccaaaccctctgtaaactggattcaggcaaacatcccgcaaagcacctcttgaaccagagatcataaggaagtttgggcgccgcggaacacatcctcagatgagtcagcagtctgccatcttccagattcaagtattgttcaaacgcttttggcaactggggcaaggaatcccggtacttggtatttaattggttcacaaagcgtcgggtgatccagtaacagtcgacactatcttccaccatttcctccatggctttagctatggcaagaaacacttcatcatctggctccagtggaaaagagggacttcgaggtaacttcccagactccagctgatacatgcggagatagacttcagcctgaggtgtggcatcactaacaaagcgaacgactttcagggcatgaaggacatccaagtactgctccttacgatacatcatcaccttggcatgggactcgtggtgtggaggcaagattcctagaagcaccttccataccaatgcacggtacatggacgggagagggaacctctgactaaaagtacaaagtttctcagtatccagacggtcatcttttaggagaatttctaatgatttcttttcttcaactccacgaaaccccactttctcataatatactgaacgaaagtttctctgagagtcctcagtcatatttcattctgggacacccgcgcgcgcccagacggcccgggagacaaaactcagcgccgctgacgctgacgctgccgctgtcgctgccg

SEQ ID NO: 892 - DNA, 1225 bp, Homo sapiens
  misc_feature (59)..(59): n equals a,t,g, or c
gtgcactctaacgatctctttgccatcttgttttaatctgacagttctcagacataganaaaaaaggtaactcatgcatgtactaccttttttctctatgtctgagaactgtcagattaaaacaagatggcaaagagatcgttagagtgcacaacaaaatcactatcccattagacacatcatcaaaagcttatttttattcttgcactggaaggaatcgtaagtcaactgtttcttgaccatggcagtgttctggctccaaatggtagtgattccaaataatggttctgttaacactttggcagaaaatgccagctcagatattttgagatactaaggattatctttggacatgtactgcagcttcttgtctctgttttggattactggaatacccatgggccctctcaagagtgctggacttctaggacattaagatgattgtcagtacattaaacttttcaatcccattatgcaatcttgtttgtaaatgtaaacttctaaaaatatggttaataacattcaacctgtttattacaacttaaaaggaacttcagtgaatttgtttttattttttaacaagatttgtgaactgaatatcatgaaccatgttttgatacccctttttcacgttgtgccaacggaatagggtgtttgatatttcttcatatgttaaggagatgcttcaaaatgtcaattgctttaaacttaaattacctctcaagagaccaaggtacatttacctcattgtgtatataatgtttaatatttgtcagagcattctccaggtttgcagttttatttctataaagtatgggtattatgttgctcagttactcaaatggtactgtattgtttatatttgtaccccaaataacatcgtctgtactttctgttttctgtattgtatttgtgcaggattctttaggctttatcagtgtaatctctgccttttaagatatgtacagaaaatgtccatataaatttccattgaagtcgaatgatactgagaagcctgtaaagaggagaaaaaaacataagctgtgtttccccataagtttttttaaattgtatattgtatttgtagtaatattccaaaagaatgtaaataggaaatagaagagtgatgcttatgttaagtcctaacactacagtagaagaatggaagcagtgcaaataaattacatttttcccaaaaaaaaaaaaaaaaaaaaaaagggcggcc

SEQ ID NO: 893 - DNA, 1493 bp, Homo sapiens
  misc_feature (8)..(8): n equals a,t,g, or c
  misc_feature (1488)..(1488): n equals a,t,g, or c
  misc_feature (1492)..(1492): n equals a,t,g, or c
atctctgnctcgtatccgccttgcctccacaagtgctgggattacaggtgtgagccaccacacccggcctatattgttttgaaagcatactctatatatagttaygggcagaggcacaggcatcctcagcagctgattcaggagatgatggtaaagctagctaactatgaattaaacattcacatatccagtctacctggtccagtaataatacaagcaaatcttgtatttcaggaacaaatcaaggttctcttaattttttggcttatatacaatgaagtaaaaacttgataaacatggtttcaaattgaggaggagagtcttggatgtatgttttaatatgtataccttataattctgcctctagccaaatgctatgtttgcaaaatgtggcatctgttagtttttattgtctgtgtcttctttgtttactataccttgggtaattttgtgttaccaaaaaaaaaaaaaaaaaggaagtgtaatgtcagacacacaagaaaagcaaatcagtgttgtaagcttaaagtacaatttcaaaggtcattaccaacagcagggttttttttatactttaaaaacattatgctacatatcattgccattttcatattttggggttttgctactcttatacaatggaatcaatggaaatgtcatccagccactgaattgccattattatatctaaaaagtttctaagatgacagttatcactattttgttttatctccatgctgacatttgaaagaaggtactagtatccctctagccagattgcttagtttttcgttggtaatcaaacaacagttgtactaaaggaaagtaaagctaggacctaaatcagaatcatagttgcctgcatatatggtaacaaggtcgtgtgcatttgctttcacagtgatgagtgagaggatgagaagaaattatttgacatttttctgtggttgaatagaagacacctttcttttgtctttaggtttaggaggagatactaagatactggatgtttatcctatcttagtttggttggagtaataagagagaagaagagggtggactttggcttttcagtgttttttcccctaaagagtgatattgctgacgtttctatcaattttacacataatatgtggctatgaaaccatatatctcacttaagtaacaaagtaatcactttgtctatcactaagtaatagacaaaaatcattgtctattatttaaagccaacaaaacagtgtaacagttttaagttcaataatgttaagtattgtatagaaatatattggaggcaaagttcagttgatgacaattgtgtatatgttactgatgctgtaaattatttttaataaagaaaattgtattatcaaaaaaaaaaaaaaaaaaaaaaaaaaaaaaaaaaaaaaaaaaaaaaaaaaaaaaaaaaaaaaaaaaaaaaaaaaaaaaaaaaaaaaaaaaaaaaaaaaaaaaaaaaaaaaggggggcccntttna

SEQ ID NO: 894 - DNA, 2791 bp, Homo sapiens
gtcacctgacacctcaccggtccggaattcccgggtcgacccacgcgtccgcccacgcgtccgtaatccgtggttttctggagcatttcacagcctaggaacatacaaggggggcatctccctggaatgtaaattgactaagaggaattcaataatggtcaaatgaatgcagaattttagagtcttgcttagtattctcaccacatttcgtttartctactcatactctttttctcttactgctgacactagatggaaaaactcttaattaaaagtatttcacaaaatgtgctcgttttcagtcattccgtttccactccagcctgttgtgttgtttttttgaaataataatttaaagtaattttccttttgcaggatggcatagtcaatccaacaataagaaaagatttgaaaactggaccgaaattctactgctgtccaattgaaggctgccccagaggccctgagagaccgttttctcagttttctctcgtaaaacagcactttatgaaaatgcatgctgagaagaagcacaaatgtagtaagtgcagcaattcgtacggtacagaatgggacctgaaaagacatgcagaggactgtggcaagaccttccggtgcacatgcggctgtccctacgccagtagaacagcactgcagtctcacatctaccgaactgggcacgagatacctgcagaacacagggacccacctagtaagaaaaggaaaatggaaaactgtgcacaaaaccagaagttatccaacaagaccattgaatcattgaacaaccaaccaatccctagaccagacactcaagaactagaagcttcagaaataaagctagaaccatcttttgaagactcttgtggctctaacactgacaagcagactcttacaacaccaccgagatatcctcagaagttgcttttaccaaagcccaaagtggctttggttaaactacccgtgatgcagttttctgtcatgcctgtctttgtgcctacagccgactcctcagcccagcctgtggtgttaggtgttgatcagggctctgccacaggggctgtgcacttaatgcccttgtcagtaggaaccctgatcctcggcctagattcagaggcttgctctcttaaggagagcctacctcttttcaaaattgctaatcctattgctggtgagccaataagtactggtgttcaagtgaactttggtaaaagtccatctaatcctttacaagaactagggaacacgtgtcaaaagawtagcatttcttcaatcaacgtgcagacagatctgtcttatgcctcacaaaactttataccttctgcacagtgggccactgctgattcctctgtgtcgtcttgttctcaaactgatttgtcgtttgattctcaagtgtctcttcccattagtgttcacactcagacatttttgcccagctctaaggtaacttcatctatagctgctcagactgatgcatttatggacacctgtttccagtcaggtggggtctccagagaaactcaaaccagtgggatagaaagtccaacggatgaccatgtacagatggaccaagctggaatgtgcggagacatttttgagagtgttcattcatcatataatgttgctacaggtaacattataagcaacagtttagtagcagagacagtaactcatagtttgttacctcagaatgagcctaagactttaaatcaagatattgagaaatctgcaccaattataaatttcagtgcacagaatagtatgcttccttcacagaacatgacagataatcagacccaaaccatagatttattaagtgatttggaaaacatcttgtcaagtaatctgcctgcccagacattggatcatcgtagtcttttgtctgacacaaatcctggacctgacacccagctcccatctggcccagcccagaaccccggaatcgattttgatatcgaagagttcttttcggcctcaaatatccagactcaaactgaagagagtgaacttagcaccatgaccaccgagccagtcttggagtcactggacatagagactcaaacggacttcttactcgcagatacctctgctcagtcctatgggtgtaggggaaattctaacttcttaggccttgagatgtttgacacacagacacagacagacttaaactttttcttagacagtagccctcatctgcctctgggaagtattctgaaacactccagcttttccgtgagtactgattcatctgacacagagacccaaactgaaggagtctccactgctaaaaatatacctgctctagaaagcaaagttcagttgaacagtacagaaacacagaccatgagttctgggtttgaaaccctggggagcttgttcttcaccagcaacgaaactcagacagcaatggatgactttcttctggctgatctggcctggaacacgatggagtctcagttcagctctgtagaaacccagacttctgcggaaccacacacagtctccaacttctaaaactaacggtggagtccatgtgtgaaatggcatctaccatttcctctggattaaaactacggactggggacaacagtattaattcgattgaatgtggctgatgatgcagttgcttagcttctttgtgtttctttgccttttgtacttgtaaacagaaatttgcgtataaatgtgagtgtattataaagtttgagatgttgatctaaattgtttttgtgttgcctacatttgccttttcacagctagtcttttcatgttaaaaaaaaaaaaaaaaaaaaaa

SEQ ID NO: 895 - DNA, 1595 bp, Homo sapiens
tattcgccaagctcgaaaccaacctcactaaagggaacaaaagctggagctccaccgcggtggcggccgctctagaactagtggatcccccgggctgcaggaattcggcacgaggataaatgtaatgtattgtgatcagatcaaggtagttagcatattcacctcaaacgtgtatcatttctttgtgttgggagcatttaatatcctagctatttgaaactatatattattgtcagctatagtcatcctacagtgctatagaacactagaacttattcctcccatatagctgtaattttgtatcttctaacaaatctctccatattcccccccctcacctccgctgaaaccatttctgcaccacaggtgcyttgaatccccggccacactgagcacttcatagargaaggtgggcacgccggcataggaaacagccttacctatcctttgcccagagatagttctagttttgtccttgttggggcaggtgttagggatgaagtgagattgccatcaagaaggtagatcatgagcctkcccacctcccactgttcttaccctttccttggtgtctgtkcagcagagccagctgctttactaacattctttytccccaaagatgaaatktggcaactktggkgagatttcggacaagtsgcagtacatccggctgatggtaactgttccccscccaacccccaacataaacactcacaaacacacatacacttctgggcagggatttggggaaactggccttcatctctccagttctttgctccctgctttttgtggtttgggagggtaggtgtcagtgtgatcagcactggattcaataggcatctttgaggtatgaggcagagttcaaaatcaaggggaagcccttttttyattttcctcaggaagccttcccaggagtcttgtcctagtaagttaccctttctgggtcttggtctctttaagtggacaataaatggtgggctcgatctcctcaggactgtacatctaattcatatgtgactgaaagttctgtttgctttttgccaggacagtgtggcactgaaggggggccgtggcagtgcttccatggtccagaagtgcaagctgtgtgcaagagaaaattccatcgagattttaagcagcaccatcaagccttacaatgctgaagacaatgagaacttcaagacaatagtggagtttgagtgccggggccttgaaccagttgatttccagccgcaggctgggtttgctgctgaaggtgtggagtcagggacagccttcagtgacattaatctgcaggagaaggactggactgactatgatgaaaaggcccaggagtctgtgggaatctatgaggtcacccaccagtttgtgaagtgctgatccctcttccttcccagttgcccttaagaactgagaaaggacaaagtactctaagcagcagagcccacagaggctcgttcctttgacccttgtctcctggtggctatacgaaaccttcacaatctgcatgctggactttattacagcttcccaagccccatcaataaagcccctgttcacgctgmaaaaaaaaaaaaaaaaaaaaaaaaaaa

SEQ ID NO: 896 - DNA, 2790 bp, Homo sapiens
gccgcgtgaggacgaggctatttgaaaacacgctccgggagctagagcctgaggtcggcggcgcacgctgttgccccgtgggcttctgctccctcgcttgtcttctcgggcttctcgccccggccgcggccggktcctcagtagtcgagaatgactaaaaaaagaaaacgccaacatgattttcaaaaagtaaaattgaaagttggtaaaaagaagcccaagttacaaaatgctactcctacaaactttaaaacaaagactatacatctgcctgagcaactcaaagaggatggaacacttccaacaaacaatagaaaacttaacataaaggatttgctgtcacagatgcatcactacaatgctggggttaaacaaagtgctcttcttggacttaaagaccttttgtctcaatacccatttataattgatgcacacctttcaaacatattaagtgaagtgactgctgtgtttacagataaagatgctaatgtacgattakcagcagttcaacttcttcaattcctggcccccaaaatacgagctgaacaaatttctccattttttcctttggccttggcagatggatccagtaggttgagagaaagtgaaggacttcaggaacagaaagaaaatccccatgccactagcaactccatttttatcaactggaaggaacatgccaacgaccagcaacacatccaggtttatgaaaatgggggttcacagccaaatgtcagttcacagttcaggctacggtatctggttggaggactgagtggtgtggatgaaggcctgtcatctactgaaaacctgaaaggatttattgagataataattccattgctaattgaatgctgggttgaagctgtacctccacaactagctactcctgttgggaatggtatagaacgagaacctctacaggttatgcagcaagttcttaatattatttcccttctgtggaaactctctaaacaacaggatgaaacccataaattggagtcatggcttcgaaagaactaccttattgattttaaacaccattttatgagtcgttttccatatgtcttaaaagaaataaccaagcacaaaaggaaagagccaaataaaagcatcaagcattgcacagttctctccaataacatagatcatctcttactgaatttaacactgtctgatatcatggtctccctggcaaatgcgtcaactttgcagaaggattgcagttggatagaaatgataaggaaatttgtaacagagacccttgaagatggctctaggctaaatagtaagcaactgaacagattgctgggagtatcctggaggttaatgcaaatacagccaaacagagaggacacagagactcttattaaggcagtttatacattatatcagcagaggggccttatccttccagttcggactttgttattgaagtttttcagtaaaatctatcagacagaagaactgagatcttgtagattcagatatcgtagtaaagtgttatcccgttggctggctggcttaccattgcaacttgctcatcttggctcccgaaatcctgagctctctacacagcttatcgatatcattcataccgctgcagcacgagcaaataaagaattactaaaaagtttacaagctactgccctccgaatttatgatccacaagaaggtgctgtggtggttctccctgcagactctcagcagcgtttggttcagcttgtatatttcctacccagtctgccggctgatttgctttctcggttaagtcgttgctgtattatgggaagactcagttcaagtttggctgccatgcttatcgggatactgcacatgagatcatcattttctgggtggaagtattcagctaaagactggttgatgagtgatgtagactatttcagcttcttattttccacacttacagggttttcgaaagaggagttgacttggcttcagagccttcgaggagttcctcatgtcatccagacacagctttcccctgtgcttctctaccttacagatttggatcaatttttacaccactgggatgtaacagaggcagtttttcacagtttattggttattcctgcccgaagtcagaactttgacatcttgcaaagtgccatcagtaagcatttggttgggttgactgtaattcctgacagcacggctggctgtgtttttggtgttatctgtaagctcctggatcatacttgtgtagttagtgagactctactgccatttctggcttcttgttgctacagtcttctttattttctgctcactatagagaaaggggaagcagaacatctaagaaagagggacaagctgtggggggtctgtgtctccatcctggctctcttgcctcgagtcctcaggttgatgctgcagagcctgcgggtgaacagagttgggcctgaggagctgcctgttgtgggccagctgcttcgactgctgcttcagcatgcacccctcaggactcatatgttgaccaatgcgatcttggtgcagcagatcatcaagaatatcacgacattgaagagtggaagtgttcaggaacagtggctcacagacttacattactgcttyaacgtgtatatcactgggcatccccaagggcccagtgcactggctacagtgtattgaagaggccatagtacctcctgtttgaagttgtttattcacatctatcttatttgaagaaaaagactgatgtaatagatctttgtcattaaagctgaacttttaaagaaaaaaaaaaaaaaaaaaaaaaaaaaaaaaaaa

SEQ ID NO: 897 - DNA, 998 bp, Homo sapiens
cgttacacatgacaccagtgcctttgtttcattgggctgggctctctggaaggtgtgctgctgcctgagctgctggaaaagcactgacaggtgtttgctagaaaagcactcctggagcttgccaccagcttggacttctagggactttcctctcagccaggaaggattttgatattcatcagaaatacctccagaagattcaaggagctgtagaggtgaagtaagcctgtgaaggaccagcatgggaatcctatactctgagcccatctgccaagcagcctatcagaatgactttggacaagtgtggcggtgggtgaaagaagacagcagctatgccaacgttcaagatggctttaatggagacacgcccctgatctgtgcttgcaggcgagggcatgtgagaatcgtttccttccttttaagaagaaatgctaatgtcaacctcaaaaaccagaaagagagaacctgcttgcattatgctgtgaagaaaaaatttaccttcattgattatctactaattatcctcttaatgcctgtyctgcttattgggtatttcctcatggtatcaaagacaaagcagaatgaggctcttgtacgaatgctacttgatgctggtgtcgaagttaatgctacagattgttatggctgtaccgcattacattatgcctgtgaaatgaaaaaccagtctcttatccctctgctcttggaagcccgtgcagaccccacaataaagaataagcatggtgagagctcactggatattgcacggagattaaaattttcccagattgaattaatgctaaggaaagcattgtaatccttgtgaccacaccgatggagatacagaaaaagttaacgactggattctatcttcattttagacttttggtctgtgggccatttaacctggatgccaccattttatggggataatgatgcttaccatggttaatgttttggaagagctttttatttatagcattgtttactcagtcaag

SEQ ID NO: 898 - DNA, 946 bp, Homo sapiens
gcccacgcgtccgctccatttctaaataccagacttcaaaagataaggttcaaaagtgttataagaagatattcctttttttgtcctagagaacttattttcctgtgaaaatgcctaccacaaagaagacattgatgttcttatcaagctttttcaccagccttgggtccttcattgtaatttgctctattcttgggacacaagcatggatcaccagtacaattgctgttagagactctgcttcaaatgggagcattttcatcacttacggactttttcgtggggagagtagtgaagaattgagtcacggacttgcagaaccaaagaaaaagtttgcagcatccttcgtttttgtgaccatgatactgtttgtggcgaacacgcagtccaaccaactctccgaagagttgttccaaatgctttacccggcaaccaccagtaaaggaacgacccacagttacggatactcgttctggctcatactgctcgtcattcttctaaatatagtcactgtaaccatcatcattttctaccagaaggccagataccagcggaagcaggagcagagaaagccaatggaatatgctccaagggacggaattttattctgaattctctttcatctcattttggcgttgcatctattgtacatcagccctgagtagtaactggttagcttctctggacaattcagcatggtaacgtgactgtcatctgtgacagcatttgtgtttcatgacactgtgttcttcattgatgctgtactcctgaaaatttttcccacaaggttggggaaatgaatgggaaatgtcgctggtctgtgtggtattcaaagcagtagtatcatgatgagcgtaacgacccttctgacctggtctcacgatctgaaataataaaaggctgtgtcatgtttaaaaaaaaaaaaaaaaaaaaaaaaaaaaaaaaa

SEQ ID NO: 899 - DNA, 1236 bp, Homo sapiens
  misc_feature (9)..(9): n equals a,t,g, or c
  misc_feature (21)..(21): n equals a,t,g, or c
gattgtttncgatcatatacngcgattgggtaccgggcccccctcgagtttttttttttttttttttgcaacaagtgtagaatttcccctgatcaaaatctgaatattggttaatgcatgttttctcattctccgtgtatgaacccactcctaacctctctcattgcctttttaagcttaagagagagaaataaaagaaaatggatatagaccatgtatttttatttatgaaaagagaggcatattctaatagtcataaggcaatgtgtttaagagctgcacctgaactggtattctcaaaactgaaaatagttatcaactctattcaacttgtaagatgtatctatgtgcttcccaagtcactggttgtcacccaaatggaccacggtgactccatcatgccttaaggaggcattatatactgtgtgtagtatgcacatgtatttttaaagaaatgacattaagagagaaaagaacagcctttcaaacatcagttcctcaaataaggggtgacagtgctatatggctcccttttaatctcctcacctactcagttatcaaatacctccaaaattagacaaataagggccagagacaaagctccatggtgaattgcatctttcagatgtgctttcaattcactggtttttaatttcccattcctgatttactgaggagtaaaggtgagaatcatccaactgatgacaaagtaaaacaggaaaacaggataaacagctagggctctgcggtttggaggctggctatcagcaaggaaagctgtggaggcaactatagaccaggcaaacatcacaatcaccacaaaaagccgaaccatgaagtttacaggtcctggatcagccaaaagtaccagccggcaaatcagcattgctactgtcaagggaagtatacagtaacccagcacacagaggctctgaaaaaaagatatgttccctccaagaagttttgagttgagggtgatggtaactgcaccaaaccagacaatgacaaacacctctgcaaattggggccctccatctttttcactatctgcagagtctctttgcagcattaatgcgagtgtcacacaaaggatcaaagggccccacaaatcccaatctctcaaaagagtattacttttccttgggtacaaaacatgcatgaattttttcccaacagcttttagatcacgcatcaggggcctgggcgatgctgtccccgggtctcctggagactcct

SEQ ID NO: 900 - DNA, 1044 bp, Homo sapiens
caaagcattaggattataccgtgtgagccatcatgcctctgttaaagtttttaatgtcctgattaatatgtgattcagattagtaagactaaaatctatgatcatatcccatcattttgaagcttttaaaaatagataataatgatttgttacatgcagcttccatctagatgcataacgttatttctggaaatgcgggccacctacaatgtaaagcaggctaaacaaggcagcttgtgatttcattttaatcagaaacacaccaaataggcatcatggcagcagatctggctgctagtgttttaaatacagatggattgttaacatctttattattcataattgtctgtcaatgttctctggatgatcaagaaactctttgtgcctcaccctaatcactgaagtaatgaaaggagatacccgcagcaaggactgcaactgtaaatgctgcaatcacacctatgttttgctgaattttcaataacattgtagttttaattggttgttttggttgttcatcatctgtgttgtccaatgaagcttgactattcatagaagaactcatacaagctgtgtttgtttcctctgcaatttccaaatcttctatttgaattgtgtgatccaacatctccataaaatggtccctgatttcttcagctgactcatcgtcaaatttataatcacacaacattacagtggatccaggaaggggaacaaagactcgataagggaggacgtggaactctttttcagaaycttttttttctggaatttcattcaaaagcagatcctcaaatagcatttcacaacgatcagcaactgtgttcaatatatccctctttactgcctgcacagcatctttaactttgggtttactgctgtggatataagctctgcatttcacagcacccttaaggtttacagaaccgctacatatctggactgtggctgtggatctgtggtctgaattcaggagcaactgcgttagcactctgacatcaaaagaatgactagttgcttgagtatttcctctagaagattttt

SEQ ID NO: 901 - DNA, 2726 bp, Homo sapiens
gaggcgctagaggcgggggcgccgggaggcgcgggcttgctcctggggtctcggccttggccggctggacctgaccctagggcggcttgcgcagctgtcgggacgtgactgcgttcagccgcgtcgggcgtgcttcccagacttgcccaagttcgggtgccctagctgcccctttgcagccgctggcctacccggcccgcgggtgagaaggttgcgacgggaggtgggtggaactcgccagcgccgggaccgcggattggctgcctcggctttctcttttccccgtgggctccggcgtgaggcgctgaagcggccggcagccggcgaccggccctcaccgtccgccgggttgcgctctgcttttgcggtgaggcgttgaccacgcccatatgaattggagctctccgccagtaggagtttccggaaggagtttgaatttttgtgatttttatgcttgkttggtcggtggaatatgttgggatttatgtttgcctctgaacaagtgtcttgctcacatcgtaaatgactttctctccgaaacgctaaatattctttcccgcaggagctcatatccttattttccatgacagatcttaacgacaatatatgcaaaagatatataaagatgataactaatatagttatactgagcctgatcatttgcatttcgttagctttctggattatatcaatgactgcaagcacctattatggtaacttacgacctatttctccgtggcgttggctgttttctgttgttgttcctgttctgatcgtctctaatggccttaaaaagaaaagtctagatcacagtggggctctaggagggctagtcgttggatttatcctaaccattgcaaatttcagcttttttacctctttgctgatgtttttcttgtcttcttcgaaactcactaaatggaagggagaagtgaagaagcgtctagattcagaatataaggaaggtgggcaaaggaattgggttcaggtgttctgtaatggagctgtacccacagaactggccctgctgtacatgatagaaaatggccccggggaaatccagtcgatttttccaagcagtactccgcttcctggatgtgtttgtctctcttggctgcactggcctgctctgctggagacacatgggcttcagaagttggcccagttctgagtaaaagttctccaagactgataacaacctgggagaaagttccagttggtaccaatggaggagttacagtggtgggccttgtctccagtctccttggtggtacctttgtgggcattgcatacttcctcacacagctgatttttgtgaatgatttagacatttctgccccgcagtggccaattattgcatttggtggtttarctggattactargatcaattgtggactcatacttaggggctacaatgcagtatactgggttggatgaaagcactggcatggtggtcaacagcccaacaaataakgcaaggcacatagcagggaaacccattcttgataacaacgcagtgaatctgttttcttctgttcttattgccctcttgctcccaactgctgcttggggtttttggcccagggggtgaactttatttcatttccacaggttgaaactggtgagtccagctaaatttgcaattccaactttcatcctaagaataataactgtaatggcaaagcggaaatgccagttcctcctgtattccattgagatgggatttcacattttcctctcatcaactcccctgtaatagctagcgtctttctagygaaagagaagaattcctagaacttatgcatttttttcctgctgaatggaagtcttgagcaatgaagctatattgtccctacatattactatatattgaactgaaagttcttacataatcaatgtcaagttttgtcttattttgttttgtttgtttaaaccagtgtaggaaataaaagtgatgatatttaaaatagttctcagttgaagcagagaaatgccactgtgctagttgcccaaatgttgtatctattttaaatagtttaagctgatgtgtatgggagcctaaacaagtgtagtatcctgaacttctcccattaattgctattcacaattgggaaaagtgtggagattggttcctagtgagttttgtggcctactccacatttgttcttccttcctcagggttagtgatgaaaaaaagtaaatatctttttcatatgtccattagaatgtatgaaaaaaatcattttaactaaaagcaaaagaattttatcttatatctaaaaaatatataacttactatatgtttcagttgctctctgaacaaaaattatcttcaatttaatatgtggaatgtgttttctagctttctttgaattatgtatggcaacctggtttagcactggcatcctgaacagttaagagtcactgggaaattattgtatttctttataaatttactgtcatatcaattgctggaaaatgctatgatttttctattattaccttctaagttgtattctctcttacactgtagcctcaactaaggcaattctgctatgtttgttcttcactatgatttactgtgtgccaaaggagttttgacagggtacagagtattttactaaaagtatttttaaatgtttctcatgtgatttctgtaccttcttcctcctgccccttttgcttttttaaagaaactggggaaggatttatgaatacaccacc

SEQ ID NO: 902 - DNA, 1011 bp, Homo sapiens
cggaagttstggactgcagttgagtggaaatgggcaacggcgggcggagcggcctgcagcaggggaaggggaacgtggatggggtggcagcgactcctactgctgcctcggcctcctgccagtacaggtgcatcgaatgcaaccaggaggccaaagagttgtaccgagactataaccacggtgtgctgaagataaccatctgtaaatcctgccagaaacctgtagacaaatatatcgagtatgatcctgttatcatcttgattaatgctatattgtgcaaagctcaggcctacagacatattcttttcaatactcaaataaatatccatggaaaactctgcatattttgtttgctttgtgaagcatacctgaggtggtggcagcttcaagattccaaccagaatactgcccctgatgacttgatcagatatgctaaggaatgggatttctatagaatgtttgcgattgctgctttagaacaaactgcctattttattggcatttttaccttcctgtgggtagaacggcccatgacggcaaaaaaaaagcccaacttcattttgctgctgaaagcattattattatctagctacggaaaactcttgctgattccagctgtcatttgggaacatgactacacatctgtgtgcctcaaactcattaaagtatttgttcttacatcaaattttcaggcaattagagtgaccctaaacatcaaccgtaagmtctccttcttggccgtgttgagtggcttactgctggaaagatcatggtctacttcttccagagtatggaatgggatgttggaagtgattatgccatctttaaatctcaggacttytgaagagttttattcttcttcactatctgtggcatgaccagctgtatctgaaagagaaaagacatgaaatataaaccaacctcctcatttctgttgagtaaaatgaagcaagattgggaaacactttctgaaaaagaamgstgatacccacccccacaatggcacccagg

SEQ ID NO: 903 - DNA, 2590 bp, Homo sapiens
tttttttttttttttttwtttggcattagaaaccttttattgwgacaaggtaaacagtgggctgaaaatattacaggctgaaggaaggctgaggaaaccagtatgaaggcagctcaaatgatgaactaaatatattccaaaggtactatttatacttaaggcagttttaaaagtgaggtcttaaccaaaaagcctttacatggcattcaaaacaaaaacaaaaacaaaaaaaacacggggggggggggtcacttaaatctcttggattgactaaaagagctaaattatgtacccaaaatctgtacagcaggggcctgttttcagcaggaaagcctatgtacaagtaagaacctcttactcttgtaacattgtcctgttttgttttgtcttataagaatatataactcctatcctcacagagttagtccataaggcctcagtgacctcacagaaatatggagttaacctctactacagaactatttacactgcactgtaaatacacatatgtgtgtccaccctcacagctaagctgtcaatgccttgagtgaaggggttacagctcattcgttttgcatctacagtgacaatgaataggcactcaatacatacttttttttgcatgaatgataaatgaaatgattttacattaccaccactatttacattaacattcctaccattagccgtctccaaaataaaaacacaaaattgctgccacatgttcagcagttttcacaatacagtgtgtctggactttttaatgtaaacaaacatgcttgatttaccaattttcagagcaaggacacaaacttagcattcttctaggaatggaaaacttgccaggaagttacttcattctttttctctttttcaaaagtgcatctcgtagtgccaactgtttttctcggaaggaacgcttattttttgaccggacattctggctataccgcatcatcataaagttcttctgttttttcttctctttatttgtcgaactggaaaatggatttgttttggttttcttcctcacaaattcttttcggtctgtctttccagccattgcagttgctagtcttgtctctttgtcagactttggctttttatgaaggcgttcaatgtcccgaagagaaagtaattcacccctgggctcttcatcactgtctatttcaatgtatttcctcttctggsatttcccgggggcagcatcaagttcttttctcatttgggccatgcggattttctggaagtcttcctgagttaaaactcggctagtgctgatggctgcagctttggccttccgctcctccatgggcatgctgttcagcttcttggagatttcttgctgttcttcatcggaagagtgttgcacatcaatccattcaccatcagcatcctcctcctcactgagactggtactttcccatccatcttcatcattttcakcattctcttctttctcaacttccagaacttctgctcctggaatgtaatctttagcatctaattctccatattcttgtactcttgcttctatggaggcctctgtaggcttaccccggaatttcttctgcagcatctgaggattcagtgttcggaagaggtgaatcaaagttctagcagacatcattacattcttatccttgtgtgttttatactgagccaggtcttggagaagttctwcagtcatggccagaggacatcgagctgttatctcctttatagcattgattcctactgtcatgacttctccagagttcttgtcggtaacaaaattgtttgccacagtcataagcaatgattgaataatctctgggggtactaggtgatgagatgcttgtgcagcaaacagaaggatcttggttacttctctttggtggggctgcagaaacctttgcaaaaagggatagaaatkgaagaggaaaagctcatgaattcccaccaatctggagataaggttcatgagcatcatcttcacttcwaacctctccttacagcactcaagctgctttagtagtttttcygcaaaatcttggggatcatgaatcaagtgaatggctgaaaagttaaacacctctggttttttcttctttttttgtttcttgagcactttcattgccttttccaactttttcttgtttttggaacttttcttccctgtagcatattgtactagcaggtctcttgctgttggtccatcatcctcagattcggagtcactgtcctgtttttcatcttcatctttcccaagaaagaatgtcaaagcggcaactaatatcttggtgaccttagagaaacatgcagttgtgataacattgacagtttttgcatcattccagatgttccttctgtagagttcaatcattacatctaaagacatcttggctgcggttgcattgctatctcttaacatggtgtacatgaaattttgcaatactacattcactttattgttcttgtgttttgcatttatattcttgatatcagtcacaatatgtgtgtataaagtctttcgcagaagtttatcatggcaacgaraaarttcaaagaagagttctagcaggcttgatggattgatgagaatcttatt

SEQ ID NO: 904 - DNA, 1865 bp, Homo sapiens
aggcgacccgggcttctgtgaacatggcggtaggctgggaccataacacaagcatgactatatgaaggaagaggaaggttttcctgaagatgaggcgactgaatcggaaaaaaactttaagtttggtaaaagagttggatgcctttccgaagttcctgagagctatgtagagacttcagccagtggaggtacagtttctctaatagcatttacaactatggctttattaaccataatggaattctcagtatatcaagatacatggatgaagtatgaatacgaagtagacaaggatttttctagcaaattaagaattaatatagatattactgttgccatgaagtgtcaatatgttggagcggatgtattggatttagcagaaacaatggttgcatctgcagatggtttagtttatgaaccaacagtatttgatctttcaccacagcagaaagagtggcagaggatgctgcagctgattcagagtaggctacaagaagagcattcacttcaagatgtgatatttaaaagtgcttttaaaagtacatcaacagctcttccaccaagagaagatgattcatcacagtctccaaatgcatgcagaattcatggccatctatatgtcaataaagtagcagggaattttcacataacagtgggcaaggcaattccacatcctcgtggtcatgcacatttggcagcacttgtcaaccatgaatcttacaatttttctcatagaatagatcatttgtcttttggagagcttgttccagcaattattaatcctttagatggaactgaaaaaattgctatagatcacaaccagatgttccaatattttattacagttgtgccaacaaaactacatacatataaaatatcagcagacacccatcagttttctgtgacagaaagggaacgtatcattaaccatgctgcaggcagccatggagtctctgggatatttatgaaatatgatctcagttctcttatggtgacagttactgaggagcacatgccattctggcagttttttgtaagactctgtggtattgttggaggaatcttttcaacaacaggttaacaaccatttcctttttgtctaatttctgaaagtgttgcttatacttaagttgcttcttctcaaaggggcaagaagtatacagattttcatgtttcggtgtttaaatagcttttgctyyaattacaaaactccaaaattatattgactaaccagtaaacataactaatttcattgtattcaatgatgtaaggtagattatataatggtgagttggaaagatcctgggtgttaacatcagattgaagtagaattgaatgtaagttctgtcatttacttggtggtagcttggaatagatcacctaccttttctgaggttttctaatcagtaaaaatagcaataataatacctaatttgcaagtgtgctataggattaaatatgaaaatgcctagaaggcatttaagacatttttaactgtacagtatgtaaaatcatatgttatagtactttgaattatgcaatacatgaaactagatttgtaatcagtaacatgtttatgatttttgtcctgagatcctggaattcgctaagattatttgtcgaattgtaatgatgaaaattgggagttaagtacaatagagaaaaaggaaacaattctattttcatcttcagtccttattcagtattagatggagctgggtagtttattatacttagaatcatatttttaaatgaatgaatagctttyctttcgaaattctttgttagtgcttcatttcaatctatttaaatttgtgttgttgacatcatttatttyccaaattgtattggtgtgggaaaccttg

SEQ ID NO: 905 - DNA, 1734 bp, Homo sapiens
  misc_feature (1703)..(1703): n equals a,t,g, or c
  misc_feature (1715)..(1715): n equals a,t,g, or c
  misc_feature (1718)..(1718): n equals a,t,g, or c
  misc_feature (1732)..(1732): n equals a,t,g, or c
gcgactgtcatggcggcggccgcccccaatgccggaggctcggcccctgagacagcgggttccgccgaagctccgctgcagtacagcctgctcctgcagtacctggtgggtgacaagcgtcagccccggctcctggagcctgggagcctgggcgggatcccaagtccagccaagagtgaggagcagaagatgatcgagaaggcgatggaaagctgcgctttcaaggctgcgctggcctgcgtgggaggatttgtcttaggaggtgcatttggggtgtttaccgctggcatcgataccaacgtgggctttgaccctaaggatccttaccgtacaccgactgcaaaagaagtgctgaaagacatggggcagagaggaatgtcctatgccaaaaatttcgccattgtgggagccatgttttcttgtactgagtgtttgatagaatcttaccggggaacatcagactggaagaacagtgtcatcagtggctgcatcacgggaggagctattggtttcagagctggcttaaaggctggggccattggttgtggaggttttgctgctttctctgctgcgattgattattacctccggtgagagtaattgcctgcagggaaggatgatgccagccccggatccgggctgctctctggaggacagtttctgtaccacaccagggccttgcttcagggcctgaagacattcattttccctcatgtcgttggtattctgagggagctgcctggcttctctgcctccagcctttggggtagccacactttgctgctcctggactccagccagccttcacagaggacgtcccgtgccagattctctcacagcagatcgggagacaggatgttgacatataggaattcagctccacaaagcttcaggcctgaccacagctggccctctaggttgtttggtgttgtgggcacagaggtgacagtgtctctgcaggcactcaggaagctgttctaccttggaactccatgcaactatccgtctcgaataccagggcagggcaaggcggactgatgccgtccaaccaattatctcacttgttttgtgttctgtcatccttgttttttttttaaaaatacactcccctcccccaccgccacacaccttacagttcaaaaggttggtttatttgtattttattttcaaattccctattccaaaaatagtgccgggtggcccaaagataacatctgaagggaaagaatgagaaagctcccagggaagygggggatggggcgctgaggcagggttgttagaggactgtgtcatcctcaccaagctcattacatctgccagggcctgcctcaagaagcccagcccagccttttcctgggatgcagtgaaatcccatccatgaactcgatgggcccctcctgtgccggccgagaggcacacactgccttcacgacgtgactgctggacctggccgagcttgaggccacatgtgaagggtcctgctgtggtcatcttggtgactcggtcacagcagctactggccaagatcagacgtcgctgaggggctgttcaccaccatcctcgttctccagggtcaaggaagtgttttaacatgtcgtgttttcgacttgaccttgtggtatttttcttggcctagttgtgtgccatggatattaaaaaaaaaaaaaaaaatccgtctacaaaaaaaaaaaaaaaaaaaaccngggggggggccnggnaccaaattcccccnaa

SEQ ID NO: 906 - DNA, 1383 bp, Homo sapiens
  misc_feature (170)..(170): n equals a,t,g, or c
cacagccccgacccaagcgcgtaatggccgctggctatcttgggggagccagctgttggactatgccccactgccaggaaacaggcgccggaaggttctctgacaagatctcgctttcctagggcggtgaaggcgttcaaaggtcgggaaggggcgctgggagaagcggngcagcgctgagccatgctcgcgaactgtgggtctgtctgtgaagagacccagtttcgtgggaccacggtggcgcctgcgctgrgagagttcttcactaccacaaccaaggagggatatgataggcggccagtggatataactcctttagaacaaaggaaattaacttttgatacccatgcattggttcaggacttggaaactcatggatttgacaaaacacaagcagaaacaattgtatcagcgttaactgctttatcaaatgtcagcctggatactatctataaagagatggtcactcaagctcaacaggaaataacagtacaacagctaatggctcatttggatgctatcaggaaagacatggtcatcctagagaaaagtgaatttgcaaatctgagagcagagaatgagaaaatgaaaattgaattagaccaagttaagcaacaactaatgcatgaaaccagtcgaatcagagcagataataaactggatatcaacttagaaaggagcagagtaacagatatgtttacagatcaagaaaagcaacttatggaaacaactacagaatttacaaaaaaggatactcaaaccaaaagtattatttcagagaccagtaataaaattgacgctgaaattgcttccttaaaaacactgatggaatctaacaaacttgagacaattcgttatcttgcagcttcrgtgtttacttgcctggcaatagcattgggattttatagattctggaagtagtattaatgctcatcctgctgtggctgttggcttcttagaacaccaaaccgggagagatttactttgaacattgtcagttgcagcaaaaatttactacacaagattattcgaagtgtatacggactaaaagaggaagtgttttagaatgagaagagatactgtgtctttattgtgtgtgtgtgagtgcaggtgtgtgtctttattatattgaaaagctgtcactcagacctggtttgagatagaagagcattttgtccttttgatagttaatagaaattgaaccagagttttcttatgtttgcttgaacagttgtgtaaatcatacaggattttgtgggtattggttgaatatttgtaaaccattccctagcctacatatttattactgaattaactttcctgataaccattgcataattacatttttctataaaatgaaagattattacaamaaaaaaaaaa

SEQ ID NO: 907 - DNA, 3878 bp, Homo sapiens
  misc_feature (2078)..(2079): n equals a,t,g, or c
  misc_feature (3847)..(3847): n equals a,t,g, or c
  misc_feature (3869)..(3869): n equals a,t,g, or c
tgacacgggccccacaggcatcaagtatgacctggaccggcaccagtacaactacgtggacgctgtgtgctatgagaaccgactgcactggtttgccaagtacttcccctacctggtgcttctgcacacgctcatcttcctggcctgcagcaacttctggttcaaattcccgcgcaccagctcgaagctggagcactttgtgtctatcctgctgaagtgcttcgactcgccctggaccacgagggccctgtcggagacagtggtggaggagagcgaccccaagccggccttcagcaagatgaatgggtccatggacaaaaagtcatcgaccgtcagtgaggacgtggaggccaccgtgcccatgctgcagcggaccaagtcacggatcgagcagggtatcgtggaccgctcagagacgggcgtgctggacaagaaggagggggagcaagccaaggcgctgtttgagaaggtgaagaagttccggacccatgtggaggagggggacattgtgtaccgcctctacatgcggcagaccatcatcaaggtgatcaagttcatcctcatcatctgctacaccgtctactacgtgcacaacatcaagttcgacgtggactgcaccgtggacattgagagcctgacgggctaccgcacctaccgctgtgcccaccccctggccacactcttcaagatcctggcgtccttctacatcagcctagtcatcttctacggcctcatctgcatgtatacactgtggtggatgctacggcgctccctcaagaagtactcgtttgagtcgatccgtgaggagagcagctacagcgacatccccgacgtcaagaacgacttcgccttcatgctgcacctcattgaccaatacgacccgctctactccaagcgcttcgccgtcttcctgtcggaggtgagtgagaacaagctgcggcagctgaacctcaacaacgagtggacgctggacaagctccggcagcggctcaccaagaacgcgcaggacaagctggagctgcacctgttcatgctcagtggcatccctgacactgtgtttgacctggtggagctggaggtcctcaagctggagctgatccccgacgtgaccatcccgcccagcattgcccagctcacgggcctcaaggagctgtggctctaccacacagcggccaagattgaagcgcccgcgctggccttcctgcgcgagaacctgcgggcgctgcacatcaagttcaccgacatcaaggagatcccgctgtggatctatagcctgaagacactggaggagctgcacctgacgggcaacctgagcgcggagaacaaccgctacatcgtcatcgacgggctgcgggagctcaaacgcctcaaggtgctgcggctcaagagcaacctaagcaagctgccacaggtggtcacagatgtgggcgtgcacctgcagaagctgtccatcaacaatgagggcaccaagctcatcgtcctcaacagcctcaagaagatggcgaacctgactgagctggagctgatccgctgtgacctggagcgcatcccccactccatcttcagcctccacaacctgcaggagattgacctcaaggacaacaacctcaagaccatcgaggagatcatcagcttccagcacctgcaccgcctcacctgccttaagctgtggtacaaccacatcgcctacatccccatccagatcggcaacctcaccaacctggagcgcctctacctgaaccgcaacaagatcgagaagatccccacccagctcttctactgccgcaagctgcgctacctggacctcagccacaacaacctgaccttcctccctgccgacatcggcctcctgcagaacctccagaacctagccatcacggccaaccggatcgagacgctccctccggagctcttccagtgccggaagctgcgggccctgcacctgggcaacaacgtgctgcagtcactgccctccagggtgggcgagctgaccaacctgacgcagatcgagctgcggggcaaccggctggagtgcctgcctgtggagctgggcgagtgcccactgctcaagcgcagcnncttggtggtggaggaggacctgttcaacacactgccacccgaggtgaaggagcggctgtggagggctgacaaggagcaggcctgagcgaggccggcccagcacagcaagcagcaggaccgctgcccagtcctcaggcccggagggcaggcctagcttctcccagaactcccggacagccaggacagcctcgtggctgggcaggagcctggggccgcttgtgagtcaggccagagcgagaggacagtatctgtggggctggccccttttctccctctgagactcacgtcccccagggcaagtgcttgtggaggagagcaagtctcaagagcgcagtatttggataatcagggtctcctccctggaggccagctctgccccaggggctgagctgccaccagaggtcctgggaccctcactttagttcttggtatttatttttctccatctcccacctccttcatccagataacttatacattcccaagaaagttcagcccagatggaaggtgttcagggaaaggtgggctgccttttccccttgtccttatttagcgatgccgccgggcatttaacacccacctggacttcagcagagtggtccggggcgaaccagccatgggacggtcacccagcagtgccgggctgggctctgcggtgcggtccacgggagagcaggcctccagctggaaaggccaggcctggagcttgcctcttcagtatttgtggcagttttagttttttgtttttttttttttaatcaaaaaacaatttttttaaaaaaaaaagctttgaaaatggatggtttgggtattaaaaagaaaaaaaaaacttaaaaaaaaaaagacactaacggccagtgagttggagtctcagggcagggtggcagtttcccttgagcaaagcagccagacgttgaactgtgtttcctttccctgggcgcagggtgcagggtgtcttccggatctggtgtgaccttggtccaggagttctatttgttcctggggagggaggtttttttgtttgttttttgggtttttttggtgtcttgttttctttctcctccatgtgtcttggcaggcactcatttctgtggctgtcggccagagggaatgttctggagctgccaaggagggaggagactcgggttggctaatccccggatgaacggtgctccattcgcacctcccctcctcgtgcctgccctgcctctccacgcacagtgttaaggagccaagaggagccacttcgcccagactttgtttccccaccgcctgcggcatgggtgtgtccagtgccaccgctggcctccgctgcttccatcagccytgtcgccacctggtccttcatgaagagcagacacttagaggctggtcgggaatggggaggtcgcccctgggagggcaggcgttggttccaagccggttcccgtccctggcgcctggagtgcacacagcccagtcggcacctggtggctggaagccaccctgctttagatcactcgggtccccaccttagaagggtccccgccttagatcaatcacgtggacactaaggcacgttttagagtctcttgtcttaatgattatgtccatccgtctgtccgtccatttgtgttttctgcgtcgtgtcattggatataatcctcagaaataatgcacactagcctctgacaaccatgaagcaaaaatccgttacatgtgggtctgaacttgtagactcggtcacagtatcaaataaaatctataacagaaaaaaaaaaaaaagggngccgtctaaagatcaacttctnccttgatca

SEQ ID NO: 908 - DNA, 4039 bp, Homo sapiens
aattcggaacgagggtgaagcacaaggattaagttggaaaagctgtaaattgcatgtgcatatttgtctattttttctataagttttattgcaagaggtaaagaagaaaactatatatatatatcttatttagataatctcagtaccttttctggcatttttgccctgtataggttgacttggcaattcggcctttttagaggcattaactactcctcgtaagtgttgcatttacatggctgtttagaaaactgctgcccaaatttattttatatttttgtacagattctgcagtttatgatattgttttctaaaaacaaatgctgtttatacatatgagatagctattttgataggatttgctcacatagttcctgcaaacttcagatgtacaagttgcacttgtacttttatagagttgtaatgttttatatgtgtatggtgcaagagaaaattggatcaaatcaatctgcagttgatgtccccaaatgcaaacacaggcacacacatgcacacacccataaacacacacacagtgctttaagaaagggccaggtgatatcacacccaaatttcacaagcactgaccccctggcaccaacacccgccagtactgtgacttccaaagccagagccacatgtgctcatcaaacttgcattaagcagttggcgggagatggctgtggagctgggggtttaagtgatggttctcttttgctccctcttytgagggtaaagctactgtctttcttaagagtgtatttatgccaagtttgcgcttttaattgtttttattttgttttttaatgaaaacccagatctttcctttttggcataatttttatgatgacctgaaattttacatccgaacaaaattttacatccgaaaagcaaccaacttcttcatggaactcagccctgttgcaatgcttagggcccttaaagaagaaaatctccccakaaggcatccatcatgttgcttaattgtcttctgcagcttcctttccctagagctttccctgtgttgctaagagctgaaaatggcatcttcgtgatcaccacagtgagcttggctcgcctcggccggcccgggatgcactcttacaacatgtgtgactcttgaacctggagttcatcacattacgtcacagcttcccatctggttgctttcctgagtcagctacttcacacttgtcaaggctgttttaccccaaaactcagacaggactttctatgcatgttttccctcctccccccaattccccccccatcaccttatctcccaggacacacttgagaagtagctttttattcctagtggtgtacatttaattttaaaaaggttgcaatgtatcatgcttgttgccgaaactgtttatggccttcttgtttcagttttttcttttcttccaatggtactttagctgttgagtgcaggttacaacctatattgttatgcagatggcttctttaggaataacttttatatttatttaaaaatttttaaattatgggatgttttgttgttgttgttgtctttgttgttggtcatttgtcaatattcagtcaccaattctgctcacttcttgccatggataaaattgggtctttctggctaattaaaaaagacaactttataaaatggcactttaagcaagccatagttagttttatttttgtaatgcacatggcaaagcaaagacgtttgtgatgaaggaactgctcatctaagcaaaagatttgagtatgatatgataaaggctttctacattctaatttactttttccccccacttgaatgtgttttaaaggctaattatcagctcagtagagcagtgagaaactgatcaaattgcacttgttctcctacaagcaacctccacgcagacacctcgtactgctacaggtgtgtcatttcctttaataggaccagggaccatgtaactgaggtgagggttgtagtaratgcttccagtgtcagtatgcctgttaattttaagagcttccctttcttgcagagaacaagtctgcccagattccatgctttctataactggaggacctggcaaacctgccgcatgctgcacacatctacctacgtacacatatacaatagtattgatgattctgaacaataacagggtaaaacagttggtttgccattgttaaaaactgatttacagtaacttacaacaactgtacttttgttggattagcaaatcatgtgtttaaacaaatcccatatgttgggcaacagttcaaataagcacggagaagtgttgcccaaacttggttctctgactcttatgtatttgtaaggctgggcttcaaaatcaaaacaaaaaccccaaaaacagcaggcaaatgctttttaactctgacaccgttgccataaatccctgatactcaaagtctaacaagaaagacatggaaaattagcagcccattttcagaaagatcaaaatgatctagggttctaattgcttttgcatcctattcttacaaagtgatgtcccaacagggaacagtaggagctggagtgggatctccaagtcccagtttgagtgtgggatgtgcttccagcagtgccttccctttatgaaagacatcacatggcatccagggccaggcaggcagcttgaggtgcctttacgagaaaaccgagctggggctgggagaggacagttattgacactgatgtgcaatgaagtgacaagatgagagcagaatcgtaagagctttgaatttgaagtgagttttttccccccataagttatttattccttttttctgtgtaaatatatttattttactgtggagcgctaacatctggatcgtaacatgtgcagaatgtatggtaggaatgtattctcttgtaggaatgtaaatctgtattaaaagggggtccaagccaggcccccaggtcttctcattgtatgcacagtccgcattcatttttactcttctctaatatgggtctatttgaaatatgcaaaaggtatgaggaatgttttaatacctccaaatttttaagaaaagcatcaaagggttgatattttttaaagtttttttagtagcactttctctggatgacagaaggggcaaccacatgggcacccttgttcataccaaagggtgagcagtggccagagcctcctctgcacctctcgagtgtctttaccaattgagctttttatcgccatagccccttggagtgccccagctgccctgaggtcaatcaaggaaaatttcttaatgaaataagctccaaagagccaaagtatcaacttacagatcgtttttaaagcttaaatttatgaaccacctttgtggtaaacaatgaattatgaataccgcagggcagccttcttaaatgacaaatgtaaaaaaaaaaaaaaaaaaactctacttcgtgcagcaattgctactctatacgaattgtcttaatttgaaaaccttgctgttacaaattggacctttatacattttctgaaaacaatgaaaagagtatatttaaccttttctggctgtaaatggttaccttcctgtaactgccccgcacctggaggcatggagttgtgtgcatcctgcttatgtacaattgttttcagtgtttctaagaatgagtctgaatggttcttgaaaattagccaggatcaaatgctattgcagacaaagccaataaaaagttggacttcttttggggataacaagttttggaagagaaatgcaggccatatgtgcgcatgaccgagattttgaaaaaagatgtacatagtgacatgtttggtgcatggtttttgaggagggcttttgtcaaaaaggaggtataacctttcccccacagacctgagagctgtgccttttctatgcaatattacagacgttacatcggaacccagatggctgtattcacatgtaggtttgggctgtaatctaaacaattggacagattaaatgtacatggaaatgagcagtcttacttttgtagttttatattatacaataaacagttaaaagatgaaaaaaaaaaaaaaaa

SEQ ID NO: 909 - DNA, 2924 bp, Homo sapiens
  misc_feature (2892)..(2892): n equals a,t,g, or c
gaggccaagattcgcacgagttttttttttttttttaaaaaatcacatagaactttattaaataaaccagtagaaaggctcctatttacatccaggttgtcagtttaagctcaagtaatatgcaaggcacaattcttcctttctccagctttagaaaaatcaaccacatggcccagccctgaaggactgaagggagcttgtgcgggatcccgtcatcctggactctccacacagcgtccacgcatggatggccatgggcatgagtctctggatctccctgagggtagcccagcctcggcctggagcacaggggcctgtgatctgagaatctcagatccagaatcaggagctgggaagagaggacttttccaagggtctcctcccccaggccctggggagtcccttctggatgggcaggccctgggctggyggccgccctccatcattggcccaggccgggctctagggcckgctgggaagctgtctggggccctgcgcctgatgagctgccatgaaagtggccgcctctcacactggcaggcggtggctcagatctgctgaggttctggagtggcacaggaacaggaggagcaaatgacactgggtctttgtgctgaggcaggacacagcggctttccgaaacacacacacagaaaatatgactcctgctgccatctcaaggacattttcctaaggacagtcctggtgtcctgatggagtgaaagggatcacacgtgggatgtcccagcagggcctaagccaagtccatcagatgtctcaacggcttatgaaacaaaaacagaggactgaagtctgttcacagtggcccatggttgggcagcagccctggcctccaggtgctggttcctgaggcttcccttgcggcagtggcgcagatacagggacactcatgtcccattgctcctcagaagtcctagcagcagccagactaggggcaaagtaagttttcacagggggaaaaaccccaccaaaaaccccctaaagtaactggacaatcctttccctgagaccactacagtaacatcacccacagacaacttctaaagagcacttctaactgctcaaagtcttgagaagggaaagattttagcaaggctaggaaaataaaaatgcaacagcacattgtccagaaaccctagacaaccatgcaaaaaggaatgagccaaaaagtcttagctttgtaagacttgaaaggaaaaaaacacacatttaaaactcctacataaaatgagctaatgggcagagccgaaactacagctctgtgtgaagagacggcagtgaagctggcctggggccggggcactcatctggaggggcttgttccagtgtgaatgcagcagggatgttccatcttgggggtgcacgaggctcggctgagacccatcctccgggaaccttcacgcggcctagtgggaggcataggctgggctccacagccctgagggagggctggctttgcgagcaggaggcaatgcattgggagatgtgggtgatgaggcagcgaaatagtgggggctgtgtccagggctggctcgaggcgtgagggctgcaggcacagcaagatcccggggcgtgcagacagtgtggtaggctatgatcatgaccgctgtcccagccaacagggcgaagagcgtgaagaacatgacctggtaggaatccaggaagtgctggaagaggctggctccataaggaccgggcccacggcgatccaycacaaaagccactgtcactgggatggcaatggcttggttggtcacggggctggagaaggtcagggtagtggacagaggcccttggctgccagccgcggggtccaagacgccgaccgtgtatgtgatgaagctgggccacccaaaagacttctcctttgcgaatgccagcacggccggggacccggatttcacctccaagttctccagaacctccggggcaccaaagaccctgatctcggaactggtgtagtggttgctcaaaaggatttcagcctggtcggcgaagagacctgggctgaagggcacctcggcccccacctgctctgtggagaagtggctgctggagagggaggcactgaccaccagagctgtcttcttcatgctcaggtgcttccgctgcttgtccgtcagcctgtgcattgtgattgagcagaagtactggccgagagcagtgtcaaactgtggctccacggtgaacacatcttgagatgggaaatcaaagacggccggcttgaactgggactggcagctgatgagggtctctgggtgcaaggcctggatgacttccctctgggtgggggtgcactcgcctctcaggttagagcttctgtctcccacggcaacaatcactttggaggctgtagcctcctggaagctggtctggatggggtggaggtgacgggccatgatcctctgagggacgctgaccaccacctccttgtaggtcctcaggtgcccagcgacctcatagtaaaccgtcacggatcccacggcccgggccacagccacacccgtcttggggtcgatgtggaggatgctgttggccgaggagctccaggttcctgagaggccttccaggctggtcagaacagtggccagacagagcacgtcccccaccaccatggccccagacagctctggggagatggcctgtaggacaggcaggggcatgaagtccgagaggcccgggtgctctgcgtcccacacacggagcagtgtcaggcccacgctgactgtgcggacaacacaggtgttgttggtggggcccttcccgatctgcacaaagtcgtctctgttagtggcaaagttgaggaccgaactgtgagcatggaagacatctccagagttgtcgyggaagtggacagtgaaggtcaccggncattcccaaaggcaccggccaccaagggcctc

SEQ ID NO: 910 - DNA, 1156 bp, Homo sapiens
ttattgaagggggtgcatcggtcgatgaaagcgccatcaccggggaatcggcaccggtgatccgtgaatccggcggcgattttgcctccgtcaccggcggcacgcgtattctttctgactggctggtgattgagtgtagcgttaaccccggcgagacatttctggatcggatgatcgcgatggtggaaggcgcacagcgacgcaaaacgccgaacgaaattgccctgaccattctgctgattgccctgactatcgtctttttactggcaaccgccacgctgtggccgttttccgcgtggggcggtaatgcagtcagcgtaacggtactggtggcgctgctggtctgtctgatcccaaccactattggcggcctgttgtcagcgatcggcgtcgccgggatgagccggatgctaggcgcgaatgtgattgccaccagcggacgtgcagttgaagcggcaggtgacgttgacgttctgctactggataaaaccggcaccatcacactcggtaaccgtcaggcgtcggagtttatccccgcgcagggcgtggatgaaaaaacgctggctgacgccgcacaactggcttcgctggctgatgaaacgccggaaggccgcagtattgtgatcctcgccaagcagcgttttaacctgcgcgarcgcgatgtgcagtcgctccatgccacctttgtaccgtttactgcgcaaagccggatgagcgggatcaacatcgacaaccgcatgatccgtaaaggttctgtcgatgccattcgtcgccatgttgaggctaacggtggtcacttccctaccgatgttgatcaaaaagtcgatcaggttgcgcgtcagggagccacgccgctggtggtggtggaaggttctcgtgtgctgggcgttattgcgctgaaagatatcgtcaaaggcggtattaaagagcgcttcgcccagctgcgcaaaatgggcattaaaacggtgatgattcaccggcgataaccgtctgactgccgccgcgattgctgcggaagcgggtgtcgatgattttcctcgccgaagcgacaccggaggccaagctggcattgatccgtcagtatcaggcggaaggtcgtttggtagcgatgaccggcggcggcggatttggcggctgtatcgtcgcgctgaycccg

SEQ ID NO: 911 - DNA, 1697 bp, Homo sapiens
  misc_feature (38)..(38): n equals a,t,g, or c
  misc_feature (969)..(969): n equals a,t,g, or c
  misc_feature (1004)..(1004): n equals a,t,g, or c
ttaggtgacactatagaaggtacgcctgcaggtaccgngtccggaattcccgggtcgcccacgcgtcckggctgtcagagtcagggtaacacacaccaagagtggagtgcggccagcaagtttgagacctgcccgccctcctcgcagctctgctctgtgtcctcaggaagtcacagagtctactgaggcaaggagagggtgattctttccccaaatcccttcttccctggttcccaaaccaaagacagcctgcagccctttctgcatggggtgctctgttgacaggcttcccagatccctgagtctctctttccttcctcctcgatctttagttgtccacggtcaattcagtgcttccattgggggacagtcccctccgggatgacctgattcacctccagcccagggaatggaatctagaggaatacgtggggtgggtctggacaaggagcggcaggaatcaccacccatctccagctgtggagccctgtggaggggaaggggaagcttggggttcagagggractcttccaggagaggggtgcccagyggaggtaaagatgatagagggttgtggggggtctctagttgaatgttttggcccatgactttggaacatggctggcagcttccagcagaagtcamgctccccatcccccaggggacatrggacctttttcctgcttcctggtcactttcaaagaactatttgcgcaatctgtgggtctgtggattcacggggctttctgtgtgggtgctgcagttgcttttgtctgcagcagcaggacacatctttcctcttactcagccctttatggcccatggggaactccgtggctcagggagagctgaactccaggggtgtgacctgggacrggtgggcctgaggtgcccagctcagggcagccaggtggctcatgggctgtagtgagccagctccctgggggaaaaggctgtgggccgttagancatcctccaggacaggtgacctctatgaggtcacntacggctgtggcctgcaggctccttccagcccagagtggcccagtagagcaaggcagacagtgacctccacccccgcagccctcttaaaaggccagtactcttgggggtggggggagggtttagaaagcatttgcccatctgcctttctttcccccagcccccacccgctttgaatgtagagacccgtgggcacttttccttttgtggtggggggtgcggaggaggtacccccacccctggcacagccgcctggaatgcaggactgtcactgctgttcgggtgatgacctcgttgccaagctcctcctgtccccttgttctgggggcaggcgctgtgcttctgtgaggtggtttagcttttgctttcgaagtggccagctgcggccaccaggtctcagcacaagagcgcttcctttgcacagaatgagcttcgagctttgttcagactaaatgaatgtatctgggaggggtcgggggcacgagttgattccaagcacatgcctttgctgagtgtgtgtgtgctgggagagtcagagtggatgtagagcgcggttttatttttgtactgacattggtaagagactgtatagcatctatttatttagatgatttatctggtaaatgaggcaaaaaaattattaaaaatacattaaagatgatttaaaaaaaaaaaaaaaaaaaaaaaaaaaaaaa

SEQ ID NO: 912 - DNA, 2390 bp, Homo sapiens
  misc_feature (1203)..(1203): n equals a,t,g, or c
  misc_feature (1856)..(1856): n equals a,t,g, or c
  misc_feature (2361)..(2361): n equals a,t,g, or c
ggcacgagggacgtcaccccggagaaggtgcccacccacatcgtggactactcagaagccgagcagacggacgaggagctgcgggaggagatccacaaggcaaacgtggtgtgtgtggtgtatgacgtctctgaggaggccaccattgagaagattcgaactaagtggatcccactggtgaatggggggaccacgcaggggcccagggtgcccatcatcctagtgggcaacaagtcagacctgcggtcggggagctccatggaggccgtgctccccatcatgagccagtttcccgagattgagacctgcgtggagtgttcggccaagaacctgaggaacatctcagagctgttctactacgcccagaaggccgtcctgcatcccacagcccccctctatgaccctgaggccaagcagttgaggcccgcgtgcgcccaggcgctgacgcgcatcttcaggctctcagatcaggacctggaccaggcgctcagtgacgaagagctcaacgctttccagaaatcctgctttrggcaccccctggccccgcaggccctggaggacgtgaagacggtggtgtgcaggaacgtggcgggcggcgtgcgggaggaccrgctgaccctggatggtgaggccgggtgcccgcctgtgcctggggagtgtggggagggggctgtgcctggtgctccccctgctttgtctcggtgcaggtttcctcttcctgaacacgctcttcatccagcgcggccggcacgagaccacctggaccatcctgcggcgcttcggctacagcgatgccctggagctgactgcggactatctctcccctctgatccacgtgccccccggctgcagcacggagctcaaccaccttggctaccagtttgtgcagagagtgtttgagaagcacgaccaggaccgcgacggcgccctctcgcccgtggagctgcaaagccttttcagtgtgttcccagcagcgccctggggccccgagctcccacgcacagtccgcacagaggccggccggttgcccctgcacggatacctctgccagtggaccctggtgacctacctggacgtccggagctgccttggacacctaggctacctgggctaccccaccctctgtgagcaggaccaggcccatgccatcacagtcactcgtgagaagaggctggaccaggagaagggacagacgcagcggancgtcctcctgtgcaaggtggtaggggcccgtggagtgggcaagtctgccttcctgcaggcctttctcggccgcggcctggggcaccaggacacgagggagcagcctcccggctacgccatcgacacggtgcaggtcaatggrcaggagaagtacttgatcctctgtgaggtgggcacagatggtctgctggccacatcgctggacgccacctgtgacgttgcctgcttgatgtttgatggcagtgacccaaagtcctttgcacattgtgccagcgtctacaagcaccattacatggacgggcagaccccctgcctctttgtctcctccaaggccgacctgcccgaaggtgtcgcggtgtctggcccatcaccggccgagttttgccgcaagcaccggctacccgctcccgtgccgttctcctgtgctggcccagccgagcccagcaccaccatcttcacccagctcgccaccatggccgccttcccacatttggtccacgcagagctgcatccctcttccttctggctccgggggctgctgggggttgtcggggccgccgtggccgcagtcctcagcttctcactctacagggtcctggtgaagagccagtgaggcccctggtacccaagccccctcccctgacctgggtgtngctmgctgctggggctctgcaggggcagcacagctggggtgcaggscaggctgccactccgggaacgcctttgcgccgggactttttgtttctgaaggcagtcgatctgcarcggggccttatgctgccatgcamtgccctggctyctgccggacccccagggtgggccgtggcaggtggctgagcaggagctcccaagtgccggccaccgctgtcagggattgcccacccctgggcatcatgtgtgtggggccggggagcacaggtgtgggagctggtgaccccagacccagaattctcagggctctacccccctttcctggtcctaggtggccagtgggtatgaggagggctggaaggcagagctttgggccaaaagcaggcgttggggggtcccccctcaagtttggagccgtttccgtggttgtagcagaggaccggaggttgggttcctgattaaacttcactgtgtgttttctatctcggatcccagtctctgaagacnacttgctttgattcaacctaaaaaaaaaa

SEQ ID NO: 913 - DNA, 1410 bp, Homo sapiens
  misc_feature (26)..(26): n equals a,t,g, or c
  misc_feature (240)..(240): n equals a,t,g, or c
gcccacgcgtccgcccacgcgttttntaaaaccctgtctctactaaaaatacaaaattagctggatgtggtggtgcacgcctgtaatccagctactcgggaggctgagtgaggcaagagaatcgcttgaacctgggaggcacaggttgtagtgagtcgagatcacgccactgcactccaggctgggtgacagagtgagatattgtctcaaaaagaaaaaaaaaaaagaaaaaaagagaangggagtaactgcaaaatggcagagctgtctgatcccaaatgacacttgttctctctgctgctgggcaccttcacgctttcctatgggtgtcacccacctcccaccctgaggtattccacctcctacctggatgcgagcagcagtttccctgcggaaatcctccttcagggcagcttcacggcggytyactakcccctccagcagcgccagggtgtcctmgtggctcaggccaccaccacctccctggccaggagccccttgccgcagctccagacgttccagccgcatggcctccttctgccagttggaggaaaattcagcagcaagagcttccagacgccgctccagagagtgtacccgggacataacacgctgctcagcctggaaatgtggcgatgagtctctggcttcccagccctcatccggcctcctgctgtccttcgctgcccaccaggaaaccaaagcagggtggaatgtctgcagcccataggggtagaaataccaagcaccatacgtcaggcacgtcagcaagagcagcggcagcaggaaccagaggaacgtcttmagggacgagaagcgcctggttaaaacgaagacgtcaaggagggaggcagctgtggtcaggcggtaccaggtggtgccagcccaccagtagagaagtctgaagagccggcctggcgaagtggccaccatccagagtaaggagcccgcccgtgagacggcgcttcggagccgcgagctggaactctgctggtccacatccgagtagcccacgtagtcgtcctcagaggagtagcccgaggaagagcccaggaagtcctcggtggccttgcgccccacaagcccgctggccctgctgctctctgagccacccgtgcctctcctcctccgcacccgcaggtcctcaccccagttggcgtcaccatgcagttcctccagggagctcctgggtgggaaccaggactcgtggaccagcgactcactgtagtaggaggtgtgtgcatcagaggacgggcccagctgtggcgctggggacaggcgcttcatgttgctggatttcctcttcaaggtcctgagaggactgtctttaaacagggtgctctgactcccagccaccgagctccctccgctgctgctgctgccgtcatcgtcaccctgggagtagcgcgc

SEQ ID NO: 914 - DNA, 1613 bp, Homo sapiens
ggcgggccagccaagatggcggcctcatgcttggtcctgctggcgctgtgtctgctgctgccgctgctgctgctgggaggatggaagcgctggcgccgggggcgggcggcccggcatgtagtagcggtggtgctgggcgacgtgggccgcagcccccgtatgcagtaccacgcgctgtcgttggccatgcacggcttctcggtgaccctcctggggttctgcaactccaaaccccatgatgagctcttgcagaacaacagaattcagattgtggggttgacagaacttcagagtcttgcagttgggccccgagttttccagtacggagtcaaagttgtacttcaggctatgtacttgctgtggaagttgatgtggagggagccaggtgcctatatctttctccagaaccccccaggtctgcctagcattgctgtctgctggttcgtgggctgcctttgtggaagcaagctcgtcattgactggcacaactatggctactccatcatgggtctggtgcatggccccaaccatcccctcgttctgctggccaagtggtacgagaagttctttgggcgcctgtcccacctgaacctgtgtgttaccaatgctatgcgagaagacctggcggataactggcacatcagggctgtgaccgtctacgacaagcccgcatctttctttaaagagacacctctggacctgcagcaccggctcttcatgaagctgggcagcatgcactctccgttcagggcccgctcagaacctgaggacccagtcacggagcggtcggccttcacggagcgggatgctgggagcgggctggtgacgcgtctccgtgagcggccagccctgctggtcagcagcacgagctggacagaggacgaagacttctccatcctgctggcagctttagaaaagtttgaacaactgactcttgatggacacaaccttccttctctcgtctgtgtgataacaggcaaagggcctctgagggagtattatagccgcctcatccaccagaagcacttccagcacatccaggtctgcaccccctggctggaggccgaggactaccccctgcttctagggtcggcggacctgggtgtctgtctgcacacgtcctccagtggcctggacctgcccatgaaggtggtggacatgtttgggtgctgtttgcctgtgtgtgctgtgaacttcaagtgtttacatgagctggtgaaacatgaagaaaatggcctggtctttgaggactcagaggaactggcagctcagctgcagatgcttttctcaaactttcctgatcctgcgggcaagctaaaccagttccggaagaacctgcgggagtcgcagcagctccgatgggatgagagctgggtgcagactgtgctccctttggttatggacacataactcctgggccagaggctaaaaccccrggacccctgctgtccttcccgcagcttcttctyggagtctcagggcaaaccctttcgagcagcrcctcccagtggccagaagctgaaatgacrgcagtggtrctgcctggtaaaagaattggttctgtgacccgggaaaaaaaaaaaaaaaaaaaaaaaaaaaaaagggcggccgct

SEQ ID NO: 915 - DNA, 1191 bp, Homo sapiens
  misc_feature (1136)..(1136): n equals a,t,g, or c
cacgcgtccggccagagtgagtgtttacaccggcggcagtscggccgggttccttccgcgggacgggtgagggcgctggggccctgggcagcgcgggctcgatgtgtgtcagccaagtagctggtcccactggagcgggagaaagagagagcgcgaaagagagaggatgtctctctcagactggcacctggcggtgaagctggctgaccagccacttactccaaagtctattcttcggttgccagagacagaactgggagaatactcgctagggggctatagtatttcatttctgaagcagcttattgctggcaaactccaggagtctgttccagaccctgagctgattgatctgatctactgtggtcggaagctaaaagatgaccagacacttgacttctatggcattcaacctgggtccactgtccatgttctgcgaaagtcctggcctgaacctgatcagaaaccggaacctgtggacaaagtggctgccatgagagagttccgggtgttgcacactgccctgcacagcagctcctcttacagggaggcggtctttaagatgctcagcaataaggagtctctggatcagatcattgtggccaccccaggcctcagcagtgaccctattgctcttggggttctccaggacaaggacctcttctctgtcttcgctgatcccaatatgcttgatacgttggtgcctgctcacccagccctcgtcaatgccattgtcctggttctgcactccgtagcaggcagtgccccaatgcctgggactgactcctcttcccggagcatgccctccagctcataccgggatatgccaggtggcttcctgtttgaagggctctcagatgatgaggatgactttcacccaaacaccaggtccacaccctctagcagtactcccagctcccgcccagcctccctggggtacagtggagctgctgggccccggcccatcacccagagtgagctggccaccgccttggccctggccagcactccggagagcagctctcacacaccgactcctggcacccagggtcattcctcagggacctcaccaatgtcctctggtgtccagtcagggacgcccatcaccaatgatctcttcagccaagccctacagnatgcccttmaggcctctgggmagcccaagcttaaagccrtggcagccagttgcag

SEQ ID NO: 916 - DNA, 1287 bp, Homo sapiens
  misc_feature (826)..(826): n equals a,t,g, or c
ccactgtaccccaggcctttaataggcaggagccccactgcttccagcctctggtgccaacacagttgccaaacccattgagcttggggctgccccgtggaggcctcctgggtatggaccaggggcttgttgagagctgagccatgcacacaggtgcagacaccccccaactcccatgcacacggctagtccaggcgcctccacgctgcaccgtraggactgcagggcatgtccccgtgarggctatgggcctctktaggtgggcttccaaggtcctgggtgcagccgggtgcatggmagcccttytggcgggggtgagcgcacgascaaagtcactggaagccgggtttccggaagctcgcagcttggcctgcaccacacgccctccccttttggcttcacgccatcaggcctcaagtgggcatgggggcagggacgggcccaggaactgttgttttctcaggattctttcagctgggaacatggcaggtgagcagagcttggtgcctctgccgtggcccctgctggggcagcccgtgttgccggagcctctaagccaaagagcccgttggccgtggttggtgggggtggacgtgggggtgtcccacctggaccagactggcgtgggtgagctccacaccctgcctggcaatggtatgagagtcggacctggacagggccagctgctgggggagcggcactggggactggaggctggaagcgggtggtgtgtgtcccctgtttacttttagctgagctggggttgggtgtacgggttctgttcctctgagccctgcggcccacctgatgtttamgtgtgtgtgtnarggggggcgggggtggcaggtgtccccccctggtccccgccccaaragcctgctgtctgtatggaggaggtgctakmccggtccaccggctgctgcccacccctgcatgccccagttgcccaccccgcctgcccctggacatgaagtggtcacgcttcatccacggctccttcccacccctcggcagtggctgtgcaatgttttaagttcacaagttcctgctcctccccacactgagctcctttgttcctccccctccagcctttgcctgggaactggtccttgtttgccgggcttctcggagggttcactgtacattcgttctcaggtggtcttgtggctgtctttcggaaaatggttattttatatgatttgtcatggaatttgttctaataaatcattcttctatcacatggcagcmcsctggaaaaaaaaaaaaaaaaaaaaaaaaaaaaaaaaa

SEQ ID NO: 917 - DNA, 772 bp, Homo sapiens
  misc_feature (648)..(648): n equals a,t,g, or c
  misc_feature (685)..(685): n equals a,t,g, or c
  misc_feature (770)..(770): n equals a,t,g, or c
ctacactatagccctcagaaggacgacttttttctcttttagcaagatggcagttatagccagaggacagctcaggttggtgctttgctgggatttagttaatatgatgatgtatacatattttatattcagctctttacagtgaatgtaaaacaaatgtaatttaagggattagtaatatatacttgtacagtcattattgagtcttagccatttatactctgtcagagaaaatctgcctttgctgttcgtgtgtacctagaatgaaaacaattacttagaatgaaaccattttcttctccttttcaataggttttatttcgtctcaatttcctggtagtggtgttatgtatagtaatggatcgaccttatcaattctattactttgtccccttggtcactgtatggttcatggtcatatatgttactttagcactatggccacaaataatccaaaaaaaagcaaacggaaattgtttctggcattttggcttactgttgaaactaggctttttgctgttattcatatgttttttggcatattctcagggtgcatttgagaagatcttttctctttggccattgtccaagtgttttgaactgaaagggaatgtatatgaatggtggttcagatggaggttagaccgntatgtaagttttccacggaatgctgtttgcttttatntatctggcttttgcagaaaccgcaaatactttctgaaggaaaagggtgaacctctttttttcaaacaaaaatttcaaaattttcngg

SEQ ID NO: 918 - DNA, 902 bp, Homo sapiens
ggacggggatcctgatgctctcaccccaccctccgctgcctctgcttctgccaaggtggccgacactgggccccctaccgaccgtggcgtccaggtgactgagcacggggccacagctgctcttgtccagtggccggatcagcggcctatcccgggcatccgcatgtaccagatccagtaccaacagctcggctgatgacatcctcgtctacaggatgatcccggcggagagccgctcgttcctgctgacggacctggcgtcaggccggacctacgatctgtgcgtgctcgccgtgtatgaggacakcgccacggggctcacggccacgcgksctstgkgctgcgcccgcttctccaccgaacctgcgctgcggccatgcggggcgccgcacgctcccttcctgggcggcacgatgatcatcgcgctgggcggcgtcatcgtagcctcggtactggtcttcatcttcgtgctgctaatgcgctacaaggtgcacggcggccagccccccggcaaggccaagattcccgcgcctgttagcagcgtttgctcccagaccaacggcgccctgggccccacgcccacgcccgccccgcccgccccggagcccgcggcgctcagggcccacaccgtggtccagctggactgcgagccctgggggcccggccacgaacctgtgggaccctagccaggcgcccccccctctaagggtcctctggccccacggacagcaggacccggacaccctgtgggacctggcctcaaactcaccaaatcgctcatggtttttaaaactctgatggggagggtgtcggggacaccggggcaaaacaagaaagtcctatttttccaarmttgggcgaaacaaaaaaaaaaaaaaaaaaaaaaaaaaaaaaaaaaaaaa

SEQ ID NO: 919 - DNA, 1894 bp, Homo sapiens
  misc_feature (1821)..(1821): n equals a,t,g, or c
  misc_feature (1845)..(1845): n equals a,t,g, or c
  misc_feature (1865)..(1865): n equals a,t,g, or c
  misc_feature (1883)..(1883): n equals a,t,g, or c
gcttggagaagggcatgtgtggggtgtgtgtgggatgtgggttgtgtgtatatctggcatgtgtcccagtcacttgcagaagggtgacttcttgccagccgcatcgagatgccatgcattgggttcctaggttggactcatacccgagggtggcagtgggaagattcgggtctcgtttctctctgtcaggactaccgtggtttgttctgcagcctcctggagacaaggcgtcccttcccgggwgctgtcggtctrgatctragggagctctytgtgtgggctctgctgcgctgggagcctgtcacggtaggagctctcccggtaccagtgtccacagaccgcccaacacagaggctttgaggcttctctagatcggaacctctttggtgacattcccgaccagccctgcaagagaaacgacaktgtgtgtgtgagcagaggtggcygcacacctgctggacatctttgccaggctgtgccttctcatgtttcatagacagtggtctgtgctggcagaggctgctgcccctggttggggctatcaggagagtgggggatggtggccacatgtccyccaggtggtctcccggtgcatagctggtggctctgggcaagccatcccttgcttctcggggctgacgccaccgttgtgtccgagcccgccctcccctgcttcctcagcgggaccccttcatctgttggccttacctgtcctcagaaaggaagargtgaccccacccagccacctctcccttttatggaactcgagagggtggccctactgtgcaccccttccttgtgagtagctctcaactgtcctggagagcagaggctatttggggtcggaggagccctcgatacctgcgaatacatctgctttccaggctgctgtttattctgagacgactgtgctgtagcttcccttgcagctgcaataacccgcaggtcttcactgaggtggaggctttggggtagaattctccatttattttactacttaatacaaaacatttatttttgaccagtcctgtggcttccattagcaatatgtttcctttcccaaatatgcaaatagtggctttgtttgctcaattttgtgagtgctttggaatttaaatgattgtataactcaagaagattacttttctatgttgctcaagctgtgcctgccaacttgtaacttaataaatacaggaaatcctcagagaaggtgatattttcaggaaaaagacaaatgccctcatagtagtgggaagtgtgaaggtgaccgtgaacatccttcctcatcgggtctgtccccgtcatttcctcccggagtcgtcgcaggtggagatggacaacgtggtgttggacttagacctccttcagtgtggctctgctgggccagaggcatcctgctgtcccgggtggctgcctcgctgtctgcaccccctctccctggggcagctttgcttcctgcccctgtgctcggggcctgggtggttactggcgtgtagatggaattgcttttttaatatgggaagatacatttatttttttccatgtgggtgggtgtctctttttggattttcttctgtttttacgtttctcttcttagaagggtgggagagaatcaagctcctgtggccacctgtgtcccagcagcaagtgaagtggagctgctcagggtgccctctcctgcggaccaagtctcygaatgttcaaagatgargggcctggcttccgtgctctggcttttgtaacttatctggaagggaaaagcacatgccttcaacgggcaaggtatggtcccttttcttctcggggggttgaacttgcaanttctggggtgaaactggtcccttntggcattggtttacccgggngaaggttctggaagtttnaaaaatggtaa

SEQ ID NO: 920 - DNA, 2092 bp, Homo sapiens
gagggtttgaagccgcgccgcgagggagcgaggtcgcagtgacagcggcgggcgatcggacccaggctgccccgccgtacccgcctgcgtcccgcgctcccgccccagcatgacagccccggcgggtccgcgcggctcagagaccgagcggcttctgacccccaaccccgggtatgggacccaggcggggccttcaccggcccctccgacacccccagaagaggaagaccttcgccgtcgtctcaaatactttttcatgagtccctgcgacaagtttcgagccaagggccgcaagcctgcaagctgatgctgcaatggtcaagatcctggtggtcacggtgcagctcatcctgtttgggctcagtaatcagctggctgtgacattccgggaagagaacaccatcgccttccgacacctcttcctgctgggctactcggacggagcggatgacaccttcgcagcctacacgcgggagcagctgtaccaggccatcttccatgctgtggaccagtacctggcgttgcctgacgtgtcactgggccggtatgcgtatgtccgtggtgggggtgacccttggaccaatggctcagggcttgctctctgccagcggtactaccaccgaggccacgtggacccggccaacgacacatttgacattgatccgatggtggttactgactgcatccaggtggatccccccgagcggccccctccgccccccagcgacgatctcaccctcttggaaagcagctccagttacaagaacctcacgctcaaattccacaagctggtcaatgtcaccatccacttccggctgaagaccattaacctccagagcctcatcaataatgagatcccggactgctataccttcagcgtcctgatcacgtttgacaacaaagcacacagtgggcggatccccatcagcctggagacccaggcccacatccaggagtgtaagcaccccagtgtcttccagcacggagacaacagcttccggctcctgtttgacgtggtggtcatcctcacctgctccctgtccttcctcctctgcgcccgctcactccttcgmggcttcctgctgcagaacgagtttgtggggttcatgtggcggcagcggggacgggtcatcagcctgtgggagcggctggaatttgtcaatggctggtacatcctgctcgtcaccagcgatgtgctcaccatctcgggcaccatcatgaagatcggcatcgaggccaagaacttggcgagctacgacgtctgcagcatcctcctgggcacctcgacgctgctggtgtgggtgggcgtgatccgctacctgaccttcttccacaactacaatatcctcatcgccacactgcgggtggccctgcccagcgtcatgcgcttctgctgctgcgtggctgtcatctacctgggctactgcttctgtggctggatcgtgctggggccctatcatgtgaagttccgctcactctccatggtgtctgagtgcctgttctcgctcatcaatggggacgacatgtttgtgacgttcgccgccatgcaggcgcagcagggccgcagcagcctggtgtggctcttctcccagctctacctttactccttcatcagcctcttcatctacatggtgctcagcctcttcatcgcgctcatcaccggcgcctacgacaccatcaagcatcccggcggcgcaggcgcagaggagagcgagctgcaggcctacatcgcacagtgccaggacagccccacctccggcaagttccgccgcgggagcggctcggcctgcagccttctctgctgctgcggaagggacccctcggaggagcattcgctgctggtgaattgattcgacctgactgccgttggaccgtaggccctggactgcagagacccccgcccccgaccccgcttatttatttgtagggtttgcttttaaggatcggctccctgtcgcgcccgaggagggcctggacctttcgtgtcggacccttgggggcggggagactgggtggggagggtgttgaataaaagggaaaataaaaaaaaaaaaaaaaaaaaaaaaaaaaaaaaaacctyggggggggcccc

SEQ ID NO: 921 - DNA, 2744 bp, Homo sapiens
  misc_feature (2699)..(2699): n equals a,t,g, or c
acacactgatagcttatagtgatttaggatactacattatcaataaactgcaccatgtggacgagtcggtggggagcaagacgagaagggccttcctgtacctcgccgcctttcctttcatggacgcaatggcatggacccatgctggcattctcttaaaacacaaatacagtttcctggtgggatgtgcctcaatctcagatgtcatagctcaggttgtttttgtagccattttgcttcacagtcacctggaatgccgggagcccctgctcatcccgatcctctccttgtacatgggcgcacttgtgcgctgcaccaccctgtgcctgggctactacaagaacattcacgacatcatccctgacagaagtggcccggagctggggggagatgcaacaataagaaagatgctgagcttctggtggcctttggctctaattctggccacacagagaatcagtcggcctattgtcaacctctttgtttcccgggaccttggtggcagttctgcagccacagaggcagtggcgattttgacagccacataccctgtggtcacatgccatacggctggttgacggaaatccgtgctgtgtatcctgctttcgacaagaataaccccagcaacaaactggtgagcacgagcaacacagtcacggcagcccacatcaagaagttcaccttcgtctgcatggctctgtcactcacgctctgtttcgtgatgttttggacacccaacgtgtctgagaaaatcttgatagacatcatcggagtggactttgcctttgcagaactctgtgttgttcctttgcggatcttctccttcttcccagttccagtcacagtgagggcgcatctcaccgggtggctgatgacactgaagaaaaccttcgtccttgcccccagctctgtgctgcggatcatcgtcctcatcgccagcctcgtggtcctaccctacctgggggtgcacggtgcgaccctgggcgtgggctccctcctggcgggctttgtgggagaatccaccatggtcgccatcgctgcgtgctatgtctaccggaagcagaaaaagaagatggagaatgagtcggccacggagggggaagactctgccatgacagacatgcctccgacagaggaggtgacagacatcgtggaaatgagagaggagaatgaataaggcacgggacgccatgggcactgcagggacagtcagtcaggatgacacttcggcatcatctcttccctctcccatcgtattttgttcccttttttttgttttgttttggtaatgaaagaggccttgatttaaaggtttcgtgtcaattctctagcatactgggtatgctcacactgacggggggacctagtgaatggtctttactgttgctatgtaaaaacaaacgaaacaactgacttcatacccctgcctcacgaaaacccaaaagacacagctgcctcacggttgacgttgtgtcctcctcccctggacaatctcctcttggaaccaaaggactgcagctgtgccatcgcgcctcggtcaccctgcacagcaggccacagactctcctgtcccccttcatcgctcttaagaatcaacaggttaaaactcggcttcctttgatttgcttcccagtcacatggccgtacaaagagatggagccccggtggcctcttaaatttcccttccgccacggagttcgaaaccatctactccacacatgcaggaggcgggtggcacgctgcagcccggagtccccgttcacactgaggaacggagacctgtgaccacagcaggctgacagatggacagaatctcccgtagaaaggtttggtttgaaatgccccgggggcagcaaactgacatggttgaatgatagcatttcactctgcgttctcctagatctgagcaagctgtcagttctcacccccaccgtgtatatacatgagctaacttttttaaattgtcacaaaagcgcatctccagattccagaccctgccgcatgacttttcctgaaggcttgcttttccctcgcctttcctgaaggtcgcattagagcgagtcacatggagcatcctaactttgcattttagtttttacagtgaactgaagctttaagtctcatccagcattctaatgccaggttgctgtagggtaacttttgaagtagatatattacctggttctgctatccttagtcataactctgcggtacaggtaattgagaatgtactacggtacttccctcccacaccatacgataaagcaagacattttataacgataccagagtcactatgtggtcctccctgaaataacgcattcgaaatccatgcagtgcagtatatttttctaagttttggaaagcaggttttttcctttaaaaaaattatagacacggttcactaaattgatttagtcagaattcctagactgaaagaacctaaacaaaaaaatattttaaagatataaatatatgctgtatatgttatgtaatttattttaggctataatacatttcctattttcgcattttcaataaaatgtctctaatacaatacggtgattgcttgtgtgctcaacatacctgcagttgaaacgtattgtatcaatgaacattgtaccttattggcagcagttttataaagtccgtcatttgcatttgaatgtaaggctcagtaaatgacagaactatttttncattatgggtaactgggggaataaatggggtcactgggagtaggg

SEQ ID NO: 922 - DNA, 2946 bp, Homo sapiens
cgcggacgggtgagaggccgcggcggcaggtccacctgggcttgcgaaggcacagattccccgtccacagctcacgaccagatgcaccagcaggagtccacatcgaggacgtcctccgggcactcccacgaccagtgaccaggagttaaactttgggatgtgcccgtgatgttggaccacaaggacttagaggccgaaatccaccccttgaaaaatgaagaaagaaaatcgcaggaaaatctgggaaatccatcaaaaaatgaggataaygtgaaaagcgcgcctccacagtcccggctctcccggtgccgagcggcggcgttttttctttcattgtttctctgcctttttgtggtgttcgtcgtctcattcgtcatcccgtgtccagaccggccggcgtcacagcgaatgtggaggatagactacagtgccgctgttatctatgactttctggctgtggatgatataaacggggacaggatccaagatgttctttttctttataaaaacaccaacagcagcaacaatttcagccgatcctgtgtggacgaaggcttttcctctccctgcacctttgcagctgctgtgtcgggggccaacgssagcacgctctgggagwgacctgtggcccaagacgtggccctcgtggagtgtgctgtgccccagccaagaggcagtgaggcaccttctgcctgcatcctggtgggcagacccagttctttcattgcagtcaacttgttcacaggggaaaccctgtggaaccacagcagcagcttcagcgggaatgcgtccatcctgagccctctgctgcaggtgcctgatgtggacggcgatggggccccagacctgctggttctcacccaggagcgggaggaggttagtggccacctctactccggcagcaccgggcaccarattggcctcagaggcagccttggtgtggacggggaaagtggcttcctccttcacgtcaccaggacaggtgcccactacatcctctttccctgcgcaagctccctctgcggctgctctgtgaagggtctctacgagaaggtgaccgggagcggcggcccgttcaagagtgacccgcactgggagagcatgctcaatgccaccacccgcaggatgctttcccacagctctggagcagtgcgctacctgatgcatgtcccagggaacgccggtgcagatgtgcttcttgtgggctcagaggccttcgtgctgctggacgggcaggagctgacgcctcgctggacacccaaggcagcccatgtcctgagaaaacccatcttcggccgctacaaaccagacaccttggctgtagccgttgaaaacggaactggcaccgacagacagatcctgtttctggaccttggcactggagccgtcctgtgtagcctagccctcccgagcctccctgggggtccactgtccgccagcctgccgaccgcagaccaccgctcagccttcttcttctggggcctccacgagctggggagcaccagcgagacggagaccggggaggcccggcacagcctgtacatgttccaccccaccctgccgcgcgtgctgctggagctggccaatgtctctacccacattgtcgcctttgacgccgtcctgtttgagccaagccgccacgccgcctacatccttctgacaggcccggcagactcagaggcacccggcctggtctctgtgatcaagcacaaggtgcgggaccttgtcccaagcagcagggtggtccgcctgggtgagggtgggccagacagtgaccaagccatcagggaccggttctcccggctgcggtaccagagtgaggcgtagaggcacgccagccagagcctgtggagagactccgcctgctgacactaaacgtcctgggaagtgggcccttccctgggtctctgcactgactcccccactcctgaccctggtgatggtcgccactgggcagcagcagccttaccagtcctccatgatcacacccagggacctgcatgggtgaggggacaccctgggcctctctcccgcccagcatcctccctgagtccccacacagggcctcactctgcaccccaccagggtcccgctcacaccaggcagccttcatagtggtctccctggccaccttgggcagagctgggtcatgcagcaccccatccttacccggtgccctctccttgccagcttctccccaggccagagcggccatcgcgtagaaagaaccagggtgtccccgggacaggccgtcccccaccccatcctgtagaagtccattccccttttccctcctgtgctctgtcccccaaggagtcatggaactcagggtactgggcctcaacgggaacctgagacagctccagcttcgcagcccttcccggagctacagggggatcctctagcatggggggtgtgacttggttcctttgaccaggtcctgtgaggaagcctggagcaagggtctcccccagcaggatgggtggggcctgctctggagctgagcccgtggccgctcacaggtgtccttagtggtgttgcagctgtctactggctgcatgtgctgtgaatatcccaaggaactggctgtggaatgcgtgtttgggtcagtctgtgccctctcagtagacactggagctgctctgtccctgaagaggccccgtgccccaggcatggcaagcgcctgcctctccccttccggtgctcacacgcccacgccgtgccacccgatgcaggactcacctctgtgccttgctgctcctgaggcccaagggcagccatggtgctctgtactgctcgggccgcccaggtcacagagcctgagcttcgtagccaaagcagcctgatgacccacccaccaaggaagaaagcagaataaacatttttgcactgcctgaaaaaccccggtggtcaggcgtgagcctaaaaaaaaaaaaaaaaaaaaaa

SEQ ID NO: 923 - DNA, 2059 bp, Homo sapiens
  misc_feature (115)..(115): n equals a,t,g, or c
  misc_feature (750)..(750): n equals a,t,g, or c
  misc_feature (756)..(756): n equals a,t,g, or c
  misc_feature (759)..(759): n equals a,t,g, or c
  misc_feature (1576)..(1576): n equals a,t,g, or c
  misc_feature (1578)..(1578): n equals a,t,g, or c
ggccttttcactggctgagagggtaaaacctgtttcccagcctggtggcatcctgtggaaagttggtcagctgcaacctggggtgtgaaggactggacctggaagccctcttgcntcggaggtgttgaaaccaaaacgaacgttatgtataaaaccccagctccatcgtgcgtgtcaggcatctgctcagactgtcactggcaagctcgtttccrcgtcaycacaatggagttgcttctgccaccctttggcatccctttaaagtgccccctacttctactccccatgtaagaggctttgtgccttgctaaggagcaaagggtagaaacatgttgattttaaagaagtttttttaagacaattgttgacaatagtaaaagagatcaggaggatcaagaatctaaaacaagcctgaaggatgtccaactgtgtatttagaatttccgacattcttctctactggatctacacattggaccccatctgatcctttgctgcttttttggcttggtcaggtcctggcctcattttggcgttacctgtgtcagagttcaaggtggatgtgcttagagctggtcagccccttccagacctggacacgtctgtggctccttttctttcttsctttttttttttttttttaaaaaaaaaaaaggttcagcagaaatcagcgtggctagttcacaaagaatttccagtatcagggaaaaactgtgcgtgtgtgtgtgtgtgtgtgcgcacgtgtgtgtngttgcngtngtgtgatacctataaaacagtttctccttctctgaagggaaaggaaagtgctaggcagcctgtgattagcaacattctttgtgcttttttgttgttcctctgctctgtcacagttctacgttgtttgccttagaaatgtaatttttaaaaaccattttaaaaatgaacggtgatttggctggctggaaaaaatcacactgtcaggggactatatttgaagtcagtctagacggggctggactaggaacccacctggacccaggagaccccacaggacccaggaggtccctgccggaagcagaggttcaggtgagagtggctcacctctgagctggtgaagtgaggacttgcctgtgacatgacccagggatctgctgctggcttctggagacagggccttgggctgacttctcaggttgattgaggcctcctgactagcggtgttcccaggmtagaggtgattggctgcaacaaagatgcttctattagtctattagcagtgccttcgggaccctgggattttgctctctctagaaaggtgttttttatttttttattttttatctcccccttttttcctggctttgctccagggtttgtgtatttgcctgtttattgtcctgctctttttttttttggatgaaaactccagcctttcctgactcacctccatcttcggttcttcagttttctgagaagagttgggatatgtgggaaggggcatgggagctcggcagcctccgcctgccaggaaggcagtttcgcctctgcaggaaagagcagagcccgtgggaagccctgggtgagggtggcgcancnggcccagcacgcatggtattgccagccacggggggcctgcgtgtagtctctgctccctgcatttcaccttctttgttgactttccttctctgttttcccccatctgtttgccagaggggtgggactggcaacagaacagccgtggctgctttatctctcctctccacggtgtactcaggcctgagtggtgactcacgggagcctggccacctcgcagctgttcgccccctcaacctttgaactggaactgctggctcacacagggttttcgacaactgcagctgaatctcatggaaaagctggattcctctgccttacgcagaaacacccgggctccatctgccaggtgcttgccactggtcctggcagaaatggcggctgctgaaagtgaccttccaaatccttggtggcacttcagcgccacaggctctccaataaaaaccctttacacacaaaaaaaaaaaaaaaaaaaaaaaaaaaa

SEQ ID NO: 924 - DNA, 1867 bp, Homo sapiens
  misc_feature (1847)..(1847): n equals a,t,g, or c
  misc_feature (1852)..(1852): n equals a,t,g, or c
  misc_feature (1856)..(1856): n equals a,t,g, or c
ggctttgctccggtctggacttcgtccctcccagatctctgagctagcaagcactgcagcccgagccaattgcgaaagaccaacaaagcccagcccagcggaaggaacggtttcggagttgtttttctttgatacgggagttcctccttgctctcgcccctactctttctggtgttagatcgagcwaccctctaaaagcagtttagagtggtaaaaaaaaaaaaaaacacaccaaacgctcgcagccacaaaagggatgaaatttcttctggacatcctcctgcttctcccgttactgatcgtctgctccctagagtccttcgtgaagctttttattcctaagaggagaaaatcagtcaccggcgaaatcgtgctgattacaggagctgggcatggaattgggagactgactgcctatgaatttgctaaacttaaaagcaagctggttctctgggatataaataagcatggactggaggaaacagctgccaaatgcaagggactgggtgccaaggttcatacctttgtggtagactgcagcaaccgagaagatatttacagctctgcaaagaaggtgaaggcagaaattggagatgttagtattttagtaaataatgctggtgtagtctatacatcagatttgtttgctacacaagatcctcagattgaaaagacttttgaagttaatgtacttgcacatttctggactacaaaggcatttcttcctgcaatgacgaagaataaccatggccatattgtcactgtggcttcggcagctggacatgtctcggtccccttcttactggcttactgttcaagcaagtttgctgctgttggatttcataaaactttgacagatgaactggctgccttacaaataactggagtcaaaacaacatgtctgtgtcctaatttcgtaaacactggcttcatcaaaaatccaagtacaagtttgggacccactctggaacctgaggaagtggtaaacaggctgatgcatgggattctgactgagcagaagatgatttttattccatcttctatagcttttttaacaacattggaaaggatccttcctgagcgtttcctggcagttttaaaacgaaaaatcagtgttaagtttgatgcagttattggatataaaatgaaagcgcaataagcacctagttttctgaaaactgatttaccaggtttaggttgatgtcatctaatagtgccagaattttaatgtttgaacttctgttttttctaattatccccatttcttcaatatcatttttgaggctttggcagtcttcatttactaccacttgttctttagccaaaagctgattacatatgatataaacagagaaatacctttagaggtgactttaaggaaaatgaagaaaaagaaccaaaatgactttattaaaataatttccaagattatttgtggctcacctgaaggctttgcaaaatttgtaccataaccgtttatttaacatatatttttatttttgattgcacttaaattttgtataatttgtgtttctttttctgttctacataaaatcagaaacttcaagctctctaaataaaatgaaggactatatctagtggtatttcacaatgaatatcatgaactctcaatgggtaggtttcatcctacccattgccactctgtttcctgagagatacctcacattccaatgccaaacatttctgcacagggaagctagaggtggatacacgtgttgcaagtataaaagcatcactgggatttaaggagaattgagagaatgtacccacaaatggcagcaataataaatggatcacacttaaaaaaaaaaaaagggggggccgcnctggngggnccaagctttcg

SEQ ID NO: 925 - DNA, 1176 bp, Homo sapiens
aattcggcacgcgtccgtacagtcatggctgccgccgtcgctgctgccggtgcaggggaaccccagtccccggacgaattgctcccgaaaggcgacgcggagaagcctgaggaggagctggaggaggacgacgatgaggagctagatgagaccctgtcggagagactatggggcctgacggagatgtttccggagagggtccggtccgcggccggagccacttttgatctttccctctttgtggctcagaaaatgtacaggttttccagggcagccttgtggattgggaccacttcctttatgatcctggttcttcccgttgtctttgagacggagaagttgcaaatggagcaacagcagcaactgcagcagcggcagatacttctaggacctaacacagggctctcaggaggaatgccaggggctctaccctcacttcctggaaagatctagattgttattgctgtttgagctgtctcagtgggataagtttgaaattcaagtgtttgaactgctgataatttggatttttttttttttttaactttggcacattgatctatctaaacctggtggggagaattatccccacattgtctcatggaaagactcaacttgcaactgtgccctccacactatccttacttctgtctccactctgataccagagtgcagccatgcagayggttattccagctctggtcacccgactcctttcaccaaattgctcctaactggaagatctcactttccccttgtggggtaggaaccgatgccagtgggagggatgtgcccctgaccattaacgactgttttttttttttttttttaaagaatggagttgttggggcrggacatgcacacaatgtgaaacagacaaaatgcattacacctgtagtgtaaagtggccactatgaatccctatgtatgagaggagggaggcaggctgcagcttcagccacagaatggggactatggaagacagcaggagctcatttcctctgcacattttggctgttagacctgtgtgtgtgtttaaaaaaagagaagtcagtgctcactttttgtatttaaatattaaaaatgattccaactgaaaaaaaaaaaaaaaaaaaaaaaaaaaaaaaaaaaaaaaaaaaaaaaaaaaaaaaaaaaaaaaaaaaaaaaaaaaaaaaa

SEQ ID NO: 926 - DNA, 853 bp, Homo sapiens
tctccggataactgtgctcctgacatccttccttatggttttgggaactggtctaagatgcatacctatatcagacttaatccttaaaagaagattaattcatggaggacagatgttaaatggattggcaggtccaactgtaatgaatgcagcaccatttctctctacgacgtggttttctgcagatgaaagggccacagccacagctattgcatcaatgctcagttatcttgggggagcatgtgcatttttagttggaccacttgttgttccagctcccaatgggacatcacctcttcttgctgcagagagcagcagggcgcatattaaagatcgcatagaggctgtgttatatgcagaatttggagttgtctgcttaatattttctgcaacactagcttatttcccaccccgacctcctcttcctcccagtgttgctgcagctagccagcggctgagttatcggagaagcgtttgtagattattaagcaattttcgatttttgatgattgctttagcatatgccataccacttggtgtatttgctggctggtctggagttctggacttaattttaacaccagcgcatgtcagccaagtagatgctggctggattggattttggtccatagttggaggctgtgttgttggaatagctatggcaaggtttgcagattttatcaggggtatgctgaaactaattcttctcctcctgttttcgggagctacactgtcatccacgtggttcaccctgacctgtttgaacagcatcacacacctacctttaaccacagtgacattgtatgcctcctgtattctcctgggagtgttcttgaatagcagcgtgcctata

SEQ ID NO: 927 - DNA, 1162 bp, Homo sapiens
  misc_feature (1080)..(1080): n equals a,t,g, or c
  misc_feature (1114)..(1114): n equals a,t,g, or c
  misc_feature (1158)..(1158): n equals a,t,g, or c
gcgcagctccgccggcgcctggtcccagcgcccgcggcgccgcgtccccggcccaaccatggcgtcctccgcggccggctgcgtggtgatcgttggcagtggagtcattgggcgaagctgggccatgctgtttgccagtggaggcttccaggtgaaactctatgacattgagcaacagcagataaggaacgccctggaaaacatcagaaaggagatgaagttgctggagcaggcaggttctctgaaaggctccctgagtgtggaagagcagctgtcactcatcagtggttgtcccaatatccaagaagcagtagagggygccatgcacattcaggaatgtgttccagaagatctagaactgaagaagaagatttttgctcagttagattccatcattgatgatcgagtgatcttaagcagttccacttcttgtctcatgccttccaagttgtttgctggcttggtccatgtgaagcaatgcatcgtggctcatcctgtgaatccgccatactacatcccgctggttgagctggtcccccacccggagacggcccctacgacagtggacagaacccacgccctgatgaagaagattggacagtgccccatgcgagtccagaaggaggtggccggcttcgttctgaaccgcctgcaatatgcaatcatcagcgaggcctggcggctagtggaggaaggaatcgtgtctcctagtgacctggaccttgtcatgtcagaagggttgggcatgcggtatgcattcattggacccctggaaaccatgcatctcaatgcagaaggtatgttaagctactgcgacagatacagcgaaggcataaaacatgtcctacagacttttggacccattccagagttttccagggccactgctgagaaggttaaccaggacatgtgcatgaaggtccctgatgacccggagcacttagctgccaggaggcagtggagggacgagtgcctcatgagactcgccaagttgaaragtcaagtgcagmyaasctggaratttccaccttttcttttcagcttgattgcatttgactatattttacagccagtgattgnagtttcatggtaatatgtggcaaaatatttttgnaattattttctaatccctttcttaagtactctggggccctgcanttat

SEQ ID NO: 928 - DNA, 670 bp, Homo sapiens
  misc_feature (5)..(6): n equals a,t,g, or c
  misc_feature (13)..(13): n equals a,t,g, or c
ggggnnccccccnttttttttttttttttttttttttttttttttwtktggaagaatacagaaatatgtttaatacttagtatcaaactaaaaagtaatataaaattacaaaacttcttttttttcatgcacaggctttttctggtaaggaccgctgggattgaacagaagcttccggtaaataagggccccgtcggcaagacagcatactgctgtcacaagtgcaaacacccctccaccaactgtcaatgttgtggtttctggtatcagtgccaacacagatacgatgagcatgaatactgttgttaccagtgagttgataatatcaagcaaaggccaaaataaccacttcattaatcgatcaagtctgagtacatataaaagtatgaaaaataagataacggtgacttcaaatccagtgataacaatatatggttcaggggcttgtgcgatgataaaaaaggtcatagatgtcacagttagtgccagccgcagcatcttcacgtggcctttcacactgaagcagaaggggcgatgttttattttcggctgcacgttatccatcgcgtctgcagacccagcagcagcactttccctcaactcttctcagctggctgcctgagtaggttctgcgaagcgatagcaacmgccaaccgcggagcaccgccct

SEQ ID NO: 929 - DNA, 1033 bp, Homo sapiens
tcgacccacgcgtccggcggctggtgagcgcccgctggaggctggagcttccgggccctggaaaggggtccccgcgcgccccgggtcggaggcagacccctgggtttgggggacatgggcatttggggcgcctgaacccaagacctctggatgagctgccccgttcagaccatggatcctgaggtgaccttgctgctgcagtgccctggcgggggcctgccccaggagcagatacaggccgagctgagccccgcccatgaccgtcgcccactgccaggtggggacgaggccatcactgccatctgggagacccggctaaaggcccaaccctggctcttcgacgcccccaagttccgcctgcactcagccaccctggcgcctattggctctcgggggccacagctgctcctgcgcctgggccttacttcctaccgagacttcctgggcaccaactggtccagctcagctgcctggctgcgacagcagggtgccaccgactggggtgacacgcaggcctatctggcggacccactgggggtgggcgctgcactagccacagccgatgacttccttgtcttcctgcgccgctcccggcaggtggctgaggcccctgggctggtggacgtacctggtgggcaccctgagcctcaggtgaacctgccgctgctcaccctgagccagcccctgctgttgggcatcgcccgaaatgagaccagtgctggccgagccagtgccgagttctatgtccagtgcagcctgacttctgagcaggtgaggaagcactacctgagtgggggacccgaggcccacgagtctacaggaatcttctttgtggagacacagaacgtgcggagattgcccgagacggagatgtgggctgaactctgcccctcggccaaaggcgccatcatcctctacaaccgggttcagggaagtcccactggagcggccctagggtccccagccctactcccgccgctctgaaaataataaacgactttattcttggaaaaaaaaaaaaaaaaactcgaga

SEQ ID NO: 930 - DNA, 594 bp, Homo sapiens
tggacaaatttttctgcctgggcgctggatccactggcaaataccattaattggcggaatctgctgtgctgctttttatgcctggttgacgggaatgcaacctcctgcattgcgtaccatggtggcgcttgctacgtggggaatgcttaagttaagtgggcgacagtggagtggctgggatgtatggatatgttgtctggcggcaattttgctgatggatcctgttgccattctctcgcaaagtttatggctctctgccgctgcggtcgcggcattgatattttggtatcagtggtttccctgtcctgagtggcaactgccgccggtattgcgtgcarttgtttccctcatccatctgcaactgggaatcacacttctgcttatgcccgtgcaaatcgtcatatttyatggcattagtctgacctcgtttattgcaaatctattagcaattcccttggtgacatttatcacggttccgttgatcctcgccgcgatggttgtgcatttaagcgggccgttaatcctggagcaagggttatggtttcttgccgaccggtctttggctttacttttctgggggttaaagagtttgcc

SEQ ID NO: 931 - DNA, 703 bp, Homo sapiens
gtgtttccggaagacgwggcggctctcgcctgggctgtttcccggcttcatttctcccgactcagcttcccaccctgggctttccgaggtgctktcgccgctgtccccaccactgcagccatgatctccttaacggacacgcagaaaattggaatgggattaacaggatttggagtgtttttcctgttctttggaatgattctcttttttgacaaagcactactggctattggaaatgttttatttgtagccggcttggcttttgtaattggtttagaaagaacattcagattcttcttccaaaaacataaaatgaaagctacaggtttttttctgggtggtgtatttgtagtccttattggttggcctttgataggcatgatcttcgaaatttatggattttttctcttgttcaggggcttctttcctgtcgttgttggctttattagaagagtgccagtccttggatccctcctaaatttacctggaattagatcatttgtagataaagttggagaaagcaacaatatggtataacaacaagtgaatttgaagactcatttaaaatattgtgttatttataaagtcatttgaagaatattcagcacaaaattaaattacatgaaatagcttgtaatgttctttacaggagtttaaaacgtataaaactcacttgtataataaacagtttttgagggatttt

SEQ ID NO: 932 - DNA, 2664 bp, Homo sapiens
  misc_feature (487)..(487): n equals a,t,g, or c
  misc_feature (2649)..(2649): n equals a,t,g, or c
  misc_feature (2656)..(2656): n equals a,t,g, or c
  misc_feature (2659)..(2659): n equals a,t,g, or c
gcaaagacttctggtactctgtggtcaacggggtcatctttaactgcttggccgtgcttgccctgtcatcccacctgagaaccatgctcaccgaccctggggcagtacccaaaggaaacgctacgaaagaatacatggagagcttgcagctgaagccyggggaagtcatctacaagtgccccaagtgctgctgtattaaacccgagcgcgcccaccactgcagtatttgcaaaagatgtattcggaaaatggatcatcactgcccgtgggtgaacaattgtgtaggagaaaagaatcaaagattttttgtgctcttcactatgtatatagctctgtcttcagtccatgctctgatcctttgtggatttcagttcatctcctgtgtccgagggcagtggactgaatgcagtgatttttcacctccgataactgtaatcctgttgatcttcctgtgccttgagggtcttctgtttttcactttcactgncagttatgtttggcacccaaatccactccatatgcaacgacgagacggagatcgagcgattgaaaagtgagaagcccacatgggagcggaggctgcgatgggaagggatgaagtccgtctttggggggcccccctcamtcctctggatgaatccctttgtgggcttccgatttaggcgactgcccacgagacccagaaaaggtggcccggagttctcagtgtgaggcgtggctcatcagactgaaacttgctcacagacttccagttatttatttggggtctgaaggatatcaacagctcatctgtgaccaacagggcaactggaacctacacaaaccaattgcttgcagcaagcagagttttatatatttatagtcacagatggcagaggaagaggctctcagtccccacctgtacaacaacggaaaggtgtgtggccacacgaagaagccaaacgccgtggcctcctgcagagctggggcttctgtggaraatacttcgggttattacatgggttattcaaatcctgggtcctgagctgctgtttccaatcatgaagaaaaacagtgaatccagtgaacagggattctccaagcagtcatttcagggggctcctgctgaccccgccactcagcagtgcactccccggatcacagcagggcgtttacatagaaagacgttttggtctcgattagctccgatgctttgcactgaagttgcaaaagatctgtgcactgaacagtgaaggtggcttccggcacactccccgctgccccggaagagacatcctttgaccctctcagcaagtctgtgtgtgtgcgtgtctgtgcgtgtgcgcgcgtgtgtgcatgtgtgtcaaaattgccagtgttgtttaggcaatgtaacatttaccggctgtgtacagcaaacaagctattttttagaaaccgacgtttcagggaagaggggagagagccgcggggtcctgcccgtggttactatgaatgtattgctgttggaggacatctcgatccaaagaacagccgttcctgtgcggcccttcgttgccctcctgctttcattttttaaagaaatcttgagtgcttgagggccttggaactgattttttttttttgttccagccaaattagcagtgtataaatggcacctaggtaagagcagagctgcggctcggtgacttgatacttggggcagcccgatgctgtgtgtggggcaggggaggcatccttactggagaggcagggcccagccattgggcacctctgggaaggggaggggaccatgaggcagccagcccctggcaggggcgactgtgccaccgcaggcagcgctccagtcgggaatggccaggatggcgccctcttgttggagtttttggttagcttttacgttttcttctccacccacggcacaggtgataaaataggatccttggtgcggagcttaaaattatgccagaaagccaacagctcccctcgtggggccttgccttaaacttgcctggtttgtacattttttgccggacgcatcaagaagcaatctgtgacaaagtctgagggtcttcctttatgcttgccctccacactaagagaagttggcgtctccctcctgggaattgttttgcctttctgttcatctgtgaactgttttttgtttttaattactctgtaccccatccgaatcagggcttctaccactgctgatgcaaaaccacaaagggacctacctgagccaccgtcctagccaagcgagcaaacctgcagggggtttggaagtggacttggtcaccgcagaagcgtgtgcgccgttgggggaagagctgcgtcacagccagagggacaaagtgtgggtgatcctggagacgccagtttccgagattgttctgcatattcatttgcacattgttgtctgggttggacatgcgtgtgggcttcagtgtgaggcttttaatatgtatatcctgttatcaataaaacaattatccaagtggttgaatcctgtgagacttggcaagtgtgtgcaaatcaagtatacttgacttttcaacctcttctttcaatgtaacttttatatgaaataaagtaatcaattaacagttctcaaaaaaaaaaaaaaaaaaaaaaaaaaaccccggggggggggccccgggaacccaattnccccccnaanggggg

SEQ ID NO: 933 - DNA, 2547 bp, Homo sapiens
  misc_feature (35)..(35): n equals a,t,g, or c
  misc_feature (106)..(106): n equals a,t,g, or c
  misc_feature (191)..(191): n equals a,t,g, or c
  misc_feature (1363)..(1363): n equals a,t,g, or c
  misc_feature (2547)..(2547): n equals a,t,g, or c
aacgacggcccagtgaaattgtaaatacgacctcnactatagggccgaaattggggtaaccgggcccccccccctccgacaggcccagcacgaacggctccgttgnaccagtggggtaaaatccaatggatgaatttgtgacgttgttcatgttyatgccaaagtctgattccgttacacagcaccgattnccatgcaattattcgtgccttgttccagaatccgcactttaatattgggatacagctcattaaatttaccgattgccagcggtaaaaaataaaatactgcggtcggaatacacgctaacgtcaccataccacgatgataagcattcatatcacgaatattaaaaagcgtttcatcgaatttctttattaattcccgcgcctccgggagcaacctttttcctgcttttgttaacgtaaccttgcgagttgtacgctcaaatagttgaacatgtaaatcttcctccatcttttttattcttcgcgttaatgcaggttgcgtaatattgagtaatttagcggcattgttaaacgaactggactctgccagtatgacaaatgccttcatacttgataattcatgcttcattattactccggaaaatggaagcgacgattttgggtggctggccgttaaaaattttaactgcatttagccaacttaaattaatgaaaaaatgttattaatcgttgagctaaagtcattagagatgctttgcccttaatgtaaccatatcgcaataagttatgtttttaaattgagggcattattatgaaaaaaataccctgcgtgatgatgcgaggtggaacctcgaggggcgcgttcctgttagcggaacatttacccgaagatcaaacgcagcgcgataaaatattgatggcaattatgggttccggtaacgatctggaaattgacggtattggcggcggtaatccactgaccagtaaagtcgccattattagccgttccagcgatccgcgtgctgatgtcgattatctgtttgcgcaggtaatcgttcatgagcaacgtgtcgataccacgcctaactgcggcaatatgctgtctggtgttggggcattcgccattgaaaatggtttgattgcagcgacttcgccagttactcgcgtacgtatccgcaacgtcaatacgggtacgttcatcgaagctgatgtgcaaacgccaaatggtgttgtcgagtacgagggtagcgccagaattgacggcgtaccgggtactgccgcaccggttgcgctcactttcctgaatgccgctggaaccaaaaccggaaaagttttcccgactgataatcagattgattattttgacgatgtcccggtgacctgtatcgatatgncgatgccagtcgtcattattccggctgaatatctgggaaaaacaggttatgaattaccggcggaactggatgccgacaaagcattattagcccgcattgaatctatccgtctacaagcgggtaaagcaatgggcttaggtgatgtcagtaatatggttatccctaaacctgtgcttatttctccagcgcagaaaggcggggcaattaatgtgcgttattttatgccgcattcttgccatcgcgcgctggcgataaccggtgctattgctatttccagtagttgtgcattggaaggcaccgtcacccgacaaatcgtcccttctgtaggatacggcaatatcaatattgaacaccccagtggtgcgctcgacgttcatttaagtaatgaaggtcaggatgccacgacgttacgcgcatctgttattcggacgaccagaaaaatattttccggtgaagtttatcttccctgaaaaaattcgttgtcaggataaggacaatcaataaaggacttctgtatgagtcatacagaaagaacaggattttaaatgaataagaaatcgttatggaagctaattctgatattagcgatcccatgtattattggttttatgccagctccggcaggattaagcgaactggcgtgggtgctttttggtatttacctggcggccattgtggggctggttatcaagcctttcccggaacctgtcgtactgttaattgccgttgctgcctcaatggtggtggtcggtaacttatccgacggtgcgtttaaaaccaccgccgtattaagcggttactcttcaggtaccacctggctggtgttctcggcgtttaccttaagcgccgcatttgtgaccaccggtttaggtaaacgtattgcctatctgctgattggtaaaatcggtaacaccacgctgggtctgggttacgttacggtattcctcgatctggtactggctccggcaacaccgtctaacaccgcgcgtgcgggcggcattgtgttaccgatcatcaacagcgtggcggtggctttggggtccgaaccggaaaaaagtccgcgtcgtgtcggacattacctgatgatgtccatttacatggtcaccaaaaccaccagctatatgttctttaccgcaatggcggggaacawtctggcgcggcgggaartgattatcgccaacgcn

SEQ ID NO: 934 - DNA, 1098 bp, Homo sapiens
  misc_feature (907)..(907): n equals a,t,g, or c
  misc_feature (1074)..(1074): n equals a,t,g, or c
  misc_feature (1084)..(1084): n equals a,t,g, or c
  misc_feature (1093)..(1093): n equals a,t,g, or c
gcagacggcgtgcggctagcagcccgcatcgtggacacaccctgcaatgagatgaacaccgacaccttcctcgaggagattaacaaagttggaaaggagctggggatcatcccaaccatcatccgggatgaggaactgaagacgagaggatttggaggaatctatggggttggcaaagccgccctgcatcccccagccctggccgtcctcagccacaccccagatggagccacgcagaccatcgcctgggtgggcaaaggcatcgtctatgacactggaggcctcagcatcaaagggaagactaccatgccggggatgaagcgagactgcgggggtgctgcggccgtcctgggggccttcagagccgcaatcaagcagggtttcaaagacaacctccacgctgtgttctgcttggctgagaactcggtggggcccaatgcgacaaggccagatgacatccacctgctgtactcagggaagacggtggaaatcaacaacacggatgccgagggcaggctggtgctggcagatggcgtgtcctatgcttgcaaggacctgggggccgacatcatcctggacatggccaccctgaccggggctcagggcattgccacagggaagtaccacgccgcggtgctcaccaacagcgctgagtgggaggccgcctgtgtgaaggcgggcaggaagtgtggggacctggtgcacccgctggtctactgccccgagctgcacttcagcgagttcacctcagctgtggcggacatgaagaactcagtggcggaccgagacaacagccccagctcctgtgctggcctcttcatcgcctcacacatcggcttcgactggcccggagtctgggtccacctggacattgctgcaccggtgcatgctggtgagcgagccacangcttcggtgtggcccttctgctggcgctcttcggcccgtgcctyttgaggacccttctgcttgaacctgggtgtccccaactgggctgtgaaggtggatgtcsaggagggggacstggggaagggacttccaagaagacgcaaagctttgggggtgaagcccttctnggccttgggncccttgacnaaaac

SEQ ID NO: 935 - DNA, 1137 bp, Homo sapiens
  misc_feature (1091)..(1091): n equals a,t,g, or c
  misc_feature (1097)..(1097): n equals a,t,g, or c
  misc_feature (1118)..(1118): n equals a,t,g, or c
  misc_feature (1121)..(1121): n equals a,t,g, or c
  misc_feature (1128)..(1128): n equals a,t,g, or c
tcgacccacgcgtccgatttggcgcctgcgcgctgagtgcgtgccgctccgccgaccgaagaggctggacatgacaccagtggcatatcacggccatggggtctcagcattccgctgctgctcgcccctcctcctgcaggcgaaacaagaagatgacagggacggtttgctggctgaacgagagcaggaagaagccattgctcagttcccatatgtggaattcaccgggagagatwgcatcacctgtctcacgtgccaggggacaggctacattccaacagagcaagtaaatgagttggtggctttgatcccacacagtgatcagagattgcgccctcagcgaactaagcaatatgtcctcctgtccatcctgctttgtctcctggcatctggtttggtggttttcttcctgtttccgcattcagtccttgtggatgatgacggcatcaaagtggtgaaagtcacatttaataagcaagactcccttgtaattctcaccatcatggccaccctgaaaatcaggaactccaacttctacacggtggcagtgaccagcctgtccagccagattcagtacatgaacacagtggtgaattttaccgggaaggccgagatgggaggaccgttttcctatgtgtacttcttctgcacggtacctgagatcctggtgcacaacatagtgatcttcatgcgaacttcagtgaagatttcatacattggcctcatgacccagagctccttggagacacatcactatgtggattgtggaggaaattccacagctatttaacaactgctattggttcttccacacagcgcctgtagaagagagcacagcatatgttcccaaggcctgagttctggacctacccccacgtggtgtaagcagaggaggaattggttcacttaactcccagcaaacatcctcctgccacktaggaggaaacacctccctatggtaccawttatgkttctcagaaccagcagaatcaagtgcctagctggcccagcaaatagttggcactcaataaagattgcagaatttaatacagatcttttcrstgtcttaggcattataaatggaaatcatnacgggntctagggtatcaaaccatggnagngaggganctaggaatg

SEQ ID NO: 936 - DNA, 1997 bp, Homo sapiens
  misc_feature (1326)..(1326): n equals a,t,g, or c
  misc_feature (1485)..(1485): n equals a,t,g, or c
gttctacatccgcctctgcgccggctgccacccgcgctccctccgccgccgccgccttgctgctgctcaaagctgctgccgccccttgggctaaaaggttttcaaatggaacattttgatgcatcacttagtacctatttcaaggcattgctaggccctcgagatactagagtaaaaggatggtttcttctggacaattatatacccacatttatctgctctgtcatatatttactaattgtatggctgggaccaaaatacatgaggaataaacagccattctcttgccgggggattttagtggtgtataaccttggactcacactgctgtctctgtatatgttctgtgagttagtaacaggagtatgggaaggcaaatacaacttcttctgtcagggcacacgcaccgcaggagaatcagatatgaagattatccgtgtcctctggtggtactacttctccaaactcatagaatttatggacactttcttcttcatcctgcgcaagaacaaccaccagatcacggtcctgcacgtctaccaccatgcctcgatgctgaacatctggtggtttgtgatgaactgggtcccctgcggccactcttattttggwgccacacttaatagcttcatccacgtcctcatgtactcttactatggtttgtcgtcagtcccttccatgcgtccatacctctggtggaagaagtacatcactcaggggcagctgcttcagtttgtgctgacaatcatccagaccagctgcggggtcatctggccgtgcacattccctcttggttggttgtatttccagattggatacatgatttccctgattgctctcttcacaaacttctacattcaggtaaatctcacccttctctgggacttggaatctggggcctttacsarcaaaggccctcatctawttacttaatgggcatskggagcccttgctgggtgacaggctctggcctctaatggagtcactatgacaagagcagcccctgcctctggggggctcmcagctcactggaagacactagaatcctgttcwagagcctgggtgaggaagtcttgggattccctgggaaatkgaaaactgtgcagcaggaccctatgttgcttccctctgacctgcagcagagacgtgagaggtgatttcaatcagaaatctctcagttcactaccctgaacgtcatggccaaatgaaatttcagaagagatttttatcacagtcctcagatatggagatcygcttttttgtcccagctttcttatacattcagtcttcaggtgtgaggattcggttcattcctaagcatatgangtggtgatgtaggtctttgctcacagaaagatccatttagggcagataatttccagtggagcctgaccacgttgcagccactgctgattctcctgccatgcgtcaccccccagatgacatgtgtcctgcctttgttgccagtgcctggtagccataagnctgctgatctgggcaaaacacggaggtcaggagcaagggcagaggctgcaagtcccgaggctcagacatttgtcctttcttcttctgtgcccacaagcacctgtgtgtggcatgttgagtttcagtggaagtcatatacttctgggcttcatagtttatggctgcactgtgggacatacaccagctacaaggaaggtgaaaggataggacccgatgaagctgaaatcacatttattctaactacttatagcagcatagcactttgttcatgaaggctgagatagtcgcygaggcagtgaggaacttttgaagacgaacaagggatgtgggtgtcaagagagctgctgccaggtgggaaagaccaatttggccacataacccctgtcatctgccatccagatactaaaaggcaaagcaaagtgtaaattgaattttctatgtgacattttaaatagtatttctgytgcagcctgtgattcagttaacttacctcagctaagcctcaaaaaaaa

SEQ ID NO: 937 - DNA, 864 bp, Homo sapiens
  misc_feature (854)..(854): n equals a,t,g, or c
  misc_feature (861)..(861): n equals a,t,g, or c
ttacgcctgcaggtaccggtccggaattcccggggcatctcagagcgccgggaggatcgcaagctggatgagcttctaggcaaggaccacacgcaggtggtgagccttaaggacaagctagaatttgccccgaaagctgtgctgaacagaaaccgcccagagaagaattaatggaggacacagggccctatggtcctactgtgggtggtgacttgtcctgctaccatgttgacagagccccagaacccacatctaattggctttgttgcttattctggcccttcccacaccacacagccacacaaatactggctgctccttgatggccaggcagacccagcagcagccgaggggccagtgaagaggaaggccgcatctgttgtgtggtggccacaagcactcaggcatctgagtttactggtgcactgctgggaggagagttatgagatgaacattggctgtcaatctctgtgggcaggcggtttggcctctagtgggaatggctgggatttgggcgttgcctttaggagggatacctgcatgtctagttccagtctgcactggaaagaattcaaatatgcacctggctcccttcactattttgccctatcctttgtgctcattcttactgaaatctgtcttgtcagctcaggaatgggattcccccaggaaggaaagcacttttctgttctgggaagcccagactgttcactttggggcagggacgaacatgtgcctcgtgaatttgcttgaaaacagtcaccatcttctacccccatcactgtatagtgaaaaacctgattaaagtggtatctgagaaccataaaaaaaaaaaaaaaaaaaaaaaaaaaaanggggggnccc

SEQ ID NO: 938 - DNA, 1703 bp, Homo sapiens
ggcaaaaagctaccacctgccagtctgaagcaccgagatgacatggccgcttaccaacaagaagagcagatgcagcttccccgagctgatgccattcgttcacgtctcatcgatactttctctctcattgagcatttgcaaggcttgagccaagctgtgccgcggcacactatcagggagttacttgatccttcccgccagaagaaacttgtattgggagatcaacaccagstagtgcgkttctctataaagcctcagcgtatagaacagatttcacatgcccagaggctgttgagcaggcttcatgtgcgctgcagtcagaggccacctctttctttgtgggccggatgggtccttgagtgtcctctcttcaaaaacttcatcatcttcctggtctttttgaatacgatcatattgatggttgaaatagaattgctggaatccacaaataccaaactatggccattgaagctgaccttggaggtggcagcttggtttatcttgcttattttcatcctggagatccttcttaagtggctatccaacttttctgttttctggaagagtgcctggaatgtctttgactttgttgttaccatgttgtccctgcttcccgaggttgtggtattggtaggggtaacaggccaatcggtgtggcttcagcttctgaggatctgccgggtgctgaggtctctcaaactccttgcacaattccgtcaaattcaaattattattttggtcctggtcagggccctcaagagcatgaccttcctcttgatgttgctgctcatcttcttctacatttttgctgtgactggtgtctacgtcttctcagagtacacccgttcacctcgtcaggacctggagtaccatgtgttcttctcggacctcccgaattccctggtaacagtgttcattctcttcaccttggatcattggtatgcactgcttcaggacgtctggaaggtgcctgaagtcagtcgcatcttcagcagcatctatttcatcctttggttgttgcttggctccattatctttcgaagtatcatagtagccatgatggttactaactttcagaatatcaggaaagagctgaatgaggagatggcgcgtcgggargttcagctcaaagctgacatgttcaagcggcagatcatccagaggagaaaaaacatgtcacatgaagcactgacgtcaagccatagcaaaatagaggacaggtcgtttggactgggagactcttgtgcacgaaaatctgcccgggctaatggaaatggatcaggatgaccgtgtttggcccagagactcactcttccgatattttgagttgctagaaaagcttcagtataacctagaggaacgtaagaagttacaagagtttgcagtgcaggcactgatgaacttggaagacaagtaaagcaatggatggcttcacttccacccttcctgcaacctctactgcctgattagagtcctaattttaccctctccctccctgatgcataggtaaaggcccctctgtggagtaaggagatcttcagagctgttagtgtaactaattgagaagtattgtttccattgcgtgttccactcatgttgcttctcttgtgaaccattaactttaattggatattatttttacctgttaaaaaaaaaaaaaaaaaaaaaaaaaaaaaaaaaaaaaaaaaaaaaaaaaaactcga

SEQ ID NO: 939 - DNA, 1751 bp, Homo sapiens
  misc_feature (1032)..(1032): n equals a,t,g, or c
gtcacaagtgctaaaatctgaagaaaggaagagcagttcataaatgcttatcttcacattgttcattgggctgccctaacctcccctgctcccagagaatgccagatggctttacaattgaggtggttcaaacacagaaggccctttttccttttattaattgctcagctatgtgtacattggcccccacacctgccacctgaccagcgcggcttctgcctccctcagcactgccagccgggggttttcttagactcatcccckgggccaccttccgctcctctccctccctctgcattaacatccaggccaccctcattactccttggcaacctagcttgggttggcctccccagccagccttccagactattctttctctcccttgcagcctgtcttgcacaccactgtggccaggtcagtctttctgagaataccatttcctcacatcatggccctgtttacaaagcagtttcccatttgcctatcacatcagatcaaatcagaactcttcggctctggattgaagccgacgccactgttcctggcaagcctcattgccctccgatcccggcgttggcctccgtccctgtcaggtcttgtacgatgctgctctctgccatcctgccgtctccagctctgcctgcatgttggtcctgcattgctctccacctcacagactcttattccacggctctggccagtccaaagcatacatggcccagttagttcccttttacttgaaatattccctgaggagcccccaggtatttttccttactcactggagacttgtagtcagggccacactgatgtcatttgggaattatttgcaaagtcacagatctggacttctctctccagctaaatcatgagttcctcagctaaatcacgggcccacagttctgcagcagctggtaaacacttttagtcacggaaggaagcctttttcggktctcagctctgccaaggaacttatttcacgtacacaaaaccacaaaccgtgagaggattgctgcctgtatcctgttncccctcatctttttttttctttgaaaagatggtaaagctgattataagaatttaaataacgtggccctagaactacactctgactctgatccgcgtgtcctgcccacagcaccaggccacgaagacagaccatgtcgctatcctcacatttgcttgtaacttaggaggcttgccagtaaaatcgatactaacagtggacgtacttctctttgaataagtttattctatttccttctcccattttctttatttgttgaaaagaatgatgctgattgagaagccaaatattgttaaccattttccccgtctggcacggttcttttgcacagcactggattaggccaggggactggcctaaccctgcaaatatcaggaaaggactcttctagggaaagtcgtactaatttgaattgatcactagaaatacatggtctccacctaaaagatgctttgtcacttaaaaggctgagtagtcatcataatgtaaagaaacctctattgtcatgcaaccatttgcacccagacattgtgcctggttggcacttaacattttatcacttgattctcacaccacccttgcaatgtgatgaaaccaaggctcctaggtgctaagtgacattcccctagtcacgcagcctagtgctagtcacgcagcctagtggtagagcgaggattcaaacccagtttttgttttcctttgagctggagctgcaagaaaa

SEQ ID NO: 940 - DNA, 1790 bp, Homo sapiens
  misc_feature (4)..(4): n equals a,t,g, or c
  misc_feature (1761)..(1761): n equals a,t,g, or c
  misc_feature (1772)..(1772): n equals a,t,g, or c
  misc_feature (1775)..(1775): n equals a,t,g, or c
  misc_feature (1779)..(1779): n equals a,t,g, or c
gcgnccgcggcatggtcttcggaggggtggtgccctacgtcccgcagtatcgggacattcgcaggacgcagaacgccgacggyttctccacctacgtgtgcctggtgctgctggtggccaacattttgcggatactcttctggtttggaaggcgctttgagtccccgctgctgtggcagagcgccatcatgatcctgaccatgctgctgatgctgaagctgtgcaccgaggtccgtgtggccaacgagctcaacgccaggcgccgctcctttacagacttcgacccccaccacttctggcagtggagcagcttctcggactacgtgcagtgcgtcctggccttcacgggcgtggcgggctacatcacctacctgtccattgactccgccctgtttgtggagaccctgggcttcctggctgtgctgaccgaagccatgctgggtgtgccccagctttaccgcaaccaccgccaccagtccacggagggcatgagcatcaagatggtgctcatgtggaccagtggtgacgccttcaagacggcctacttcctgctgaagggtgcccctctgcagttctccgtgtgcggcctgctgcaggtgctggtggacctggccatcctggggcaggcctacgccttcgcccgccacccccagaagccggcgccccacgccgtgcaccccactggcaccaaggccctctgacagtggggaggacgaggatgtgggaccgccagccgcgggcactggtgggccctgacctccccgcggggagggtgggtgccgtggcccctgcaggtgtggcagagatggggcaygggcattggggtctccatcagcctctgtggggtgtctcagggtgggcagtgggggtggggctgggacgctgtttgtgctcagcggggacagccagggttgatctggccccgagggttttggatgtttttaggatgacataaaaagcaagtgttttccccatttcctcttatgaaacaccgtctgagcccaaggtacacattgggcggcctgcaggaacctgctccaggtggacacacgggccagcagccgcgaaccttgaagctggggtgaccgcagagaccctgtaaggcctgtgagcggascctcgaccccgtgacaccctggccagacaccctgcttggactggggtggcctctgctacccaggggtctggcacgggggagggctggggctttctctgcctggtacacacggaaaggcggctgtgcggacgcagggtcaccgtgctccgggttttctgacagtcggtgtttcctgggcctttggagtggctgcgaggcctgaacgccttgtggatccgctgtgtccagcccggctgagcatcgccagggctagctcatgctgctcttgtcagcctctggttctcctcgagtccttggggacgtggcagatgccagcgaccatcagacaacgtggaggccctcatgggcaatggctgagggggccgggctgaggctgtgcacatgcagtctgcacgccactcttgggctctgctggcggagatccccttccttctgggtgcagactgcacctccggatgcagttttgatgtccatcttccaggagagagacggtctcgggtccagggagtggagggggctgcccctgccgtgcagktcctggccgatggcgccttaccctsctgccctgggcttttggcctgaagcaaattcctrartggggggtactggggcctgccgcatcctgtcctgtccactgcccgggngggttttctgnaanaaangtggggggtcc

SEQ ID NO: 941 - DNA, 1398 bp, Homo sapiens
  misc_feature (1270)..(1270): n equals a,t,g, or c
  misc_feature (1279)..(1279): n equals a,t,g, or c
  misc_feature (1362)..(1362): n equals a,t,g, or c
  misc_feature (1375)..(1375): n equals a,t,g, or c
gggtcgagcatgtagcggctgctggcggcggggctcccggggcgggccgggcgggccgcgggagccgcacgcggcgatatggaagaggagggcaagaagggcaagaagtatttaggtcagttaacgtccataccaggatacctgaatccctccagtaggactgaaatcctgcatttcatagacaatgcaaagagagcccaccagcttccgggacacttgactcaggagcacgatgctgtgctcagcctgtctgcgtacaacgtcaagctggcctggagggacggggaggatatcatcctcagggtgcccatccatgacatcgccgccgtctcctatgttcgggatgacgctgcacacctggtggtcctgaagacagcccaggacccagggatctcccccagccagagtctgtgtgcggaaagttccagaggcctcagtgcaggctccctgtcggagagtgcagttgggcccgtggaggcatgctgcctggtcatcctggctgcagagagcaaggtcgctgcggaggagctttgctgtctgctaggccaggtcttccaggttgtttacacggagtccaccatcgactttctggacagagcgatatttgatggggcctctaccccgacccaccacctgtccctgcacagcgatgactcttctacaaaagtggacattaaggagacctacgaggtggaagccagcactttctgcttccctgaatctgtggatgtgggtggtgcatcaccccacagcaagaccatcagtgagagcgagctgagcgccagsgccactgagctgctgcaggactacatgctgacgctgcgcaccaagctgtcatcacaggagatccagcagtttgcagcactgctgcacgagtaccgcaatggggcctctatccacgagttctgcatcaacctgcggcagytctacggggacagccgcaagttcctgctgcttggtctgaggcccttcatccctgagaaggacagccagcacttcgagaacttcctggagaccattggcgtgaaggatggccgcggcatcatcactgacagctttggcaggcaccggcgggccctgagcaccacatccagttccaccaccaatgggaacagggccacgggcagctctgatgaccggtcggcaccctcagagggggatgagtgggaccgcatgatctcggacatcagcagcgacattgaggcgctgggctgcatcaccccacagcaagaccatcagtgagagcgagctgagcgccagcgccactganctgctgcangactacatgctgacgctgcgcaccaagctgtcatcacaggagatccagcagtttgcagcactgctgcacgaataccgcaacangtcctctactgtnaaaggacaaggactgccgaagga

SEQ ID NO: 942 - DNA, 1337 bp, Homo sapiens
  misc_feature (1337)..(1337): n equals a,t,g, or c
cttccggttctccgggcagctgccactgctgtagcttctgccacctgccacgaccgggcctctccctggcgtttggtcacctctgcttcattctccaccgcgcctatggtccctcttggagccagcgtggcgggcctggcggctcccgggtggtgagagagcggtccgggaacgatgaaggcctcgcagtgctgctgctgtctcagccacctcttggcttccgtcctcctcctgctgttgctgcctgaactaagcgggcccctggcagtcctgctgcaggcagccgaggccgcgccaggtcttgggcctcctgaccctagaccacggacattaccgccgctgccaccgggccctacccctgcccagcagccgggccgtggtctggctgaagctgcggggccgcggggctccgagggaggcaatggcagcaaccctgtggccgggcttgagacggacgatcacggagggaaggccggggaaggctcggtgggtggcggccttgctgtgagccccaaccctggcgacaagcccatgacccagcgggccctgaccgtgttgatggtggtgagcggcgcggtgctggtgtacttcgtggtcaggacggtcaggatgagaagaagaaaccgaaagactaggagatatggagttttggacactaacatagaaaatatggaattgacacctttagaacaggatgatgaggatgatgacaacacgttgtttgatgccaatcatcctcgaagataagaatgtgccttttgatgaaagaactttatctttctacaatgaagagtggaatttctatgtttaaggaataagaagccactatatcaatgttgggggggtatttaagttacatatattttaacaacctttaatttgctgttgcaataaataccgtatccttttattatatctttatatgtatagaagtactctrttaatgggctcagagatgttggggataaagtatactgtaataatttatctgtttgaaaattactataaaacggtgttttctgatcggtttttgtttcctgcttaccatatgattgtaaattgttttatgtattaatcagttaatgctaattatttttgctgatgtcatatgttaaagagctataaattccaacaaccaactggtgtgtaaaaataatttaaaatttcctttactgaaaggtatttcccatttttgtggggaaaagaagccaaatttattactttgtgttggggtttttaaaatattaagaaatgtctaagttattgtttgcaaaacaataaatatgattttaaattctcttaaaaaaaaaaaaaaaaaccccgggggggggcccggn

SEQ ID NO: 943 - DNA, 1020 bp, Homo sapiens
  misc_feature (1016)..(1016): n equals a,t,g, or c
ttttttctccgcccctaagaggtkgactccgggctggagctgtcctgggggagcttgtttgcggcasggctgctgctgccactgctgtgctgggggcccggtcgccaggcaaaaagccctcccacgtttgaggggagtcatgagccgtttcctgaatgtgttaagaagttggctggttatggtgtccatcatagccatggggaacacgctgcagagcttccgagaccacacttttctctatgaaaagctctacactggcaagccaaaccttgtgaatggcctccaagctcggacctttgggatctggacgctgctctcatcagtgattcgctgcctctgtgccattgacattcacaacaagacgctctatcacatcacactctggaccttcctccttgccctggggcatttcctctctgagttgtttgtctatggaactgcagctcccacgattggcgtcctggcacccctgatggtggcaagtttctccatcctgggtatgctggtcgggctccggtatctagaagtagaaccagtatccagacagaagaagagaaactgaggccagcattatcacctccaggactttctcgttttccaccttggccatcttcttccttcgtcgtctctcctctttaatttcttttctattccatcatctgcccttttattcacttttagcctctttttttaatttttaaaatttaaagatatgcatactgaaaagtatataacatgtacgtacaatttaaagaataattttaaagtgaatactacgtaactccatccaagtcaagaaattgccagcttctcggaagcccactgtgtctccttcccctacctgcaacctcttccaggctcccttttccagccttcccctttttcccttttattttcatgccttgatttgacttgtgtggtgggaacatgtgaactatgaaacttaaacctgctgcccacccagagcagctktgaccaaggstgcttmaggggttgccacgraggtgggctccctntctt

SEQ ID NO: 944 - DNA, 1672 bp, Homo sapiens
gaattcggcacgagtgaacctgtggggcaagggggtcttccctgggccccaagagtgcagagatgcctgggtccgcagcctggcagggcagctgcagctttccccagggagcttccgccctgccaactctgagagggtggggctcctacttgttgctggctcccactggttctgtggagcatgcagcaccagctgcacctcctcatatgctggggcaagggctctaagtccaacacatcatgcctgggcccagtgctaagctgctccaacatgtggagtctggctctgctggtagtggctggctctatgggggtagcatacagctctgtggtgatgtacgttttgctctgggtgccgctcccamttccttcccacttccttccttcaggggcccctgaagcacagcccacaacttgggcccagtccccacactccgtgtgcaagtgtggcaccamcttgggcccagctaaacctcagggcccctctttgcctamtcctccatgcctgatcatgttgctgtcctgccgcaggcagctaggtctggccccatcawggtggctgccggggktgggttcccatggtggcgaactccggggatgctcccaggggtgggctccagggattgcccacctcaatatctgcacctgatgacccttggtctgtccctgttccccactgcagctgacatcatggtastgatcacttcamacaggctgccgctgtcctcacatacaatttataatttaaattagaaagaaacataaataaacgacataagattttgaatataatctatgtaagtaatttcaaaatatgttttattatcttctccatgctagagaacattttattagtttatattttaactaattttaaaaacgtaaacataaaattacatgtgttgtcaagctaactcaatcgatgtttgagataaaaattaacctaagaccaaagtatattattttgatttccttagaggaaaagttatgcagtaattacttgaagagtaattctctctacmattagcattgcagatgcatccattataccactaaagtacacttaataaataatacttaagarryyaccagacaccatakggaaaaataaaaataaaaagtcattttgaaaaaagtttagaaagtaaatcattcctagaatgcttggaaaagtatgtgcctgtgtgccagtatttctgatcctaagagttatgaatatcttatgaatagttatgaatatcactgatagtgaacctgagtgtaaatgcttgggcttgggktgcagatggactacagatacaaatctaaagtagtgtwcctagtagcactgtaactcagttaagtacttactttttcatgccctcagtatttttatctgcaaaataggaataaaatagctaatcatgttatcataagggttaagttatgagatataataactatgaagtacttaatgggtaaaggaaaaaataagcttagcagttgttgttgttgttgttgttgacgaccttatttcaccatatacacttgttagtaactcaaaggggttctccaaagtgaaatatttaaaaaacgaatgagataaattattattttgttattagaaaatatatttagcaatttgtctcactggatcataaaactaattgtggtatgagaacatttataaaaca

SEQ ID NO: 945 - DNA, 2290 bp, Homo sapiens
  misc_feature (146)..(146): n equals a,t,g, or c
  misc_feature (525)..(525): n equals a,t,g, or c
  misc_feature (2196)..(2196): n equals a,t,g, or c
  misc_feature (2254)..(2254): n equals a,t,g, or c
  misc_feature (2256)..(2256): n equals a,t,g, or c
  misc_feature (2274)..(2274): n equals a,t,g, or c
ggaggaatgggaagcccgctaagagaacagaagtcaaaaacagttgggttctagatgggaggaggtgtgcgtgcacatgtatgtttgtgtttcaggtcttggaatctcagcaggtcagtcacattgcagtgtgtcgcttcacctgnctccctcttttaaagattttccttccctctttccaactccctgggtcctggatcctccaacagtgtcagggttagatgccttttatgggccacttgcattagtgtcctgatagaggcttaatcactgctcagaaactgccttctgcccactggaaagggaggcaggggaaatacatgattctaattaatggtccaggcagagaggacactcagaatttcaggactgaagagtatacatgtgtgtgatggtaaatgggcaaaaatcatcccttggcttctcatgcataatgcatgggcacacagactcaaaccctctctcacacacatacacatatacattgttattccacacacaaggcataatcccagtgtccagtgncacatgcatacacgcacacattcccttcctaggccactgtattgctttcctagggcatcttcttataagacaccagtcgtataagggagcccaccccactcatctgagcttatcaaccaattacattaggaaagactgtatttcctagtaaggtcacattcagtagtactgagggttgggacttcaacacagctttttgggggatcataattcaacccatgacagccactgagattattatatctccagagaataaatgtgtggagttaaaaggaagatacatgtggtacaaggggtggtaaggcaagggtaaaaggggagggaggggattgaactagacacacacagacacatgagcaggactttggggagtgtgttttatatctgtcagatgcctagaacagcacctgaaatatgggactcaatcattttagtccccttctttctataagtgtgtgtgtgyggatatgtgtgctagatgttcttgctgtgttaggaggtgataaacatttgtccatgttatataggtggaaagggtcagactactaaattgtgaagacatcatctgtctgcatttattgagaatgtgaatatgaaacaagctgcaagtattctataaatgttcactgttattagatattgtatgtctttgtgtccttttattcatgaattcttgcacattatgaagaaagagtccatgtggtcagtgtcttacccggtgtagggtaaatgcacctgatagcaataacttaagcacacctttataatgaccctatatggcagatgctcctgaatgtgtgtttcgagctagaaaatccgggagtggccaatcggagattcgtttcttatctataatagacatctgagcccctggcccatcccatgaaacccaggctgtagagaggattgaggccttaagttttgggttaaatgacagttgccaggtgtcgctcattagggaaaggggttaagtgaaaatgctgtataaactgcatgatgtttgcaggcagttgtggttttcctgcccagcctgccaccaccgggccatgcggatatgttgtccagcccaacaccacaggaccatttctgtatgtaagacaattctatccagcccgccacctctggactccctcccctgtatgtaagccctcaataaaaccccacgtctcttttgctggctctgggtctctttggcgtcttgaaccttatgccttccctattgaagttaataggggttcagcacaacactgggtcccaggcatgcagccttgtctttttatgtttgtcctcatgggcatcatgtgggccacagggatcttacccaaaatcatgcctagcaggaagagatgcctctctattgatattccagctgccccacaagcaggtatgtgcctactcattctctgacatgtgtcctaggtttcttgactgtaamattccgcttaataaataatgtattgagcacctgctatatccagagctctgctgggcactctggaagattagagtttgaagaacacacaatcgttgtcctccagaagttcatggtccagtagggagagaaggtcacaaacagccakaatctacaagatgagaggggctatwaaagagagctgagaagagtttcagagccactgagaagatactcattttagtcttggtaacgggaanctttctggagttggtggcatttaagatgaaccacaaatggagcaggaatttaatgaanangaaaggaccaggacgtcnaatagaggacacagca

SEQ ID NO: 946 - DNA, 1651 bp, Homo sapiens
  misc_feature (1601)..(1601): n equals a,t,g, or c
  misc_feature (1607)..(1607): n equals a,t,g, or c
  misc_feature (1630)..(1630): n equals a,t,g, or c
aatttctcttcctctttctggaataatttgctactatatgaattggacttatgtcttctacttttttggtactattggaatattttggtttcttttgtggatctggttagttagtgacacaccacaaaaacacaagagaatttcccattatgaaaaggaatacattctttcatcattaagaaatcagctttcttcacagaaktcagtgccgtgggtacccattttaaaatccctgccactttgggctatcgtagttgcacacttttcttacaactggactttttatactttattgacattattgcctacttatatgaaggagatcctaaggttcaatgttcaagagaatgggtttttatcttcattgccttatttaggctcttggttatgtatgatcctgtctggtcaagctgctgacaatttaagggcaaaatggaatttttcaactttatgtgttcgcagaatttttagccttataggaatgattggacctgcagtattcctggtagctgctggcttcattggctgtgattattctttggccgttgctttcctaactatatcaacaacactgggaggcttttgctcttctggatttagcatcaaccatctggatattgctccttcgtatgctggtatcctcctgggcatcacaaatacatttgccactattccaggaatggttgggcccgtcattgctaaaagtctgacccctgataacactgttggagaatggcaaaccgtgttctatattgctgctgctattaatgtttttggtgccattttctttacactattcgccaaaggtgaagtacaaaactgggctctcaatgatcaccatggacacagacactgaaggaaccaataaataatcctgcctctattaatgtatttttatttatcatgtaacctcaaagtgccttctgtattgtgtaagcattctatgtctttttttaattgtacttgtattagatttttaaggcctataatcatgaaatatcactagttgccagaataataaaatgaactgtgtttaattatgaataatatgtaagctaggacttctactttaggttcacatacctgcctgctagtcgggcaacatgaagtaggacagttctgttgattttttagggccatactaaagggaatgagctgaaacagacctcctgatacctttgcttaattaaactagatgataattctcaggtactgataaacacctgttgttgttcactttsctcataaaaattgtcagctctctctgacacttagacctcaaactttagcatctctgtggagctgccatccactgtataatttcgcctggcaactggactgaggggagtgtgcccaggcagctgccaagcactccctccctggcttcagggtcagagtgcccagcgtttatcagaggcagcatccaagcccagagccagtgtcgactcttcggctggtgcctttcctctgaggggctatcaatgtgtagataaagccctgagtaggcaagagcagtgagatccactgctatggtcttgatacatcctcaaactttcccttcccagcacagaggaatattggctggcatgcaacctgcaaangaaaantgcgaggggccgggcacggtggntcatgcctgttaatcccagca

SEQ ID NO: 947 - DNA, 556 bp, Homo sapiens
  misc_feature (540)..(540): n equals a,t,g, or c
  misc_feature (549)..(549): n equals a,t,g, or c
  misc_feature (551)..(551): n equals a,t,g, or c
acgtctttgtctggctgatgttgttcagctatttctctgttccggcggcattacaacgccgcgtgctggtgtatggcgtgctcggggcgattgttctgcgtaccatcatgatcttcactggcagctggctaatttcgcagttcgactggatcctgtatatcttcggtgccttcctgctgtttaccggcgtgaagatggcgctcgcccatgaagatgaatcaggcattggcgacaagccgctggtgcgctggctacscggtcatttgcgcatramcgacaccatcgacaacgarcatttctttgtgcgtaagaatggattgctgtacgccacaccgctgatgctggtactgattctggtggaattgagcgacgtgattttcgccgtggatagcattccggctatcttcgccgtgaccactggacccgttcattgtgctgacctcaaacctgtttgcgatcctcggcctgcgtgcgatgtatttcctgctggcgggcgtaaagagcgtttctcgatgctcaaatagggctggcggtgattcngggggttancnggaac

SEQ ID NO: 948 - DNA, 465 bp, Homo sapiens
  misc_feature (420)..(420): n equals a,t,g, or c
gcagagaccgaggctgcaccggcagaggctgcggggcggacgcgcgggccggcgcagccatggtgaagattarcttccagcccgccgtggctggcatcaagggcgacaaggctgacaaggcgtcggcgtcggcccctgcgccggcctcggccaccgagatcctgctgacgccggctagggaggagcagcccccacaacatcgatccaagagggggagctcagtgggcggcgtgtgctacctgtcgatgggcatggtcgtgctgctcatgggcctcgtgttcgcctctgtctacatctgcacaattagaaaagtcctcagaagctttttcttkgaagggtacacttttcttactgtccytattcctagacctggggcttgagctgaggatgggacgatgtgcccagggagggacccaccanagcacaagagaaggtggctacctgggggtgtccaaggaactttgt

SEQ ID NO: 949 - DNA, 2370 bp, Homo sapiens
  misc_feature (678)..(678): n equals a,t,g, or c
  misc_feature (1752)..(1752): n equals a,t,g, or c
  misc_feature (2313)..(2313): n equals a,t,g, or c
  misc_feature (2315)..(2315): n equals a,t,g, or c
  misc_feature (2369)..(2369): n equals a,t,g, or c
agctgtcgcgrgcggcgcccggccttgctcaacgcccagcagtccccaccgtcgctgccgccgccaccgccctcggccgctgccgaggcctcctgcagccatcatgtccgccagcgccgtctacgtgctggacctgaagggcaaggtgctcatctgccggaactaccgtggcgacgtggacatgtcagaggtggagcacttcatgcccatcctgatggagaaggaggaggaggggatgctgtcgcccatcctggcccacgggggggtccgtttcatgtggatcaaacacaacaacctgtatctggttgccacatccaagaagaacgcgtgcgtgtcgctggtcttttctttcctctataaggtggtgcaggtgttttccgagtacttcaaggagctggaggaggagagcatccgggacaactttgttatcatctacgagctgctggacgagctcatggacttcggctacccccagaccaccgacagcaagatcctgcaggagtacatcactcaggaaggccacaagctggaaacaggggccccgcggccaccagccaccgtcaccaacgcggtgtcctggcggtccgaaggcatcaagtatcggaagaatgaggtgttcttggacgtcatcgagtctgtcaacctcttggtcagcgccaacggcaatgtcctgcgcangagatcgtgggctccatcaagatgcgagtcttcctctcgggcatgcccgagctgcgcctgggcctcaacgacaaggtcctctttgacaacacgggccgcggcaaaagcaaatccgtggagctggaggatgtgaagttccaccagtgtgtgcggctatcacgcttcgagaatgaccgcaccatctccttcatcccacccgacggcgagttcgagctcatgtcctaccgtctcaacacccacgtcaagcctttgatatggatcgagtcggtgatcgagaagcactcccacagccgcatcgagtacatgatcaaggccaaaagccagttcaagcggcggtcaacagccaacaacgtggagatccacattcccgtgcccaatgatgccgactcacccaagttcaagacgacggtggggagcgttaagtgggtccccgagaacagcgagatygtgtggtccatcaagtccttcccgggcggcaaggagtacctgatgcgggcccacttcggcctgcctagtgtggaggccgaagacaaggagggcaagcccccgatcagtgtcaagttcgagatcccttacttcactacctccggcatccaggtgcgctacctgaagatcattgagaagagtgggtaccaggccctgccctgggtgcgttatatcacgcagaatggagattaccagctccggacccagtgaggggctgtcgcagccaacaccccggcctcggggctcctggtggcagcaccaggggacacacctgccaaacccaccagatggaggggccctccctggtctctggccaccctcccagcctctgcccagggacccctgccttccccaggccatctgctctgccgtcgacactcgtctcagaagcccctttcccagaagaggctggtcttcaagaagtctcgtttctttgcccctgaagtcagtttcaggggaaggatgtgaaatttttccgtgtagaggttacagccttttatgctgttgagctcccaggtaccaaaaagcttggccaacgcttgccagccagccagctgcaggtggcatctgccacgaaggaagcgccancctcgccaggccagcaggggcgtcgttttgttgccattttgttgaacgttatgggtttatgggtgttcctggaacttgtctttgtgcattcgttgctgtttgtgttaccctcactgtccccatgtcccacccacgtcctacggcactcaggaagcacttggtgaggacgagccctcacccttcttgtcttccttcccagcagcgcccgcagcgggccatttacacgtcgaggctggcacctggcgcgctcgggggccactgtagcgtctgcctgctccctggactcgcaggcctcgcctgtggcgccttcccagggccagcctgggtcacgagatgctgtcactcagccagatcagtattgacccaccaggggaggtggggtttggtgagagacgccagcctcagactttttcccactgagggtccagagagcggggccacgtgtcacccacgtctgcgcttggtcacccgtcctccccaccctgtgtgtgtttatgtcatagttacattaaattccattcattgaataaaaaaaaaaaaaaaaaaactcgggactagttntntcctcgggccgatttggaagggttttttttttttttttgaaaaatttaaaaaant

SEQ ID NO: 950 - DNA, 2301 bp, Homo sapiens
  misc_feature (2263)..(2263): n equals a,t,g, or c
  misc_feature (2281)..(2281): n equals a,t,g, or c
gcgacgctcggcccgaagatggcggccgaatggggcggaggagtgggttactcgggctcaggcccgggccggagccggtggcgctggagcgggtctgtgtgggtccgaagcgttttactcctgttgggcgggctccgggccagcgccacatctactcccgtctccttgggcagttcccctccctgccggcaccacgtcccctctgacactgaggtcataaataaagttcatcttaaggcaaatcatgtggtcaagagagatgttgatgagcatttaagaatcaagactgtctatgataaaatgktgaasagttgctccctgagaaaaagaatcttgtaaagaacaagcttctcccacawgcgatttcttatttagagaagacttttcaggtccgtcgacctgcgggcactatcttacttagcagacaatgtgcaacaaaccaatacctccggaaggaaaacgatcctcacaggtactgcaccggggagtgtgccgcacacacaaagtgcggccccgttattgttcctgaggaacatctccagcaatgccgggtctaccgtgggggtaagtggcctcatggagcagtgggtgtgccagaccaagaaggcatctcagatgcagactttgttctttacgttggtgctctggccaccgagagatgcagccatgaaaacatcatctcttatgcagcctattgtcagcaggaagcaaacatggacaggccaatagcaggatatgctaacctgtgtccaaatatgatctctacccagcctcaggagtttgttgggatgctgtccacagtgaaacatgaggttattcatgccctgggtttctctgctgggctgtttgcattctaccatgataaagatggaaatcctctcacttcaagatttgcagatggcctyccaccttttaattatagtctgggattatatcaatggagtgataaagtagttcgaaaagtgragagattatgggatgttcgagataataagatagttcgtcacactgtgtatctcctggtaacgcctcgtgttgttgaggaagcacgaaaacattttgattgtccagttctagagggaatggaacttgaaaatcaaggtggtgtgggcactgagctcaaccattgggaaaaaaggttattagagaatgaagcgatgactggttctcacactcagaatcgagtactctctcgaatcactctggcattaatggaggacactggctggtataaagcaaattacagcatggctgagaagttagactggggccgaggaatgggctgtgactttgtcaggaagagctgtaaattctggattgatcagcagagacaaaagagacagatgctgagcccttactgtgacacgctcagaagtaacccactgcagctaacttgcagacaggaccagagagcagttgccgtgtgtaatttgcagaagttccctaagcctttaccacaggaataccagtactttgatgaactcagtggaatacctgcagaagatttgccttattatggtggctccgtggaaattgctgactactgscctttcagtcaggaattcagttggcatttaagtggtgaatatcagcgcagctcagattgtagaatattggaaaatcaaccagaaatttttaagaactatggcgctgaaaagtatggacctcattccgtttgtctaattcagaaatcagcattcgttatggagaagtgtgagaggaagctgagttacccagactggggaagcggatgctatcaggtttcttgttctcctcaaggtctgaaagtttgggtccaagatacttcatatttgtgtagtcgggctgggcaggtcctccctgtcagtatccagatgaatggctggattcacgatggaaacctgctctgcccatcatgttgggacttctgtgagctctgtcctccagaaacagatcctccagccactaacctgacccgagctctgccacttgatctttgttcctgttcctcgagcctggtggtcaccctctggcttctgctaggcaatctgtttcctctgctggctggatttcttctgtgtatatggcactaggaatggaaaagtggatcttcaagatattcttttatgttatgttcttgtgaacaaagcacaaagtttgagtgagtgccaacctatgcagatggtagaagtggcattcctggctttggcttggaagaattgacgaccatcagaccttgaagcagaacttcacagcagcctgtcctcatcagcaacccaaccancttcatcagcaacccaancaccttcatcagcaacccaa

SEQ ID NO: 951 - DNA, 2205 bp, Homo sapiens
gttccagacatgtttgcagactctaatgaaaatgagactgtctttgctcctgtcatccaggctggcatggaagcactaaaggcagcagactgtcctgggaagctgttcatcttccattcttccttgccaactgctgaagcaccagggaagctcaaaaacagagatgacaaaaaactggttaatacagacaaagagaagatacttttccagccccaaacaaatgtctatgactcattggccaaggactgcgtggctcacggctgctctgtgacactcttcctctttcctagtcagtatgtggacgtggcctcgctggggctggttcctcagctcactggaggaaccctttacaaatacaacaatttccagatgcacttggatagacaacaatttttgaacgacctcagaaatgatattgaaaagaaaataggctttgatgctattatgagggttcgtaccagcacaggtttcagagccactgatttctttggtggaatcttgatgaacaacaccaccgatgtagaaatggctgccatcgattgtgacaaggcagtgaccgtggagttcaagcacgatgacaaactcagtgaagacagtggagccttaatccagtgtgctgtgctttacacgacaatcagtggtcaaagaagacttcggattcacaatcttggcttaaactgcagctctcagctagctgatctttataagagctgtgagacagatgctcttatcaacttctttgccaagtcagcttttaaagcagttctccaccagcctttgaaggtcatccgggaaattctagttaatcagactgcccatatgttggcatgttaccggaagaattgtgcaagtccttctgcagcaagccagcttattctaccagattccatgaaagtattgccagtgtacatgaattgcttgttgaaaaactgtgtactactcagcagaccagagatctcaactgatgaacgagcataccagagacagctggtcatgaccatgggtgtggctgactctcagcttttcttctacccacaacttctgcccatacacacgttagatgtcaagagtacaatgttacctgctgccgttcgttgctctgagtcccgtctttcagaagaaggaatattcttactggctaatggtctacacatgttcctgtggttgggagtaagcagcccaccagaactgatccaaggaatatttaatgtgccatcttttgcacatatcaacacagatatgacattgctgcctgaagtgggaaacccatactctcaacaactcagaatgataatgggtattatccaacaaaagaggccatattcaatgaagctcacaattgtaaagcagcgagaacaaccagaaatggttttccgacagttcctggtagaagacaaaggactttacggaggctcttcttatgtggatttcctttgttgtgttcacaaggagatctgtcagctgcttaattaattgaaacttctctgtcattgatgttgcatttccaaggagataatctccttcttggtgcctaattttctagatgataataggctagttttgatttcttgctcattttcagaataactttccaggaagagatggcatttagaacttcagctttggtgctcaggtataaagccaattaaggtacaattgtaccataaagggaacaatctgtttctgattgcacagtttctaatttttaaaactgatgtggtttgcatttcataaaaggcaaagtttacagaaccataaacattctcaattttctttatgctagacatataaattatttttcaaactgtatagatttggggtaaaaagttgtctcagttcctctcccaattgcaatgagaaaaaaaagcttaatttttacattatacttaattttctaaaaccatgtaactccattgaacacatttttcaacttaaggtctgcatagcagacttttaataaccttgggatttatctggtagaacaatatgtgttctacatttttttcataattatatattgtgtatgttaaaactattttccagttgttttgtctgtaaaactgtctttatcaatatgcttaatggttctttgtacaattttgaaagtttctacctgtatataatggatgttaaccagtatcaataaatcacttcgtataatcttaaaaaaaaaaaaaaaaaaaaaaaaaaaaaaaaaaaaaaaaa

SEQ ID NO: 952 - DNA, 1703 bp, Homo sapiens
  misc_feature (45)..(45): n equals a,t,g, or c
  misc_feature (1689)..(1689): n equals a,t,g, or c
  misc_feature (1703)..(1703): n equals a,t,g, or c
cacgtgctaggtgcccatctggtgctgcggcacggctaccacctnaccacctttctgcgacacttctggcccaccaccctgacggaccccactttggccgcaatcacatttaccaagggacattggagctccccacaccactcattgctgcccaccagctatacaactacgtggctgatcacgccagctcttaccacatgaagccattgcgaatggcccggccagggggcccagaacacaacgagtatgccctggtgtcggcatggcacagttctggctcctacctggactctgagggacttcgacaccaggatgactttgatgtgtctctgcttgtctgtcactgtgctgcaccctttgaggagcaaggagaggctgagcggcacgttctgcggctacagttcttcgtggtgctcaccagccagcgagagctcttccccaggctcactgctgacatgcgccgsttccggaagccacccagactgccccctgagccagaggctcctgggagttcagctggcagccctggggaggcctcagggcttattctagcgcctggaccggctcctctgttcccaccactggctgcagaggtgggcatggcacgagcacggctggctcagctggtgcggctggctggagggcactgccgtcgggacaccctttggaagcgcctcttcttgctggagccaccggggcctgatcgactgcggctaggggggcgcctggccctggcagagctggaggaactcctagaagcagtccatgccaaatccattggggacatcgacccccagctggactgcttcctatccatgacggtctcctggtaccagagcctgatcaaagttctcctaagccgcttcccccagagctgtcgccatttccaaagcccagacttgggaactcagtacctggttgtgctgaatcagaagttcactgactgctttgtgctagtgtttctggactcccacttaggaaagacgtctctgacagtggttttccgagagcccttcccagtacagccccaggacagcgagagcccccctgcccaactggtctccacctaccaccacctggagtctgtcatcaacacagcctgtttcaccctctggacccgcctcctctgagggagtggactggaccactgaatgtcactgttccttgaatcatgggcctaccagattgcctgccagaggcaggactgaccagcccttctgggccccagggcaagccagacactgagtgacaccaaaggctttgtaactatgtcttgagggtctgctgccccagcctggcagcaggaaccgccctccccaaacacccacagccactgacccatccaggactccagagagtcaggtcaaccccgaggaccccttgggcccttctggggtactcctttcggcccccctggtagagtctcgggagttcacacagggtggcaaacaccccctagagctcctctgcctgaatcctgccccctagcctttgaccactgtcagccacctgtgtcccttgagccttcgggtcttcacttcccacttggacatcactgctggacattcccatcgagatgacacctgggttccaatcccagctctgcctttgaagcacwtrcggccaccgtcaagtccctttgctctcggaccctgggtttctsatcstttaatkaaatraattcagggnggtttccagacctn

SEQ ID NO: 953 - DNA, 2938 bp, Homo sapiens
  misc_feature (491)..(491): n equals a,t,g, or c
  misc_feature (1987)..(1987): n equals a,t,g, or c
  misc_feature (1994)..(1994): n equals a,t,g, or c
  misc_feature (2892)..(2892): n equals a,t,g, or c
  misc_feature (2932)..(2932): n equals a,t,g, or c
ggcacgagccagccttctggccctaagggcctagagccaccagaagaagagaagaatccctacaaagaagtgtacacggacatgtgggtggaacctgaggcagctgcctacgcaccacctccaccagccaaaaagccccggaagagcacagcggagaagcccaaggtcaaggagattattgatgagcgcacaagagagcggctggtgtacgaggtgcggcagaagtgccggaacattgaggacatctgcatctcctgtgggagcctcaatgttaccctggaacaccccctcttcgttggaggaatgtgccaaaactgcaagaactgctttctggagtgtgcgtaccagtacgacgacgacggctaccagtcctactgcaccatctgctgtgggggccgtgaggtgctcatgtgcggaaacaacaactgctgcaggtgcttttgcgtggagtgtgtggacctcttggtggggccgggggctgsccargcagncattaaggaagacccctggaactgctacatgtgcgggcacaagggtacctacgggctgctgcggcggcgagaggactggccctcccggytccagatgttcttcgctaataaccacgaccaggaatttgaccctccaaaggtttacccacctgtcccagctgagaagaggaagcccatccgggtgctgtctctctttgatggaatcgctacagggctcctggtgctgaaggacttgggcattcaggtggaccgctacattgcctcggargtgtgtgaggactccatcacggtgggcatggtgcggcaccaggggaagatcatgtacgtcggggacgtccgcagcgtcacacagaagcatatccaggagtggggcccattcgatctggtgattgggggcagtccctgcaatgacctctccatcgtcaaccctgctcgcaagggcctctacgagggcactggccggctcttctttgagttctaccgcctcctgcatgatgcgcggcccaaggagggagatgatcgccccttcttctggctctttgagaatgtggtggccatgggcgttagtgacaagagggacatctcgcgatttctcgagtccaaccctgtgatgattgatgccaaagaagtgtcagctgcacacagggcccgctacttctggggtaaccttcccggtatgaacaggccgttggcatccactgtgaatgataagctggagctgcaggagtgtctggagcatggcaggatagccaagttcagcaaagtgaggaccattactacgaggtcaaactccataaagcagggcaaagaccagcattttcctgtcttcatgaatgagaaagaggacatcttatggtgcactgaaatggaaagggtatttggtttcccagtccactatactgacgtctccaacatgagccgcttggcgaggcagagactgctgggccggtcatggagcgtgccagtcatccgccacctcttcgctccgctgaaggagtattttgcgtgtgtgtaagggacatgggggcaaactgaggtagcgacacaaagttaaacaaacaaacaaaaaacacaaaacataataaaacaccaagaacatgaggatggagagaagtatcagcacccagaagagaaaaaggaatttaaaacaaaaaccacagaggcggaaataccggagggctttgccttgcgaaaagggttggacatcatctcctgatttttcaatgttattcttcagtcctatttaaaaacaaaaccaagctcccttcccttcctcccccttcccttttttttcggtcagaccttttattttctactcttttcagaggggttttctgtttgtttgggttttgtttcttgctgtgactgaaacaagaaggttattgcagcaaaaatcagtaacaaaaaatagtaacaataccttgcagaggaaaggtgggagagaggaaaaaaggaaattctatagaaatctatatattgggttgtttttttttktnttttttntttttttttttttgggttttttttttttactatatatcttttttttgttgtctctagcctgatcagataggagcacaagcaggggacggaaagagagagacactcaggcggcacatttccctcccagccactgagctgtcgtgccagcaccattcctggtcacgcaaaacagaacccagttagcagcagggagacgagaacaccacacaagacatttttctacagtatttcaggtgcctaccacacaggaaaccttgaagaaaatcagtttctagaagccgctgttacctcttgtttacagtttatatatatatgatagatatgagatatatatataaaaggtactgttaactactgtacaacccgacttcataatggtgctttcaaacagcgagatgagtaaaaacatcagcttccacgttgccttctgcgcaaagggtttcaccaaggatggagaaagggagacagcttgcagatggcgcgttctcacggtgggctcttccccttggtttgtaacgaagtgaaggaggagaacttgggagccaggttctccctgccaaaaagggggctagatgaggtggtcgggcccgtggacagctgagagtgggattcatccagactcatgcaataaccctttgattgttttctaaaaggagactccctcggcaagatggcagagggtacggagtcttcaggcccagtttctcactttagccaattcgagggctccttgtggtgggatcagaactaatccagagtgtgggaaagtgacagtcaaaaccccacctggagcaaataaaaaaacatacaaaacgtactggtgctttcctgtctaagtcgccttttgtgtgttcttttatgaggcccccaccatccacccctctgtgcacaaggcggnttccggcccctggaatgtgatgtttttggtcatctccaangctgca

SEQ ID NO: 954 - DNA, 1751 bp, Homo sapiens
  misc_feature (1716)..(1716): n equals a,t,g, or c
  misc_feature (1723)..(1723): n equals a,t,g, or c
aattcggcacgagacctttagggtgcgcgggtgcagtatatctcgcgctctctcccctttccccctcccctttccccaccccgggcgctcaggttggtctggaccggaagcgaagatggcgacttctggcgcggcctcggcggagctggtgatcggctggtgcatattcggcctcttactactggctattttggcattctgctggatatatgttcgtaaataccaaagtcggcgggaaagtgaagttgtctccaccataacagcaattttttctctagcaattgcacttatcacatcagcacttctaccagtggatatatttttggtttcttacatgaaaaatcaaaatggtacatttaaggactgggctaatgctaatgtcagcagacagattgaggacactgtattatacggttactatactttatattctgttatattgttctgtgtgttcttctggatcccttttgtctacttctattatgaagaaaaggatgatgatgatactagtaaatgtactcaaattaaaacggcactcaagtatactttgggatttgttgtgatttgtgcactgcttcttttagttggtgcctttgttccattgaatgttcccaataacaaaaattctacagagtgggaaaaagtgaagtccctatttgaagaacttggaagtagtcatggtttagctgcattgtcattttctatcagttctctgaccttgattggaatgttggcagctataacttacacagcctatggcatgtctgcgttacctttaaatctgataaaaggcactagaagcgctgcttatgaacgtttggaaaacactgaagacattgaagaagtagaacaacacattcaaacgattaaatcaaaaagcaaagatggtcgacctttgccagcaagggataaacgcgccttaaaacaatttgaagaaaggttacgaacacttaagaagagagagaggcatttagaattcattgaaaacagctggtggacaaaattttgtggcgctctgcgtcccctgaagatcgtctggggaatatttttcatcttagttgcattgctgtttgtaatttctctcttcttgtcaaatttagataaagctcttcattcagctggaatagattctggtttcataatttttggagctaacctgagtaatccactgaatatgcttttgcctttactacaaacagttttccctcttgattatattcttataacaattattattatgtactttatttttacttcaatggcaggaattcgaaatattggcatatggttcttttggattagattatataaaatcagaagaggtagaaccaggccccaagcactcctttttctctgcatgatacttctgcttattgtccttcacactagctacatgatttatagtcttgctccccaatatgttatgtatggaagccaaaattacttaatagagactaatataacttctgataatcataaaggcaattcaaccctttctgtgccaaagagatgtgatgcagatgctcctgaagatcagtgtactgttacccggacatacctattccttcacaagttctggttcttcagtgctgcttactattttggtaactgggcctttcttggggtatttttgattggattaattgtatcctgttgtaaagggaagaaatcggttattgaaggagtagatgaagattcagacataagagttgtccntgagaancttggtgtgcttgaacagacgggcccct

SEQ ID NO: 955 - DNA, 729 bp, Homo sapiens
agattatctgctgtatcggctcattttctcagtgagcaagcagtttcaaagcttgccagggttttgggatacagttgggttcaaacacagatatattaaaggaagaatcatggataatatcttgagttccttgtttctctccgtgcagtttcaagtgaacctcaaaccctggcaagctttgaaactgcttgctcactgagaaaatgagccgatacagcagataatctacagctgcaawcagcacccagatgcagagatggataagtatggggaggaaaaacagccccaggtttttcctttctttaggagtcggccagaaagtcgggatgatgacatacttcctcctttcctccttattcagcgggagcacacagggcctctgttgatgtctctccctttcatcaaactgaacaaattgtctggtgatgtagatgttttcatacttccaaccacaagggcccaaaaatcgcttcatgaagaggccagtgccaagcaggacgagcgaaagccctgcaaaggcaagtagcttctgacccagggaggacaacacctctgtggtttgttgccatctggtacaagacgctcaggacttcccctttgctgtcatttagctgtgcctccaggacatggctgggactgaaaagagagactgccagggtctggttccaagaaacaaggtcatcaaatacacttagtggagtggcaaggccataaatccactgaattgcc

SEQ ID NO: 956 - DNA, 1439 bp, Homo sapiens
  misc_feature (105)..(105): n equals a,t,g, or c
tcgacccacgcgtccggaacgtgctccgcgggctcagtccgcccgccgctgcgtccgcggagtgcaagtgagcttctcggctgccccgcgggccggggtgcgganccgacatgcgcccgcttctcggcctccttctggtcttcgccggctgcaccttcgccttgtacttgctgtcgacgcgactgccccgcgggcggagactgggctccaccgaggaggctggaggcaggtcgctgtggttcccctccgacctggcagagctgcgggagctctctgaggtccttcgagagtaccggaaggagcaccaggcctacgtgttcctgctcttctgcggcgcctacctctacaaacagggctttgccatccccggctccagcttcctgaatgttttagctggtgccttgtttgggccatggctggggcttctgctgtgctgtgtgttgacctcggtgggtgccacatgctgctacctgctctccagtatttttggcaaacagttggtggtgtcctactttcctgataaagtggccctgctgcagagaaaggtggaggagaacagaaacagcttgttttttttcttattgtttttgagacttttccccatgacaccaaactggttcttgaacctctcggccccaattctgaacattcccatcgtgcagttcttcttctcagttcttatcggtttgatcccatataatttcatctgtgtgcagacagggtccatcctgtcaaccctaacctctctggatgctcttttctcctgggacactgtctttaagctgttggccattgccatggtggcattaattcctggaaccctcattaaaaaatttagtcagaaacatctgcaattgaatgaaacaagtactgctaatcatatacacagtagaaaagacacatgatctggattttctgtttgccacatccctggactcagttgcttatttgtgtaatggatgtggtcctctaaagcccctcattgtttttgattgccttctataggtgatgtggacactgtgcatcaatgtgcagtgtcttttcagaaaggacactctgctcttgaaggtgtattacatcaggttttcaaaccagccctggtgtagcagacactgcaacagatgcctcctagaaaatgctgtttgtggccgggcgcggtggctcacgcctgtaatcccagcactttgggaggccgaggccggtgattcacaagktcaggagttcaagaccagcctggccaagatggtgaaatcctgtctctaataaaaatacaaaaattagccaggcgtggtggcaggcacctgtaatcccagctactcgggaggctgaggcaggagaattgcttgaaccaaggtggcagaggttgcagtaagccaagatcacaccactgcactccagcctgggtgatagagtgagacactgtcttgacaaaaaaaaaa

SEQ ID NO: 957 - DNA, 1616 bp, Homo sapiens
ctctcattggctctgctgcasccctgaccaacgctccaataggccgggatccagccatacttcaatggatcccaggggtatcttgaaggcatttcccaagcggcagaaaattcatgctgatgcatcatcaaaagtacttgcaaagattcctaggagggaagagggagaagaagcagaaggaggcctgcagtatccctgggattgggaakcggatggctgasaaaatcatagagatcctggagagcgggcatttgcggaagctggaccatatcagtgagagcgtgcctgtmttggagctcttctccaacatctggggagctgggaccaagactgcccagatgtggtaccaacagggcttccgaagtctggaagacatccgcagccaggcctccctgacaacccagcaggccatcggcctgaagcattacagtgacttcctggaacgtatgcccagggaggaggctacagagattgagcagacagtccagaaagcagcccaggcctttaactcygggctgctgtgtgtggcatgtggttcataccgacggggaaaggcgacctgtggtgatgtcgacgtgctcatcactcacccagatggcyggtcccaccgggktatcttcagccgcctccttgacagtcttcggcaggaagggttcctcacagatgacttggtgagccaagaggagaatggtcagcaacagaagtacttgggggtgtgccggctcccagggccagggcggcggcaccggcgcctggacatcatcgtggtgccctatagcgagtttgcctgtgccctgctctacttcaccggctctgcacacttcaaccgctccatgcgagccctggccaaaaccaagggcatgagtctgtcagaacatgccctcagcactgctgtggtccggaacacccatggctgcaaggtggggcctggccgagtgctgcccactcccactgagaaggatgtcttcaggctcttaggcctcccctaccgagaacctgctgagcgggactggtgacccatggctgggggtgctgaggagagccgagttggactggctacccctcctggccacccagtactccctccagcctcagctggctgaacctcgccgctccaaccaccagcttcctcagcgagcagggcccagggctctgggcmtgaagcaagagccagcccggctcccagtgtctgcccggctcccagtgtctgcccagccctctcccagacaggagcaggctgccaccccttctacctcaccactgcccctcgaagaattttgcaaatggccccttgccccattttaagcaggagcaggtggctggtttgaagccccaggtatcccccttccctgctatgggaaaggccaagctgctgggtggggacagaagctgcaggggagagggaagcagccgtgctgtcaacatcatccggcaccctctggggtaggagaacagccattccacatgtgttccctctatccgtcctgcttccyggkcagctggtggtgctgggaatggggtgccccagccttggtgaggacagtgttgggcaggcccaggggcccagtaaagtgcatttgacattgaaaaaaaaaaaaaaaaaaaaaaaaaaaaaa

SEQ ID NO: 958 - DNA, 1721 bp, Homo sapiens
  misc_feature (1569)..(1569): n equals a,t,g, or c
  misc_feature (1707)..(1707): n equals a,t,g, or c
gctttttccccgccatgatcaagtctgcggcacaccctcattctcagtgttcttcccatctgggtggagagacgcctcctggctgtggcacaaggctcccagcgctacgcggtcatgagagcggcggaaatgcaccagttgaaggacagcagccgtggggaggcgagcaacccggactttgggaaaaccatcagagasctgcctctctccatctggctcctgctgaagaaccccacgttcatcctgctctgcctggccggggccaccgaggccactctcatcaccggcatgtccacgttcagccccaagttcttggagtcccagttcagcctgagtgcctcagaagctgccaccttgtttgggtacctggtggtgccagcgggtggtggcggcaccttcctgggcggcttctttgtgaacaagctcaggctccggggctccgcggtcatcaagttctgcctgttctgcaccgttgtcagcytgctgggcatcctcgtcttctcactgcactgccccagtgtgcccatgcgggcstcacagccagctacggcgggasstcctgcccgaagccacctgaacctaacggctccctgcaacgctgcctgcactgccagccagaacactacagccctgtgtgcggctcggacggcctcatgtacttctcactgtgccacgcaggtgccctgcagccacggagacgaatgtggacggccagaaggtgtaccgagactgtagctgtatccctcagaatctttcctctggttttggccatgccactgcagggaaatgcacttcaacttgtcagagaaagcccctccttctggttttcatattcgttgtaattttctttacattcctcagcagcattcctgcactaacggcaactctacgatgtgtccgtgaccctcagagatcctttgccctgggaatccagtggattgtagttagaatactagggggcatcccggggcccatcgccttcggctgggtgatcgacaaggcctgtctgctgtggcaggaccagtgtggccagcagggctcctgcttggtgtaccagaatcggccatgagccgctacatactcatcatggggctcctgtacaaggtgctgggcgtcctcttctttgccatagcctgcttcttatacaagcccctgtcggagtcttcagatggcctggaaacttgtctgcccagccagtcctcagcccctgacagtgccacagatagccagctccagagcagcgtctgaccaccgcccgcgcccacccggccacggcgggcactcagcatttcctgatgacagaacagtgccgttgggtgatgcaatcacacgggaacttctatttgacctgcaaccttctacttaacctgtggtttaaagtcggctgtgacctcctgtccccagagctgtacggccctgcagtgggtgggaggaacttgcataaatatatatttatggacacacagtttgcatcagaacgtgtttatagaatgtgttttatacccgatcgtgtgtggtgtgcgtgaggacaaactccgcaggggctgtgaatcccactgggagggcggngggcctgcagcccgaggaaggcttgtgtgtcctcagttaaaactgtgcatatcgaaatatattttgttatttaagcctgaaaaaaaaaaaaaaaaaaaaaaaaaaaactcgagggggggtcccgtacccaatctcctnatcatgcatcgtat

SEQ ID NO: 959 - DNA, 3992 bp, Homo sapiens
ccggccccggcccctggcgagatgccgtgtggggaggattggctcagccacccgctgggaatcgtgcagggattcttcgcccaaaatggagttaatcctgactgggagaagaaagtaattgagtattttaaggaaaagctgaaggaaaataatgctcctaagtgggtaccatcactgaacgaagttccccttcattatttgaaacctaatagttttgtgaaatttcgttgcatgattcaggatatgtttgaccctgagttttacatgggagtttatgaaacggttaaccaaaacacaaaagcacatgttcttcattttggaaaatatagagatgtagcagagtgtgggcctcaacaagaacttgatttaaactctccacgaaataccactttggaaagacagactttctattgtgttccggtgcctggggaatctacgtgggtaaaagaagcctatgttaatgcaaaccaagctcgagtcagtccctcaacatcctacactcctagtcgccacaagaggagttatgaagatgatgacgatatggacctacagcccaataagcagaaagaccaacatgcaggtgccagacaagcagggagtgttggtggtcttcaatggtgtggagagccaaaacgtttagaaactgaagcttctactgggcaacagctgaactctctgaacttgtcttctccttttgatttgaattttccattgccaggagagaagggccctgcatgccttgtgaaggtttatgaagattgggattgtttcaaagtaaatgacattcttgagctatatggcatactgtctgtggatcctgtgctgagtatactgaataatgatgaaagggatgcctctgcactgctggatccgatggagtgcacagacacagcagaggagcagagagtacacagtcctcctgcttcattagtgccgagaattcatgtgatcttagcccagaagttgcaacacatcaacccattattgcctgcctgccttaacaaagaggagagcaaaacctgtaagtttgtttcaagtttcatgtccgaattgtctccagtcagagcagaacttcttgggttccttactcatgcccttctgggggatagtttggctgctgaataccttatattacatctcatctccacagtatatacaagaagagatgtccttccactaggaaaatttacagttaacttgagtggttgcccacggaatagtaccttcacagaacacttgtatcgaattattcaacatcttgttccagcatcttttcgtctgcagatgactatagagaacatgaaccatttgaaattcattccccacaaagactacacagccaatcgcttggtcagtgggctcctccagctgcccagcaatacttcccttgtaatcgatgagactctcctggaacaggggcagctggataccccaggtgttcataatgtgacagccctgagcaacctcataacgtggcagaaggtggattatgacttcagctaccatcagatggaattcccctgcaatattaacgttttcattacttcggaggggaggtcactcctcccggcagactgccagattcacttacagccccagctaattccaccaaacatggaggagtacatgaacagccttctctcagcggtgctgccttccgtgctgaacaaattccgcatttatctaactcttttgagattcttggaatatagcatatctgatgaaataaccaaggcagttgaagatgactttgtggaaatgcggaagaacgaccctcagagcatcactgctgatgatcttcaccagctgctcgtggtggctcggtgtctgtctctcagtgctggtcagacaacgctgtcaagagaacgatggctgagagcaaagcagctagagtctttaagaagaacgaggcttcagcagcaaaaatgtgtgaatggaaatgaactttaaagatgtaatacctatgaagagtaatgggcaaactgtagccacataattgtaaaattcagatattcatttataccacattgttttataggtaatttctatcacaaaccagtgacatttcctgaaatcaagcctggtaacacctgatgtttatatgatattcagtaaggacttttaccttactgatttcatggagcttttgaagtttgttttataataattatataaattagtaatgatgtaaaaaaagtatttgatattaaaagtttaatattgawaatgttgctgattgtaccatttccttagcttcagctgagtcataggccagactgttgaaatgctgaaatgaagaaggttgttgcagtttcaaagtcagaggaatcgtgcttcggatttcttatgttttctagttctctgtttttccagttcacagtgggttggggtgcattcagtagtccatctttggggaacggaggcgtacttgccattgattcacatgactacatgaaattctgtactgtcatttcccagatgtttggccacagaaactttttcccacttaacatttgttaacagcctgcaaaactaaacttgtacatggcagtggttcccagacttttgtattttatggaccggtagtaatatttccaaaaatctggggtactataaggttgccaatttaccttgccaagtaatccgaataaatcactgtattatcaccatttttttcataaaaggaaaggacaatctatctctgaataagaggagtcctttaaacggaatgaatgtggcttttgggggcaaaagaaaccaagacactacattgtctttattttctcctatcccagtgcatttgagaaccatgcataagggaatgctgtgctacaaagctgtgcccaaatatgaaaacaaaataggaaacttaaaaagcaataccccctttagaaagtttttattttcttaaatgtcattgagttgctttgattctattggatttttggcattttttatgggatcatcagttggttccaagtatgttagatcagctaacatctgctactccagtaacagcctcgtacaactgcaggtaggttttctccagaccaattagttttaatagagcaaactaacaacagactgtagtagcatggttatggcaaccagaatcttcagaaaggttaggacattactttttaagctgtcagtggtatcaartaacttacctagttggaggcagataaaggatcccttacgttttttcctataaggcctaaattgaaattgttaaccaaggaaacagggtcagccttgaaaaatcaaggaattcattgtacctaataactgaagtaaaaataactagttgttcaacttttcctaaactcaaatctatttttataaacaaatgtaaataatgtttatattagagttgaactggttttcatttttataactggtagactagaccttccttaaacttttagaaataaaatgaaggcttcactggatttgtgaggataaaatacattttctttaattgtcctagagcaaagtacattagtcaccatgtgttttttgtgccaatgtaamttgtaatttaccaaagaaaaatacatacattgcttggtcttgcagaaaagttcccttgaaagaacctttccaataaataaaacgtcccaaattagcagtaccttgggctgtttttcatgagtaagaagattcaccatcccatgtgatctgtgtggaaaaagaccatgtcctcttggtggaagacatgagagagctgaactgaagtggaggaggtggtgcaagagggaccttcctgctcaaggcccgcccaggcagcggaatggagtgcagtgcttggctgcagaaaccctttgtccctcacctatatatacacggacagtcaagtttgttgctctaacgtaaggcacagcgttaatcctgtatggccaggaaactgagtagactcctgtgtaaccctgtttggaactttgccttcttaaaatgatttttcaaagatctctttcgaactaaaaaaaaaa

SEQ ID NO: 960 - DNA, 1986 bp, Homo sapiens
  misc_feature (1049)..(1049): n equals a,t,g, or c
  misc_feature (1774)..(1774): n equals a,t,g, or c
  misc_feature (1933)..(1933): n equals a,t,g, or c
ggccgtggagcgcactgacgagctggtccgggagtacctgctcttccgcgggttcacgcacacactgcggcagctggacgccgagatcaaggcggacaaggagaaggggttccgggtggataagattgtggaccagctgcagcagttaatgcaggtgtatgacttggctgcccttcgggattattggagctacttggagcgtcggctcttcagccgcttggaggatatatacagacccacaatccacragctgaaaaccagcctgtttcgattttatcttgtctacacaatccagacaaacagaaatgacaaggctcaggagttctttgcaaagcaggccacggaactccagaaccaggctgagtggaaggattggtttgtcctgcccttcctgccatccccggacaccaaccccacctttgctacctacttttctcgacagtgggctgacaccttcattgtgtccctgcacaacttcctgagcgtcctgtttcagtgcatgccagtccctgtgatcctgaactttgatgcggagtgtcagaggactaaccaggttcaagaagaaaatgaagttctgcgtcagaagctttttgcattgcaagctgaaatccaccgactgaagaaagaggagcaacagccagaagaggaagaggccttggtccaacacaaattgcctccttatgtctccaacatggaccgcctgggggactcggaacttgccatggtgtgcagccaaaggaatgcctccctctcccagtcacytcgtgtgggcttcctgtcctcgctgctgcctcagagtaagaagagcccctcaaggttgtcgcctgctcagggccctcctcaacctcagagctcggccaagaaagagtccttcggtggtcagggcaccaagggaaaggacccgacgtccggagccaaggatgggaagagcctcctcagcgggctggccactggggagtccggttggtcacagcaccggcagcggcgcctgcaggaccatggcaaggagaggaaggagcttttctccacaaccacttcccagtgtgcanagaagaaaccagaagccagtggcccagaggctgagccctgcccagagctccacacggagccagtggagccactgactcgggcatcctcggcaggccctgagggtggaggagtccgccccgagcagccctttattgtgctgggacaggaggagtacggggaacaccactcatccatcatgcactgcagagtggattgctctgggaggagagtcgccagcttagacgtagatggggtcatcaaagtgtggtccttcaaccccatcatgcagaccaaagcatcctccatttccaaatcaccgctgctgtctttggaatgggccaccaaacgggacagactgctcttgctgggcagtggtgtgggaacagtgcgtctctatgacacggaagccaagaagaatctctgtgaaatcaatatcaacgacaacatgcccagaatcctgtctcttgcgtgcagccccaacgggccttctttcgtctgttcggcagcagctccgagcctcacttcccaggtggacttctcagcaccagacatcggcagcaagggcatgaaccaggttcctggcaggctgctgctgtgggacacgaaaaccatgaagcagcagctccagttctccctggatccagaacccattgctatcaactgtacagccttcaatcacaacgggaacctgctggtcacaggggcagctgatggcgtcatccggctgtttgacatcagcagcatnagtgcgcgatgagytgragggcccactacggggaggtctactctgtggagttcagctatgatgagaacaccgtgtaacagcatcggcgaggacgggaagttcatccagtggaacatccacaagagtggccctcaaggtatccgagtacagcctcccctncagatggccacgggcccctttgtgctgtctgggataacagcggctaacaagca

SEQ ID NO: 961 - DNA, 583 bp, Homo sapiens
  misc_feature (452)..(452): n equals a,t,g, or c
  misc_feature (529)..(529): n equals a,t,g, or c
  misc_feature (537)..(537): n equals a,t,g, or c
  misc_feature (577)..(577): n equals a,t,g, or c
tcaattctgaggttatccctcaattacctcatcgccagggggtggcggatacagtggagcatcgtgcccgaagtgtctgagcccgtggaacctccaaaggaagacctgactgtgtctgagaagttccagctggtgctggacgtcgcccagaaagcccagaaccttttcgggaagatggctgacatcctggagaagatcaagaacttgttcatgtgggtccagccggagatcacacagaagctgtatgtggcgctctgggctgccttcctggcctcctgcttcttcccctaccgcctggtggggcttgccgtgggactctatgctggtatcaagttcttcctcattgatttcatctttaaacgctgcccgaggctgcgcgccaagtacgacacgccctatatcatctggaggagtctccccaccgacccgcagctcaaggagcgctccagcgncgcagtcttcacggcaggctgcagacggacctcgtcacgggagcttacgtacccagcggcaccggccggcctgggtnaaagaggnagggacgccggttcgttttccacagcaccaagaagggcantttcca

SEQ ID NO: 962 - DNA, 1203 bp, Homo sapiens
gcctggctttgcctttgccctgctgtgtgatcttagctccctgcccaggcccacagccatggccatggcccagaaactcagccacctcctgccgagtctgcggcaggtcatccaggagcctcagctatctctgcagccagagcctgtcttcacggtggatcgagctgaggtgccgccgctcttctggaagccgtacatctatgcgggctaccggccgctgcatcagacctggcgcttctatttccgcacgctgttccagcagcacaacgaggccgtgaatgtctggacccacctgctggcggccctggtactgctgctgcggctggccctctttgtggagaccgtggacttctggggagacccacacgccctgcccctcttcatcattgtccttgcctctttcacctacctctccttcagtgccttggctcacctcctgcaggccaagtctgagttctggcattacagcttcttcttcctggactatgtgggggtggccgtgtaccagtttggcagtgccttggcacacttctactatgctatcgagcccgcctggcatgcccaggtgcaggctggttttctgcccatggctgcctttctcgcctggcttttytgcattggytcctgctataacaagtacatycagaaaccaggcctgctgggccgacatgccaggaggtgccctycgtcctggcctacgcactggacattagtcctgtggtgcatcgtatcttcgtgtcctccgaccccaccacggatgatccagctcttctctaccacaagtgccaggtggtcttctttctgctggctgctgccttcttctctaccttcatgcccgagcgctggttccctggcagctgccatgtcttcgggcagggccaccaacttttccacatcttcttggtgctgtgcasgctggstcagctggaggctgtggcactggactatgagcccgacggcccatytatgagcctctgcacacgcactggcctcacaacttttctggcctcttcctgctcacggtgggcagcagcatcctcactgcattcctcctgagccagctggtacagcgcaaacttgatcagaagaccaagtgaagggggatggcatctggtagggagggaggtatagttgggggacaggggtctgggtttggctccaggtgggaacaaggcctggtaaagttgtttgtgtctggccaaa

SEQ ID NO: 963 - DNA, 1383 bp, Homo sapiens
gaataaatacatcatgcaaccccacggcccaccttgtgaactcctcgtgcccagggctgatgtgcgtcttccagggctactcatccaaaggcctaatccaacgttctgtcttcaatctgcaaatctatggggtcctggggctcttctggacccttaactgggtactggccctgggccaatgcgtcctcgctggagcctttgcctccttctactgggccttccacaagccccaggacatccctaccttccccttaatctctgccttcatccgcacactccgttaccacactgggtcattggcatttggagccctcatcctgacccttgtgcagatagcccgggtcatcttggagtatattgaccacaagctcagaggagtgcagaaccctgtagcccgctgcatcatgtgctgtttcaagtgctgcctctggtgtctggaaaaatttatcaagttcctaaaccgcaatgcatacatcatgatcgccatctacgggaagaatttctgtgtctcagccaaaaatgcgttcatgctactcatgcgaaacattgtcagggtggtcgtcctggacaaagtcacagacctgctgctgttctttgggaagctgctggtggtcggaggcgtgggggtcctgtccttcttttttttctccggtcgcatcccggggctgggtaaagactttaagagcccccacctcaactattactggctgcccatcatgacctccatcctgggggcctatgtcatcgccagcggcttcttcagcgttttcggcatgtgtgtggacacgctcttcctctgcttcctggaagacctggagcggaacaacggctccctggaccggccctactacatgtccaagagccttctaaagattctgggcaagaagaacgaggcgcccccggacaacaagaagaggaagaagtgacagctccggccctgatccaggactgcaccccacccccaccgtccagccatccaacctcacttcgccttacaggtctccattttgtggtaaaaaaaggttttaggccaggcgccgtggctcacgcctgtaatccaacactttgagaggctgaggcgggcggatcacctgagtcaggagttcgagaccagcctggccaacatggtgaaacctccgtctctattaaaaatacaaaaattagccgagagtggtggcatgcacctgtcatcccagctactcgggaggctgaggcaggagaatcgcttgaacccgggaggcagaggttgcagtgagccgagatcgcgccactgcactccaacctgggtgacagactctgtctccaaaacaaaacaaacaaacaaaaagattttattaaagatattttgttaactcaaaaaaaaaaaaaaaaaaaaaactcgag

SEQ ID NO: 964 - DNA, 611 bp, Homo sapiens
  misc_feature (585)..(585): n equals a,t,g, or c
  misc_feature (601)..(602): n equals a,t,g, or c
  misc_feature (610)..(610): n equals a,t,g, or c
ggcagcggctagatatggcgtcctctttgcttgcgggcgagcgattggtgcgtgctttgggccccggcggggagctggagccagagcggctaccccgaaagctgcgggccgagcttgaggccgcgctggggaagaagcacaagggcggtgatagctccagtggcccccaacgcttggtttctttccgtctcatccgggatctgcaccagcatctgagagaaagggattccaaactatacctccatgagctcctagaaggcagtgaaatctatctcccagaggttgtgaagcctccacggaacccagaactagttgcccggctggagaagattaagatacagctggccaatgaggaatataaacggatcacccgcaacgtcacttgtcaggatacaagacatggtgggactctcagcgacctgggaaagcaagtgagatcattgaaggctctggtcatcaccatyttcawtttcattgttcacggtggttgctgccttcgtctgcayttaccttggaagccattatcttacagaaatggctcgggtgtactgaatgacgcgctctgggggggctggccacttatgnatgggcggcaaggaannactggaanc

SEQ ID NO: 965 - DNA, 2683 bp, Homo sapiens
  misc_feature (18)..(18): n equals a,t,g, or c
  misc_feature (43)..(43): n equals a,t,g, or c
  misc_feature (65)..(65): n equals a,t,g, or c
  misc_feature (85)..(85): n equals a,t,g, or c
atgatgttccatttactnggttcaccaaaaaccaccgactaangttcctttaacccatggcgggnaacattctggcgctggaaangatcaacgaacattctgcacctgcaaattagctggggtggatgggcgctggcagccggattgccgggcatcattatgctgctggtcaccccgctggtgatttacaccatgtatccaccagaaattaagaaggtggataacaaaaccatcgctaaagcgggccttgccgaactaggaccgatgaaaatccgcgaaaaaatgctgctcggtgtctttgtgctggcgctgctgggctggattttcagtaagtctctgggggttgatgaatccaccgtggcaatcgttgttatggcaaccatgctgctgctgggtatcgttacctgggaagacgtggttaaaaataaaggcggctggaataccttaatctggtacggcggtattatcggcttaagctccttattatcgaaagttaaattcttcgaatggttagctgaagtctttaaaaataacctggcatttgatggtcacggtaacgttgactttcttcgttattattttcctcagcattatcgtgcgttatttcttcgcttccggtagtgcctatatcgttgctatgttaccggtatttgccatgctggcgaacgtctccggcgcaccgttaatgttaaccgcgctggcactgttgttctccaactcctatggcggcatggttactcactatggcggcgcggcaggtccggtcatctttggcgtgggttataacgatattaaatcctggtggttggtcggtgcggtactgacgatattaaccttcctggtgcatatcaccctcggcgtgtggtggtggaatatgctgatcggctggaacatgctgtaaatattctcgtcatacttcaagttgcatgtgctgcgtctgcgttcgctcaccccagtcacttacttatgtaagctcctggggattcactcgcttgtcgccttcctgcaactcgaattatttagagtatatccatttattatctttctgcgcacttcacggtgcgcagatatctggagcatttgatgatcaagttatctgaaaaaggcgtgtttctcgccagtaataacgaaataattgccgaagaacatttcaccggcgaaattaaaaaagaagaagccaaaaaaggcactattgcctggtctattctctcttcgcataatacgtccggaaatatggataaacttaaaattaagtttgattcattagcctctcacgatattacctttgttggtattgtacagaccgctaaagcgtccggtatggaacgtttcccgctgccgtatgtgctgaccaactgccataactcactctgcgccgtcggcggcactattaacggtgatgaccatgtttttggtttatcggcggcccagcgttatggcggtatttttgtgcctccgcatattgcggtcatccatcaatatatgcgtgagatgatggcaggcggcggcaaaatgatcctcgggtcagacagccacacccgttacggtgcattagggacaatggcagtcggtgagggcggcggtgagttggtaaaacagctgcttaatgacacctgggatatcgactatccgggcgtggttgcggtgcatctgaccggaaaacctgcgccgtatgtggggccacaggatgtggcgctggctatcattggcgcggtgttcaaaaacggttacgtcaaaaacaaagtcatggagttcgttggaccgggcgttagcgcgctctctaccgatttccgtaacagcgttgacgtgatgaccactgaaacgacctgtttaagttctgtctggcaaaccgatgaagaagtccataactggctggcgctgcacggtcgcggccaggattactgccagcttaaccctcaaccgatggcgtactacgatggctgcatcagcgttgatttaagcgccatcaaaccaatgattgcgctgccgttccacccgagcaacgtgtatgaaatcgacacactgaaccagaacctgaccgacattctgcgtgagattgaaattgagtccgaacgcgtggcgcacggtaaagccaaactctcgctgctggataaagtggaaaatggtcgcctgaaagtgcagcaggggattatcgcgggctgttctggcggtaactacgaaaacgtcatcgcggcggcgaatgcactgcgcggtcaatcctgtggcaatgacaccttctcgctggcagtttacccgtcatcacagccggtgtttatggatctcgccaaaaaaggtgtggtagcagatttgattggcgcaggcgcaatcatcagaaccgcgttctgcggcccatgctttggcgcgggcgatacgccaatcaacaacggtttgagtattcgccacaccacgcgtaacttcccgaaccgcgaaggctctaagccagctaatgggcagatgtcagcggtggcgttgatggacgctcgttctatcgctgcgactgcggcaaacggtggctatttaacctctgccagcgaacttgattgctgggacaacgtgccggagtacgccttcgatgtaacgccgtataaaaaccgtgtttatcagggctttgtgaaaggggcaactcagcaaccgctgatttacgggggggcccggtacccaattcgccctatagtgagtcgta

SEQ ID NO: 966 - DNA, 803 bp, Homo sapiens
  misc_feature (360)..(360): n equals a,t,g, or c
  misc_feature (367)..(367): n equals a,t,g, or c
  misc_feature (774)..(774): n equals a,t,g, or c
  misc_feature (784)..(784): n equals a,t,g, or c
aattcggcacagtttagttcgaatatcactgtgaaatatatagagaagaggctctgggggctcatgaacttggcccatggactgttgaggctttttttttaatctttagagatgatataaatgtagtgctttggaattcyttatawttaraagttttattcttaccccatcaccatgtcccaagataatttttattatcatctttcagctttaacatatcacagacaaaagttatttttccaaatagawttttaagtatggtataagaggtttttagaaatggaatgattggttttggcggaactgcctggcctgacctgtcactcgggtgaagtgtcagagagctgtgtcgaatgctgncggaganctgtccctctcctgcagagagaaggagctgcttatcctgggggataatgtgggttgagaaagaagtgttttatgagcagaatcagcacagagggagggaggaggaggtgtttaggggctgcagagagccgccagaagatgtgggaacagtatgccagcacggaggtgggtcaratccccatggtgggactctgctgagggttgcctccagccgagacttccaagggctgggattcagtgtgtgtttatgttctctggtgtgcctgataggtgggggcccacatgacagctggcctctctgtgtttcccttctggccgtctctgatttggggcccaagggccataggggggccagggcactccagatgggacgaaaatcaagtccaagaaaaaaaaaaaaaaaaaacntggggggtanttttgggggggcccggggg

SEQ ID NO: 967 - DNA, 684 bp, Homo sapiens
  misc_feature (635)..(635): n equals a,t,g, or c
  misc_feature (646)..(646): n equals a,t,g, or c
  misc_feature (648)..(648): n equals a,t,g, or c
  misc_feature (678)..(678): n equals a,t,g, or c
ggtgaggctcaccatgaaagctcaggactgcaggcgtggagctgtgcatggctctaggacgcgcctttgccccctgggcgagggtgtcctttctcacgaggtgcccatccgtcacccccgtggcccatatcaccccttcctctctgagggagtcttcggtgcgtgggggcggcttgctgtccagcctgtgtgggggccgtcccgtcccacactcccctgggcattcttggactcaaggccggggctctgcgtggcttgctgggaggtgggctgcagcacagaggcctgtgactgcgttccagcggccagttcactacgcatatctctggggcctgggaccagccacgtgccgagctgtcagcgacgtgaggtgtcccttctcgktgagatatttaactttggttttgctctagttctttctttttgaagagagtgactggagtggtaaagatggaaatgctggaaatgatactggcgctcacgctgccatccgaccamcctcggctcccgagtccacgcctgcctgggsctgkgctgkcagaccgcgtcggtcgtaacctctgtgggtccctgcatcagaacgtccaacaacaagtcaccaagttcaccagaaagggttcaaaatagcaaaccanactgagtgttntnatggtggaattgacatctggaaacctgaanaaaaga

SEQ ID NO: 968 - DNA, 1603 bp, Homo sapiens
tcgacccacgcgtccgctctgccaggaatctggtctttctgtagacccaagtcagaaagaaccatttgtggagttaaatcgaatattagargcattaaargtcagagttctgagacctgctctggaatgggcagtttcaaaccgagagatgcttatagcccaaaacagctccttggaatttaaactacacagactgtattttattagcttrttaatgggtggaacacaaatcagcgagargcattacaatatgctaaaaattttcagccatttgccctaaatcatcaaaaagacattcaggttttgatgggaagccttgtgtacctgagacaagggattgagaactcaccatatgttcacctacttgatgcaaaccagtgggctgatatctgtgacatctttacacgggatgcttgtgccctcctggggctctccgtggagtcccctctcagtgtcagtttctcagcaggttgtgtggcgctgccagctttaattaacatcaaagccgtgattgaacagaggcagtgtactggagtttggaaccagaaagatgaattacctattgaagtggaccttggtaaaaagtgctggtatcactctatatttgcctgccccattcttcgtcagcaaacaacagataacaatccacccatgaaattggtctgtggtcatattatatcaagagatgccctgaataaaatgtttaatggtagcaaattaaaatgtccctactgtccaatggaacaaagtccaggagatgccaaacagatatttttctgaagagataactttagtttgcaatttgtaagtgaaactgaatcgtgggtgcatttcagaagagaacgttccatataatgcagctaaccaaggactcctgtgtttctataagctaatgctccagaaactttgccaacctgttagtgtacacacactgaggggagtgctcccggtgaatattatcatagggctttattatattcttggtcttcatttctgatcaagtaaatacaccagcagttgtcattcaatgcaggtttttgtacttaattatatggtgatttttttactttttaagagcagaaacggaaattgacctccccgccatgtgtttaatattcctcctgcttttacttttgtcattttcttgataatcgtaagccttgagagtgtttgtgaaaaagttttatttcctgttatgtatacataattaaatgaaaattcttcagaaaaagtttgataaattgaattgtggttatgaaactaatttgcatttttatttgcttaagaaagaaagctgtgatagattccagatatgctttttgatgttttcctctgctccagctccaagaagtcagcacacctgcattttagctctgcatgcagccccagcaggctgcgtgtttaagaatttcattgtttaactggctggtgtgagaagtcttccgttagcatagagtggaaggagtactattgtttggttgggtttttgtttgtttgttttttgtttttgcttttattgccaagaggtgcttgttttaaaagtatgtttaataaaatgaaattctaaagttaaaaagtgttcttaaagttgatatttaactct

SEQ ID NO: 969 - DNA, 684 bp, Homo sapiens
  misc_feature (650)..(650): n equals a,t,g, or c
  misc_feature (663)..(663): n equals a,t,g, or c
  misc_feature (668)..(668): n equals a,t,g, or c
  misc_feature (680)..(680): n equals a,t,g, or c
gacggatcaccctccgctccaacatggctagtcctcaacgcgtgactcaagcctgttgtgccagcaggcgcactcagcagcgaccctcataggtggcgaaggtccgcgagagggttccgccagctagacagtggagtgccgcacagcgcgccttccagcctcgcagccgccaccctagcggttccgacccggcgccacaggcctgcttggtcgatcttcgagccaaagatgcggcgaggctggaagatggctctgtctggggggctgcggtgctgccgccgggtactgtcctgggtgccagtgctcgttattgtcctcgtcgtgctctggtcctactatgcctacgtctttgaactctgcctggtgactgttttgagcccagcagaaaaagttatttacctcatactctaccatgccatctttgtgttctttacctggacctactggaagtctatctttacactcccacagcagccaaaccagaagttccacttgtcctacacagacaaggagcgctatgaaaatgaagaaagacctgaggtccagaagcagatgcttgktgatatggccaaaaagctaccggtttacacaagaactggaagtggagctgacgawtctgtgaccsgtgtcatctgatcaagccagaccgntggcaccaattgntctgnctggggctatgnggtg

SEQ ID NO: 970 - DNA, 775 bp, Homo sapiens
atgcgccgaaagatgacatcatcgtcatgctgctgtgcatgtcgctgaccgtgttgtttgatatggttattgccatcagcgtggggatcgtgctggcatcgctgctgtttatgcgtcgtatcgcacgtatgactcgcctggcaccggtagtcgtagatgttccagacgatgtcctggttctgcgcgttattggcccgctgttttttgctgctgctgaaggcttattcacggacctggagtcacgtcttgaaggcaaacggattgtgattctgaagtgggatgccgttccggtacttgatgctggtggtcttgatgcgttccagcgttttgtgaagcgtctgcccgagggatgtgaactgcgcgtgtgcaagtggaattccagccactgcgcactatggctcgcgctggcattcaaccgatcccgggacgcctggcgttcttcccgaatcgtcgcgcggcgawggcggatttataagtacgagattgaccagtcagcgcaaactgactggtcagcaaactgcattatttgttagctatgacggcgattatcgctacggcggcaacgtttgtcatagtggcgaacccaccagtaacggtcgcacacctgttcatgcccgccaacacgggcacccgccagccagagaatggcaccgacgaaaatacttagcactgcaccatgtgcgaaatactggggcataattaaactgtggtaactggttgaagattgaatacccacgccgaccaccattacaccagacccaaccccatgaacacg

SEQ ID NO: 971 - DNA, 1399 bp, Homo sapiens
  misc_feature (13)..(13): n equals a,t,g, or c
  misc_feature (38)..(38): n equals a,t,g, or c
  misc_feature (747)..(747): n equals a,t,g, or c
  misc_feature (1378)..(1378): n equals a,t,g, or c
  misc_feature (1392)..(1392): n equals a,t,g, or c
  misc_feature (1398)..(1398): n equals a,t,g, or c
cggtagtccccgnaaccaacaagtgcggcattttcgcnagatcggcaaccaccggctcaccggcgatatctttacccagcaccacggttaatggcgacggattatcgcggaatttggcgttatccaaaacttcgcgcagataaacggtttgtcgttttttattcggtaactccagacctacatagggtttgccaggaataacttcaacgacacgcaccgccaccgtcgaaagtgaacgggcaaggtcccgtgacaagttagaaatgcgcgccgcttttacgcccggtgccaggttcaattcaaagcgagtgataaccggccccggagagtaattgacgacatcggctttaatacggaaatcagccagacgcgcttccaccaggcgagccatttgttcaagcgcaaaggtatctaccggctccacttcgctcggcggcggtgtcagcaaatccagagaaggcagcggcgtcgtcggtttatgcaacggacggctgtcgccattacgcatcaacagcggatgaagcagggtatcctgcggttgtggcgcaactggctgttgtggctgctgatactgctgctgcggcgcaaccggttgttgcggctgctgatattgctgctgtggcgcaaccggttgttgcggctgctgatattgtggctgcggcgcaaccggctgttgtggctgctgatactgcggctgcggcggaactggttgttgcggctgctgatattgctgctgcggtgcaacgnttgttgcggctgctgtacaggttcaacaattggcgtaaacaacggttcgtgtggaccatcatccagcaacgctttcattggcgaaaattcaaaatcatccagcgagaacggattcgccccagccggttgttcgccggaataacgttgttgttgagtttgcgcaaactgacgagccagttcagcctctgccgcagcatctgcatcttctgcgtttacgggcacatcatgttgatactgttcgccatagcgttgctgctgtgtctgggcgaactgacgtgccagttcatcctgctgcatcgcatcgatttcatcatcgttgtactgatcgccagaatcgtactgattgcgctgggcttcacgggctttttcttccgccgcacgctgtgagggcagcttaataccgtaagacgccagttcacgacgagttggcacgcggatacgtttcggtcgtggcaactgcggaccaatcccctctttgacctgaggacgcggtccaccgctatttgccagactgaagactggcgcggcaacggttgcggcagcccccgtcgccagtgtcgcttttttcacgccagatgccagcgagtcactcagcgcactggttaaggcgggggcccggtamccaattcgncctatagtaatcgngttacna

SEQ ID NO: 972 - DNA, 437 bp, Homo sapiens
acaagggaactgggaccgttgggctgaaacagtcttgagcctggggttgactgggttagagaagaaccgggatgcaaggagctgcctgtgacacctggcctgccctttctcagctgcctcccctgccctttctcagctgcctcccctgccctcagaaggaaaggagagggctcacttatcacttgtgccatagcacctggtctcaaaatcctaaaagctttcctcgccctcactgccttgctccacaaggtccactttcctgggtcttgtgctgtgcctttccttgtctgcctcctgctgcttctgtaactgcagaccccaggcccaatggcaagccctcggctcagctgcttctccattggaataaactcttgtttctctatgtcgatgttcttctctggtcttcctccctgcctatcaagagctgagtgataact

SEQ ID NO: 973 - DNA, 1934 bp, Homo sapiens
gcctgagttgaaagatcatcccatcacacagttttcattattggccatggcatccttgacaaaaatactggtcattggattgaaaccatccttgaaagtatggatgacttttccctatggccggatggatccttccagtgtgccactgctggcctggcactttgtagcagtacaaaattacgtgaatcccatgcttgccttctgcagaggagatgttgttcattttctattggtaaagagagatgaatctggagcaatacatgttactaagcaaaagcatcttcacctatactatgacctcatcaactttacctggataaattcacgcacagttgtgctcttagacagcgtagagaagttgcatgtgattgatcggcaaacacaagaggaattggagacagtggagatctcagaagttcagctggtctacaatagcagccatttcaaatcactagccactggaggaaatgttagccaggcactggctttggttggagagaaggcttgttatcaatccatcagtagctatggtggtcagatcttttatttggggacaaaatctgtttatgtgatgatgctgaggagctggagagagagagtggatcatctcctgaaacaagattgtcttacagaagcgttggctcttgcgtggtctttccatgaaggaaaagcaaaagcagtagtgggattatcaggggatgccagtaagcgaaaggctattggtgcagaccggatggtagaaatcctattccattatgcagatcgagctctgaaaaagtgcccagaccaaggaaaaatccaagtgatggagcagcattttcaggatatggtgcctgtcatagttgattactgccttctgctgcagcgaaaggatcttttatttagtcagatgtatgataaattaagtgagaattcagtggccaaaggagtatttttggagtgccttgagccatatattttaagtgataaattggtgggaatcacaccccaagtaatgaaagacttgattgttcatttccaagataaaaaattaatggaaaatgtggaagcgctcattgtacatatggatatcaccagcctagatattcagcaggtagttctcatgtgttgggaaaatcgtttatatgatgctatgatctatgtctacaacagaggcatgaatgaatttattagtccaatggagaaacttttcagagtcattgctcctcctctgaatgcaggaaaaacactaacagatgaacaagttgttatgggcaataagctccttgtatatattagctgttgtctagcaggtcgtgcctatccccttggtgacatccctgaagatctggttcccttggttaaaaaccaggtttttgaatttctaattcgcctgcattcagcagaggcttctcctgaggaagaaatctatccttacattcggactttgctacattttgacacaagagaatttctcaatgtattggcactgacttttgaagattttaaaaatgacaagcaagctgtggaatatcaacagcgaattgtggatattttgttgaaagttatggtggagaattcagactttaccccctcacaagtaggatgtctctttaccttccttgctcggcagcttgcaaagcctgacaacaccttgtttgtaaacagaacactttttgatcaggtccttgaattcctttgtagtcctgacgatgactcccgacactctgaaagacagcaggtccttttagaattgctgcaggctggaggcatagttcaatttgaagagagtcgactcatccggatggcagaaaaagctgagttctatcaaatttgtgaatttatgtatgaaagagaacaccaatatgaccaaaattrttgrttgccacttacgtgacccctgcgagaggargagtctttaattacattcacatatcttacccaattcccgggac

SEQ ID NO: 974 - DNA, 1285 bp, Homo sapiens
  misc_feature (576)..(576): n equals a,t,g, or c
  misc_feature (1281)..(1281): n equals a,t,g, or c
cggataagcggcggcaccggcgtcacgatgaccgtgcagagactcgtggccgcggcgtgctggtggccctggtctcactcatcctcaacaacgtggcggccttcacctccaactgggtgtgccagacgctggaggatgggcgcaggcgcagcgtggggctgtggaggtcctgctggctggtggacaggacccggggagggccgagccctggggccagagccggccaggtggacgcacatgactgtgaggcgctgggctggggctccgaggcagccggcttccaggagtcccgaggcaccgtcaaactgcagttcgacatgatgcgcgcctgcaacctggtggccacrgccgcgctcaccgcaggccagctcaccttcctcctggggctggtgggcctgcccctgctgtcacccgacgccccgtgctgggaggaggccatggccgctgcattccaactggcgagttttgtcctggtcatcgggctcgtgactttctacagaattggcccatacaccaacctgtcctggtcctgctacctgaacattggcgcctgccttctggccacgctggcggcancatgctgcatctggaacattctccacaagagggaggactgcatggccccccgggtgattgtcatcagccgctccctgacagcgcgctttcgccgtgggctggacaatgactacgtggagtcaccatgctgagtcgcccttctcagcgctccatcaacgcacacctgctatcgtggaacagcctagaaaccaagggactccaccaccaagtcacttcccctgctcgtgcagaggcacggggatgagtctgggtgacctctgcgccatgcgtgcgagacacgtgtgcgtttactgttatgtcggtcatatgtctgtacgtgtcgtgggccaacctcgttctgcctccagctttcctggttagcgcaacgcggctccacgaccacacgcacttcagggtggaagctggaagctgagacacaggttaggtggcgcgaggctgccctgcgctccgctttgctttgggattaatttattctgcatctgctgagaggggcaccccagccatatcttacactttggtaaagcagaaaaccaggaaaattttcttaaaatatccacaatattccttgagtgagtcagaatctatagccggttagtgatggtttcagacagaatcgtgttcgtgtctgttttgctcgattcctttcctaagttaaataaatgcaagcctctgaaaaaaaaaaaaaaaaawaattcgggggggggncccc

SEQ ID NO: 975 - DNA, 1445 bp, Homo sapiens
  misc_feature (542)..(542): n equals a,t,g, or c
  misc_feature (892)..(892): n equals a,t,g, or c
tcgaggagctcagagtctagtgtgggagataaatacctaaaagctagttatggccaagtgtgagaagcttgaggtcagcccaggggccctggttgcacaggggagggagggatggactgtctctgcttcaggataattggggaagccttcatgggggaggtgacaataggcaggagcaggaagtcacttcaagtcacaagtaagagtatgagcaaggaggagggggtatagctcagaggtagagcattgggctgcagattaagaatatgagcaaggmcacatggmcmcaaaatagaaatagcatactcattgctcattgtgtggggagctggggagtgattttattctgccagcacctctctttcctgttcatcccccttgccaggtgttgaatttctcagtagcagaatccctgtctacttttacaatatgttctccctctcttttcctcttttttccatagtgctttctatagcaccttgctggaatttatggatgaatgaatagttcttgctgttctaaggttactctagggatctggnaaataataaagaccattattaagattattaacagctttcagatgacatctatcttagtgatcaaggtgcaaataaagctagctgaccaagagatgtggttgctatgttgaccaggtgaccaagatggtgactgagatgccaagtggctaacatgatgatcaacccaaattgtctggtaaatgcaccactttctgaaatgcacatttcagggtaggtgaaggaaatacatgtacctgacatggcccagtctgacacgtgtcacctcttctgtcttctycccaggctgctctgcgtagattggctggggtctgccctgaaggcctccaggactctgactttyagcagttggnccagcctcggctggtggactccttcttactctgcagcaacatggaggagagttttgtgtagtgagtgtgggmgaagaaatacatttggctgttctcacaccccctctgactatgcaccagtgaacacatctgagtacataccagctctcctcatcttcttatttatacttaacttatttttgtgtgaaataaatggaggacgaaatcttagagcaacatcatcaaacagtctttggtccttgagaatcttctttgtgttttattttttgatttctgtagcttttcagttgcagatgttgaaattcgtaatgacaaatatgacaaattgtcatgggtgattccacttcatcttattttttctactctcactatacaatcttgcctcattttttaaaactttggaaccagaggatttcaactgcctagcaagttttttttttaagttggatttgctcttcccaaaaatctaaaatgaatttaataattgggtagaatatattggaaagaagtttctttttctttaataaatggaatcatataaaatgaaaaaaaa

SEQ ID NO: 976 - DNA, 1694 bp, Homo sapiens
  misc_feature (328)..(328): n equals a,t,g, or c
  misc_feature (1553)..(1553): n equals a,t,g, or c
tgccggagaaagtccgcgaagtgttgcaacagtttgacgatcaawgcgccaccagcgtacccgtcagataaaatccgtctgattgtccaggcgattattggcgtctggctggtgactgcgctggcgttgcatctggcggaagttggcttgattggtttgtcagtcattattctggcaacatcattgaccggtgtcaccgatgagcatgctatcggtaaagccttcaccgaatctytgccattcaccgcactgttgasggtgtttttytcggtagtcgcggtgattatcgaccaacaactgttttcgccaattattcagtttgtgttgnaggcatcggaacatgctcagctgtcgctgttctatattttcaacggtctgctgtcatccatttcggataacgtcttcgtggggacgatttatatcaacgaagcgaaagsggcaatggaaagtggcgctatcacgttgaagcaatacgagctgctggcggtcgccattaataccggtaccaatctgccctccgtcgctacgccgaacggtcaggctgcgttcctgttcctgctgacctctgcactcgcgccattgattcgcctctcttatggccgcatggtgtggatggccctgcctwacaccctcgtcctgacactcgtcggcttgctctgcgtcgagtttacgcttgcccctgtaaccgaatggtttatgcaaatgggctggatagcaacgctttgataacaacttaccgggcatataaatgcccggtttgccttttcgcccgataattgtccaattgcgtcctatttttgctgcctcctggtggcgcagcgaatgaattggtttaaactgcgcactctatgcatattgcagggaaatgattatgttgcgatttttgaaccaatgttcacaaggccggggcgcgtggctgttgatggcgtttactgctctggcactggaactgacggcgctgtggttccagcatgtgatgttactgaaaccttgcgtgctctgtatttatgaacgctgcgcgttattcggcgttctgggtgctgcgctgattggcgcgatcgccccgaaaactccgctgcgttatgtagcgatggttatctggttgtatagtgcgttccgcggtgtgcagttaacttacgagcacaccatgcttcagctctatccttcgccgtttgccacctgtgattttatggttcgtttcccggaatggctgccgctggataagtgggtgccgcaagtgtttgtcgcctctggcgattgcgccgakcgtcagtgggattttttaggtctggaaatgccgcagtggctgctcggtatttttatcgcttacctgattgtcgcagtgctggtggtgatttcccagccgtttaaagcgmmaaamcstgatctgttcggtcgctaatccattcggcgctcctgcgggagcgcttttttcctgccgctatatttatttgaccctcagtaaatcagaacttcgcgttgtataacgtggtgaaagcatggctcgcttcatctgccattgttgctggatcccctgcccggcaaaatagagngttcctctgccctctttagcattcagtgtatccattaccgtcatcaattgctcactcccggggcgcggtgcgttgtcatcgaataaattgagctgcgcgactccctgactgaagaaatcccccagcatcacgcccgctctt

SEQ ID NO: 977 - DNA, 782 bp, Homo sapiens
gagatcaacctcttcaaccactgggtgtcagggctggcccaggaggcccgggggtcctgtaactggcaggcccacctacccctgggagctgcagcctgccccctgsgcaggctctccgggctgggctggctctgatacaggtccccgtatggctggtgctacagggacccaggctgatgtgggctggcatgtggggcagcaccaagggcctgggcctggccttgctcagtgcctgggagcagctgggcctgtctgtggccatctggacagatctgtttttgtcatgtctgcacggcctgatgttggtggccttgctcttggtggtagtgacctggagggtgtgtcagaagtcccactgcttccgactgggcaggcagctcagtaaggccttgcaagtgaactgcgtggtaaggaagctcctggtacagctgagacgtctgtattggtgggtggagactatgactgccctcacctcctggcacctggcctatctcatcacttggaccacctgcctggcctcccacctgctgcaggctgcctttgagcacacgacccagctgccgaggcccaggaggttgaaccccaggaggtctcagggtcttccttgctgccctcactgtctgcgtcctcggactcagagtctggaacagttttgccagagcaagaaactcccagagaataaatgtatccccatctgcaaaaaaaaaaaaaaaaaaaaaaaaaaaaaaaaaaaaaaamaaaaaaaaaaaaaaaaaaaaaaaaaaaaaaaaaaaaaactcgag

SEQ ID NO: 978 - DNA, 1671 bp, Homo sapiens
  misc_feature (918)..(918): n equals a,t,g, or c
gtacctggatatccacgccttcatcaggttgcagacggatagtcagtttattctgcggcagatcctgccacgattctttaaacagattcagttcaggtgttttgaaatagaccacgacttcagaacatttggtcggcagacgtttaccagtacgcaggtagaatggcacaccggcccagcgccagttatcaatgtcgacgcggatcgccacgaaagtttctgtattgctgctcttgttcgcgccctcttcttccagatatcccggcacttttttgccctgggcgaacgcagtatattgcccgcgtacggttttttcgcgtacgttggagcggtcgatgcggcgcagagacttcagtactttcactttttcatcgcggatgctgtctgcgctcaggtcagacggcggagacatcgcaatcatgcaaagaatttgcagcaggtggttctggatcatgtcgcgcatctgaccggctttatcaaaatagccccagcgcccttcgatccccacttcttctgccacggtaatctcaacatgatcaatggtgcgattgtcccagttattcacaaacagggagttagcaaaacgcagcgccaacaggttcagcaccgtttctttaccaagatagtggtcgatacggtaaacctggcactcctcgaagtattcgccaacctgatcattgatttcctgcgargtcgccagcgacgtccccagcggtttctccatgamtamgcgtgccggtttagcattcagttttgcctcgccaagccctttgcaaattgcgccaaaagtgctgggcggcatggcaaagtagttaatggtgatacgatttttttgatccagcatcgcgccgagacggctgaatgcagcagtgtcattgacatcgagattacaaaaatccagacgtgcactcagggtgncccataaaccttcatcaatggtttctttcatgaaagtttcgagcgcctcgcggacaactttggtatatgccgctttatcccagcagcacgccctacgccgataatmcggstgtccgggttgagctgaccggctttttccagwtgatacagggaaggcagyaatcacccaccgtaaacaggccgcttgagggaaataagacgatgccgctttacccagtttaacctgcactttattctcaacgacttgcctgtattggctcccttttaatcactttgcgtcgggaagttatgctggaaaatttgaatctctctctattctctcttattaacgcgacgccagactcggctccgtggatgatctcgttggcgatttttattgctaaagatttgattaccgtggtgccgttgctggccgtggtactttggttgtgggggcttacagcacaacggcaactggtgataaaaatcgctatcgcgctggcggtcagcctgtttgtgtcctggacgatgggacatctttttccgcacgaccgaccctttgtcgaaaatatcggctataacttcctgcatcatgcggcggatgactcattcccaagcgatcacggtacggtgattttcacctttgcactggcatttttatgctggcatcgcctgtggtccggctcacttttaatggtgctggccgtcgtcattgcctggtcgcgcgtttatcttggcgtccagtacccaattcgccctatagtagcgactcaa

SEQ ID NO: 979 - DNA, 3113 bp, Homo sapiens
gttattaatgaccgctgagcaggcagcaccatgtcagtgtgacaactgaatcgggtgaacgatgcaccactaaccaccatggaaacaaggaaaaataaagccagctcacaggatctctcttcactggattgagagcctcagcctgccgactgagaaaaagagttccaggaaaaagaaggaatcccggctgcagcctcctgccttcctttatattttaaaatagagagataagattgcgtgcatgtgtgcatatctatagtatatattttgtacactttgttacacagacacacaaatgcacctatttataccgggcaagaacacaaccatgtgattatctcaaccaaggaactgaggaatccagcacgcaaggacatcggaggtgggctagcactgaaactgcttttcaagcatcatgctgctattcctgcaaatactgaagaagcatgggatttaaatattttacttctaaataaatgaattactcaatctcctatgaccatctatacatactccaccttcaaaaagtacatcaatattatatcattaaggaaatagtaaccttctcttctccaatatgcatgacatttttggacaatgcaattgtggcactggcacttatttcagtgaagaaaaactttgtggttctatggcattcatcatttgacaaatgcaagcatcttccttatcaatcagctcctattgaacttactagcactgactgtggaatccttaagggcccattacatttctgaagaagaaagctaagatgaaggacatgccactccgaattcatgtgctacttggcctagctatcactacactagtacaagctgtagataaaaaagtggattgtccacggttatgtacgtgtgaaatcaggccttggtttacacccagatccatttatatggaagcatctacagtggattgtaatgatttaggtcttttaactttcccagccagattgccagctaacacacagattcttctcctacagactaacaatattgcaaaaattgaatactccacagactttccagtaaaccttactggcctggatttatctcaaaacaatttatcttcagtcaccaatattaatgtaaaaaagatgcctcagctcctttctgtgtacctagaggaaaacaaacttactgaactgcctgaaaaatgtctgtccgaactgagcaacttacaagaactctatattaatcacaacttgctttctacaatttcacctggagcctttattggcctacataatcttcttcgacttcatctcaattcaaatagattgcagatgatcaacagtaagtggtttgatgctcttccaaatctagagattctgatgattggggaaaatccaattatcagaatcaaagacatgaactttaagcctcttatcaatcttcgcagcctggttatagctggtataaacctcacagaaataccagataacgccttggttggactggaaaacttagaaagcatctctttttacgataacaggcttattaaagtaccccatgttgctcttcaaaaagttgtaaatctcaaatttttggatctaaataaaaatcctattaatagaatacgaaggggtgattttagcaatatgctacacttaaaagagttggggataaataatatgcctgagctgatttccatcgatagtcttgctgtggataacctgccagatttaagaaaaatagaagctactaacaaccctagattgtcttacattcaccccaatgcatttttcagactccccaagctggaatcactcatgctgaacagcaatgctctcagtgccctgtaccatggtaccattgagtctctgccaaacctcaaggaaatcagcatacacagtaaccccatcaggtgtgactgtgtcatccgttggatgaacatgaacaaaaccaacattcgattcatggagccagattcactgttttgcgtggacccacctgaattccaaggtcagaatgttcggcaagtgcatttcagggacatgatggaaatttgtctccctcttatagctcctgagagctttccttctaatctaaatgtagaagctgggagctatgtttcctttcactgtagagctactgcagaaccacagcctgaaatctactggataacaccttctggtcaaaaactcttgcctaataccctgacagacaagttctatgtccattctgagggaacactagatataaatggcgtaactcccaaagaagggggtttatatacttgtatagcaactaacctagttggcgctgacttgaagtctgttatgatcaaagtggatggatcttttccacaagataacaatggctctttgaatattaaaataagagatattcaggccaattcagttttggtgtcctggaaagcaagttctaaaattctcaaatctagtgttaaatggacagcctttgtcaagactgaaaattctcatgctgcgcaaagtgctcgaataccatctgatgtcaaggtatataatcttactcatctgaatccatcaactgagtataaaatttgtattgatattcccaccatctatcagaaaaacagaaaaaaatgtgtaaatgtcaccaccaaaggtttgcaccctgatcaaaaagagtatgaaaagaataataccacaacacttatggcctgtcttggaggccttctggggattattggtgtgatatgtcttatcagctgcctctctccagaaatgaactgtgatggtggacacagctatgtgaggaattacttacagaaaccaacctttgcattaggtgagctttatcctcctctgataaatctctgggaagcaggaaaagaaaaaagtacatcactgaaagtaaaagcaactgttataggtttaccaacaaatatgtcctaaaaaccaccaaggaaacctactccaaaaatgaacaaaaaaaaaaaaagcgaaagactgcagttgtgctaaaaacaaaacaaaacaaacaaacaaacaaaaaagtaaaaaaagattactttcgagagagaagtttaagcttcaccaatggctggctcctggaccaatgggaaatatgttacaactttcaggcattttttaagtgaactttttttttttt

SEQ ID NO: 980 - DNA, 1720 bp, Homo sapiens
  misc_feature (29)..(29): n equals a,t,g, or c
caggcggcggcggccggggctcgagccgnaggcaggagcagccgccatggccgagagcatcataattcgtgtccagtccccrgatggagtgaagcgratcacagcaacaaagagagaaacagcagcaacatttttgaaaaaggttgcaaaggagtttggcttccaaaataatggcttctcggtttacatcaatagaaacaagaccggagagataacagcctmctccaacaaatccctcaacttgctaaaaatcaagcatggcgatttgttgttcctgtttccctcgagccttgctgggccctcatctgaaatggagacgtcagttccaccgggcttcaaagtctttggcgctcccaacgtggtggaggatgagattgatcagtacctcagcaaacaggacgggaagatttacagaagccgagacccacagctatgccgccacggccctttggggaaatgcgtgcactgcgtccctctagagggggaagtttgttgccctggagaacatcagctgcaagattaagtcagggtgcgaggggcactcccgtggccgaatgactctgtactaagtgccagccgagcgccatcacgctgaacagacagaagtacaggcatgtggacaatatcatgtttgagaatcacaccgtcgctgaccgctttcttgacttctggagaaagacagggaaccagcattttgggtacttatacggacggtacacggagcacaaagacattccccttggcatcagggctgaagtggctgcgatttatgagccacctcagattggtacacagaacagcttggagcttcttgaggatccaaaagctgaagtggtcgatgaaattgctgccaaacttggcctgcggaaggttggctggatatttacagacctcgtctcagaagatacccgaaagggtaccgtccgctacagtcgaaataaggacacctatttcctaagttcagaagagtgcatcactgcaggagacttccagaacaagcatcccaacatgtgccggctctctccagacggacattttggatccaagtttgttactgcagtggctacaggtggtcctgacaaccaagtccactttgaagggtaccaggtgtccaatcagtgtatggcactggtccgtgatgagtgtttgctgccatgcaaggacgccccggagctgctacgccaaggagtctagcagtgagcrgtacgtgcctgatgtgttttataaggacgtagacaagtttggcaacgagatcacccagctggcccggcccctgcctgtggagtatctcatcatagacatcacaacaactttccccaaggatccagtttacactttttctatttcgcaaaatccatttcctattgaaaaccgggatgtattgggtgagacacaggacttccatagcttggccacctatttgtctcagaatayctcatctgtgttcttggataccatctcagatttccacctcttgctgttcctggtcaccaatgaagttatgcctctgcaggacagcatcagcttgctgctggaggccgtgcggaccagaaatgaggagctcgcccagacatggaagaggtctgagcagtgggccaccatcgagcagctktgcarttcacagggtacatgtgcaggtttgtcacctgggattacagacgtgtatacacaagacacaaagatcagctcaggatgggtcataggcctaatggtaaaaggt

SEQ ID NO: 981 - DNA, 809 bp, Homo sapiens
  misc_feature (788)..(788): n equals a,t,g, or c
ctgcggggccgcggccagtgcctcagcggtgggaacctgcggggccgcggccggtgcctcggcggtcggtgttttgtcgcagagtttactctgcctcccctctcctgcgcgtgcgtgtgttcacacaggttttattttgaatttgcatgagtgcagatgtcatgccccttggcactcagatcttcgcctgtgatctctgagagggacagtgctctcatggccacagcagtcactcgggactgcgctgcacccagtgctggcttctgctctgtggtccacgttccatttctgccgtggtcccagcagcgtcgctgtgggtctggcctgggttgcgtgtgtttcgtatgtgggccgtgctccctgcttggttcccttttcctggaacgtgtcactgcctccctgtctcgctccgtggacatttctgggaggtcaggccgtggccacctggccccctgttcaggtctgaggctcccacctgcttaggttcgggaagctcaggagtgaggccatgccctcctcaggacatcccatccaagccagccatgtccggtgatgggccgctgcccggaaagtccttttccttcttgtaactgagaagaacttgccttgagccacgtcaagtcccgtccgtcgcagccactgcccacaagcgtgagtctgctgtgagccagcggctccatggcagggcatcccagcgccattcctgccttcacacacacttgctgccgtttccctgtgctgggggctgtgcargtctgcctcggtgtggamttttctcttaaggaaanaaccccaggtcggccgagcac

SEQ ID NO: 982 - DNA, 2373 bp, Homo sapiens
  misc_feature (70)..(70): n equals a,t,g, or c
  misc_feature (1848)..(1848): n equals a,t,g, or c
tataccgacggcatctccttcgaccctgccctcatccatgacaatgcctcatccacccaccccgaagagncctgctctcatgattggggcctgctggactgaggagaagaacaaagagaaggaaaaggggagacaacagtacagacaccacccaaggagaccctttgtcgatccaccactacttccatggctacctggctggtttcagcgtgcgctcaggtcgcctggagagccgcgaggtcatcgagtgcctctatgcatgtcgggaggggctggactatagggatttcgagagcctgggcaaaggcatgaaggtccacgtgaacccctcacagtccctgctcaccctggagggggatgatgtggagaccttcaaccatgccctgcagcatgtggcttacatgaacactctgcgctttgccacgcccggcgtcaggcccctgcgcctcaccactgctgtcaagtgcttcagcgaagagtcctgcgtctccatccctgaagtggagggctacgtggtcgtccttcagcctgacgscccccagatcctgctgagtggcactgytcattttgcccgcccagctgtggactttgagggaaccaacggcgtccctttgttccctgatcttcaaatcacctgctccatttctcaccaggtggaggccaaaaaggatgagagttggcagggcacagtgacagacacacgcatgtcggatgagattgtgcacaacctggatggctgtgaaatttctctggtgggggatgacctggatcccgagcgggaaagcctgctcctggacacaacctctctgcagcagcgggggctggagctcaccaacacatctgcctacctcactattgctggggtggagagcatcactgtgtatgaagagatcctgaggcaggctcgttatcggctgcgacacggagctgccctctacaccaggaagttccggctttcctgctcggaaatgaatggccgttactccagcaatgaattcatcgtggaggtcaatgtcctgcacagcatgaaccgggttgcccaccccagccacgtgctcagctcccagcagttcctgcaccgtggtcaccagcccccgcctgagatggctggacacagcytagccagctcccacagaaactccatgatacccagcgccgcaaccctcatcattgtggtgtgcgtgggcttcctggtgctcatggtcgtcctgggcctggtgcgcatccattcccttcaccgccgcgtctcaggggccggcgggcctccaggggcctccagtgaccccaaggacccagacctcttctgggatgactcagctctcaccatcattgtgaaccccatggagtcctaccagaatcggcagtcctgtgtgacgggggctgttgggggccagcaggaggatgaggacagcagtractcggaggtggccgattcccccagcagcgacgagagacgcatcatcgagacccccccacaccgctactaaggcctacacctctccccacgcagagggggaattctgccctggtgaaacagacactccagacatgggagaaggactttctgggaacacagagaccaagagggagagaggcttcagaaccagtcctcctttcatttcaaaaccccagcgggccctctggagtccgccctgcccctcccccggccccccatccctcacttctgggctgtcatgctcctggtgtgccccttgcactggggctggctgggttggaaagtgggctggacttcagctgcctttctacccccaatggcagctgcccccttagcactcactgtgttggggagagggtgacgattgcaatggctggggctggggctggggntgggggtgggattgaaggaaaccctctcctctccccttcccttctctctcctgtccatgggaagcttttccccctctgcagggctccctcagctggaccatcgtccctgcttctcttatgatcgccccacctcatttccatttcagtctggggaccccatttctccctcctttccaacttccttcctttcttgtcctgtttcccttcctgcccttgcagtcctgaggtcctgcagccccggcccctcctccgtgacctggtgtggccaggctgcggggacgggaggggacgtgggggccccgggtgtacatatataatgtatattttttcaatgttgtcgtgagtgcagcccatgttcctgcgtgcagctcacggccttgtgtgtatgtgtgtgtgtgtgtgtgtgaggcatcgtcatgtcctggggcaggggcggggggttgggtgtggtgagggaggggacatatcctagggttttcaaataaaacaatcagaaaaaaaaaaaaaaatgccccccgggggggg

SEQ ID NO: 983 - DNA, 1732 bp, Homo sapiens
  misc_feature (1568)..(1568): n equals a,t,g, or c
  misc_feature (1631)..(1631): n equals a,t,g, or c
  misc_feature (1673)..(1673): n equals a,t,g, or c
  misc_feature (1701)..(1701): n equals a,t,g, or c
cttttatggcgttctttgtttttgaaacgctcaccgcgcaacgtttacacccaatgcaatatttgctggtggggctttcattggtgatgttttatttgctcttgctggcgctttctgaacataccggttttaccgtggcatggataatcgccagtctgattggggcgataatgaacggtatttatttgcaagcggtattgaaaggttggtgcaacagcatgttgtttaccctcgcgctgttgttgctggatggtgtgatgtggggactgctcaactctgccgatagcgcgctgttgttgggaaccagtgtgctggtggtggcgctggccggcatgatgtttgtracccgtaatatcgactggtatgcgttttcactgccgaaaatgaaagccagtaaagaagttacamcggacgatgagttacgtatctggaaataaggttgaaaaataaaaacggcgctaaaaagcgccgttttttttgacggtggtaaagccgattaatcttccagatcaccgcagaagcgataaccttcaccgtgaatggtggcgatgatttccggcgtatccggcgtagattcgaaatgtttacgaatacggcggatcgtcacgtctacagtacggtcgtgcggtttcagctcacggccggtcattttcttcagcagttcagcacgggactgaattttgcctgggttttcacagaagtgaagcatggcgcggaactcgctgcgcggcagcttgtactgctcgccatcagggccgatcaacgaacggctgttgatgtccagttcccaaccattgaacttgtagctttcaacgctacgacgttcttcgctgacagtacccagattcatggtacgggacagtaggttgcgtgcacgaatcgtcagttcacgcgggttgaacggtttggtgatgtagtcatctgcaccgatttcgaggccgagaattttatcgacttcgttgtcacggccagtcaggaacatcaacgcaacattcgcctgctcgcgcaktkcacgcgctaacagaagaccgttcttacccggcagattgatatccatgatcaccaggttgatgtcatattcagagaggatctgatgcatttccgcgccatctgtcgcttcgaaaacatcatagccttccgcttcgaaaatacttttcaacgtgttgcgtgttaccaactcgtcttcaacgataagaatgtgcggggtctgcatgtttgctacctaaattgccaactaaatcgaaacaggaagtacaaaagtccctgacctgcctgatgcatgctgcaaattaacatgatcggcgtaacatgactaaagtacgtaattgcgttcttgatgcactttccatcaacgtcaacaacatcattagcttggtcgtgggtactttccctcaggacccgacagtgtcaaaaacggctgtcatcctaaccattttaacagcaacataacaggctaagaggggccggacacccaataaaactacgcttcgttgacatatatcaagttcaattgtagcacgttaacagtttggatgaatcatcgtattctaatggctagcttcgtcacntatttaataatccaactagttgcatcatacaactaataaacgtggtgaatccaatgtcgaganttaatttttataaaattaacccaaggtaaaccgaaagggaanggtaggccattttttaaccaactccaancggttaggttaccggttccggggaaaatagg

SEQ ID NO: 984 - DNA, 1608 bp, Homo sapiens
  misc_feature (1601)..(1601): n equals a,t,g, or c
  misc_feature (1604)..(1604): n equals a,t,g, or c
gaattcggcacgaggatttggaggggacaaacatccaaaccatttaagtcacagcactttactccgcagtgtgaataacacaggcattctcctacataatcacagtacagttatcatactctggaaattgaatatcatctaatatactttccatacccagattttcttagatttcccaatgatatttcttactgtcctccctttagccttcctctttctccattcaggattctaccattacatttcattttcatgtctcttcagtctctctttagctttgtttttctttcttgatgttgccacttttaggaggccaggccagttgttttgtgaaagatctgttctctttgatatgtttcattttggatttgtttcattgtttttgcatgaatggattcaggctaaacatttttgggcaggactgtttattgtattacctagtgatgtgttcttttcagtccatcatctggaggcacctgatggcagttttcccaatattgcgaaattaagtttgattattttgttaaggtagtgtccaccagatctctccattttaaagacatccttttctctaattactcagtggactgtagagtgatgctttgaaactgaataactaacactccctaactcagtgatttagcacccgttgattttttttttttgcctgaatcaaatattattatagtagttttaaatggkgattttccatttctattcttttgttagctgccattcttctataattttgtctttatattttactgggtgttaagattgctattccagctttcctttgtcttttacaccttttcccattcttttatttttttccatccctttttgtcctgttttccaatagatggatagaattttctttctctggtttaaaggttatacatttgtgtgtgtgtgtgtattcttagccatttgcccttaaaacatagagatggttattcctgttgattaaaaaaaactcagtaatgttactatcttctctttaataagataggtactttatttcattctgtgttcttgggtgaggtctcccctcacccagtcaagttgatgttaatctagaatttttagttttttaaattatcgatatactttctgtcttttcctttttttttcactctctctgtatttgtgctttccccctttactctctttcccttcattccttctttctcactttcttcttctatttttcactcttgggtagattatcttttagaaaacagcaagatattatataatttactttatattctctttccaaatgattaaagtaataattaaaaatttttgatatgtgtgtatgcaaggataggaatcctcttgtaagtggaagaactctaccacatgcatgagtcattagtgtgttaaacactgggaagtggctttaggtccagctgggtgctctgaagaaggtaggtttcttcagttctttatgttaactgtctccttaccttaaaaaaggagtgaagaatactgactgcagaggttttgtgaggattccggtaacacagaagcatagaactggaaaagaatattaatatttgccaaaaaaaaaaaaaaaaaactcgagggggggcccnaanccaa

SEQ ID NO: 985 - DNA, 1118 bp, Homo sapiens
ggcacgagctacctttctgcctgctttgctggctgcaacagcacgaatctcacgggctgtgcgtgcctcaccaccgtccctgctgagaacgcaaccgtggttcctggaaaatgccccagtcctgggtgccaagaggccttcctcactttcctctgtgtgatgtgtatctgcagcctgatcggtgccatggcaagacaccctcagtcatcatcctcatcaggacagtcagccctgaactcaagtcttacgctttgggagttctttttctcctccttcgtttgttgggcttcatccctccacccctcatcttcggggctggcatcgactccacctgcctgttctggagcacgttctgtggggagcaaggcgcctgcgtcctctacgacaatgtggtctaccgatacctgtatgtcagcatcgccatcgcgctcaaatccttcgccttcatcctgtacaccaccacgtggcagtgcctgaggaaaaactataaacgctacatcaaaaaccacgagggcgggctgagcaccagtgagttctttgcctctactctgaccctagacaacctggggagggaccctgtgcccgcaaaccagacacataggacaaagtttatctataacctggaagaccatgagtggtgtgaaaacatggagtccgttttatagtgactaaaggagggctgaactctgtattagtaatccaagggtcatttttttcttaaaaaaagaaaaaaaggttccaaaaaaaaccaaaactcagtacacacacacaggcacagatgcacacacacgcagacagacacaccgactttgtcctttttctcagcatcagagccagacaggattcagaataaggagagaatgacatcgtgcggcagggtcctggaggccactygcgcggctgggccacagagtctactttgaaggcacctcatggttttcaggatgctgacagctgcaagcaacaggcactgccaaattcagggaacagtggtggccagcttggaggatggacatttctggatacacatacacatacaaaacagaaaacattttttaaaagaagtttcctaaaataaaaaaaaaaaaaaaaaaaaaaaaaaaaaaaaaaaaaaaaaa

SEQ ID NO: 986 - DNA, 1813 bp, Homo sapiens
agtaggatccagtctgtggggctcatttgagggagaatgagcacggggcttttggaggctgcagcctagggccaagggatggaggctcacctgagtgcaggttaggcagtgaagtgtctccccggaaaccaagctagagtgccccacctgctcggccctgccttctcggatcggatccagcacatccaggcttctcctcctcccgaggaaccagtggtgacagctgaggccatgtgagtaggatcctgaatgaggctttatctctggctgttcgtcccatcgtccaccgtggcaccagctccctcagccagccgggatgggaccagcgactgagagagccagaggcagagaggtgagggtgaccatatcctggactgtgagaggaatgggactctgggcctgtagctgccaagcaggtggcaggtgctccaggctgtgatctgcaccctctgacccctgacattgacctcctaccctgacccctgcctgaccaagccatgtctgaacaggaggctcaagccccagggggccgggggctgcccccggacatgctggcagagcaggtggagctgtggtggtcccagcagccgcggcgctcggcgctctgcttcgtcgtggccgtgggcctcgtggcaggctgtggcgcgggcggcgtggcactgctgtcaaccaccagcagccgctcargtgaatggcggctagcaacgggcactgtgctctgtttgctggctctsctggttctggtgaaacagctgatgagctcggctgtgcaggacatgaactgcatccgccaggcccaccatgtggccctgctgcgcagtggtggaggggccgacgccctcgtggtgctgctcagtggcctcgtgctgctggtcaccggcctgaccctggccgggctggccgccgcccctgcccctgctcggccgctggccgccatgctgtctgtgggcattgctctggctgccttgggctcgcttttgctgctgggcctgctgctgtatcaagtgggtgtgagcggacactgcccctccatctgtatggccactccctccacccacagtggccatggcggccatggcagcatcttcagcatctcaggacagttgtctgctggccggcgtcacgagaccacatccagcattgccagcctcatctgacggagccagagccgtccttcttctcacagcggcctcagcgtccccagagccgagccagggtgtgagtgcatgtgaacgttgagtacacatgagtgcgtgtatgcccccaggctgggtcagctcttctgtggattgcatggcgtgtgattaaaagcccatgtgttcccacacatccacatcatgggaaggttaatgtgtgcctccttggaactgggtgttggtgtccatggaacttcctctctgtatctcaggtcagtaggcgcagaaacgcctcatgatgaagattcttgagccccatttccaagacccctcacatccaatcctgtcctgtaacatccatcaaggatttccataggggtgactggtgcccacccaagactgcaccagtgcctgctcattgaggagagtaactgctggccaggcagaaagaatatgggctctgcaatgagacagacctggaggggactctcccgttgagcactagcagctggaggagttgggagttcatggctatcatggttgtgttaatcgattgtggggatgaaatgtcattgtgtatggaaggcggggctcatggctgattggcaataaaatggcggctgccgttgtcattgtctccaaaaaaaaaaaaaaaaaaaaaaaaaaagtcgtatcga

SEQ ID NO: 987 - DNA, 637 bp, Homo sapiens
  misc_feature (529)..(529): n equals a,t,g, or c
  misc_feature (605)..(605): n equals a,t,g, or c
gataatcccaatcgtcccctggcagaatgccagttttgccataagaagtttacaaggaatgactacctcaaagtgcacatggacaatatccatggtgtagctgacagctaataggggctgtaaaggaattaaactattcagaagggctcctaatatgaatcccagatttttatcacctgatcagcataacagaagtagccaaaagtgacttactggtctcatagttcttatttgcctacatttagagtctgtagatgcatatgcaaccaaaaaaaagtcttacttttaacaagaaatggtataaatggaaaaaaatacaactccatagccttgcaaaatgcaacttgtgctctgtcttataaaaatggagaaaggagtcatggctctctttcttggccatccctctgtaatgaagtttataatatacttycctaataggcctttttattttattgktattctttgkgtgtctgtgtgtctgtgtgtctgtatgtgtctgtgtgtgtgcactcacttgcaaatgccagtngttgcagctggttttaccaatttaaatagaaataaatcaagatatccaactatttctttgcagatgagggtaagantaagtttatcaaagtctcaagttttgataggg

SEQ ID NO: 988 - DNA, 1205 bp, Homo sapiens
  misc_feature (1202)..(1202): n equals a,t,g, or c
aggaagcaatcctcttacctccgcttcccaagcagctggggccacagatggagttttgctctagcctgggggagaaagtgaactccctctcaaaaaaaagaccactctcagtatctctgatttctgaagatgtacaaaaaaatatagcttcatatatctggaatgagcactgagccataaaaggttttcagcaagttgtaacttattttggcctaaaaatgaggtttttttggtaaagaaaaaatatttgttcttatgtattgaagaagtgtacttttatataatgattttttaaatgcccaaaggactagtttgaaagcttcttttaaaaagaattcctctaatatgactttatgtgagaagggataatacatgatcaaataaactcagttttttatggttactgtaaaaagactgtgtaaggcagctcagcaccatgcttctcgtaaaagcagcttcaattatccactggggttatcttttgacaacttgccattatctgatgttacacaattcaatagcaagcaagtttgagacaatcgcagtttaaaagcatgaaccatttaacaaaaagtggaataattaaagataaagcacttcttcccaaagggaattatcacctagtgaaaaattatgcatttcatctactcagttaccgactgcaagtctctcctcgctctagctctcaagctttgggtgaatattcctgtgaaatatatcttcaacttgaaagttcatactccaatcaaaaactccttttactgagtttgcagtactgtatttgcactgtttgtattcctctgggcccttattgctacttttgctttcctttgttacacagattttgtgttgcactttttctccagaggggtgttgtagagccttggttgtatgaataataccagtggtagtgtccacgggtctaatgtaagcccatttggcatcactcctctcctctctcttgagaggatttcttgtgcacagagtatgaagcagttgtggagcgctgtgcctttgtcaagataccatcttgtttgatgatttctttctttgctgttttttcttcaaaatgttagtaagctctgtcatgcttctagcaaattgtaagactaattatttgtttccacctcataacctgttgcaataaatattacttctcatacaaaaaaaaaaaaaaaggggggcccttttaaagggaccantta

SEQ ID NO: 989 - DNA, 1855 bp, Homo sapiens
ggagactgcctggttctctctgatgttcaaggtggtggggttctgagacacttgggggaattgtggggatattctagccaccagttctcttcttcctttgctaaattcaggctgcaggctccttccatccagataactccatcctgtcgagtaggctctttctgaccctcagaaatacattgtcctttttcctctttgcccatttttcttccctctcttcctccccatgagaagtctgcttgtagtattagaatgttattgttgactctctcccaagtgccttgatctttgtaatatctcctgttgtttctatgatataggagctaggggaagggggttgtttgccttcttcaggacctgactggacagatggacctggctcaagcaactactctggatgcactttgctgtgtgggatgaactaaaagtgtctgaattttgctgataactttataaaactcactatggcatgcttccctcctggtgggccctaggatggatgacactcaagatactacagatgtgggtgcaggcatgcacacacacgatggaatatggccattcctacacaggtggggtagagagtgggtcagcagcctggcacctcacagaggtgggacctaagaggactcatgattatgcagagaattggattgggtctctgtcatagattgagtaatctcttcccttacctcaattccatctccacccatctctacatctgggcacagcaacccagagatggccaaaagcattcaagcctgggggaagatgtttgactattgctgctcttcaccagaacctcacacctctcctgggactggaacccttcagtgggtgtgtggccagttttggaggctggaatgatgggccagggtgtaggattcattctccatgtaaagtttcctttcatcctgcctagccatccccaaggtttatttccagaagaaaggaatatctctacttggatcaattctggtcatttcaagaggatggaggcctcaagtgtgggaacttcccctactccctggatgtgtgtacctagcacacttccttctcccacccctttttccagttggatttgtttttctgttctcttctgtcctgtcttatactgcaactgtgtctcctaggggacagatggccttctttgtcatcttcactctccacccccagagaggagtcagagccataactcaatcactcagcccctccaaagatagttgatgtgtgataatctcataatgttgagaaccctgatgagatacattgtcttcctctccctacaatgcctctggggccaaggcacccattcttcttgctatcctccatcccccttgaggcttccactttttttttttttagacataaagctgggcatcagcaactggcctgtggtgatgcaaagctgctttgctctgtatctggctggactgatctgtctcacaagaagccatgaggccatagggagaagctccctctccccttcatcttctgctccaaaggtggtagcaagaggagtacccagttaggggttggagcccccatataacatcttcctgtcagaagactgatggatctttttcattccaaccatctccctttcccccgatgaatgcaataaaactctgtgacaccagcaaccattgctctttagaaatgggttttctgatcatatggctgatgtgttatgggcagtatggatgtcttcatttgttgcttctgtttttcatcttttttgttttattaataaaaatttatgtatttgctcctgttactataataatacagggaataaattattcaatccaaaaaaaaaaaaaaaaaaaaaaaaaaaaaaaaaaaaaaactcgag

SEQ ID NO: 990 - DNA, 1035 bp, Homo sapiens
  misc_feature (1033)..(1034): n equals a,t,g, or c
cggagatccagtgaaagagtgttcatctcagaatgttactatgtcatgtagtgaaggcttcaaaaacctattttaccgaacttacatgctttttaagaatgcttctggtaagagacgatttttgctctgtttgttactttttacagtaatcacttatttttttgtggtaattggcattsccccaatttttatcctttatgaattggattcaccactctgctggaatgaagtttttataggttatggatcagctttgggtagtgcctcttttttgactagtttcctaggaatatggcttttttcttattgtatggaagatattcatatggccttcattgggatttttaccacgatgacaggaatggctatgaccgcgtttgccagtacaacactgatgatgtttttagccagggtgccgttccttttcactattgtgccattctctgttctacggtccatgttgtcaaaagtggttcgttcgactgaacaaggtaccctgtttgcttgtattgctttcttagaaacacttggaggagtcactgcagtttctacttttaatggaatttactcagccactgttgcttggtaccctggcttcactttcctgctgtctgctggtctgttactacttccagccatcagtstatgtgttgtcaagtgtaccagctggaatgagggaagctatgaacttcttatacaagaagaatccagtgaagatgcttcagacaggtgactgtgatttaaacaaacaaaaaaaatctatgaatgcacatatcatataccatgacttctgaagactataaatgaattccacaatcagtgcttcactgagaaccaattttacctatcttttcttctaaactgaacagtcagagagacagctcctggctttagcttcttgtggtaccacgcactttgagcactttgtgcgtatcatgcaatatacttgcaataccacagaaccaattttcaaatacgcctcactttttagacttagaagaggaacctttaaacttaaggggggtaggaaggnnc

SEQ ID NO: 991 - DNA, 2104 bp, Homo sapiens
  misc_feature (7)..(8): n equals a,t,g, or c
cgtgcgnntatatgacttcttcctggcctgccacccactgatgccgatttactttgcagccgtgattgtgttgtatcgcgagcaggaagtcctggactgtgactgtgacatggcctcggtccaccacctgttgtcccagatccctcaggacttgccctatgagacactgatcagcagagcaggagacctttttgttcagtttcccccatccgaacttgctcgggaggccgctgcccaacagcaagctgagaggacggcagcctctactttcaaagactttgagctggcatcagcccagcagaggcctgatatggtgctgcggcagcggtttcggggacttctgcggcctgaagatcgaacaaaagatgtcctgaccaagccaaggaccaaccgctttgtgaaattggcagtgatggggctgacagtggcacttggagcggctgcactggctgtggtgaaaagtgccctggaatgggcccctaagtttcagctgcagctgtttccctgaaagccagagaagaccttcctcttacatcacattaaggtctcacccttccatggaaggattgggaggggtggaatttcctttattaaaagggtttctgtccagagttttttattcctgccaccctgccctgcccgtttgtgtttgcctttacttcagaggccartagcagagcctacctgacacagaggggacctgggggcctggcacagaatcttatgcctctcccagtgggcttttggatgggctctctgccacctccctggtgttggaggaagtgggtttctgaagcttgcagctgcttttgcaacctgctgggcctgggctgccctagttaccgggaacctcctagtcaccccatagaaggtgaactggaacatgggatgccctcttactgctcctgcttgcctgcatcagatggacacagaaggagggggctgctgctgaaggagtcaggcttgggatggagagcaagaggccaaaggactcgtctgggagcatgatcggcccctcttactagcagctccatcagctgatcagaaatcagagacagaagggaactaggttactcgttaaatcctacctattttcagcctagaaatcacatgggcgtttccagtcaagtgggaaggaagctcatttttagggcctagacctagactagttttgcctgcctttttttcctccctgctttcttctacaagccacacaacattgcttataaaaggtacttttattactatttttagaatatatacaccccatatgtaaattaccctcacttttaaagtaataatagttccttcacggaaaaaaaaatagttctcatcagaaggatgagcttctaagatcctgaattttactttctacttgattaacattttcgctttagccagagttgctatttgcaaacagctttccacttccaaagtgccactttctgaccggtttttcttcctgttttcctcaaatcatcctactcccaaataggcacccactcactaccttggcgtcgttttttgggtctgacttgtctcgtcaactgctggtctctcccacctggttggaaatgtcgttggaaacttgcaaagactctccagaccttagggaacaagaggcatcactcagtccttctgggacagcttccctgtaagcaaagccaggtttgttttagattcactctggcctgaaaaaaaaagtgccttttgctgctttaaaraattggggtatatggtatgaagcagccatgtacttgtattttcctggtctttcctgggcactcttctctcttggcagatgttttcttaaagtgaacacaccagaagcactctaccccaccatatccagtcctctttgcatgcctgttgtgtgcagggtggagggtgtcccacgtgccagagcagctgggagccctgtccgctgagttacactaagcactktattttattyatttatattatttttttttttctgggcattagagcagactccatctcataataataatacataataagctattattttctacctgatgtcatcaggtgttaatccacctctatatctgttggccagtgaaatactttgggctgggacgtt

SEQ ID NO: 992 - DNA, 646 bp, Homo sapiens
gtcgacttttttttttttttttttgatatttattatgtttattcataatttgattgcttgtttgtgcagtgcttagtggacagcacatctcagggagcctcccagagcctggggtggaatacggtcatggaccatacaggaagcttcaccagactgggaggctgagggccttccccgagcctttctgctgatagggaaggcagagaaactgagagcatcaccatttcttcagttagtgctttctcctttctgtaattcctgttagtcatcatcatcatcatcctctggaacaaaaatgtcatgttcctcaagtagagcagcaaagttcttgctaatgagtgtcccgacatagagaaaggggatcacaatggagaacacacggagaaggccgaaggacattttcaccggtttgggcaaaatggcgccgctgcgggtaacgatgactgacctcgacggtaccaggctccggcctgagccgctccatgcggcggagacatcgccatctttcctcaagctaggcccgctccggagagccccggacctgacgggtgccaatactagccagcgagccgctccggacgccatgcccccagctccgcccctcacccgggcacccgcaccccaccgcccagccctcgtgccgccc

SEQ ID NO: 993 - DNA, 593 bp, Homo sapiens
  misc_feature (520)..(520): n equals a,t,g, or c
  misc_feature (579)..(580): n equals a,t,g, or c
  misc_feature (586)..(586): n equals a,t,g, or c
caatggcaatccaccatcgtgcaggccaacctgcacaacagagtgatttgattaacgtcgcccaactgacggcgcaatattatgtactgaaaccagaagcagggaatgcggagcacgcggtgaaattcggtacttccggtcaccgtggcagtgcagcgcgccacagctttaacgagccgcacattctggcgatcgctcaggcaattgctgaagaacgtgcgaaaaacggcatcactggcccttgctatgtgggtaaagatactcacgccctgtccgaacctgcattcatttccgttctggaagtgctggcagcgaacggcgttgatgtcattgtgcaggaaaacaatggcttcaccccgacgcctgccgtttccaatgccatcctggttcacaataaaaaaggtggcccgctggcagacggtatcgtgattacaccgtcccataacccgccggaagatggtggaatcaaatacaatccgccaaatggtggcccggctgataccaacgtcacttaaaagtnggtgggaaagaacaggggccaaacgcactggttgggcccaatgggcctggaaaagggcnntgaaanccgtaat

SEQ ID NO: 994 - DNA, 2176 bp, Homo sapiens
aattcggcacgagccggcttttcgagtcagtgctgccgccgctgcccgcggctttgcagagcaggatgaatgtgatagaccacgtgcgggacatggcggccgcggggctgcactccaacgtgcggctcctcagcagcttgttacttacaatgagtaataacaaccctgagttattctccccacctcagaagtaccagcttttggtgtatcatgcagattctctctttcatgataaggaatatcggaatgctgtgagtaagtataccatggctttacagcagaagaaagcgctaagtaaaacttcaaaagtgagaccttcaactggaaattctgcatctactccacaaagtcagtgtcttccatctgaaattgaagtgaaatacaaaatggctgaatgttatacaatgctaaaacaagataaagatgccattgctatacttgatgggatcccttcaagacaaagaactcccaaaataaacatgatgctggcaaacctgtacaagaaggctggtcaggagcgcccttcagtcaccagctataaggaggtgctgaggcagtgcccattagcccttgatgccattctaggcttgttgtccctttctgtaaaaggggcagaggtggcatccatgacaatgaatgtgatccaaaccgtgcctaacttggactggctctctgtgtggatcaaagcgtatgcttttgtgcacactggtgacaactcaagagcaatcagtaccatctgttcactagagaaaaaatccttattgcgagataacgtggacctattgggaagcttggcagatctgtacttcagagctggagacaataaaaactctgtcctcaagtttgaacaggcacagatgttggatccttatctgataaaaggaatggatgtatatggctacctactggcacgagaagggcggctagaggatgttgagaaccttggatgccgccttttcaatatctctgatcagcatgcagaaccgtgggtggtttctggctgtcacagcttctatagcaaacgctactcccgggccctctatttaggagccaaggccattcagctgaacagtaatagtgttcaagctctgctacttaagggagcagcacttaggaacatgggcagagtccaagaagcaataatccactttcgggaggccatacggctcgcaccttgtcgcttagattgttatgaaggtcttatcgaatgttacttagcctccaacagtattcgagaagcaatggtaatggctaacaacgtttacaaaactctgggagcaaatgcacagacccttacccttttagccaccgtttgtcttgaagacccagtgacacaggagaaagccaaaacattattagataaagccctgacccaaaggccagattacattaaggctgtggtgaaaaaagcagaactacttagcagagaacagaaatatgaagatggaattgctttgctgaggaacgcactggctaatcagagtgactgtgtcctgcatcggatcctaggagatttccttgtagctgtcaatgagtatcaggaggcaatggaccagtatagtatagcactaaggtaggcactagcctcccttgggggaaggccactgaggagggtagaggaggcagtgagctgtgtcacaggagttatggaaacacacacacactttgtgtccatggttgaaagcagaataataatagtaatggtagaagagttatttgtgaattcatgacttctaaaaattttttcttaaaatatattaacaacattagagaactgtttcactcataaccatcccacaccactataacatctgtgttcatttgtatagctcatcttctgtccttgcccacacacacatatttttatagggctgtacctagtatatattttatattcttctttttcaaatcaaagtattgtaagtactttcccatgtttctatctactgtagtcattaagaacttgaggtctgaagttttgaatactaccttcaccacctgtgatcttgggcaagttactaacacatttccttgtctatatctagctaccttattagatattaaatgatcgaatgagggttaaatgattatttcatgtaaagctcttagccctgtgcctggtacatagtaaatgctaaataaatagtggtattcttactgtttaaaaaaaaaaaaa

SEQ ID NO: 995 - DNA, 1539 bp, Homo sapiens
cgcagcttgatggcgtcgggctggagagccgcagtcccggctgcagcacctgggagaaggcagaccgtgtgagggggcctgtggccccagcgtgctgtggcctcsgggagtgggaagtggaggcaggagccttccttacacttcgccatgagtttcctsatcgactccagcatcatgattacctcccagatactattttttggatttgggtggcttttcttcatgcgccaattgtttaaagactatgagatacgtcagtatgttgtacaggtgatcttctccgtgacgtttgcattttcttgcaccatgtttgagctcatcatctttgaaatcttaggagtattgaatagcagctcccgttattttcactggaaaatgaacctgtgtgtaattctgctgatcctggttttcatggtgcctttttacattggctattttattgtgagcaatatccgactactgcataaacaacgactgcttttttcctgtctcttatggctgacctttatgtatttcttctggaaactaggagatccctttcccattctcagcccaaaacatgggatcttatccatagaacagctcatcagccgggktggtgtgattggagtgactctcatggctcttctttctggatttggtgctgtcaactgcccatacacttacatgtcttacttcctcaggaatgtgactgacacggatattctagccctggaacggcgactgctgcaaaccatggatatgatcataagcaaaaagaaaaggatggcaatggcacggagaacaatgttccagaagggggaagtgcataacaaaccatcaggtttctggggaatgataaaaagtgttaccacttcagcatcaggaagtgaaaatcttactcttattcaacaggaagtggatgctttggaagaattaagcaggcagctttttctggaaacagctgatctatatgctaccaaggagagaatagaatactccaaaaccttcaaggggaaatattttaattttcttggttactttttctctatttactgtgtttggaaaattttcatggctaccatcaatattgtttttgatcgagttgggaaaacggatcctgtcacaagaggcattgagatcactgtgaattatctgggaatccaatttgatgtgaagttttggtcccaacacatttccttcattcttgttggaataatcatcgtcacatccatcagaggattgctgatcactcttaccaaggtgatactatgaccatgagtagcatcagccagaacatgagagggagaactaactcaagacaatactcagcagagagcatcccgtgtggatatgargctggtgtagaggcggagaggagccaagaaactaaaggtgaaaaatacactggaactctggggcaagagatgtctatggtagctgagccaaacacgtaggatttccgttttaaggttcacatggaaaaggttatagctttgccttgagattgactcattaaaatcagagactgtaaaaaaaaaaaaaaaaaaaagggcggcc

SEQ ID NO: 996 - DNA, 1833 bp, Homo sapiens
  misc_feature (40)..(40): n equals a,t,g, or c
ggcacgagccacataaaagatgtgttacatcagaattttnagagttataagcctgaagtacaggagctgatttgtgtggctgatcgtttgggatccctgatgcaatatgaaacacctggtttcctgccaaacaagagaatacacagagctatgggtttggccgcattggaggtcatgcaagccgtgcagcgtacatggaccaactcgaaagttcgaatgaatgggaagacacggttgatgcagtggagagacatgtttgacattgcagttaaatggagaaggattgctgacccagaccagcccgtgctgtggttagatcaaatgccagcacgaagtcttagcagaggttttaacaaccacattaatttaatcaggggtcaggtgatcaacatgagatacctagaatattttgagaaaatacttcattttattaaagacagaattcttgtttatcatggagctaataatcctaaaggattgctggaagttcgggaagccctggaaaaggtacacaaagtagaagaccttcttccgattatgaagcagtttaatactaaaacgaaggatgggttcaccgtgaacacaaaagttcccagccttaaagaccaagggaaggaatatgatggattcacaatcacgattacaggagacaaagttggcaatatattattttctgtggaaactcaaaccacggaagaaaggacacaattatatcatgctgaaatagatgcactttataaagatttgacagcaaaaggaaaagtattgattctttcatcagaatttggggaggctgatgctgtctgcaacttaatcttatccttagtttattacttttataatttaatgccactctctcgaggatccagtgtaattgcttactcggtcatcgtgggagcactgatggcaagtggaaaagaagtagcaggaaaaattcccaaagggaagttagtcgactttgaagctatgacagcccctggttcagaggcctttagcaaagtcgccaaaagctggatgaacttgaaaagtatttcaccttcttataagactcttccatcagtwtcagaaacgtttccaacgttaagatcgatgattgaggtgctaaacacagactcttctccacgttgtcttaagaaactctagttctgctgctgtatttatacaagtaaagggccggacctcttgcttcttaagttattttttaaaacatggaattataaagaaattaggtcctctattacttttggataccaatttttataggaattgaatacttgaaatcattttctttacttttctgaaccataatgaaaatcatgaaagaggctttcggggggaaaaagctacttgacttggagggaaagcgtatgtattagccggcagcctgttggttcccacttataaagtcatataactccttccttacagtaaaaaaaattttcctcaacaactaaaatataatactgaagatgaacaaaaacaaaaccaaataggagtgtttgtattcctttagagatctggatatttttcaaagacttgctttttacgcacattgtgatagagcatcttttgttgactcacgtaacctccatgtgtgggtcctttgttttattagaaccatggaagaaggttcctgggccatcagtatgtgttgcagagctcacagccaggaacacttattttgaacaatgcagacagtacttgccagagtcccaaatgctgaattattgaaccatgtttttttttcctttgttgaaaaaaataaaccagggtgatttctataaatcaccagtttttggcattgaaaaaaaaaaaaaaaaaaaaaaaaaaaaa

SEQ ID NO: 997 - DNA, 2881 bp, Homo sapiens
  misc_feature (1667)..(1667): n equals a,t,g, or c
  misc_feature (2865)..(2865): n equals a,t,g, or c
agggtaacattcaacaatctatccatctccggagaacttgaagctgttcagaatatggtatctactgttgaatgtgctcttaaacatgtctcagattggttggatgaaacaaataaaggcacaaaaacagagggtgagacagaagtgaagaaagatgaggccggagaaaactattccaaggatcaaggtggtcggacattgtgtggtgtaatgaggattggcctggttgcaaaaggcttgctgattaaagatgatatggacttggagctggttttaatgtgcaaagacaaacccacagagaccctgttaaatacagtcaaagataatcttcctattcrgattcagaaactcacagaagagaaatatcaagtggaacaatgtgtaaatgaggcatctattataattcggaatacaaaagagcccacgctaactttgaaggtgatacttacctcacctctaattagggacgaattggagaagaaggatggagaaaatgtttcgatgaaagatcctccggacttattggacaggcagaaatgcctgaacgccttggcgtctcttcgacatgccaaatggtttcaggcaagggcaaatggattaaaatcatgtgtaattgtcctccgcattctgcgtgatttgtgcaacagagtccccacatgggcaccattgaaaggatggccactagaacttatatgtgaaaagtctataggtacttgtaatagacctttgggcgctggggaggccttgagacgagtaatggagtgtttggcatctggaatactacttcctgggggtcctggtcttcatgatccttgtgagcgagacccaacagatgctctgagctatatgaccatccagcaaaaagaagatattacccacagtgcacagcatgcactcagactatcagcctttggtcagatttacaaagtgctggagatggacccccttccatctagtaagccttttcagaagtattcctggtcagttactgataaagaaggtgctgggtcttcagctctaaagaggccatttgaagatggattaggggatgataaagaccccaacaagaagatgaaacgaaacttaaggaaaattctggatagtaaagcaatagaccttatgaatgcactaatgaggctaaatcagatcaggcctgggcttcagtataagctcctatctcagtctggccccgttcatgccccagtcttcacaatgtctgtagatgtggatggcacaacatatgaagcctcaggaccatccaagaaaacagcaaaacttcacgtagcggtgaaggtattgcaggcaatgggatatccaacaggctttgatgcagatattgaatgtatgagttccgatgaaaaatcagataatgaaagtaaaaatgaaacagtgtcttcaaactcaagcaataatactggaaattctacaactgaaacctccagtaccttagaggtaagaactcagggccctatcctcacagcaagtggcaaaaaccctgtaatggagctcaatgaaaaaagaagaggtctcaagtatgaactcatctcagagactggtggaagccatgacaagcgctttgtaatggaggtagaagtagatggacagaaattcagaggcgcaggtccaaataagaaagtggcaaaggcgagtgcagctttagctgcctntgggagaaactgttttctggacccaatgcggcaaataataagaaaaagaagattatccctcaggcaaagggcgttgtgaatacagctgtgtctgcagcagtccaagctgttcggggcagaggaagaggaactctaacaaggggagcttttgttggggcgacagctgctcctggctacatagctccaggctatggaacaccatatggttacagcacagctgcccctgcctatggtttacccaagagaatggttctgttacccgttatgaaatttccaacatatcctgttccccactactcattcttttagcaaatgacagaagctaattcctattgaacaacaatacagtacaacacagaatgttagagaaaaagcctttttatcctgctttctttgaacacatacttgatcaaaattatttgtaaagaacatctttcctactttttgattttaacaaatgcaaatttagttctctaaaacttgaaaaaaaaaaaagaaaccagttctgtgaaaacggtacctcatttctggaaaataacttataccagcccttctgttctagggaaataaaagtctagcagttcaaagtttaagttttaagagacgtatcagattatgtaaaattaaatttgtgaaggatgtatagagtctcaaacactgatcacaaataaactgctttgttgtaacacagagtactgcctggttcctgatgcagtcactgattcttagttgattgatatgtatttgccccagggcactttaatttgggctgtagttattttttttaatacaatagagacttttcatttaactttaactttgtaaatattgaagtgtgtaataaagccaataaaatatgggtttgaatattgttttagcttattatttttgatatgttttggtatcaaattacaaggaattgaaaactaataacttagccctagaagcccattcacttgtaagcaaagtgctaaaacaaagcaaaggtgattgttagtttgagccagtctactcactttgtaagccctttgtactcctgttgtacaagggccatccccatgataaaggttccattctgttatttgagcattgcttattaaaatgatggcactacccagagatggggaaggagaatgtgattatcctagtttatgaatttccaagtttttaaaaataataaattaatcaatcaatcmcnaaaaaaaaaaaaaaaa

SEQ ID NO: 998 - DNA, 2060 bp, Homo sapiens
  misc_feature (1804)..(1804): n equals a,t,g, or c
  misc_feature (1991)..(1991): n equals a,t,g, or c
  misc_feature (2024)..(2024): n equals a,t,g, or c
  misc_feature (2053)..(2053): n equals a,t,g, or c
gcccaccacggcctctctcggcgaggaaactctggcctccgcttcctcctcctccgactcggacaccggcggagcctccccgcccccgcggaagaaaccccgccagcaacaatagcaacagcctgaatgtcaataacggggttcccggcggggcggccgccgcatcctcagccaccgtcgcagctgcctccgccaccaccgccgcctcctcttccttggccaccccagaactgggcagcagcctcaagaagaagaagcggctctcccagtcagatgaggatgtcattaggctaataggacagcacttgaatggcttagggctcaaccagactgttgatctcctcatgcaagagtcaggatgtcgtttagaacatccttctgctaccaaattccgaaatcatgtcatggaaggagactgggataaggcagaaaatgacctgaatgaactaaagcctttagtgcattctcctcatgctattgtggtaagaggcgcacttgaaatctctcaaacgttgttgggaataattgtgaggatgaagtttttgctgctgcagcagaagtacctagaatacctggaggatggcaaggtcctggaggcacttcaagttctacgctgtgaattgacgccgctgaaatacaatacagagcgcattcatgttcttagtgggtatctgatgtgtagccatgcagaagacctacgtgcaaaagcagaatgggaaggcaaagggacagcttcccgatctaaactattggataaacttcagacctatttaccaccatcagtgatgcttcccccacggcgtttacagactctcctgcggcaggcggtggaactacaaagggatcggtgcctatatcacaataccaaacttgataataatctagattctgtgtctctgcttatagaccatgtttgtagtaggaggcagttcccatgttatacgcagcagatacttacggagcattgtaatgaagtgtggttctgtaaattctctaatgatggcactaaactagcaacaggatcaaaagatacaacagttatcatatggcaagttgatccggatacacacctgctaaaactgcttaaaacattagaaggacatgcttatggcgtttcttatattgcatggagtccagatgacaactatcttgttgcttgtggcccagatgactgctctgagctttggctttggaatgtacaaacaggagaactaaggacaaaaatgagccagtctcatgaagacagtttgacaagtgtggcttggaatccagatgggaagcgctttgtgactggaggtcagcgtgggcagttctatcagtgtgacttagatggtaatctccttgactcctgggaaggggtaagagtgcaatgcctttggtgcttgagtgatggaaagactgttctggcatcagatacacaccagcgaattcggggctataacttcgaggaccttacagataggaacatagtacaagaagatcatcctattatgtcttttactatttcaaaaaatggccgattagctttgttaaatgtagcaactcagggagttcatttatgggacttgcaagacagagttttagtaagaaagtatcaaggtgttacacaagggttttatacaattcattgcatgttttggaggccataatgaagacttcatcgctagtggcagtgaagatcacaaggtttacatctggcacaaacgtagtgaactgccaattgcggagctgacagggcacacacgtacagtaaactgtgtgagctggaacccacagattccatccatgatggccagcgcctcanatgatggcactgttagaatatggggaccagcaccttttatagaccaccagaatattgaagtgagaaagatgactaattgctctcagttaagtgattctctgtggaggagggttatcggagtagcatgtatggtttgaaaaagtatattccctacacttttatctttgtggtacagactgtagaaggnttgccacatcttactggcggaggaatgcagtancatggatagttgatggtgaatttggacanacgactt

SEQ ID NO: 999 - DNA, 4339 bp, Homo sapiens
  misc_feature (405)..(405): n equals a,t,g, or c
ggcgactacccgaggaggctgacctccagcccgggcgcccggttcagcgccgccccggccggcgccggtgcctgccaggcactcagggaggcgggggcgcagtggaggaggcggcgccatcgcgaagmgagcgcctcgcccgcactcagccttgccaccccgcccgcagtccaggctggactgggcggcatttgccgaggctcctcggccaggccccgtccgcccgagccgcgctgagacccgggcagcggccgcgtggagaggaggtggcagcggcccgggaggccgragccaagccagcgacccaccatggagacccgctacaacctgaagagtccggctgttaaacgtttaatgaaagaagcggcagaattgaaagatccaacagatcattaccatgcgcansctttagaggataacctttttgaatggcacttcacggttagagggcccccagactccgattttgatggaggagtttatcacgggcggatagtactgccaccagagtatcccatgaaaccaccaagcattattctcctaacggctaatggtcgatttgaagtgggcaagaaaatctgtttgagcatctcaggccatcatcctgaaacttggcagccttcgtggagtataaggacagcattattagccatcattgggtttatgccaacaaaaggagagggagccataggttctctagattacactcctgaggaaagaagagcacttgccaaaaaatcacaagatttctgttgtgaaggatgtggctctgccatgaaggatgtcctgttgcctttaaaatctggaagcgattcaagccaagctgaccaagaagccaaagaactggctaggcaaataagctttaaggcagaagtcaattcatctggaaagactatctctgagtcagacttaaaccactctttttcactaactgatttacaagatgatatacctacaacattccagggtgctacggccagtacatcgtacggactccagaattcctcagcagcatcctttcatcaacctacccaacctgtagctaagaatacctccatgagccctcgacagcgccgggcccagcagcagagtcagagaaggttgtctacttcaccagatgtaatccagggccaccagccaagagacaaccacactgatcatggtgggtcagctgtactgattgtcatcctgactttggcattggcagctcttatattccgacgaatatatctggcaaacgaatacatatttgactttgagttataatatggttttgtgacttatgagctgtgactcaactgcttcattaaacattctgcattgggtataatctaagaattgtttacaaaaagattattttgtatttacccttcattcctttttttgatccttgtaagtttagtataaatatatctagacattcagactgtgtctagcagttacgtcctgcttaaagggactagaagtcaaagttccttgtctcactatttgatctgctttgcagggaaataacttgttttttctcatgtttcatcttctttttatgtaaatttgtaatactttcctatattgccctttgaaatttttggataaaagatgatgttttaagttccaatgagtattactagttactcaataccacttattgagtactctgtttctacgtatgtagaatgtatagggatagaagagttgaaaagggaaagcaaaactcctcaagtagcttccttaaaatgtcattcataggagatgtactggaattgctcattctgtgactttatttgtgtcctaaacattcttcagtgaaaataattttatttcagtcaaacatttatgaggaaatgagatcacatctttgtcactggatgctacttgaagagggagtactttgtaaccactttgatatgctgttatcaccaccccctgccctctgctgccataatcacacaaatttaaaaagaaagaaaacagtcttccatagatttttaaggaagaaagggcccaagccaggagatcgcttggttttcttccagaagttaaatggggggatctgaagatttgaatgtttggtctgctttgaaatgtatgtcttttgggatgtattatatgcctagctttataatcagtataaattttaattattccaggaatatgcataatattgaaatatttcatgtcctattttaatagaaaacctcagggcccaagtaacagtgatagaagttagaaaaacctttacttagaattgtccacctagtcagagcccaagaaagaattttcagtggaaaaatcaatatataacttagtgctagctagcgccacagactctagtagataatattatcatcataatggctggtgaaaccatataatcacagaaaaacattgccttcagcatgttcagttcgcagcactgagggcactcttgagggtgttgttaatgaagatttaatttttaaatacaggtggttccaagctttcaaataggttatgctccaaaagtgttatttgtaagttaatttttttacaagtcaaacaatgttggaagtggtatttaggttctagatcggtccacgaaagttagcccatatgtatatcttgaatagtataggggagggtattcataaagtccttatgtggttttaactaagtgaaattatggacaagagaaataattgtaaaatcgtcttaaaggcaaatttaatttttactcctgtttatgggacattcgttctattaactgtcagacacaatttctgttttcatctgagagccagttttcctttatttctacatctaaaataagaacatattgtacactattatataatacagaattgtcttaaactttaataaattcgcattttaaaggtgtttacagattattttttatatctgtagctgaatttgttaaagtctaaaaagctcaaggactttatgaagatctcattatatgaggaaaatcataggttaccattttataactctattgccataagaaaatacactctaaaatcttgatttgaaacatattagaaaccttgattcagtgctcagtggtctcctagtaagaagtcaccgacggtagcgtcatatgagaagaaagaaatccccaccacctcaacctctgctgagattgtgtgctaggaacagccttccctccgtttcccctcagtcaaacttgagccagcctctggatcgatgtgatcttattgcatgtttccatggggtgtacctatactttaagccaatcctgctgcattcactgctaagttaaataaaaagccaagaagattttgcactgtgcagatcctttgctatctgacttgcatctcttcccccacctgtcagctagccacctgcttgtttgtgttgggatattttttagcacctgaagcaccatctgaaaggggcaccattttcttcttccctttgatctcacatatgctccctaaaaatccttaagttgtcaatctgatccccagtgtgaggttaatgagcaaaattggtctttggggccctttttgtccaagccccactgaaaggcctcttcagaaaactattatctttaaagccctactttaactccttaattccagcatacagctaaaactggatgtatattctggcaagtaaaggctgaggactcctctttaatcctcagatctagataactcatgacattttatttgaccaacatagcacatgatgagatatcaaggtaattaaaatagcatgcttgaaaaaaaaatacgtaatctgtttcacctgtaactgtttaagccaataaacttttcaaaatttatgtaatgtggggcttttatgtagcactttacgttttcatgctgcttattgttttattctactgaaaaaaatgaatttcaagattctcaacttttttaatttcaaaaattgtttattgttttgactataggaatacaaaatttcctattttgggagaataagaactctttttgtcatttttggctatgaataaactttctggtcttttgagaccacccatttttatagatcagaatcagaaaacaggtaaacctcactcacacatttggactcatttgaacaaaaatctaggccaaaatactgaaaagcctatgtgtttttttaattggaagtatatgtaaggttaatgcatttagtgaacgtgactaacaaagactaatgtgcacattaacagatgtactttttaaggttttatgggaggctgtgcattgctcaaaagctgttgggaacgccttctgaacagttgccttcagaactagtttgagctgctcaataaaaccagtgactttactcataaaaaaaaaraaaaaaaaaa

SEQ ID NO: 1000 - DNA, 1652 bp, Homo sapiens
gggcagcttctggggacagccacaaggagggtaccaggggtcccccgccgctgcctacagacatgcgccagatcagccaggactttagcgagctaagcacccagctgacgggtgtggcccgggacctgcaggaggagatgctgccaggaagctctgaggattggctggaacccccaggggcagttgggcgaccagccacagagccccccagggagggcacaaccgagggggatgaggaggatgccacggaggcatggcgcctgcaccagaagcatgtctttgtgctgagtgaggcagggaagcctgtgtactcccgctatgggtctgaggaggcactttccagcactatgggtgttatggtggccctggtgtccttcctggaggcagacaagaacgccatccgctccatccatgcagatggctacaaggtagtattcgtgcgccggagcccgctggtgctagtggcggtggctcgtacgcggcagtcggcacaagagctggcgcaggagctgctctacatctactaccagatcctaagccttcttaccggtgcgcagctgagccacatcttccagcagaagcagaactatgatttgcggcgcctactctcgggctcagagcgcatcaccgacaacctgctgcagctcatggcacgagaccccagcttcctgatgggggcggcacggtgcctgcccctggcggcggccgtgcgcgacactgtgagcgccagcctgcagcaggcgcgtgcgcgcagcctggtcttctccatcctgctggcccgcaaccagctcgtggcactcgtgcgccgaaaggaccaatttctgcaccccatcgacctgcacctgctcttcaacctcattagttcctcctcgtcctttcgcgagggcgaggcctggacgcccgtgtgcctgcccaaattcaacgcagccggcttcttccacgcacacatctcttacctagagcctgacactgacctctgcctgctgcttgtctccactgaccgtgaggacttctttgcagtctctgactgccgccgccgcttccaggagcgccttcgcaagcgcggagcccacctggccctgcgagaggcactgcgcacaccctactacagcgttgcccaagtgggcatccctgacctgcgtcacttcctctataagtcaaagagctcgggactcttcaccagccctgagattgaggccccatacaccagtgaagaggagcaggagcggctgctgggcctctaccagtacttgcacagtcgtgcccacaatgcctctcgcccactcaagaccatttactacacgggccccaacgagaacctcctggcctgggtgacaggcgcctttgagctctacatgtgttacagccccctggggaccaaggcgtcagccgtcagtgccatccataagctgatgcgctggatccgcaaagaggaagaccgcctcttcattctcacgcccctcacctattgatgggaatgtgtgcgggctcagccttcctggacacactaggtgtgggaagccataggagcctccagatgggggctggcctctcttgcccagccagcgggcagggactgtgggttggtgaatgcattaaagtgctttggggaagacaaaaaaaaaaaaaaaaaaaaaaaaaaaaaaaaaaaa

SEQ ID NO: 1001 - DNA, 2045 bp, Homo sapiens
  misc_feature (975)..(975): n equals a,t,g, or c
  misc_feature (1255)..(1255): n equals a,t,g, or c
ggaatctctggcaggtctgtgtgttctgtcacttgctcgcccgagcagtggctttgctggtcatcccggtcgtcctgttacttactgttcttctacgtccacttgattctagtcttccgctctgggccccacgaccaaatcatgtccagtgccttccaggccagcttagagggaggactagctcggatcacycagggtcagccactggaggtggcctttgggtcccagrtcactctgaggaacgtctttgggaaacctgtgccctgctggcttcattcccaccaggacacctaccccatgatatatgagaacggcgaggcagctcccaccagcaacaggtgacctgttaccccttcaaagacgtcaataactggtggattgtaaaggatcccaggaggcaccagctggtggtgagcagccctccgagacctgtgaggcacggggacatggtgcagctggtccacggcatgaccacccgctccctgaacacgcatgatgttgcagcccccctgagcccccattcacaggaggtctcctgctacattgactataacatctccatgcccgcccagaacctctggagactggaaattgtgaacagaggatctgacacagacgtctggaagaccatcctctcagaggtccgctttgtgcacgtgaacacttccgctgtcttaaagctgagcggggctcacctccctgactgggggtatcggcaactggagatcgtcggggagaagctgtcccggggctaccacgggagcacggtgtggaacgtggaggagcaccgatacggcgcgagcaggagcagagggagcgggaacgggagctgcactcacctgcgcaggtggacgtcagcaggaacctcagcttcatggcgagattctcggagctgcagtggaggatgctggcgctgagaagtgatgactcggaacacaagtacagctccagcccactggagtgggtcaccctggnacaccaatattgcctactggctgcaccccaggaccagcgctcagatccacctacttggaaacatagtgatctgggtttcgggcagcctcgctctggccatctacgccctgctgtccttgtggtacctgctccgacggcgaagaaatgtccatgacctccctcaggatgcctggctgcgctgggtgctggctggggcgctgtgtgccggtggctgggcagtgaactacctcccgttcttcctgatggagaagacactcttcctctaccactacctgcccgnactgcaccttccaaatccttctgctccctgtggtcctgcagcacatcagcgaccacctgtgcaggtcccagctccagaggagatcttcagcgccctggtggtggcctggtactcctccgcgtgccacgtgtccaacacgctgcgcccactcacctacggggacaagtcactctcgccacatgaactcaaggcccttcgctggaaagacagctgggacatcttgatccgaaaacactagaacaagagtgtggcaaagaacacccgtgctggggtcgggacgaggttgaagggtcttggtcaatacacagggagtatttcagaggccagcgtaggagtcatcgacaacgaaaagccgagaacccagggccagcagtggagcctcagcagaccagggcctggtccttgctaattgctgcagggtggagtttgatctggcagacccgatcctccttcatgaacacccagcaacctgagcaagtcccggccctgccctcagcgagcccggcaggcgtcccgggacagctcagtgttggagggccacctgaaccacgagccagggctggggcttgcatgtcattgtctatgacagcgtcaagactggcccttggcaccgtgctgtgtggaaaccctcccctctgagactccactgagacgtggctgagtgaaatcttcctcgtcagtggtcaaggtgtgtcatccatacagctccatgcctttgtcttttttaaatgtaattaaaaaaggaaccaactggcaaaaaaaaaaaaaaaaaaaaaaaaaaaaaaaaaaa

SEQ ID NO: 1002 - DNA, 1239 bp, Homo sapiens
ctacttttttcttaccacttaatagaagaacctgtccctagaggcgacttcattgctatggatgtggagtctctgaactcttaataggatgcagcctcacatacataatgtcacccattttatgttgatgaaaacattacaagttttcatcattgggtatgtgttgatgttcacagacagtacttgggcccattaggttttcgcgtctggtcttagagcatgtgtattcatctcagcgtgaatacctcagccagtcttatgaataggaggctatgtatgggcagggaatagattagattagaacactcgcacaagatgaccacatatagaagcagaaagccccaaattccctgggaactgttttttctctagtagctgaatataaggaaatatgtctaatggacaccagttaatactttttaaaactactctttaaaaaaaaaatacgttccccttggttaactgattttttaatccagggtggacattttttcaacctttattaaaaagacaaataaactattttgtagaagatcagactcctacttaactggaagagaaatgtctattaaatgtctctcctctttctctgggtcaagaccatgtaattttatgcttcagagatgaagatactgtttgtttacaaagagtttagtttttaagacatccaaaactctatgctagagcaaaaatcaaatagcaaaggacactagccagaaaatacagtgtgtgtgtgtgcacctgtgtgcctgctgaacaacttgacagtgtaacagataaggtaactgaagatggtggatatttgaattgtattagcttaatgtctacatatctttggccaaaactctattgtcatattagaaacatgttatctttttcatgtttattagtaatttatttttgattctttgttttctttttcgtccaactaaaacaactgtaatgtacttgatacatttatatcaagttctaaagtatttagacaaatccaaatactttgtttttagttttttcctcctttccatcctgttaaccacagtgaaacgctgcagtattttgatttggtcagtgctacggaggaagaccatgaaagctgaattggtctgtgccacccagagtaaacctcttctcttcttctggaaagatggcgtgatgtttttcaaggattctaataaatatcccgcagtcatctcctgaaaaaaaaaaaaaaaaaaaaaaaaaaaaaaaaaaagggcggcc

SEQ ID NO: 1003 - DNA, 2012 bp, Homo sapiens
ggcacgaggcgcccttcctcttctgtgcgctcgggctcctggtcccggctccccggttaccggggcgcgagtatgaccacaatggcggccgccaccctgctgcgcgcgacgccccacttcagcggtctcgccgccggccggaccttcctgctgcagggtctgttgcggctgctgaaagccccggcattgcctctcttgtgccgcggcctggccgtggaggccaagaagacttacgtgcgcgacaagccacatgtgaatgtgggtaccatcggccatgtggaccacgggaagaccacgctgactgcagccatcacgaagattctagctgagggaggtggggctaagttcaagaagtacgaggagattgacaatgccccggaggagcgagctcggggtatcaccatcaatgcggctcatgtggagtatagcactgccgcccgccactacgcccacacagactgcccgggtcatgcagattatgttaagaatatgatcacaggcactgcacccctcgacggctgcatcctggtggtagcagccaatgacggccccatgccccagacccgagagcacttattactggccagacagattggggtggagcatgtggtggtgtatgtgaacaaggctgacgctgtccaggactctgagatggtggaactggtggaactggagatccgggagctgctcaccgagtttggctataaaggggaggagaccccagtcatcgtaggctctgctctctgtgcccttgagggtcgggaccctgagttaggcctgaagtctgtgcagaagctactggatgctgtggacacttacatcccagtgcccgcccgggacctggagaagcctttcctgctgcctgtggaggcggtgtactccgtccctggccgtggcaccgtggtgacaggtacactagagcgtggcattttaaagaagggagacgagtgtgagctcctaggacatagcaagaacatccgcactgtggtgacaggcattgagatgttccacaagagcctggagagggccgaggccggagataacctcggggccctggtccgaggcttgaagcgggaggacttgcggcggggcctggtcatggtcaagccaggttccatcaagccccaccagaaggtggaggcccaggtttacatcctcagcaaggaggaaggtggccgccacaagccctttgtgtcccacttcatgcctgtcatgttctccctgacttgggacatggcctgtcggattatcctgcccccagagaaggagcttgccatgcccggggaggacctgaagttcaacctaatcttgcggcagccaatgatcttagagaaaggccagcgtttcaccctgcgagatggcaaccggactattggcaccggtctagtcaccaacacgctggccatgactgaggaggagaagaatatcaaatggggttgagtgtgcagatctctgctcagcttcccttgcgtttaaggcctgccctagccagggctccctcctgcttccagtaccctctcatggcataggctgcaacccagcagagggcagctagatggacatttcccctgctcggaagggttggcctgcctggctggggaggtcagtaaactttgaatagtaagccagcctgtgtcctgtgtcctttgtgcaaattggagaggataggggaggacaaaaagggtgttgaaccccagacagatggggagcttgtgagatcccagagcagttttaacggakaaatcaagtccagtgagcttagtgattgcctagacacagtaggatgccgttattcagcctcctgggagatagtgggaaagaatgttctatcgctctggagccagcatggcttcagctcaggtgccaaacccatcttgtttcctcggaatactaagtgaatgtctagcatccattcacattctgtgggaacagggactggacaggcatacctcagatgctgtaggtttgcttccagactaccacaataaagcaggtcacaaatttaaaaaaaa

SEQ ID NO: 1004 - DNA, 1800 bp, Homo sapiens
cgggactgggctgcggcggttagtcctctcccggccgccgtcgcctccgacatattgcccgcagagctgcggcggcgaagggagagcaccggggggaggagatgggaggacgaagaggtcccaacaggacatcttactgtcgaaatccgctctgtgagccgggatcctcggggggctctagtggaagccacacttccagtgcatcggtgaccagtgttcgttcccgcaccaggagcagttctggaacaggcctctccagccctcctctggccacccaaactgttgtgcctctacagcactgcaagatccccgagctgccagtccaggccagcattctgtttgagttgcagctcttcttctgccagctcatagcactcttcgtccactacatcaacatctacaagacagtgtggtggtatccaccttcccacccaccctcccacacctccctgaacttccatctgatcgayttcaacttgctgatggtgaccaccatcgttctgggccgccgcttcattgggtccatcgtgaaggaggcctctcagagggggaaggtctccctctttcgctccatcctgctgttcctcactcgcttcaccgttctcacggcaacaggctggagtctgtgccgatccctcatccacctcttcaggacctactccttcctgaacctcctgttcctctgctatccgtttgggatgtacattccgttcctgcagctgaattgcgacctccgcaagacaagcctcttcaaccacatggcctccatggggccccgggaggcggtcagtggcctggcaaagagccgggactacctcctgacactgcgggagacgtggaagcagcacacaagacagctgtatggcccggacgccatgcccacccatgcctgctgcctgtcrcccagcctcatccgcagtgaggtggagttcctcaagatggacttcaactggcgcatgaaggaagtgctcgtcagctccatgctgagcgcctactatgtggcctttgtgcctgtctggttcgtgaagaacacacattactatgacaagcgctggtcctgtgaactcttcctgctggtgtccatcagcacctccgtgatcctcatgcagcacctgctgcctgccagctactgtgacctgctgcacaaggccgccgcccatctgggctgttggcagaaggtggacccagcgctgtgctccaacgtgctgcagcacccgtggactgaagaatgcatgtggccgcagggcgtgctggtgaagcacagcaagaacgtctacaaagccgtaggccamwacaamgtggctatcccctctgacgtctcccacttccgcttccatttctttttcagcaaacccctgcggatcctcaacatcctcctgctgctggagggcgctgtcattgtctatcagctgtactccctaatgtcctctgaaaagtggcaccagaccatctcgctggccctcatcctcttcagcaactactatgccttcttcaagctgctccgggaccgcttggtattgggcaaggcctactcatactctgctagcccccagagagacctggaccaccgtttctcctgagccctggggtcacctcagggacagcgtccaggcttcagccaagggctccctggcaaggggctgttgggtagaagtggtggtgggggggacaaaagacaaaaaaatccaccagagctttgtatttttgttacgtactgtttctttgataattgatgtgataaggaaaaaagtcctatttttatactcccaamaaaaaaaaaaaaaaaagcggccgaaagct

SEQ ID NO: 1005 - DNA, 695 bp, Homo sapiens
  misc_feature (638)..(638): n equals a,t,g, or c
  misc_feature (659)..(659): n equals a,t,g, or c
  misc_feature (673)..(673): n equals a,t,g, or c
  misc_feature (687)..(687): n equals a,t,g, or c
gtcagacaggtggagccgccggggcaggagtctcaaagagccaggctccaggagaggaagggctctgcgagaggagagaggagagcgctggagaggagaggctggagagtccttagccaggatggaggctgttgtgaacttgtaccaagaggtgatgaagcacgcagatccccggatccagggctaccctctgatggggtcccccttgctaatgacctccattctcctgacctacgtgtacttcgttctctcacttgggcctcgcatcatggctaatcggaagcccttccagctccgtggcttcatgattgtctacaacttctcactggtggcactctccctctacattgtctatgagttcctgatgtcgggctggctgagcacctatacctggcgctgtgaccctgtggactattccaacagccctgaggcacttaggatggttcgggtggcctggctcttcctcttctccaagttcattgagctgatggacacagtgatctttattctccgaaagaaagacgggcaggtgaccttcctacatgtcttcatcactctgtgcttcctggarctggtggtggggggtaaagattgccccgggaggaatgggctctttccatgccakgataactctccgngcatgtcataatggacctggnctacggattattgnctttggcctttggnacaacctt

SEQ ID NO: 1006 - DNA, 922 bp, Homo sapiens
  misc_feature (4)..(4): n equals a,t,g, or c
  misc_feature (6)..(6): n equals a,t,g, or c
  misc_feature (849)..(849): n equals a,t,g, or c
  misc_feature (893)..(893): n equals a,t,g, or c
  misc_feature (909)..(909): n equals a,t,g, or c
gtancngacagtcacggtcggattcccgggtcgacccacgcgtccggtccgcagtgactacactcatggcaggtcccctgtggcggaccgcagcatttgtgcagagacacaggacaggcctcttggtgggttcctgtgcaggcctgtttggagttccagtctcgtaccacctcttcccggatcccgtggtccaatggctctaccagtactggcctcagggccasccagctccgctccctccacagctgcagagcctcttccaagaggtgctacaggacataggtgttccttcaggccattgctacaagcccttcaccaccttcaccttccagcctgtgagtgcaggcttcccaagactccctgctggggctgtggtgggcatccctgccagtttcttgggagacctagtgatcaacactaaccatcccgtggtcatacatgggcatacagtggamtkgcggagccagcargcgcccggctgagagcttccctgaccttgtcccgtgaagcccagaagttcgccttggccagggaagtggtgtacctggaaagcagtaccactgccgtgcacgccctgctggccccagcttgcctggcagggacctgggcactgggcgtgggtgccaagtacaccctggggctccatgcaggccccatgaatttacgggctgccttcagcttggtggcagcagtggcaggctttgtggcctacgccttctcccaggattctctcactcatgccgtggagtcctggctggaccgccgcacggcytccctctctgcagcctatgcctgtggtggagtggagttctatgagaagcttctgtcgggcaacctggccctgcgcantctctttgggcaaaagaagggggagaagctgtatacacccaacngggaacatcgtccccnagacacttgttcc

SEQ ID NO: 1007 - DNA, 1571 bp, Homo sapiens
ggaacctcatcaacgctgacttctgcgtggcctctgtctgcgtggcctttggggcagttctgggtaaagtcagccccattcagctgctcatcatgactttcttccaagtgaccctcttcgctgtgaatgagttcattctccttaacctgctaaaggtgaaggatgcaggaggctccatgaccatccacacatttggcgcctactttgggctcacagtgacccggatcctctaccgacgcaacctagagcagagcaaggagagacagaattctgtgtaccagtcggacctctttgccatgattggcaccctcttcctgtggatgtactggcccagcttcaactcagccatatcctaccatggggacagccagcaccgagccgccatcaacacctactgctccttggcagcctgcgtgcttacctcggtggcaatatccagtgccctgcacaagaagggcaagctggacatggtgcacatccagaatgccacgctcgcaggaggggtggccgtgggtaccgctgctgagatgatgctcatgccttacggtgccctcatcatcggcttcgtctgcggcatcatctccaccctgggttttgtatacctgaccccattcctggagtcccggctgcacatccaggacacatgtggcattaacaatctgcatggcattcctggcatcataggcggcatcgtgggtgctgtgacagcggcctccgccagccttgaagtctatggaaaagaagggcttgtccattcctttgactttcaaggtttcaacggggactggaccgcaagaacacagggaaagttccagatttatggtctcttggtgaccctggccatggccctgatgggtggcatcattgtggggctcattttgagattaccattctggggacaaccttcagatgagaactgctttgaggatgcggtytactgggagatgcctgaagggaacagcactgtytacatccctgaggaccccaccttcaagccctcaggaccctcagtaccctcagtacccatggtgtccccactacccatggcttcctcggtacccttggtaccctaggctcccagggcaggtgaggagcaggctccacagactgtcctggggcccagaggagctggtgctgacctagctagggatgcaagagtgagcaagcagcacccccacctgctggcttggcctcaaggtgcctccacccctgccctccccttcatcccagggggtctgmctgagaatggagaaggagaagctacaaagtgggcatccaagccgggttctggctgcagaagttctgcctctgcctggggtcttggccacattggagaaaaacaggctcaaagtggggctgggacctggtgggtgaacctgagctctcccaggagacaacttagctgccagtcaccacctatgaggctcttctaccccgtgcctgcacctcggccagcatctcctatgctccctggtcccccagacctctctgtgttgtgtgcgtggcagcctccaggaataaacattcttgttgtcctttgtaaaaaaaaaaaaaaaaaaaaaaaaaaaaaa

SEQ ID NO: 1008 - DNA, 2222 bp, Homo sapiens
  misc_feature (2)..(2): n equals a,t,g, or c
  misc_feature (2212)..(2212): n equals a,t,g, or c
  misc_feature (2214)..(2215): n equals a,t,g, or c
gncccgaggctgcgtggtggagggcaaccccgtgctggcaggatcctgcgactcaacgtgcagccatctggtggtgcccatcctgctcctggtcagcctgggctcggccctggcctgtctcacccacacaccctccttcatgctcatcctaagaggagtgaagaaagaagacaagactttggctgtgggcatccagttcatgttcctgaggattttggcctggatgcccagccccgtgatccacggcagcgccatcgacaccacctgtgtgcactgggccctgagctgtgggcgtcgagctgtctgtcgctactacaataatgacctgctccgaaaccggttcatcggcctccagttcttcttcaaaacaggttctgtgatctgcttcgccttagttttggctgtcctgaggcagcaggacaaagaggcaaggaccaaagagagcagatccagccctgccgtagagcagcaattgctagtgtcggggccagggaagaagccagaggattcccgagtgtgagctgtcttggggccccacctggccaagagtagcagccacagcagtacctcctctgagtcctttgcccaagattgggtgtcaagagccctgtgttccattctggctcctccactaaattgctgtgtgacttcaggcaagacattgatcctctctcagcctttgcttgctagtctgaaccaaagagttgtttgggcatttgctgtgttggccatttctggagcaagagggtcttcttcctccttcccccagccagccagctgtcctggggccaggctttcctgggtggaaagaagtatacctttccctggggccctaggatagcaaagtgagccatagtgggccaggctgccctccatgctgggccccagcccaggtctgcactcgcctggatcaccttctttgagccttagccatctcctgtcaggtaggaatgaacttgccagccttcaggctcgttcagctatgaccatctgtgcggtcagggtacactcagctctcctccccaactccagcagcctttaagaagtgtccctttggcgccccctggaggcagagcactgagctggaccctgggtagactcccacagggaggacggagctggcctcaggagtgggacacccagacttggcagggccttcaagaggcctgtgtgggggccccaggaatccttagctgaagcggggagactcactctccatctcaggaaattctagcccttgccctcagggagccacggttgagggtgaggcccaacacctgccttagggccctgggtgggcaagtctgggccctggggtagggagggagactcaggcccacacttgggtattttctaatttcagacaaacacacactcagcgcgcactcactgattcctacacattgccaagatttcacacatgtgaccaggggccaccaaagtccctgtgacctttgtgactaggatcctaatttctctattttctcctgggtgcctgggtctgtgtcacctggggcagtgtggataatgtttagttctgtgacactgttttttgggggtggcacctggttctccgatgcctgggctggtgtcaggcccaggactgtagtgctgggagcagtaaagctcagctctgtgtaatgagtgatgctatggcttgctcgtgtcttatgatccaatccttttctacatcagcccttgttttgttttatggctagtcttatctggcctggttatttccttgcggggaggagagggtttgctaatctgctcccagcccaacctattaccaccccacctcgctgggacctactgctcgggaggcagcagacagggagccaccagcagtggcttcctggccctgtgctgggggtggggggaagctgggggcacatgtggcccttgccttctgagcagctcccagtgccagggctttgagactttcccacatgataaaagaaaagggaggtacagaagttccaattccctttttattttgctggttggtatctgtaaatgtttaataaatatctgagcatgtatctatcaacgccaagaatttcaaagtctccttcaacaatatgaggcttttaggatgtttatattccttcatccctcttgtttcccaggttttgcagggaaaaaaagtctggaattatagatacagcttattattaaatttgttcttgcataaaaaaaaaaaaaaaraacncnnggggggg

SEQ ID NO: 1009 - DNA, 2050 bp, Homo sapiens
  misc_feature (45)..(45): n equals a,t,g, or c
  misc_feature (2048)..(2048): n equals a,t,g, or c
gagggcagaggaggagagtcgcgggcggccgcttgggcgcacttnccgggtcaccttgtcccggaggagaaatggcttccctgaggcaagtgtaacctacattcccagcccaccagcctgacgcccagccagggagagagtaccatggatggcatcattgaacagaagagcatgctggtgcacagtaaaatcagtgatgctggcaagaggaatggtttaattaacaccagaaacttgatggccgagagcagagatggtctggtgtctgtttacccagcgccccagtaccagagccaccgggtgggggccagcacagtgccggccagcctggacagcagcaggagtgagccgatgcagcagctgctggaccccaacaccctgcagcagtcagtggagtcccgctaccggcccaacatcatcctctattcagagggcgtgctgcgctcctggggggacggtgtggccgccgactgctgcgagaccaccttcatcgaggaccggtcgcccaccaaagacagcctcgagtacccggatgggaagttcattgacctctcagctgatgacataaaaatccacaccctgtcctacgatgtggaggaggaggaggagttccaggagctggagagcgactactcaagcgacacagagagtgaggacaatttcctcatgatgcccccgcgggaccacctgggcctcagtgtcttctccatgctctgctgcttctggcctctgggmatcgcagccttctacttgtcccatgagaccaacaaagccgtggccaagggggacttgcaccaggccagcaccagctcccggcgggccctattcctggcagtgctgtccatcaccattgggactggcgtctatgtgggcgtggccgtggccctcatcgcctacctctccaagaacaaccacctgtgagcttcctgcgaatggagggggagcacccggggccaggtctgtgtggacgtggaggaagcaggcataccgcatgatgctgtacagtacaaatgattgccaaatgatgccacgargccctgggatttcctacccatggatttattttgtttttatcctttaatttcatgttcacagcactgtgtagagcaccagacagacgggcactgctaatccttccaaaggaaagctccaaagatcccagcccgcaaggctgtctctggatggattctggtggatgaatggcaacgcggctctctgcagcctgccagtgcccagagtgccaccgcattagcaatatacaaacagtccaaaaaagtgtttattttttatggaatacggtgcaataggcagaggacaagggacacatcactcttctgtctgtggccctgctggagtcctttgtgccccccggagtccacacgccttccctgcaagacgagaatggggctgggaagaaagaggcaacaccacggctggcaggagccccgctgcactgctctgcagacccattggcctgaccctgagaagcagagccagcaaagcccgggacctgcccctctttctttcccttcacaccaccccagcctcaggatgtcaagccacctccggaacgtgtctacactccacagctaccccgcagcaatacgcactcttgggacctcgctgatctaggatggggaggcaggccaccgcccctcccaagactcctcaagaaagagccccgcggttgctccggaaactcgaggcactgcagctatgggcactgcctcagcctaaagacacaggggcgcctcccaatcaccgcgctggcggatgctcaccccgtcataagcagaaactagtgatcctggaaatgagatgggccttactctgtcgactaaatgaatagctattttcttgtcattttttaaagtgcaactcttgcttcatgctgcttaagttaccagatgaatgctgagaaataagtaatcacagacattttaataccatttcattgctgttttacgagtgttcattacttaacaaaaaattatcttttaaaaaaaaaaaaaaaaaccycgggggggscccggtacccaattcgcccnaa

SEQ ID NO: 1010 - DNA, 3217 bp, Homo sapiens
  misc_feature (40)..(40): n equals a,t,g, or c
  misc_feature (45)..(45): n equals a,t,g, or c
  misc_feature (68)..(68): n equals a,t,g, or c
  misc_feature (3200)..(3200): n equals a,t,g, or c
  misc_feature (3204)..(3204): n equals a,t,g, or c
acccaattgcttattttggaaaattaggggttcaagggantggtnggccccagacaacccacccaggncccaaaagtgctttcgaaagcttccccagacggctggtaactgtggtagaggaaaaggaactggtgcggcggcggcggcagcagcggggagctgccagaccctagtgcctggggtctctgagactagtgccagcccgggwagcccgtctgtccgcagcatgtcagggccagaatcctcccctcccattggtgggccctgtgaagctgctccttcatcctcactgcccactccaccccagcagcccttcattgctcgccgtcacattgagctgggggtgactggtggtggcagccccgagaatggagacggagcactgctcgccatcaccccacctgctgtgaaacgtcggagggggaggccccccaagmagaacaggtctccagcagatgctggragaggwgtkgatkaggcaccctcatccaccttgaagggaaaaaccaatggggctgamccagtccctgggcctgagaccctaattgttgcagatcctgtcctggaaccacagcttattcctgggccccagcctcttggaccccagccagttcacagacccaatcccctcctgtcacctgtggagaaaagaaggcgaggacgaccccctaaagcacgagatttgcccatccctgggaccatttcctctgcaggggatggcaactccgaaagtcggacacagccacccccacacccatcacccctaaccccactcccaccactgctagtttgtcccactgctactgttgccaacactgtcaccactgtcaccatttcaacgtccccacccaaacggaagaggggccgacctcccaagaatcctccatcacctcggcccagccagctccccgtcttggaccgtgacagcacttctgttctcgagagctgtggattggggaggcgacggcaaccccagggccaaggggagagtgagggtagttcctctgatgaggatggaagccgccccctcacccgcctggcccgccttcggcttgaagcagaaggaatgcgaggacggaagagtggagggtccatggtggtggctgtaattcaggatgacctggacttagcagatagcgggccaggcgggttggaattgacaccacctgtggtctcactaaccccaaaactgcgctcgacccggctgcgtccagggtctctagtccccccactagagactgagaagttgcctcgcaaacgagcaggggccccagttggtgggagtcctgggctggcaaagcggggccgcctacagcccccaagtcccctggggcctgagggttcagtagaggagtctgaggctgaagctcaggwgargaggaggaaggggatgggaccccacgccgacgtcctggcccccgccggcttgttgggaccaccaaccaaggggaccagcgcatcctgcgcagcagcgcccctccctccctggctggccctgctgttagtcacagaggccgcaacaagacgtgagtgggctgcccctccacctaggctttccaccgtggccactccctccatgaccaggcctgactctgttaaccactacttgaagtcttgagggggaaagcctccagggagacataggggccttctcccttcttcccaccaaagtagggggtaggcaactggttgtcatggaaatggggatcatcacagtccccttccccttcaccccacgtggctgggcagtgttaagggtggcaagatagtctctgtccccacccccttgtacttgattccccagctgtctttcacacagccccccacccttaggggaagggggaggggcttctctacaatgaggtttttttctttttttttttttttaagaagaaaaaataataaacttagtttctgtatgagcatccgcgtaaggaggcttctgattttctggtctggtggagggttgggtgggaacttgggcatcgtttttctcctccctcttgttcttgcaaagatcctagcacctgatctctagcccaggactatatgttccaggcagaaatctacccaagaagagggaagattggtgaatttgatgtggtagggtgcctttccccagtcagtttgaagtcacagatatccttttcctctcatttcttttccctcggttcctagacgttcctcggagctctttgatgcctcagacctttcccttttatccctcttgctcaggtgcttcctttcacaactttttccagagggcaggcgtcctagctccagttgctccatcccttgggccctcccctgctcttcatctagccaaactggtttgagtcagccacaccccttcccagctccctgggctcttcacgtggtggctggccactcaaccccacccctgggcttggcttggagccctgagtcagctccatcaccacccaagccaaaccaaagctgaggcaggagccgaaactcagagtccttcaaggcctatagccaggtgatggaggacgaggagaaggcagtggagatcttgggcaacacggaagctgctcatcctccatcccccatccgctgctgctggctccgcctccgctgcttggcagctactagcattatctgtggctgctcttgcctgggagtcatggctctggtgtttgccatcaaggcggaagagcggcataaagcaggccggtccgaggaggcagtgcgctggggggcccgggcccggaaactcatcctggccagctttgctgtctggcttgctgtcctcattctgggtcccctgctgctgtggttgctctcctacgccatcgctcaggctgagtgaccctggatggcctctgctgagagccagccgagacctcctggatcctgcaatgcggcattgctaaggtcctgtgacagcagtggttggaaggatcctggttggaaggatggggactctctcaaggggctttggaagagctcttctagccctttataaaaggagggcagcagctgagactgatgagaggagggcagcctgctctgttctttcagggccccccacccccatctcccctaccctagcccaccctagggcctctacccagcgggaggggttgaagaccaggcctggttttattagaattcattttgtaataaaagccttttttagtggtgaaaaaaaaaaaaaaaaaaaaaaaaaaaaaaancccngggggggggcccg

SEQ ID NO: 1011 - DNA, 560 bp, Homo sapiens
  misc_feature (556)..(556): n equals a,t,g, or c
gtcttggagctggctttgggaaaggagaaacttgcagtcagaagcccagtgtcctatgtatgcaggaagctgtgctctagcaatagacagtgttggtaatggttgtgctgtacggcgtttggggtggccccatgttccatgctcagctgaccggatgccaactcagatgaaaagaattcatggctctgggcaccccgtgagcagtgcttgccatggctgggagtttgtcgggattgaaccaaacctagtgcttcaaagctcctgggacacctccagtgtccagcacacattctcatacatactgcccctaatttctaaagtccctaaagcactacattctgtaaccttgtttcttttactccattcccagattagttatgcaaaattcaactgcgttctacttttagaagtgtttagggtctttattttctgttgacccttcatctggaaagattctcttcccttgttaggtacaatcamtggccccccccctttttttttgagaggggtctgctawgttgccaggckggtctaaagcckgggytcaagcaacctnccgg

SEQ ID NO: 1012 - DNA, 2786 bp, Homo sapiens
ggtggtcggcggcggcggcggcggcggcggcggcacagagccggtggtggagccgccgaggagggtcacgcagcacaatgccagctctgcccctggaccaactccagatcacccacaaggacccgaagacaggaaagctgaggacttcaccagcgctgcaccccgagcagaaggcagaccggtattttgtgttatacaaaccgccccctaaagacaacattcccgccctagtggaggagtacctggaacgcgccaccttcgtagccaatgacctcgactggctcctggccttgcctcacgataaattctggtgccaggtgatctttgacgagactctacagaagtgcctggactcctacctgcgctatgtcccccgcaaattcgacgagggggtggcctcagcccctgaggttgttgacatgcagaagcgcctccatcgaagtgtttttctcaccttcctccgcatgtccactcacaaggaatccaaagatcacttcatttccccttctgcgtttggagaaatcctctacaataacttcctctttgacattccaaagatcctggacctctgcgtgctctttggaaaaggcaactcaccactgctccagaagatgataggaaacatctttacacagcagccaagttactacagtgacctggatgaaaccctgcctaccatccttcaggtcttcagcaatatcctccagcactgtggtttgcaaggggacggggccaataccacaccccagaagcttgaggagaggggccgattgacccccagtgacatgcctctcctggaattaaaggacattgttctctacctttgtgatacctgcaccacactttgggcctttctggatatcttccctttggcttgccagaccttccagaagcacgacttttgttacagactagcttccttctacgaagcagcaattcccgaaatggagtctgcaattaagaagaggaggcttgaagatagcaagcttcttggtgacctgtggcagaggctctcccattccaggaagaagctaatggagattttccacatcatcctgaaccagatctgcctccttcccatcctagaaagcagctgtgacaacattcagggcttcatcgaagagttccttcagatcttcagctccttgctgcaggagaagaggttcctccgggactatgatgcactcttccccgtggccgaagacatcagcttgctgcagcaggcctcatcagtcttggacgagacgcggactgcctacatcctccaggcagtcgagagtgcatgggaaggggtggacagacggaaagccacagatgctaaagacccatcggtgattgaggagcctaatggggagcctaacggggtcacggtgacagcagaggcagtcagtcaagcatcatcacatccggagaactcggaggaagaggagtgcatgggagcagccgcggctgtgggccctgccatgtgtggggtggaactggactctctcatctcccaagtgaaggacctgctgccagaccttggtgagggcttcatcctggcctgcctggagtactaccactacgacccagagcaggtgatcaacaatatcctggaggagcggctggcccccaccctcagccagctggaccgcaacctagacagagaaatgaaaccagaccctacacccctgctgacgtctcgccacaacgtcttccagaatgacgagtttgatgtgttcagcagggactcagtagacctgagccgggtgcacaagggcaagagcaccaggaaggaggaaaacacgcggagtttgctgaacgacaagcgtgcagtggcggcacagcggcagcgctacgagcagtacagcgtggtggtggaggaggtgccactgcagccaggcgagagcctgccctaccacagtgtctactacgaggatgagtacgatgacacatacgatggcaaccaggtgggcgccaatgatgcagactctgatgacgagctcatcagccgcaggccattcaccatccctcaggtgctgagaaccaaagtgcctagagaagggcaggaggaggatgacgacgatgaggaagacgatgctgacgaggaggctcccaagcccgaccattttgttcaggaccctgcagtgctgagagagaaggcagaagccaggcgcatggcctttctcgccaagaaagggtaccggcatgacagctcaacagcagtggccggcagcccccgaggccatgggcagagccgcgagacaacccaggaacgcaggaagaaggaagccaacaaggcgacaagagccaaccacaaccggagaaccatggccgaccgcaagaggagcaaaggcatgatcccatcctgagacctggtgcagggccagtggggaggcagcggcaccagactcaccaggccgcgctcccatcgcctggggcctcctcactaggggccccaagttcaactcaacccctcaacagcctcagctttgcagcccctgagaaggccgcctctcatctaccagccagccatgagcgccttcctgcagaacacacagtgccttatgccacagccgaagaatccgtggggccggcaagcaggcaccttcccccagctgcgctagcgggaaagagatggggatggagtcccaaggcaagcgccccaaacctcgggccacaagacaccacttcccctttaccctggacagcaggaaacctgtatattcaaaaacacaaaaagtcctgctaataaaatttttgaccctttcaaaaaaaaaaaaaaaaaaaaaaaaaaaaaaaaaaaa

SEQ ID NO: 1013 - DNA, 2038 bp, Homo sapiens
ttttaaagtgcaaaaagctctctgctgccctagagagaggatctttggacaggccgttcaatgcaaagtaaaagggggcagctgatggggctcaacaaagggcggtggagcgggagacaccatgctcccctccctccctccctccacacacacgcgcagaatacactcagccacacacacagaggcacgtgcacacccccttccatggctgcaggcagagggctggtgactggcttctaagcaggaccccctgactgccctgaaagttcagtgagccactggggctagacacaggcctgggctcagggggctccgctaaaccagaggcctggaggagcctggctgggaggcaggttggggcttggcccagtcctctgccgcctccagcttgggggagataggctgctccctctgaggacgtgcatcctgggaaagccttcttcaggcagaatgaagacacatggaaaagggcagtcagtgggaggcaaaagagagagggggaacaaggagatggtgcctgtctcagaatccacttgggtagcaacgaaatgggtgtgtccctggggtagacagttccagctcctctgaagagcttcaaccccaataagtgcaataaggacctcatagagactagcaagtaagtcgggtaggctggggtgggaaacctaattatgtgaacaagcacgagtgctgggcagaaccaagctcaagggagaggaaaggagggagagcacagttaaggacgtgaggtttgggagatctcaacagcaccagtgtgatcggcacgggtctgggactcctgggctgctggcccctcctgcgcaagccgggagagtgtgatggaggagagacgcgcactggacaccacaagaacctggccatggagacagggccgttttcttccctgggagtttgctcagaaccaggcactgctggggaccatggatggggaggaggggcacagggcccagtgcagatgaaggttgcacaaacaccccaaactgagagcccggcctcctggcaggcgagtaagcgagcaggcgcctcgacagcacagcctgtgctttcccctcagatcaatctgctactcccttttccttaggagggagaggagcaggcagataagcctggtgtccaccaccctctctgccccacctgtagaggaagggctcaagggacaggagagcagagagggagtgtgacgctggcctcagagcccgtgcagggtcgaggagaggctctcctcggtggggagtcaggggaagatcggtttcctgttgaatctgggctgggtgtgtcttagctgatcttctgtatcagcttctcgtcagacaggcagtagaggctgttgatggacaagtctgagatgaagtgctcgcaggcttttcgagtgatctgcttgcatcctcgaaggtcgatcaaggtgacgttggcaatgcgccgtaggtagatcagggtctggtctgtcaatttattgcaacctgccatattgagctctgtgagagagtagcgagtggaagacccgacagcagtgagtagattggaggactgatctgtaaggtggctgcagtgactgaggtcgagtcgagacaggaggggcatgtggcgaattatgaggcgaagcgtggcatctgtgatgtcaaggcctgccagccggaagtcggtcatgttccggagcttgctgcgattgtcctgacctggtttatcagccggtggagtaagcaagtcccgaatttgagggtccttgattcctactgcccaccgaagatcaagggtcctgagaagggggcagctggaggtgctgagggcagagactgcagaccaggagcagcctgctaggaggaggtctttcagtcctggcagcctattgacgagccatgtcagttgctttttagagatgttggtccaactgaggtcaaggctgactggctgcctcttgatgatgccactgagggcctggggcacaatggccttacacctacwcaagtcaatttttgtccaaagtctcttgtcgcagcaccwktkctcgtgccgaatt

SEQ ID NO: 1014 - DNA, 449 bp, Homo sapiens
  misc_feature (120)..(121): n equals a,t,g, or c
  misc_feature (430)..(430): n equals a,t,g, or c
ggcacgagcgcgggcggcgggacggacgaggccggggccccgggtggcacccgcaggcgggcaggcgggcgccatggagctgctctcggcgctgagcctgggcgaactggcgctcagctnntcgcgggtgccgctcttccccgtcttsgacctcagttacttcatcgtctccatcctctacctcaagtatgagccaggagcagtcgaactgtcccggcgccaccccatcgcgtcctggctgtgcgccatgctgcattgcttcgggagctacatcctggctgatctgctccttggggagccactgatcgattacttcagcaacaactccagcatcctgctkgcctcagctgtctggtacttgattttcttctgccccctggacctcttctacaagtgtgtctgcttccctgcctgtgaaactcatcttccntggccatgaaagaagtggt

SEQ ID NO: 1015 - DNA, 695 bp, Homo sapiens
  misc_feature (1)..(1): n equals a,t,g, or c
  misc_feature (677)..(677): n equals a,t,g, or c
  misc_feature (687)..(687): n equals a,t,g, or c
ntgtgatccccgggttaagaattcscacatggcggcggtggtagctgctacggcgctgaagggccggggggcgagaaatgcccgcgtcctccgggggattctcgcaggagccacagctaacaaggcttctcataacaggacccgggccctgcaaagccacagctccccagagggcaaggaggaacctgaacccctatccccggagctggaatacattcccagaaagaggggcaagaaccccatgaaagctgtgggactggcctgggccatcggcttcccttgtggtatcctcctcttcatcctcaccaagcgggaagtggacaaggaccgtgtgaagcagatgaaggctcggcagaacatgcggttgtccaacacgggcgagtatgagagccagaggttcagggcttcctcccagagtgccccgtcccctgatgttgggtctggggtgcagacctgaggagcgctgcgaccctcctaggctattgactgttaagtcctcaggtttggcccagattccagttcgtgcctctgaggtccaccagagggcgcatgaagcccaggctgttgccaaaccctaccctgccccacaccaaggagccagccaaaggcaaataaagttattgagtgtttagtagaaaggaaaaaaaaaaaaaaytccaagggggggccccggtaanccaatttggnccctataa

SEQ ID NO: 1016 - DNA, 581 bp, Homo sapiens
  misc_feature (347)..(347): n equals a,t,g, or c
  misc_feature (550)..(550): n equals a,t,g, or c
  misc_feature (565)..(565): n equals a,t,g, or c
ccatctactctcctttttctcagtcctgatgtggacctagggcaatgttwctcaaactttgctgcatgttgggatcacttaggaaatctttaaaaaatactgatgcccgtctcctaccttctgatttaattagggtttgaattggactttgggattttgtttttttaagtccctagatggtttttaatgggcaacaagcttgtgaaccatgaacttaggggactagagaagtcaagactggagagactgtccataataacagaaagatgatattttggtggcaccggtgctgtttgtcccactcttggtacaactgtagggtatgtgcggattcttggcctccggcntcccctatcctcagcgggcccagcctcytctgctctccagtcttgcaaggccctcggtgctttcctcttcctcctcggtgcaggctgtggcttgccgtggctgcagccttaggttcamcattttctgcagtgakctggggctctctttgtgcctgstgtgttctgggtaatacagttgtggttaaaggaagctcattttttcnggtccaacctctgtnttcccacaatccttcg

SEQ ID NO: 1017 - DNA, 2153 bp, Homo sapiens
  misc_feature (101)..(101): n equals a,t,g, or c
  misc_feature (2134)..(2135): n equals a,t,g, or c
caggcctcagggcctctggtggctctggcccagacagtatttgcagttcttgtgctatgggtgggagtcttcttcctcaagtttcggcagctgtgctgtgnctggatgggctgctcctcccagggctcaagggctgtggtccgctcagggtctcatttccccaggccaagttcaaggcagcagccctttgtgaggcgctcttggccctgggctggagggagaactttaagcttttttgctcacagggacgtggtatgggccctgggtgcaggtgcccacattctgctaatgagagctttgtctgatcagtcctgggtccatcagtttgtccatgtgtccggctgccagcccgtcccttgggatccttcccctggggtgtagccttgttcattagtatatactcattccttcatgctttcctcagcagaacacttccacttctgaggtgagcttttgccccgtgcccttcctccacaggtgttgcctttttataaagacctgatagcagaataaattggtgtttccctgttgacccagcaccatttctgtgggcctagaatatggccctcaacccttagagtggggcagtgagggcttgaggagtgacccttcctttctcatggttttagtcattttggctgccagcccttaatggcacagatctgctgcttctaacagatggccaggaggtgacaccgatttcagccattgccaaggttagcaccctctcctttgagcctagggccacactgttcattgtcactttaggcaagtgcctgtttggctttaaaggtaagcctgccagctgtgagaagccttggtaactgatggactcatttcctggtccttaaagatgcagcctcttaagggctccttgatggatgccatctctcctagcccccagccctggtgccactggtgggcaggttcccattctttggggctgggagggacagcttgcctgtttctggtcacaaattacagtcttctctcctgtaccattctgtggcttcagcatgggggcagtagccyttcattagtgtagatagtcattccctggtagggtggagggtaagacatagggtctggaactgtttgggaccttttggggatgtcctgtgcctcccagattcctmgattctgggaggagaggctgccgcattctgctgctcctcacagcgagcaaagctgcacccacttacattcagtattttcctggcactacaaagagtgggaaggcctgggatttgctgctgctcccttagagcagggcccctcttttcagcactttggacacctggagacccagccctgttatttaatggtagtgggcaagtgtgtgtgcatactgtctgccactgctttctccctgccccatgccagagagccctgtccctgccaggcccagccttcttagccccaacttgggaacaaagtgcaacatgggatcatgggttggggtgctcaggtgagccctctctatagtgcttccctgggccaagctgacaccagcccctgagggtggggtgggacgggtggtgcttaaaagaggaaggggaccagtgtagcaacttgccagggaccccacccctccctctctgggcctgtgcagtgagcatggggattcccatcaaggggcctggcacctgtgctagttacgtagccgctgctcacgcgctcactcctgaccacatgcacgttccctagatgcagactgctttgaactttaaagctgtacaatttggttatgtttgtgctgacttaaaatatattttaatgaggaaaaaataatggagaaccctgggaaggacctggttcttttgcttctcggggaactgtaagccctcgcgttctgggaatcgctctctgctgctctttcctggaagctaagcctgtctccaccgcccgaggcctgcgccggtgctcccgccgcagttgcgtttgctttggaccttgcgtgcgggggagggggtgctcggtccgagcccgctcctttctgtacacctagcgctgcccgccccgcttgtgtctgaggtcgtgtatgtcaaaaataaagccgctagaaacggaaaaaaaaaaaaaaaaaaaaaaaaaaaaaaaaaactcgagggggggcccgtacccaattaacccnntatgatctataaagcgtc

SEQ ID NO: 1018 - DNA, 855 bp, Homo sapiens
cttccccaacaaggagacgatgaatattcatttcaggggcaaaacaaaatcctttccagaagagaaggatggtgcttcatcctgtttaggaaagtctttgggttcggaggattccagaaacatgaaggagaagttggaggacatggagagtgtcctcaaggacctgacagaggagaagagaaaagatgtgctaaactccctcgctaagtgcctcggcaaggaggatattcggcaggatctagagcaaagagtatctgaggtcctgatttccggggagctacacatggaggacccagacaagcctctcctaagcagcctttttaatgctgctggggtcttggtagaagcgcgtgcaaaagccattctggacttcctggatgccctgctagagctgtctgaagagcagcagtttgtggctgaggccctggagaaggggacccttcctctgttgaaggaccaggtgaaatctgtcatggagcagaactgggatgagctggccagcagtcctcctgacatggactatgaccctgaggcacgaattctctgtgcgctgtatgttgttgtctctatcctgctggagctggctgaggggcctacctctgtctcttcctaactacaaaagccctttctccccacaagcctctgggttttccctttaccagtctgtcctcactgccatcgccactaccatcctgtcaccagtgggacctctttaaaacaagcagccaaccattctttgatgtatcccattcgctccatgttaacatccaaaaccagcctggatttcatacatggacttctgattaaaagtggcaggttgtgcatgttaaaaaaaaaaaaaaaaaaaaaaaaaaa

SEQ ID NO: 1019 - DNA, 1207 bp, Homo sapiens
  misc_feature (1195)..(1195): n equals a,t,g, or c
tcgacccacgcgtccggttgaattccttgacctgcaaacacatatttattagcctgactcaaacaatgaagctattaaaacttcggaggaacattgtaaaactctctttgtatcggcatttcaccaacacgcttattttggcagtggcagcatccattgtgtttatcatctggacaaccatgaagttcagaatagtgacatgtcagtcggactggcgggagctgtgggtagacgatgccatctggcgcttgctgttctccatgatcctctttgtcatcatggttctctggcgaccatctgcaaacaaccagaggtttgccttttcaccattgtctgaggaagaggaggaggatgaacaaaaggagcctatgctgaaagaaagctttgaaggaatgaaaatgagaagtaccaaacaagaacccaatggaaatagtaaagttaacaaagcacaggaagatgatttgaagtgggtagaagagaatgttccttcttctgtgacagatgtagcacttccagcccttctggattcagatgaggaacgaatgatcacacactttgaaaggtccaaaatggagtaaggaatgggaagatttgcagttaaagatggctaccatcagggaagagatcagcatctgtgtcagtcttctgtacggctccatgggattaaaggaagcaatgacatcctgatctgttccttgatctttgggcattggagttggcgagaggtgtcagaacaaagagaacatcttactgaaaacaagttcataagatgagaaaaatctacgagcttcttatttacaacactgctgccccctttcctcccagactctgacatggatgttcatgcaacttaagtgtgttgttcctgaactttctgtaatgtttcattttttaaatctgacaaactaaaaagtttaacgtcttctaaaagattgtcatcaacaccataatatgtaatctccaggagcaactgcctgtaatttttatttatttagggagttacataggtgatgggggaaattgttaactacctttcattttcctgggaagtcaaggttacatcttgcagaggttgttttgagaaaaaagggcccttctgagttaaggagccatagttctatcaatgatcaaaagaaaaaaaaaaaaastcgaycggcacgagggggggcccggtacccaattcgccctatgggantcgaatgagacc

SEQ ID NO: 1020 - DNA, 894 bp, Homo sapiens
  misc_feature (751)..(751): n equals a,t,g, or c
  misc_feature (887)..(887): n equals a,t,g, or c
gaaattttacagtatctctgcctgaagatgaattaattcaggttacagtcacggcagtcgcaatcacttttgacaaaaatcaggctttacaaaccacaaaaacccctgttgaaaagtcattgcaaagagcctcaacagataatgaagaacttttacaatttccactggaactgtgttcagattcacttccttctcatccttttccaccagctaaagccatgacagttgaaaaagcaagtccagtgggtgatggaaatttccggaatcgttctgctccaccttgtgcaaattccacagttggggttgttaagatgacacctctttcttttattcctggagcaaaaataactaagtatcttgggataattaacatgttttttattcgagagactacttctcttcgggaggaaggaggagtcagtggttttctccatgcttttattgctgaagtgtttgcaatggtgagagctcatgttgctgcattaggagggaatgctgttgtctcctacataatgaagcagtgtgtcttcatggagaatccaaataaaaaccaggcacagtgtcttataaatgtaagtggtgaygcagtggtttttgttcgtgaatctgacttagaagtggtgtcatctcagcaacctactaccaactgccagtcatcatgtactgaaggcgaagttacaacctgaggaaaattaggaaaaaagagctcaactaaatgaaattcatcaatctctggtattttggcattaantatcttcttagacttaaaattgacttgagataaataaggaagaattgagtagattggatttgcctggagcttttggaggcatgagaattttctaacttgacatttggttgcctggtctaaacaggccctggggggncttgacc

SEQ ID NO: 1021 - DNA, 625 bp, Homo sapiens
aggtccgggactgggcgctgcggcctcgtccgcgcgccggggcgggggcctagctcgacagcttcccggcggctgcgcgatggacagccccgaggtgaccttcactctcgcctatctggtgttcgccgtgtgcttcgtgttcacgcccaacgagttccacgcggcggggctcacggtgcagaacctgctgtcgggctggctgggcagcgaggacgccgccttcgtgcccttccacttgcgccgcacggccgccacgctgttgtgccactcgctgctgccgctcggctactatgtgggcatgtgccttgcggcttcagaaaagcggctccacgccctcagccaggcccctgaggcctggcggctcttcctgctgctggccgtgaccctcccctccatcgcctgcatcctgatctactactggtcccgtgaccggtgggcctgccacccactggcgcgcaccctggccctctacgccctcccacagtctggctggcaggctgttgcctcctctgtcaacactgagttccggcggattgacaatttgccaccggtgcaccaggtgcccgtgtgaatgtgaacagacactgggtgatgaaagttaaccaacttaccgagtggcaagtgg

SEQ ID NO: 1022 - DNA, 1902 bp, Homo sapiens
  misc_feature (28)..(28): n equals a,t,g, or c
tagcgcctgggtcgctggggtgtctctngtactctggggactgggtgcctcgctgggcttcccgctgaccatttctgccgccagcatcgagatagcacgggttgcgatttcaccgttagcgtgacgctgcgggccccatccctggctgataaacgccggtttggtactaccgatttcacgagccaatttgatgattttgtctgccggaacaccagtgatttgcgaggcccattccggcgttttagccacgccatctggcccttcacccagaatataagctttatagtggccatttttcggcgcactggctggcagggttttctcatcgtagccaacgcaatatttatcgaggaatgcctgatccaccaggttttcagtgatcatgacgtacgccagaccgttaaccagtgcggcatctgttcccggacgaatagggatccactcatcttcgcgcccggcaccggtgtcggtatagcgcggatcgatgatgatcatgcgggcattagatttctggcgtgcctgttcaagatagtaagtcaccccaccgccactcattcgcgtttcgccagggttattaccaaacagcactaccagcttactgttttcgatatccgacggggctgttgccatctgcccagccgccgtagtatagttcaaaccttccgcaatttgcgcggaggagtagtcgccgtaatggttcagatagccgccgcagcagttcatcagccgcgcgaccagggtatttcccggcggccaggagcgggtcatggtgccgcccagcgtaccggtgccatagttcagatagatagactcgttgccgtactctttgatcaggcgctgcatattggtcgcgatgatgtcgtaggcttcttcccagctaatgcgctcgaatttgccttcaccgcgcgccccgactcgtttcatcggatatttcaggcggtccggattgtagacacggcgacgcatggaacgcccacgcaggcaggcgcgaacctggtgcaggccgtcgtaattgtcatcgccggtattgtccgtttcgacatatttgatttcaccgtccacgacgtgcatacgtagcgggcagcgactaccacagttaactgtacaggcgctccagataaccttttcgtctgattttgttggaatggcgctatcgacagcgtgcgcaatccgactaaaaggtaatgttaatgcgctgctggccattgccaggccgccgatcgctgtcgtttttaccaaaccacggcgactcacctcagcagccaataccgcatcagggattttcgttttcataatggctcactcaagcttgctcacgattgattccagtaacaaaccgtattgtgtaattatttctatagcagttcgctatataggcttgtatacatcgaataatttgaaaatcaaagagataggtagattttcactcgaaagtagtattacgtgtaagtgaggagtaattattgttcggtatcaaagggagacaaaaaaagcgcccgcaggcgctttttagattcagaaaaattgggtattagccaatatattccagtccgttcatatacggacgcagaacttctggtacttcaatacgaccatcagcctgctgatagttttccattactgcaaccagcgtacgaccaacagccagaccagaaccgttcagggtatgaaccagacgggttttcttgtccgacttgctgcggcaacgtgcctgcatacgacgtgcctggaaatcccaaacgttggagcaggaagagatctcacggtaggtgttctgtgccgggatccatacttccaggtcgtaagttttgcaagcgccaaagcccatgtcgccagtgcaaaggatgattttacggtacggcaggcccagcaactgcaggactttttctgcatgaccagtca

SEQ ID NO: 1023 - DNA, 1617 bp, Homo sapiens
  misc_feature (92)..(92): n equals a,t,g, or c
  misc_feature (1539)..(1539): n equals a,t,g, or c
  misc_feature (1563)..(1563): n equals a,t,g, or c
gcccaaggagctcagcttcgcccgcatcaaggccgtkgagtgcgtggagagcaccgggcgccacatctacttcacgctggtgaccgaagggngcggcgagatcgacttccgctgccccctggaagatcccggctggaacgcccagatcaccctaggcctggtcaagttcaagaaccagcaggccatccagacagtgcgggcccggcagagcctcgggaccgggaccctcgtgtcctaaaccaccgggcgcaccatctttccttcatgctacccaccacctcagtgctgaggtcaaggcagcttcgttgttccctctggcttgtgggggcacggctgtgctccatgtggcaaggtggaaggcatggacgtgtggaggaggcgctggagctgaaggaatggacgagccctgggaggagggcagaaggctacgcagggctgaggatgaagatgcagcccctggatggtcccagactctcaggacatgcccagctcaggggcttcgagccacaggcctggcctcatatggcatgagggggagctggcataggagccccctccctgctgtggtcctgccctctgtcctgcagactgctcttagccccctggctttgtgccaggcctggargarggcagtcccccatggggtgccgagccaacgcctcargaatcargaggcmagcytggtaccaaaaggrgtacccagggcctggwacccaggcccaytccagaatggcctctggactcaccttgagaaggctacgcagggctgaggatgaagatgcagcccctggatggtcccagactctcaggacatgcccagctcaggggcttcgagccacaggcctggcctcatatggcatgagggggagctggcataggagccccctccctgctgtggtcctgccctctgtcctgcagactgctcttagccccctggctttgtgccaggcctggaggagggcagtcccccatggggtgccgagccaacgcctcaggaatcaggaggccagcctggtaccaaaaggagtacccagggcctggtacccaggcccactccagaatggcctctggactcaccttgagaagggggagctgctgggcctaaagcccactcctgggggtctcctgctgcttaggtccttttgggacccccacccatccaggccctttctttgcacacttcttcccccacctctaygcatcttccccccactgcggtgttcggcctgaaggtggtgggggtgagggggggtttggccattagcatttcatgtctttccccaaatgaagatgccctgcaaagggcagtaaccacacagtttgctgagtgaaattctttgcccacaaagacccagggcttggagcatctctytctttatccttaatctcccaatttgcaacccattctgaagtctccagcctggataggcagagacactaaaaccccagtagacagggccttggtggtcctaggaaggagggcccatagattctggaccgagggatgtcaagctggtcagttcagtccctatgaatgtntcttctacaggaggctaccctgcncctgctaccctggggagaagcctcagctttctggggcagagtttgtctccctgt

SEQ ID NO: 1024 - DNA, 1496 bp, Homo sapiens
  misc_feature (525)..(525): n equals a,t,g, or c
  misc_feature (616)..(616): n equals a,t,g, or c
gccggaggtctccgggtggtatcgccctttcctctttgccagcccgctggcgagccgagccrgggcaagatgaggtcgtcctgtgtcctgctcaccgccctggtggcgctggccgcctattacgtctacatcccgctgcctggctccgtgtccgacccctggaagctgatgctgctggacgccactttccggggtgcacagcaagtgagtaacctgatccactacctgggactgagccatcacctgctggcactgaattttatcattgtttcttttggcaaaaaaagcgcgtggtcttctgcccaagtgaaggtgaccgacacagactttgatggtgtggaagtcagagtgtttgaaggccctccgaagcccgaagagccactgaaacgcagcgtcgtttatatccacggaggaggctgggccttggcaagtgcaaaaatcaggtaktatgatgagctgtgtacagcaatggctgaggaattgaatgctgtcattgtttccattgaatacaggctagttccaaangtttattttcctgagcaaattcatgatgttgtacgggccacaaagtatttcctgaagccagaagtcttacagaagtatatggttgatccangcagaatttgcatttctggtgacagtgctggtggaaatctggctgctgcccttggacaacagtttactcaagatgccarcctaaaaaataagctcaaactacaagctttaatttatccagttcttcaagctttagattttaacacaccatcttatcagcaaaatgtgaacaccccaatcctgccccgctatgtcatggtgaagtattgggtggactacttcaaaggcaactatgactttgtgcaggcaatgatcgttaacaatcacacttcacttgatgtggaagaggctgctgctgtcagggcccgtctaaactggacatccctcttgcctgcatccttcacaaagaactacaagcctgttgtacagaccacaggcaatgcaggattgtccaggagcttcctcagttgctggatgcccgctccgccccactcattgcagaccaggcagtgctgcagctcctcccaaagacctacattctgacgtgtgagcatgatgtcctcagagacgatggcatcatgtatgccaagcgtttggagagtgccggtgtggaggtgaccctggatcactttgaggatggctttcacggatgtatgattttcactagctggcccaccamcttctcagtgggaatccggactaggaatagttacatcaagtggctagatcaaaacctgtaaaggagcaaaacttccagmagcctcgagcccctcttgacctcctacacctgctttggaaagacatgcactttttagtcgactaattcttcctcccattcccctctacttgcgagttatggaatttctattccataactgaagtctttatgataacctaatttttaaaaatgaatttgactaacttaagtgcaaaacatgtaa

SEQ ID NO: 1025 - DNA, 474 bp, Homo sapiens
aattccgcacgacgcggccacagcccacagcaggaaggcctgcggaattcscgcatcgtcagccagaaggacgacgtcacgtctgtattatgtgcctacgcgccatcatgaactaccagtctggcttcagccttgtcatgaaccacccagcctgtgtcaatgagattgctctgagcctcaacaacaagaaccccagaaccaaggctctggtgctggagctgctggcggccgtgtgcttggtgcggggaggacatgacatcatccttgcagcctttgacaacttcaaggaggtgtgtggggagcagcaccgctttgaaaagctgatggaatatttccggaatgaggacagcaacatcgacttcatggtggcctgcatgcagttcatcaacattgtggtacattcggtggakaacatgaacttycgtgtcttctgcattatgarttcacccayttgggcytggacctgtacttgga

SEQ ID NO: 1026 - DNA, 776 bp, Homo sapiens
gcccacgcgtccgcccacgcgtccgcggacgcgtggggggtgacattgagctcaccagcgccaccgtccccggcgaagttctgcgctggtcggcggagtagcaagtggccatggggagcctcagcggtctgcgcctggcagcaggaagctgttttaggttatgtgaaagagatgtttcctcatctctaaggcttaccagaagctctgatttgaagagaataaatggattttgcacaaaaccacaggaaagtcccggagctccatcccgcacttacaacagagtgcctttacacaaacctacggattggcagaaaaagatcctcatatggtcaggtcgcttcaaaaaggaagatgaaatcccagagactgtctcgttggagatgcttgatgctgcaaagaacaagatgcgagtgaagatcagctatctaatgattgccctgacggtggtaggatgcatcttcatggttattgagggcaagaaggctgcccaaagacacgagactttaacaagcttgaacttagaaaagaaagctcgtctgaaagaggaagcagctatgaaggccaaaacagagtagcagaggtatccgtgttggctggattttgaaaatccaggaattatgttataacgtgcctgtattaaaaaggatgtggtatgaggatccatttcataaagtatgatttgcccaaacctgtaccatttccgtatttctgctgtagaagtagaaataaattttcttaaataaaaaaaaaaaaaaaaaaaaaaaaaaaaaaaaaaa

SEQ ID NO: 1027 - DNA, 724 bp, Homo sapiens
  misc_feature (629)..(629): n equals a,t,g, or c
  misc_feature (705)..(705): n equals a,t,g, or c
gtggttgcggcggaggacgcaaccgagcgggcctgcggcmtcaccatggacccagaatgcgcccagctgctcccggctctctgtgctgttctggtagatcccaggcagccggtggcagatgacacctgtttggagaagctcctggactggtttaaaacggtcactgaaggagagtccagtgtcgtgctgctgcaggagcacccctgcctggtggagctgctgtcccatgtgctgaaagtccaggacctgagttctggggtcctctccttctcactgcgcctggcaggaaccttcgcagcccaggaaaactgcttccagtatcttcagcagggggagttactaccagggctctttggggagccaggacccctcggccgagcaacctgggccgtccccaccgtgcgcagcggctggatccagggcctgcgctccctggcacagcaccccagcgccctgckyttcctggccgaccatggtgcggtcgacaccatcttctccctgcagggggactccagcctgtttgtggcctcggcggccagtcagctcctggtgcacgtcctggctttgtccatgcgargtggarccgaggggcagccctgcctgccggggggttgactggcccgcgtgtncccaaaaaatcatggatcacgtttgaaaaatccttgtgctccgcgggcacccccaaggtcactccagccctgaacntcctgaacacaacttccgg

SEQ ID NO: 1028 - DNA, 2231 bp, Homo sapiens
  misc_feature (2228)..(2228): n equals a,t,g, or c
ggcacagccgtgctccgggtaagatggcagcggacggacagtgctcgctccccgcttcatggcggccggtgaccctcacccacgtcgaatatcctgcaggtgatctctcyggccacctccttgcctacctgagcctcagccctgtatttgtcatcgtcggtttcgtgaccctcatcatatttaagcgggagctgcacacgatctccttccttgggggcctggcactgaacgagggggtcaactggctgatcaaaaacgtcatccaggagccacggccctgtggaggcccccacacagcagtgggcaccaagtacgggatgccctccagccattcccagtttatgtggttcttctccgtctattccttccttttcctgtatttaagaatgcaccaaacaaacaacgccaggttcctggacttgctgtggaggcacgtgctctccctgggactcctcgctgkggccttcctagtctyctacagcagggtctacctgctgtaccacacctggagccaggtgctctatggaggcatcgctggaggcctcatggccatcgcctggttcatcttcacccaggaggtcctcaccccgctgttccccaggatagcagcctggcctgtctccgagttcttcctaatccgagacacaagcctcattcccaacgtactctggtttgagtacacggtaacccgggcagaagccaggmacagacaacgcaagctggggacgaaactgcagtgaccagtgggtgtggctgggtccagcctccagatctggcccgcacgatgccttgcaggatggacaggatgacagacagggacgaagcagagacctctacagacccaagtcaccaagtggagcctttttttttcttattttaattttaatgaacaaggtggaccaaagggctgaaccagcccctcaaccaggaccctggggggcctgctgcctgggggccgtggccagagaccctcgctgtgctgctgccagcccctggctggggcagaaagtgccctcggcatgggcacctgggtgtggggtggaggaggagggctcgcgcctctggtctcggggccaggaattccaggtggcgtgagaagtacacactatttattttttggttttktcagaggcaggcaggattttggagctggaagaatctgctctccggtggctgccctgtgaacagagggctcccggtcagcttcccaggcccttcgccctatgcccagaggcagactgcctctccctgggccggggtggcctgggtgccaggaggaggggagcataccccacaccctccctgccaccgttgccgttccagaacctcggtcagtgtttccctgtctgggggcagggcccagagcgagcacgcgtctggcggctgctgtcgttgtgttctaccccgtactgacccaacaccacaagggctttctctggtcccctgtccctaagacaataatcgctttctgacaaaggagcctgcacatttgggtgagcagacccaagctgtttacagctctttcttgtcctgccatccagtagcagttagtcttcatccccacgtgaacaaaatgggaaggagccgtgaggagaggagtgaggcaacaggcacccgaagtccctcgtccttccctctgtgtgctctgaatatgtccttgtccttcctgacccatctctgaccagctgggaacctgcttggggtccccctcaaacctgtgtctggggtgtgggctcacagatccctatcagcctggttcgtgggagggctcttcctaaagggacccccatctctaagtcactctgaaagggagttgtggagaggagacgcctccagactctcagaagttttgaggactgaactgggtcactcgggatctgtgttcgaatcctccccacccctttctttgtggagtttcctaacctgctgctgaagcacaatgttttggtgctttcttttctcatttgttaaaggcagtgtccaaaagccattccagatgccaagaccaggggcttatttctagggaaggtaggtcggtttccatgtttccctcccgttatttttattttttactttttgcctgagacaagccgagtatgaggtggtttgatttaagaaaaatcaatgaaattgtttactactgttttaaaataaaaccgtaaactctgaaaaaaaaaaaaaaaaaaaaaaaaaaaactcgagggggggcccggtacccaatcgcatcncat

SEQ ID NO: 1029 - DNA, 2033 bp, Homo sapiens
  misc_feature (1539)..(1539): n equals a,t,g, or c
ggcacgaggtgagctggtggtggggggagagcccagtgctgggcagaagggcgctgcttctctttgatgactctttcctgcatgctgcgttccatgaaggttcagcagaggatggcccacgggtggttttcatggtggatttgtggcatccaaacgtcgcagcggccgaacgcaggctcttgatttcatctttgctccgggacgatgagagtatttcccatgctggagtcggcgagaagggccgaggcggggcctgggcagactgtggtccggtccagtccctaccggtgttgtttccatgctcagaaacctgcctcagcggaaagctcttatttgggattttatatcatgtcgggtccctctttcccttggttattgtaaatggaaacttttcggcttgtatttccttagattttttttttttccttccaatcatttgcttcagagactcctttctggcctaacagcgcattcctttgattggtccttgagtgaccagagacttagtgcccttgtaagtctgtcttctgttgctacttgtttttttcagtgctctgaaatagagtaactaaatggttatttgtctgaatataataatgtaaaacttcttgtggtcatcttaaaaaaaaaaaaaaaaaactaaaaactgcaaaccagagagctagagaacttggcctctgatgctggcacacwggggacccttcagccacctgacggcagggggacagtctgcagcccccacacctgactggcttcagtagccaggtggaggggctgccagacacagtcagggtggcacacagtgtccaggcccagggatactgtcaccatcgctcacctcattctaaaccttgtcaggtccctgatggcaaaagcattgggccagtaggactggaggctactctttaaacatggctttcctgcaaagctgaagctggtgtcccccagcaccaagctgcggctcacacagatcagccacggaacgtgtgatccgcttacctcactgcctacagaagccctactgccaaactgggcctggaaaattcccagttttaggtgttttgagtccacagtgatgaacgttaaggccaccaggttggctgataggagctgtagggggataggaccgcgctcacccagcgacatttggggaaagcctttctctggcaaaactggaataatagatctgaccaaagtttctgttttgctttggagttctgttgcctatgtttttttttttttttttttttgtctgtacataaatgttcaaacactagacttggagatagtggaagagttggccctgtgtctttgtcatggcacaaaggtgtgcactgcgtgacaatgacccaagccagtgtgtgctagtgaggagacagagaagacctacatgcccagaggacccgtggccgttgtgctggttttctggtctcctgtgaagaacatgtggatctcttcccgaagaaaaggtcccaggagaccagtttgaggcactcactctagaaatagcctgtgttagctgatgtgtgaaagcgtasncggccagccacactagagatgccttttctgaataatgtattatgagcagtgtcagatttataaagccgaggagtggtttggaatatacagctggtcgcaggtgcaggtccagtgtttagatccaaatggaaaacagcagcttctaagaggtacaactgttggaagaaaacacagttgaaatgcaccaggcaggtactagcaagtgtgcaaagagcacgtctacatttgagtaaaatgtctacacagatatttgtcagtgatgagaatgcaggaaaaggcagacatttcaaacatacctgaagtctttttactcattatcttgttaaagaatcactgaggtgcatgatttctacacatcgtgactgctctgctctgcgtttacaaaaccaacagcccgcgcaggtacctagctacctgcattcatgtgacatgtctggggaacagaagataaataaaggatcttgctgaaaaccaaaaaaaaaaaaaaamaaaaa

SEQ ID NO: 1030 - DNA, 819 bp, Homo sapiens
  misc_feature (733)..(733): n equals a,t,g, or c
  misc_feature (754)..(754): n equals a,t,g, or c
ggcgcccgagtgcggtactggcggcgggcggcgggcagccatggcggaggccgcgtcgccgcacttgtcgctgccctcggggctgctggagctctgcgcgctgctgggcgccccccgggacagtctccgaagtctcgagcaggttgcttataaaaagggagtcaaacatctttctgctcttcttgatccagaggtcctgtccattttcgtgcctccttttatcagtaaagaggacagtcaaacggccggtgccaactgcggcactctcggtaaaacccggatgcgctccttgagaaagaagagagagaagcccagaccagagcagtggaagggsctcccggggccccccaragcgccaragcctgaggatgtcgccgtcccgggcggcgtggacctcctcaccctgccgcagctgtgcttcccagggggtgtgtgcgtggccactgaacctaaggaggattgcgtccacttcctggtgctgaccgatgtctgcgggaataggacctatggcgtggtggcccagtactaccggcccctgcatgatgagtactgtttctacaatrgcaaaacgcaccgggagtgtcctggctgcttcgtgcccttcgcggtgtgcgtggtctccargtttccctattacaactccctcaaggactgcctttcctgtttattggctcttctgaagccctgtaaagattttgaagtggacagtcatataaaagatttcgctgcgaantgtctttaatacccagcccgncacctggaccgctccatttggtatttaacatgaagtcgctccagattgtgttacctgcccgagca

SEQ ID NO: 1031 - DNA, 565 bp, Homo sapiens
gccaagggcaaactcttcctgcaccgcgtgggccgtgtggctcgggctggccgaagtggcacagcctactccttggtggcccctgatgaaatcccctacctgctggatctgcacctgttcctgggccgctccctcacctcgcccgacccctcaaggagccctcaggtgtggccggtgtggatggcatgctgggtcgggtgccacagagtgtggtgggcatcagcagacgttcccgtgcaccactgtgtgcctggccctgtgctgggcactgggggcactccctgcaggagccatcatctgtgaaaaggagcactgtatggccacagaagggcagcagctgcgtcagcctaagacagagacatttgaacagggccttgaagggtgtgcaggagttcgccagcaaagccaggcaggccaagacttgagttggcaactcagctgctgctgcttccatgtgttctgggttcagaggtcatggctgcaccggtcagagccctgagtgcctcagggtttggcaatggaatttttaatgtaataaatctttattgagcactgaaaaaaaaaa

SEQ ID NO: 1032 - DNA, 562 bp, Homo sapiens
  misc_feature (299)..(299): n equals a,t,g, or c
  misc_feature (317)..(317): n equals a,t,g, or c
  misc_feature (508)..(508): n equals a,t,g, or c
  misc_feature (554)..(554): n equals a,t,g, or c
gcggccgccactggagacactccctcccgcctcccgggtctcctggcggcggcggagtgaggctgacagcggggaacctgggagacccctccgccctccccgcggtggcagcggccgatccccggctccggcgcgagggacggccgcgatgcctcggcctgaggttacccggcccggcccttcctcgcttccctcgactattccactgcgtctccgcgccccgggtcatcctgcgagtccctctgacgggagggaagatggctgcacggagctggcaggacgagctggcccagcaggcngaggagggctcggcgkcntgcgggaaatgctctcggtcggcctaggctttctgcgcaccgagctgggcctcgacctggggctggagccgaaacggtaccccggctgggtgatcctggtgggcactggcgcgctcgggctgctgctgctgtttctgctgggctacggctgggcgcggcttgcgcggcgcccgcaaaaagcgaggagcccnccccgcaagcgggaggaggcggcggccgtgccggccgcggtccccnacgacctg

SEQ ID NO: 1033 - DNA, 2645 bp, Homo sapiens
  misc_feature (508)..(508): n equals a,t,g, or c
  misc_feature (971)..(971): n equals a,t,g, or c
  misc_feature (2034)..(2034): n equals a,t,g, or c
  misc_feature (2641)..(2641): n equals a,t,g, or c
gcaacgagctccaatccctgccctcggaactgtgtggcctctcttcctgcgggacctcaatgtccggaggaaccagctcagtacgctgcccgaagagctgggggacctccctctggtccgcctggatttctcctgtaaccgcgtctcccgaatcccagtctccttctgccgcctgaggcacctgcaggtcattctgctggacagcaaccctctgcagagtccacctgcccaggtctgcctgaaggggaaacttcacatcttcaagtatttgtccacagaggccgggcagcgtgggtcggccctgggggacctggccccttctcggcccccgagtttcagtccctgccctgcagaggatctatttccgggacatcggtacgatggtgggctggactcaggcttccacagcgttgatagtggcagcaagaggtggtctggaaatgagtcaacagatgaattttcagagctgtcattccggatctcagagctggcccgggagccccggggncccagagaacgcaaggaggatggctcagcggacggagaccctgtgcagattgacttcatcgacagccatgtccccggggaggatgaagagcgaggcactgtggaggagcagcgaccacccgaattaagccctggggcaggggacagggagagggcaccaagcagcaggcgggaggagccggcaggggaggagcggcggcgcccggacaccttgcagctgtggcaggagcgggaacggcggcagcagcagcagagcggggcgtggggggccccgaggaaggatagcctcttgaagccagggctcagggctgttgtgggaggggccgccgccgtgtccactcaagccatgcacaacggctcgcctaagtccagtgcctcccaagcaggggctgcagcggggcagggagccccgcccctgcccctgcctcccaagagccccttcccatagctggaccagcgacagnacctgctccacggccacttggctccattcagagaccaaacagcttcctcttccgttcctcctctcagagtggctcaggcccttcctcaccagactctgtcctgagacctcggcggtacccccaggttccagatgagaaggacttaatgactcagctgcgccaggtccttgagtcccggctgcagcggcccctgcctgaggacctggccgaggctctggccagtggggtcatcctgtgccagctggccaaccagctacggscgcgctccgtgcccttcatccatgtgccctcccctgctgtgccaaaactcagtgccctcaaggctcggaagaatgtggagagttttctagaagcctgtcgaaaaatgggggtgcctgaggctgacctgtgctcgccctcggatctcctccagggcactgcccgggggctgcggaccgcgctggaggccgtgaagcgggtggggggcaaggccctaccgcccctctggcccccctctggtctgggcggcttcgtcgtcttctacgtggtcctcatgctgctgctctatgtcacctacactcggctcctgggttcctaggccccaaaatcggccctccctcacccctttcccttcctctctatttataaggtccctgctccacccgaccccacctgcggtgccttcagccccaaccaaagacactagtgcacccccttcacagacactgacctcagaggccccactctggtgcccccagaccctgggcccccagcctctggcctccctccagtagccccacgagtccccacctctcagtgctgacggtgccttcatgtccccgccggccctgcccctgccctctgtaccccgtgaggggtggcaggagctggagtctcccccttcctcctgtgccctccccttccccccccaacagctgctatgggggggctaaattatctctattttgtagagaggatctatatttgtaggggttcggggcccaggccgggtccctatctctgtgtataaactgtacagaccgtggccgccctgcctgtgtgtgtgtgtgtgcgcgcgcgcgsncgtctgctccgcgtgttggtggctgtggccatggctctgtgcccaccagcatctccctcctgagatgccggcctctcatgctcccggagcgtccgccaaccccccgtgtcacctmccttstgttatcgctgacagctttcttgcgtctcatttgtcgccgagccccgagcgcaggtgatgctcgggtctgcccccgaccccctgccacargccggaagccgcagggggcamcgtggggaarctaacccggccccttcccccargagtcactgtgccagccccaccacatcctggaagaggagggggccccggraaggggcctcccctacatcgctgctgtcgtccacgccctgctggaccggccttaggggtgaaggtgggggcacagggcccaccccgcccgggaccccgggagcagaagacgcgcctgggctccgcgctctcagagaagcacgtggtgagggtggcctgggcctgggcacccttggcctgccggcctggctgcctctggggtcgagggtctgggtggaaggaccgcgggtgtcgcaggtgtcgtgtcagccgcaataaacagaagccagaaraaaaaaaaaaaaaaaaaaagggnggcc

SEQ ID NO: 1034 - DNA, 596 bp, Homo sapiens
tgataatatagcttataattagcttatcaattaaatatgcatggctgtatctaaagggcttgaaaactgtttttaaggtttttcttttctatcttgattttatatttaggaaamcccaggtaaactcacaaatagrggaacatttttttaagcaggaaaatatgtaacaatttttgggccaaatgcttaagaagtgagaattttgaaatggaaacaaaagttggaatctgtcttagaagtaatctactccaccccttctctcccagcagtttgagtgctctatttaaagctagaattttgagcatgagaacgccactgtggacaacagagagattttctctctctctcacctcttctctttctctccttctatctccccctccaccaccatctctctcatcttcttccctttgtccccaccccattgcttttttctttctgcttttcctgttccctatccttacgcaggattgttttactgttagccaggttaagtttaagcttcttgaggactttagtactgaaagacaatggctcacttgtaagacctagttgaagagtacagatttagatttgttcagtgtgctgtgatctgt

SEQ ID NO: 1035 - DNA, 503 bp, Homo sapiens
  misc_feature (481)..(481): n equals a,t,g, or c
ggcacgagagcgcctggagccacacagggatccggagcctgggggaaaagcggcgcgggagccggcacccaccgctggaggggcggcgacggcggccgtagcgacctcgggaggcaagcggagccgccatggccgagttcccgtcgaaagttagcacgcggaccagcagtcctgcgcagggcgccgaagcctcggtgtcggcgctgcgcccggacctgggcttcgtgcgctcccgcctcggggcgctcatgctgctgcagctggtgctggggctgctggtgtgggcgctgattgcggacaccccgtaccacctgtatccggcctatggctgggtgatgttcgtcgctgtcttcctctggctggtgacaatcgtcctcttcaacctctacctgtttcagctgcacatgaagttgtacatggttccctggccactggtgttaatgatctttaacatcagcggcaccgttctctacatcaccgncttcatcggctgctctgcggca

SEQ ID NO: 1036 - DNA, 2520 bp, Homo sapiens
  misc_feature (99)..(99): n equals a,t,g, or c
cgcatcccgcaccaaagttttccccggggagcgcgtagagcatgtaacttttaacttcacgttggagaatcagatccaccgaggcgggcagtacttcantgacaagttcattgggctgcggctcaagtcagtgtcctttgaggattccctgtttgaagagtgttattttgaggatgtcacatccagcaacacgtttttccgcaactgcacattcatcaacactgtgttctataacactgacctgttcgagtacaagtttgtgaacagccgtctgataaacagtacattcctgcacaacaaggagggctgcccgctagacgtgacagggacgggcgaaggtgcctacatggtatactttgtgagcttcctggggacactggcagtgcttcctgggaatatcgtgtctgccctgctcatggacaagatcggcaggctcagaatgcttgctggctccagcgtgatgtcctgtgtctcctgcttcttcctgtcttttgggaacagtgagtcggccatgatcgctctgctctgcctttttggcggggtcagcattgcatcctggaatgcgctggacgtgttgactgttgaactctacccctcagacaagaggaccacagcttttggcttcctgaatgccctgtgtaagctggcagctgtgctggggatcagcatcttcacatccttcgtgggaatcaccaaggctgcacccatcctctttgcctcagctgcccttgcccttggcagctctctggccctgaagctgcctgagacccgggggcaggtgctgcagtgaaggggtctctagggctttgggattggcaggcacactgtgagaccaacaactccttccttcccctccctgccctgccatcctgacctccagagccctcactccccactccccgtgtttggtgtcttagctgtgtgtgcgtgtgcgtgtgcatgtgtgtaaaccccgtgggcagggactacagggaaggctccttcatcccagttttgagatgaagctgtactccccatttcccactgcccttgactttgcacaagagaaggctgagccccatccttctccccctgttagagaggggcccttgcttccctgttccaggggttccagaataggcttcctgccttccccatcattccctctgcctaggccctggtgaaaccacaggtatgcaattatgctaggggctggggctctggtgtagaccatggaccaaaagaacttcttagagtctgaagagtgggcctcgggtgccctctcacatctcctgttggatgctgggggagaagcaataaacctcagccctctggcctccactttcctctcaatttgggctgcaaatatgaagcctgaattttatgaaattagctttctgattcttatttattaatagattaagttctgaggcagctccgcagactgtgtgtgaatgtgtatgtatacttacatatgtgtgtgcatgtgccatggggcggggggtatcactatactgtcctcaaatataagccaagggtaatttcagcggatgcacacacaaccctgcctcccacagttcctcccctaatctggtttctgtgttgagcctgggatggaggagccctaggccagcctgggataagagtcccacagtctagggagatctgagggcatccgacaaggcccatctccttccctcctcaagaagcagaggcctcctctggagtgagaggctccacccactacagcacaggcgggaatagcacagctgccctcccatgctccctacctgtcccctcacagggaggggagcaggggagggaaagaaaccaggcatctggtcaaaccagcagatcaaaaagcacaaagagctggggcagaggcaggaagcaggggccctcctggcagctcctctgagtggggagaggttgggcagtgagtgagggacccctaatgcagggactagaagcctcagtttccccattttacccttccacacaatagcctctgtaggttaggctgccccatcccaccctactctgtgtggctgctttctttggtgccctcccctcaccccactgtagctgtgacgtgttgtagtttttagatgtttgtaaaatgtttaaaaaaatgttaaaaggaaaaaagtgaaaataacaaaaaagaaaatcaaaattcaccttcgtcatgctgcgtccagtgccccaaccctgtggtcactctccccattttgtaacactgtaccaggtggtgactgtttaactctttggtgtctgtgctcaaaagactgccttctccagtgcccagtgtatgagtgtgtgccctgtgcccttgtccctcactccccacatgctggacgtagccctcttcctcgcacccctgggagggacccatccatctcccttgctctcctggggaaccctaaacccaactctgttgatgtgaaaaatgcagtgaaaaatattgacgaaaaataaaacggaaacaaatcctcaaaatacaaaaaaaaaaaaaaaaaaaaaaaaaaaaaaaaaaaaagg

SEQ ID NO: 1037 - DNA, 1461 bp, Homo sapiens
ggcgcactgatcccgcctggggccggctgagtggcacttaagcgggccatgccatgcaaccttgggcgctgccaaccgtgggcgagctctgggtgtgcgggcggcctggcgcggcgctccgctgtgtcagcgtgttatgatgccgtcccgtaccaacctggctactggaatccccagtagtaaagtgaaatattcaaggctctccagcacagacgatggctacattgaccttcagtttaagaaaacccctcctaagatcccttataaggccatcgcacttgccactgtgctgtttttgattggcgcctttctcattattataggctccctcctgctgtcaggctacatcagcaaagggggggcagaccgggccgttccagtgctgatcattggcattctggtgttcctacccggattttaccacctgcgcatcgcttactatgcatccaaaggctaccgtggttactcctatgatgacattccagactttgatgactagcacccaccccatagctgaggaggagtcacagtggaactgtcccagctttaagatatctagcagaaactatagctgaggactaaggaattctgcagcttgcagatgtttaagaaaataatggccagattttttgggtccttcccaaagatgttaagtgaacctacagttagctaattaggacaagctctatttttcatccctgggccctgacaagtttttccacaggaatatgtatcatggaagaatagaggttattctgtaatggaaaagtgttgcctgccaccaccctctgtagagctgagcatttcttttaaatagtcttcattgccaatttgttcttgtagcaaatggaacaatgtggtatggctaatttcttattattaagtartttattttaaaaatatctgagtatattatcctgtacacttatccctaccttcatgttccagtggaagaccttagtaaaatcaaagatcagtgagttcatctgtaatattttttttacttgctttcttactgacagcaaccaggaatttttttatcctgcagagcaagttttcaaaatgtaaatacttcctctgtttaacagtccttggaccattctgatccagttcaccagtaggttggacagcatataatttgcatcattttgtcccttgtaaatcaagatgttctgcagattattcctttaacggccggacttttggctgtttcctaatgaaacatgtagtggttattatttagagtttatagccgtattgctagcaccttgtagtatgtcatcattctgctcatgattccaaggatcagcctggatgcctagaggactagatcaccttagtttgattctattttttagcttgcaaaaagtgacttatattccaaagaaattaaaatgttgaaatccaaatcctagaaataaaatgagttaacttcaaamaaaaaaaaaaaaaaaaactcga

SEQ ID NO: 1038 - DNA, 1771 bp, Homo sapiens
  misc_feature (1745)..(1745): n equals a,t,g, or c
  misc_feature (1757)..(1757): n equals a,t,g, or c
gcagcactcggttccgtgcaactttcaagtgagttgcgaactccgccctgtaggccggtgctggtggcccggcgcgctggaaccgcggcgacccgctccagcgcgggaccagcagcaagggccgagcgccaggttctccgcggcagaaagggcgggtgggagctgtaactgccccggccgcggggcgcgcccgctcccaagtcggcttcctccccgccggggccgctttgcctcgggtctccccattctccaggtcccctgaactgcacagtcggaggccgtgggcggcgggctctgcctccgccgagggacagccggatcgcccctctgcttcccgcaactgccctgatcaccccccgtcccagcccttgagtgaacgtccttctgagcggcttcctggggtcctccccacgtcccaaaggccggcaagatggtgtcctggatgatctgtcgcctggtggtgctggtgtttgggatgctgtgtccagcttatgcttcctataaggctgtgaagaccaagaacattcgtgaatatgtgcggtggatgatgtactggattgtttttgcactcttcatggcagcagagatcgttacagacatttttatctcctggttccctttctactatgagatcaagatggccttcgtgctgtggctgctctcaccctacaccaagggcgccagctgctttaccgcaagtttgtccacccgtccctgtcccgccatgagaaggagatcgacgcgtacatcgtgcaggccaaggagcgcagctacgagaccgtgctcagcttcgggaagcggggcctcaacattgccgcctccgctgctgtgcaggctgccaccaagagtcagggggcgctggccggcaggctgcggagcttctccatgcaggacctgcgctccatctctgacgcacctgcccctgcctaccatgaccccctctacctggaggaccaggtgtcccaccggaggccacccattgggtaccgggccgggggcctgcaggacagcgacaccgaggatgagtgttggtcagatactgaggcagtcccccgggcgccagcccggccccgagagaagcccctaatccgcagccagagcctgcgtgtggtcaagaggaagccaccggtgcgggagggcacctcgcgctccctgaaggttcggacgargaaaaagactgtgccctcagacgtggacagctagggtctgctgcatctgcccccttcttacctcgtgccctgcagggctccagggctatttggagggaccttgggctgcacatctggcctgcctgcaccagctgcctgggccccaccctcctgactcctgctgatggttaagggccgggagcagatgctgccaaggccacatgcagggatgcacccacaatgtaccaaagcaggctgggcccagggttctatttattgccttgctctgccctctcccttccccggttgtgggacaagagccctccctgaacccctgcaaccctccctgaacccctgcaaatgaaaccaaacgtccacctgggtgtgttcattccttcctgtccttcaaagtacttgatagcctttcataaggcctggcacatgtgtcctggttgtgtgtgtgtgtgttggtgagtgaggtcaggtttgcgagtgttttgataaataaatacataaaggggcaaaaaaaaaaaaaaaaaaaaaaaaamaaaaaaaaaaaaaaaaaaaaaaaaaaaaaaaaaaaaaaaaaaaaaaaanaaaaaaaaaaanaaaaaaaaaaaggg

SEQ ID NO: 1039 - DNA, 1519 bp, Homo sapiens
  misc_feature (715)..(715): n equals a,t,g, or c
  misc_feature (747)..(747): n equals a,t,g, or c
  misc_feature (1397)..(1397): n equals a,t,g, or c
  misc_feature (1409)..(1409): n equals a,t,g, or c
  misc_feature (1423)..(1423): n equals a,t,g, or c
  misc_feature (1431)..(1431): n equals a,t,g, or c
tcgacccacgcgtccgctcagagaatgtccagagctaagtctgagcaaagggccagcttttgcttttggggctggggtacaggcagattcctgttggagagcatttattttacttttcaagtgtgggctttctggaaggtaatgggaaactgcaaggtgtcttgcaagcaggtgtttggcttatggtgatgtggttcccagggtggcttttgggcaggggcagggcggggtcctccaggagctgtctgtcggtgctgagctcagtctgcttccctaccactcagcccamtgcttggatggttccctctgtcamtctcatcttacamtgtccaggttttagcactgaaatcatatgtgtgggaagcctctcagtcccaggccaaccagaacagttggtcgccccgtgtctaacatacctgtctaactgtctccagggcatggctcatcagcgtggctgtggcaccctctccctgccttctcttgtctccttcactgtcaagtctgggaaagggctcctggtgggtgtccgatgaggcacagctgggtgacaaagatggctccagctctggttggggcgtgcacctcatggtgacacctccctctgtgggacctccgagggtcaaggaaggaggcaccttccatcctaggtttaggattcattgcacttacacaggattccccgtggcagatcacctgtgttccagargctgtgtanttcaaggtgtgtgtgaggcagttgcatggtangggggcacctataactgggggtaagtctgtaatggtgcaatagatgatgttagaacagtgggggtccccctccctctcaggcctcaaaagcacaaccaccagarctggtgggtggcactgggccatggggagacctgaccagcaaggctccctctttcctctgtccaggccacccagcctgaratacagtgctggtcactctaaggaatgctgtggcccccaagggacaccccttgggtggctcctcccwggcttctcactgckggctggcargcargctggtgggcgggcaarcgtaatattacccctaagataaatgaagaagagtttcagcccttattggattatagtttttattgaactttataaattccaattagcagacccctgggcaataagcgacacacagcccgtggctcgctttatagcgtgattatgaccctgtttatcctcccctgaacgagaagtattaatggaggaaacaaaggaaagggactcaaaaatacataaaaacagatattggtgacacagagataaacagacaggagtcagggagagaaaacaatctccgggcaggcaagggggaacagagaatcagagattctaagaacccatgtgctcagaccaccgtgagcttggatgtccttctnggctcctcccanggcacaaacccctnagctcctnaagctgctggggctgaagagacctccctcccaagcctactcaggatcttgctggggtggatgtgattataatgaaatcaggtgccacc

SEQ ID NO: 1040 - DNA, 1448 bp, Homo sapiens
gtctatccattttttggagtctgaattcagtagaggaatttcagacaattatactctagcccttataacttatgcattgtcatcagtggggagtcctaaagcgaaggaagctttgaatatgctgacttggagagcagaacaagaaggtggcatgcaattctgggtgtcatcagagtccaaactttctgactcctggcagccacgctccctggatattgaagttgcagcctatgcactgctctcacacttcttacaatttcagacttctgagggaatcccaattatgaggtggctaagcaggcaaagaaatagcttgggtggttttgcatctactcaggataccactgtggctttaaaggctctgtctgaatttgcagccctaatgaatacagaaaggacaaatatccaagtgaccgtgacggggcctagctcaccaagtcctgtaaagtttctgattgacacacacaaccgcttactccttcagacagcagagcttgctgtggtacagccaatggcagttaatatttccgcaaatggttttggatttgctatttgtcagctcaatgttgtatataatgtgaaggcttctgggtcttctagaagacgaagatctatccaaaatcaagaagcctttgatttagatgttgctgtaaaagaaaataaagatgatctcaatcatgtggatttgaatgtgtgtacaagcttttcgggcccgggtaggagtggcatggctcttatggaagttaacctattaagtggctttatggtgccttcagaagcaatttctctgagcgagacagtgaagaaagtggaatatgatcatggaaaactcaacctctatttagattctgtaaatgaaacccagttttgtgttaatattcctgctgtgagaaactttaaagtttcaaatacccaagatgcttcagtgtccatagtggattactatgagccaaggagacaggcggtgagaagttacaactctgaagtgaagctgtcctcctgtgacctttgcagtgatgtccagggctgccgtccttgtgaggatggagcttcaggctcccatcatcactcttcagtcatttttattttctgtttcaagcttctgtactttatggaactttggctgtgatttatttttaaaggactctgtgtaacactaacatttccagtagtcacatgtgattgttttgttttcgtagaagaatactgcttctattttgaaaaaagagttttttttctttctatggggttgcagggatggtgtacaacaggtcctagcatgtatagctgcatagatttcttcacctgatctttgtgtggaagatcagaatgaatgcagttgtgtgtctatattttcccctctcaaaatcttttagaatttttttggaggtgtttgttttctccagaataaaggtattactttagaaaaaaaaaaaaaaaaaatcgaa

SEQ ID NO: 1041 - DNA, 1882 bp, Homo sapiens
acccacgcgtccgctagccctgcccggccccggaggacttgcaacactccgaggccaggaacgctccgtctggaacggcgcaggtcccagcagctggggttccccctcagcccgtgagcagccatgtccaaccccagcgccccaccaccatatgaagaccgcaaccccctgtacccaggccctcygccccctgggggctatgggcagccatctgtcctgccaggagggtatcctgcctaccctggctacccgcagcctggctacggtcaccctgctggctacccacagcccatgccccccacccacccgatgcccatgaactacggcccaggccatggctatgatggggaggagagagcggtgagtgatagcttcgggcctggagagtgggatgaccggaaagtgcgacacacttttatccgaaaggtttactccatcatctccgtgcagctgctcatcactgtggccatcattgctatcttcacctttgtggaacctgtcagcgcctttgtgaggagaaatgtggctgtctactacgtgtcctatgctgtcttcgttgtcacctacctgatccttgcctgctgccagggacccagacgccgtttcccatggaacatcattctgctgaccctttttacttttgccatgggcttcatgacgggcaccatttccagtatgtaccaaaccaaagccgtcatcattgcaatgatcatcactgcggtggtatccatttcagtcaccatcttctgctttcagaccaaggtggacttcacctcgtgcacaggcctcttctgtgtcctgggaattgtgctcctggtgactgggattgtcactagcattgtgctctacttccaatacgtttactggctccacatgctctatgctgctctgggggccatttgtttcaccctgttcctggcttacgacacacagctggtcctggggaaccggaagcacaccatcagcccsgaggactacatcactggsgccctgcagatttacacagacatcatctacatcttttagctcaggaaggtagaagagatctgtgcccatgggtctccttgcttcaatcccttcttgtttcagtgacatatgtattgtttatctgggttagggatgggggacagataatagaacgagcaaagtaacctatacaggccagcatggaacagcatctcccctgggcttgctcctggcttgtgacgctataagacagagcaggccacatgtggccatctgctccccattcttgaaagctgctggggcctccttgcaggcttctggatctctggtcagagtgaactcttgcttcctgtattcaggcagctcagagcagaaagtaaggggcagagtcatacgtgtggccaggaagtagccagggtgaagagagactcggtgcgggcagggagaatgcctgggggtccctcacctggctagggagataccgaagcctactgtggtactgaagacttctgggttctttccttctgctaacccagggagggtcctaagaggaaggtgacttctctctgtttgtcttaagttgcactgggggatttctgacttgaggcccatctctccagccagccactgccttctttgtaatattaagtgccttgagctggaatggggaagggggacaagggtcagtctgtcgggtgggggcagaaatcaaatcagcccaaggatatagttaggattaattacttaatagagaaatcctaactatatcacacaaagggatacaactataaatgtaataaartttatgtctagaagttaaaaccctgtatggccccttccctagttcttttttggggttagttatcagtctcctttgtctgtctctttcccctcctaatcttgaagttcaatgaaa

SEQ ID NO: 1042 - DNA, 500 bp, Homo sapiens
gaattcggcacgagcagcgcgcacttaccaccatgcagatccaggtcgcggggctgctgcagtttgccgtgcccctcttctccactgcagaggaagacctgcttgcaatccagctcctgctgaactcctcagagtccagccttcaccagctgaccgccatggtggactgccgagggctgcacaaggattatctggacgctcttgctggcatctgctacgacggcctccagggcttgctgtaccttggcctcttctccttcctggccgccctcgccttctccaccatgatctgtgcagggccaagggcctggaagcacttcaccaccagaaacagagactacgatgacattgatgatgatgacccctttaacccccaagcctggcgcatggcggctcacagtcccccgaggggacagcttcacagcttctgcagctacagcagtggcctgggaagtcagaccagcctgcagcccccggcccagaccatctccaacgcccct

SEQ ID NO: 1043 - DNA, 1061 bp, Homo sapiens
  misc_feature (992)..(992): n equals a,t,g, or c
  misc_feature (998)..(998): n equals a,t,g, or c
  misc_feature (1021)..(1021): n equals a,t,g, or c
  misc_feature (1051)..(1051): n equals a,t,g, or c
gccaggctggatggagcccagagctgtgggtctcctaccctcccatcccctcattccagcttgatcttccttaagagactcatacgccccaaccccttggtctgagtatcttagattgttctcgtggttcctccrtccttcaccactgaaggctgctgttcattctctctccgtctctgtcccttattgctctcacgtctgtctctgtcatcttttcactccttgtccctcttactccgttctttggcccccaatgaaagctgagtcagagacagacgcttcccctcagttcccagtgcctcccttgggggcccctccttggctgtatccgtcagtggctccaggctgccgcgcgcaggcttagctcattcctctgacctgccaggaagcagagagacccacagagcaggagggaggcagaaagtggagacggacctgagcccgaggaagaggcaggcagaggctgaggctgattccaccccagcctgcctggacaaccctccttagccgcagccccttccagttccctaggggttctgcccctccccctctctggggcaccagccccccagggtcctgcatcccaccatgtcgatggctgtggaaacctttggcttcttcatggcaactgtggggctgctgatgctgggggtgactctgccaaacagctactggcgagtgtccactgtgcacggkaacgtcatcaccaccaacaccatcttcgagaacctctggtttagctgtgccaccgactccctgggcgtctacaactgctgggagttcccgtccatgctggccctctctgggtatattcaggcctgccgggcactcatgatcaccgccatcctcctgggcttcctcggcctcttgctaggcatagcgggcctgcgctgcaccaacattgggggcctggagctctccaggaaagccaagctggcggccaacgcagggcccttccaaattcttggccggtatctgcgggatggtggcanctcctngtaagcttcaaatcaccggattnttcgaacctttaaccggaacaataagagtnggccgcttaa

SEQ ID NO: 1044 - DNA, 1329 bp, Homo sapiens
  misc_feature (1297)..(1297): n equals a,t,g, or c
tcgacccacgacgtccggcctcgggtgggccggggttgctgcgccgtcctccactactggctactggcgctgyagccatgcagcccccgcccccgggcccgctgggcgactgcctgcgggactgggaggatctacagcaggacttccagaacatccaggagacccatcggctctaccgcctgaagctggaggagctgaccaaacttcagaacaattgcaccagctccatcacgcggcagaagaagcggctccaggagctggccctcgccctgaagaaatgcaaaccctccctcccagcagaggccgagggggccgcacaggagctggagaaccagatgaaagagcgccaaggcctcttctttgacatggaggcctatttgcctaagaagaatggattgtacctgagcctggttctggggaacgtcaacgtcacgctcctgagcaagcaggctaagtttgcctacaaggacgagtatgagaagttcaagctctacctcaccatcatcctcatcctcatctccttcacttgccgcttcctgctcaactccagggtgacagatgctgccttcaacttcctgctggtctggtactactgcaccctgaccatccgggagagcatcctcatcaacaacggctcccggatcaaaggctggtgggtgttccatcactacgtgtccaccttcctgtcgggagtcatgctgacgtggcccgacggtctcatgtaccagaaattccggaaccaattcctctccttttccatgtaccagagcttcgtgcagtttctccagtactactaccagagcggctgcctctaccgcctgcgggcgctgggcgagcggcacaccatggacctcactgtggagggcttccagtcctggatgtggcggggcctcaccttcctgctgccttttcttttctttggacacttctggcagctttttaacgcgctgacgttgttcaacctggcccaggaccctcagtgcaaggagtggcaggtgcttatgtgcggctttcccttcctcctccttttcctcggcaatttcttcaccaccctgagggttgtgcaccacaagtttcacagtcagcggcacgggagcaagaaggattgaggctgggccttcccctgccggcccagaggggcttctgtcctgtgtgttgtgggaggggatgggaggcgcccctcgagtgtgcgtgtatcagggggtctcttctattctcccttgggttttatgggcgctgtgggccctgaaggaagacctgggcccagtgccctcaataaagagaggcccagaggtgnaaaaaaaaaaaaaaaaaagggcggccgctcta

SEQ ID NO: 1045 - DNA, 1542 bp, Homo sapiens
  misc_feature (1471)..(1471): n equals a,t,g, or c
cgctggcagtcaacgctggttcgctactgacgccaattggcaacccgcaaaatattcttatctggggacgttctggtctttcgtttgccggatttattgcccaaatggcaccgctggctggcgcaatgatgctgacgctcctgctcctgtgctggtgttgtttccctggaaaggcgatgcaataccatacgggggtgcaaacaccggagtggaaaccgcggctggtgtggagttgtctggggctgtatatcgtctttctgacggcgctggagttcaaacaagagctgtggggactggtgattgtggcggcaggctttgcgctgctggcacgtcgcgtggtgctcagtgtggactggacgctgctgctggtgtttatggcgatgtttatcgacgtccatttactgacccagcttccagcgttgcaaggcgtgttgggtaacgtgagtcatctatctgaacccgggttatggttaacggcaatcggtttatcgcaggtgatcagtaacgtgccgagtaccatattgttgctgaactatgtgccgccgtctttattactggtatgggcggtaaacgtaggtggctttgggttattacccggatcgctggcaaatttgattgcgctacgtatggcgaacgatcgccgcatctggtggcgtttccatctctattcaataccgatgctgttgtgggcggcgttggtgggatatgttttgttagttatactcccggccaactagggtctggcaaataaaaaaggcggattatgagtccgccttttgctttaagttttgaagattaattcagacgaaccggcatcccggagcggtttttaatcgcttcatcaagaacaacctggtcaacatctggctgaccggtcactgtctgcacgctcttcgtcagggtaattggcacaatttcctgaccttcaaactgggcttcggtggtagacagcgggttatggacttcaatataacggctgccgtctggctcggtggtcgcttttaccggctcatcaataaactgtacgcgggtaccgaccggtactttctcgaacaggaatttgatgtcttcgttacgcagacgcacacaaccatgacttacacgcaggccgataccgaagttggcgttggtgccatggatagcatacaggcgaccgatatagagtgcatacagccccatcgggttatccggacctgccggaacgacagccggaagcggttygcccgcagcgcggtactctgcgtgcattttggcggtcggcgtccaggtcgggcctgcttttttacgctcaactttggtggtccagttgataggcgtatctttgcctaactgaccaatgccgatcggcagcacgataacggtgttggtccctttcggatagtaataaagacgcatctcagcactgttaatgacgatgccttcatgaacggtatccggcaggatcagctgctgcggaatgttcagtacagtnaccgctttcggcaggaaggtatccacacccgggttcgcttccatcatattggaaagccccatctggtactc

SEQ ID NO: 1046 - DNA, 618 bp, Homo sapiens
  misc_feature (529)..(529): n equals a,t,g, or c
  misc_feature (613)..(613): n equals a,t,g, or c
  misc_feature (615)..(615): n equals a,t,g, or c
agttggggactaccagcttttgtggtgattctcctcatagttattttgaaaggaatctatcatcagagcatgtcacagatctatggactcattcatggtgacctgtgttttattccaaacgtctatgctgctttgttcactgcagctcttgttcctttgacgtgcctcgtggtggtgttcgtggtgttcatccatgcctaccaggtgaagccacagtggaaagcatatgatgatgtcttcagaggaaggacaaatgctgcagaaattccactgattttatatctctttgctctgatttccgtgacatggctttggggaggactacacatggcctacagacacttctggatgttggttctctttgtcattttcaacagtctgcagggactttatgttttcatggtttatttcattttacacaaccaaatgtgttgccctatgaaggccagttacactgtggaaatgaatgggcatcctggacccagcacagcctttttcacgcccgggagtggaatgcctcctgctggangggaaatcagcaagtccacccagaatctcaatcggtggtatggaggaaggtgccacctgactgggagagagcatccttccaaananggg

SEQ ID NO: 1047 - DNA, 1782 bp, Homo sapiens
  misc_feature (32)..(32): n equals a,t,g, or c
  misc_feature (1697)..(1697): n equals a,t,g, or c
  misc_feature (1702)..(1702): n equals a,t,g, or c
  misc_feature (1729)..(1729): n equals a,t,g, or c
  misc_feature (1741)..(1741): n equals a,t,g, or c
  misc_feature (1774)..(1774): n equals a,t,g, or c
ccacgcgtccgcgacgggagcgcgtggagttncgttgggggaaaagagtccttttatgacacattccatactgtggctgacatgatgtatttctgccagatgctggcagttgtggaaactatcaatgcagcaattggagtcactacgtcaccggtgctgccttctctgatccagcttcttggaagaaattttattttgtttatcatctttggcaccatggaagaaatgcagaacaaagctgtggttttctttgtgttttatttgtggagtgcaattgaaattttcaggtactctttctacatgctgacgtgcattgacatggattggaaggtgctcacatggcttcgttacactctgtggattcccttatatccactgggatgtttggcggaagctgtctcagtgattcagtccattccaatattcaatgagaccggacgattcagtttcacattgccatatccagtgaaaatcaaagttagattttccttttttcttcagatttatcttataatgatatttttaggtttatacataaattttcgtcacctttataaacagcgcagacggcgctatggacaaaaaaaraaaaagatccactaaaaagaaagatttagatggcttcttgccagtttgagcctaatctgattcttacagttttaccttcttgaaccaatgtaaaagtttttttaatgttaaatgattaaattctcagtgaggctatcttccttttccccagtaacattcctgaatttactgttatcttattgtagtacttgcatgacatggattcctgatatctgatgagaggttcattcttgtgtattcagttaatgacaccaaaaggctcagcccaccccaaccctatctcatgttcagtctgtctaatacatgccagagatttttttttcaaaaagtgctttatccctacaatgtactgacagttcttacagttgagatttgttcttttcagctattgcttgtgaaaaaaagcaagactatgtcactctatagaaggctgttaaagtgactcaggcaggaattaattattctgtacctaaggggttacttgtttaatgggatggcattgactttttgaaaatcaagtggactgagtcattgataaaacatttctaagagtggggctagagaacatactttacatctgacatcctttggcctaacaacatctattattatagtgctcagcagtgtgggcattgaagaggcgcagaatgctttgaaagaaactaatcagaatcttggaacatcatgatcatgccattcttaagtaaatcaactattttcaacactgaagaaaaatgaaacattatttagaaaacaatgagattacaagttccaaactcagccaggaatgtgggctcacacctgtaatcccagcactttgggacacctaggtgggagcatcgcttgaagccaggagttcaagaccagcttgggcaacgtagtgagacccctatctctacaaaaaataaaaaaattagctgggtgtgatggcacacacctgttgtcccagctactcaagaagctgagatgggaggatcctgagctcaggaggtcaaggctgcagtgagccgagawtgtgccactgcactgsagctggggtgacagtgcaagaccctgtcttaaaccaaaccaaaccacacacacacaaacacacatacacacacacacanacganggtccaaatggtagcagggatccaaangggacacagtangtagggtcaaactgggcagttacagtgtacagnctttgaca

SEQ ID NO: 1048 - DNA, 672 bp, Homo sapiens
  misc_feature (59)..(59): n equals a,t,g, or c
  misc_feature (641)..(641): n equals a,t,g, or c
  misc_feature (661)..(661): n equals a,t,g, or c
  misc_feature (663)..(663): n equals a,t,g, or c
cttggctcctcttctcactatcagcagagagctgttactgaacagtgaaaggggaaggnttctttgtcaatcccatcataactctgtccttttggtcckcctgcagatgctccagtggctttraccgctatcgccaggagtggatggactatggctgtgcacaggaggcagagggcaggatgtgcgaggacttccaggatgaggaccacgactcagcctcccctgacacttccttcagcccctatgatggagacctcaccactacctcctcctccctcttcatcgacagcctcaccacagaagatgacaccaagttgaatccctatgcaggaggagacggccttcagaacaacctgtcccccaagacaaagggcactcctgtgcacctgggcaccatcgtgggcatcgtgctggcagtcctcctcgtggcggccatcatcctggctggaatttacatcaatggccaccccacatccaatgctgcgctcttcttcatcgagcgtagacctcaccactggccagccatgaartttccgcagcacctgamcattccacctatgcggargtggagcctcgggccatgaaaaggaaggctccatggaagctgacaatgctgaaaaacaccaatctccctttgaaanactttgaaggcacagaaaananagttaaagc

SEQ ID NO: 1049 - DNA, 806 bp, Homo sapiens
ccatgtctttgcaataggataatataaagaatagtattaaaagtcagaggctttactaatctacctatatgtattccatggctaacaaaccctggcccctttacatatgagctctggaggttcgcctggctgcctcaggcttgcagaaggctgccccaatcacagagcctgggtaaggtggaacaggaggcagccccactcggcttttctgattgcatcccacctgtttctgagtgtgttggtttggtttaattcttttcaagggttggagttggaaagtgaaaaccctagacacttgctgtggaatgtttgcctggttgtattggtgtgtccctcttcttcactggcatgtcgctttcaagtgtaccaaaggacattttgttctgttgaaagccacaggaccaaaaggaaaatattgcaactatttgcaaacatacttccctacctatacaagcagccatatactaaaaagcactaaacaagcacaaatgaacactaaatagccttataccaaaaagcattcttgtaactgtcagggcatggtatgaattccttcctctttaagcagcaacttaccacaggcttggtggctttaagtaatatagcattaagcaaatggtcagttattttttaatgttgaaaacttccaagtgtgaataatacggacatagtttactaccttttgcttttaatatacctggttatctatttccatttgaaataaaatgaaaggagacctcaaactgatgctgagaagtagacaaaatcagctctcagacttaactctccccaattaaaatagtttt

SEQ ID NO: 1050 - DNA, 523 bp, Homo sapiens
  misc_feature (519)..(520): n equals a,t,g, or c
  misc_feature (522)..(522): n equals a,t,g, or c
cacgaactcccaggaggcagcgcagcccctggcatgggggcagcccacccactgccgctcggtatgtctccacaggctgacggggtacgggatccaccactgctttgccaggagcatgatgggccacgaggtgaaggtgccgctcctggagaacttctatgctgactactataccacggccagcatcgcgctggtgtcctgcctggccatgtgcgtggtggtccgattcctcgggcgcaagggaaggctgctgctcttcatgatcctcaccgccctggcctcgctcctgcagctcggcctcctcaacctgattggaaagtacagccagcacccagactcagggatgartgacagcgtcaaggacaaattttccatcgcgttttccatcgtggggcatgtttgcctcccatgcggtggggacctcagcgttttcttctgtgcggaaatcaccccaacggttattaaagttttgccggcttgggctggttcttgccaccccgggcttccggcattcttaanngna

SEQ ID NO: 1051 - DNA, 762 bp, Homo sapiens
  misc_feature (300)..(300): n equals a,t,g, or c
ggcagaggggaatcatggcagcatccaggccattgtcccgcttctgggagtggggaaagaacatcgtctgcgtggggaggaactacgcggaccacgtcagggagatgcgcagcgcggtgttgagcgagcccgtgctgttcctgaagccgtccacggcctacgcgcccgagggctcgcccatcctcatgcccgcgtacactcgcaacctgcaccacgagctggagctgggcgtggtgatgggcaagcgctgccgcgcagtccccgaggctgcggccatggactacgtgggcggctatgccntgtgcctggatatgaccgcccgggacgtgcaggacgagtgcaagaagaaggggctgccctggactctggcgaagagcttcacggcgtcctgcccggtcagcgcgttcgtgcccaaggagaagatccctgaccctcacaagctgaagctctggctcaaggtcaacggcgaactsagacaggagggtgagacatcctccatgattttttycatcccctacatcatcagctatgtttctaagatcataaccttggaagaaggagatattatcttgactgggacgccaaagggagttggaccggttaaagaaaacgatgagatcgaggctggcatacacgggctggtcagtatgacatttaaagtggaaaagccagaatattgagttatttcttaacaagtttcgagagagaagggagcaagacaagagcaagcaacggctattaaatgtcacaatcctttaatta

SEQ ID NO: 1052 - DNA, 1201 bp, Homo sapiens
  misc_feature (727)..(727): n equals a,t,g, or c
  misc_feature (1016)..(1016): n equals a,t,g, or c
  misc_feature (1149)..(1149): n equals a,t,g, or c
  misc_feature (1180)..(1180): n equals a,t,g, or c
ggagttcggagcctaggagccccccgcggctgcggcgcaggtgccctcggcctgagtcgggatggagctgcctgctgtgaacctgaaggtgattctcctaggtcactggctgctgacaacctggggctgcattgtattctcaggctcctatgcctgggccaacttcaccatcctggccttgggcgtgtgggctgtggctcagcgggactccatcgacgccataagcatgtttctgggtggcttgctggccaccatcttcctggacatcgtgcacatcagcatcttctacccgcgggtcagcctcacggacacgggccgctttggcgtgggcatggccatcctcagcttgctgctcaagccgctctcctgctgcttcgtctaccacatgtaccgggagcgcgggggtttccttgggtcttctcaggaccgtagtgcctaccaracgattgaytcagcagaggcgcccgcagatccctttgcagtcccagagggcaggagtcaagatgcccgagggtactgaagccagccacgctgcgcccggccctgccccgggccttcctcgtgcctgggaggtcgttctagggatgctcctgacctycgtctcttggacctaagatggaatgtgtccccagctcarggattgcctgaaccaagaggccaggagcccccatgggccgcccagtaccatgcacactcctgtcccgaactccctgaggcytcccctccnttcagggcacccatggttcccaggctggaamcagggtctctctttamctyctamcccatggtggsaccacaraggccctcagccgaktcctgsctgagtgttgcaakctcaggcctttaaggactgctgatgccccctcaggcctcccccaagtttgctgggctttggtggaagccctgagagcttcaggtcctgctcagcccgaggagcagtctggcatgggagtgaggccccgtccttctcactgcctggtcacatggtgcctagggatgcagggctggaggcagangtgtcagcaacactgtgaaccaacacaacttcagcctcccttttagagcacagcattaaagtttgggaatctgtaaaaaaaaaaaaaaaggggcgaagttattccttaggaggtaattagttggatggcgtgnttaaagtgtatggaaaaaaggtaccaattangctgagaatcctttcatggaa

SEQ ID NO: 1053 - DNA, 773 bp, Homo sapiens
  misc_feature (76)..(76): n equals a,t,g, or c
ttgcggtcaggcgattattaacgccgacgatgaagtgggccgccgctggctggcaaaactgccggacgcggttgcngtatcaatggaagatcatattaatccgaactgtcacggacgctggttgaaagcgaccgaagtgaactatcacgacagcggtgcgacgattcgctttagctcaagttggggcgatggcgaaattgaaagccatctgatgggcgcttttaacgtcagcaacctgctgctcgcgctggcgacactgttggcactcggctatccactggctgatctgctgaaaaccgccgcgcgtctgcaaccggtttgcggacgtatggaagtgttcactgcgccaggcaaaccgacggtggtggtggattacgcgcatacgccggatgcactggaaaaaccttacaggcggcgcgtctgcactgtgcgggcaagctgtggtgtgtctttggctgtggtggcgatcgcgataaaggtaagcgtccactgatgggcgcaattgccgaagagtttgctgacgtggcggtggtgacggacgataacccgcgtaccgaagaaccgcgtgccatcatcaacgatattctggcgggaatgttagatgccggacatgccaaagtgatggaaggccgtgctgaagcggtgacttgcgccgttatgcaggctaaagagaatgatgtggtactggtcgcgggcaaaggccatgaagattaccagattgttggcaatcagcgtctggactactccgatcgcgtcacggtggcgcgtctgct

SEQ ID NO: 1054 - DNA, 948 bp, Homo sapiens
  misc_feature (856)..(856): n equals a,t,g, or c
ggcagagggccatttcctgcaaagagccaaacccccattcctctgtgcccctcctctcccaccaagtgctttataaaaatagctcttgttaccggaaataactgttcatttttcactcctccctcctaggtcacacttttcagaaaaagaatctgcatcctggaaaccagaagaaaaatatgagacggggaatcatcgtgtgatgtgtgtgctgcctttggctgagtgtgtggagtcctgctcaggtgttaggtacagtgtgtttgatcgtggtggcttgaggggaacccgctgttcagagctgtgactgcggctgcactcagagaagctgcccttggctgctcgtagcgccgggccttctctcctcgtcatcatccagagcagccagtgtccgggaggcagaagatgccccactccagcctgcatccatccatcccgtgtcccaggggtcacggggcccagaaggcagccttggttctgctgagtgcctgcctggtgaccctttgggggctaggagagccaccagagcacactctccggtacctggtcctccacctagcctccctgcagctgggactgctgttaaacggggtctgcagcctggctgaggagctgcgccacatccactccaggtaccggggcagctactggaggactgtgcgggcctgcctgggctgccccctccgccgtggggccctgttgctgctgtccatctatttctactactccctcccaaatgcggtcggcccgcccttcacttggatgcttgccctcctgggcctctcgcargcactgaacatcctcctgggcctcaagggcctggccccagctgagatctctgcagtgtgtgaaaaanggaatttcaacgtggcccatgggctggcatggtcatattacatcggatatctgcggctgatcctgccaaaastccaaggccggattcgaact

SEQ ID NO: 1055 - DNA, 785 bp, Homo sapiens
  misc_feature (74)..(74): n equals a,t,g, or c
gccctcagttctctggccaagaggagcaattttcgtgccatcagcaaaaagctgaatttgatyccacgtgtggnacggcgagtatgatctgaaagtgccccgagacatggcttacgtcttcrgtggtgcttatgtgcccctgagctgccgaatcattgagcaggtgctagagcggcgaagctggcagggccttgatgaggtggtacggctgctcaactgcagtgactttgcattcacagatatgactaaggaagacaaggcttccagtgagtccctgcgcctcatcttggtggtgttcttgggtggttgtacattctctgagatctcagccctccggttcctgggcagagagaaaggctacaggttcattttcctgacgacagcagtcacaaacagcgctcgccttatggaggccatgagtgaggtgaaagcctgatgtttttcccggccagtgttgacatcttccctgaacacattcctcagtgagatgcaggcatctggcacccagctgctataaccaagtgtccaccaactacctgctaagagccgggagcatggaacgtgttgggatttagagaacattatctgagaaaagagttcacttcctgctcccaggatatttctcttttctgtttatgaagtacaacccatgctgctaagatgcgagcaggaagaggcatcctttgctaaatcctgtttgaatgtcattgtaaataaagcctctgctctcagatgtaaaaaaaaaaaaaaaaaaaaaaaaaaaaaaaaaaaaaaggggggggggc

SEQ ID NO: 1056 - DNA, 853 bp, Homo sapiens
gcaagcaaacctagagatcactggccccaaggtggcatctcctgggccacaaggaaaaaaacgtgactaccagcgtctgggatkgcccagcccggacgaatgcctcaaactccgctgggtagagctgactgccatcgtgagtacctggcttgcagtttcttcaaaaaacattgacatcacagaacacatagattttgccacccctatacagcagccagcaatggagcctctttgcaatggcaatctccccacgagtatgcataccctggaccacttgcatggggtttccaaccgagccagcctgcactacacaggggagagtcagttaacagaggtattacaaaatctcggcaaagaccaatatccacaacagtcgcttgaacagattggcacccgaattgccaaagttttggaaaagaaccagacgtcctgggtcctctccagcatggcagccctctactggagggtgaaaggccaaggaaagaaggcaatcgactgcctccgccaggctctgcactatgcgccacaccagatgaaggatgtgcccctgattagcctggccaacatcttgcacaatgccaagctctggaatgacgccgtcatagtagccaccatggcagtagagatcgcaccacactttgctgtgaaccacttcactctgggcaatgtctacgtggcaatggaagaatttgaaaaagcactggtgtggtatgaatccacattgaagcttcagcccgagtttgtcccagccaagaaccgaatccagaccatccagtgtcacttaatgctgaagaagggacggcgctctccttagtgcacttcttccttctctctttctctttactcatgctct

SEQ ID NO: 1057 - DNA, 663 bp, Homo sapiens
gggaaactgaggcacagaggggttaacttctcccagggggattgagctagtgagtagtgtaacctgatattggacccaggcagtctggctccagggccaatgcttgggtccctgttcttctgcctctcagtatgcgaatggccagtctgtttctttaattggagtgagtggcacttggcacacccacacagccaccttaaacattgtgggaaatcaagtccaagtatctcaagtaacagtacaacawtccatatcrggaaaaacagcttagggcttgacttcattatggttttggctgccattttatgcattctgagtagaagaaacattcctcctagcgcccccaccttgtctttaacattccgcagtggaagttcctcaaagctctccgttttgaaagcatcctctatgattaccagccactaaattgcatctgccaccgagggcccaatgggctttgaacctgttattcttgggaaattcaagctgcgagggagagagagaacgttgtacacgtgtgcagctgtgctttggagtasaagaagtaatcgtatgtgtctgtgtgttttttatgggggtaggggaagggtatattaattaacccaactgagaaggagatgactgtgttccaggaaggagccaatgaaatgagtttgctttaaa

SEQ ID NO: 1058 - DNA, 2062 bp, Homo sapiens
  misc_feature (49)..(49): n equals a,t,g, or c
  misc_feature (1379)..(1379): n equals a,t,g, or c
  misc_feature (2047)..(2047): n equals a,t,g, or c
gctcgggggcctgggctgcccctgacaccccttctgggcgatggtgcancccaagggcgcctccatcccccgccgctgccgctaacccgggtcccctacccccacttctctcagttcctggcatgaggagagaagaccctgctctggtggagctgacaagaccaaggagatccagtctgtctacatccgtgagggcatggggcagctggtggctgctaacgatgggtgacgctggtgaagtggcccagggaagtgcacatgtctctccctgctcttccagggtgatttttttgatgtttggctcttggtccttgtttccactggctttccatccccatggggcagaaacagtggctcctgggagcagaaaaggaattgaggtgggcaggcagaagagcctggattgctcactgttttgggaaacttacatgttgagatctacagagatccaggaaaccaaagccctgctgagcagagccattttgtggctatttctggargcccaggartgtggctgcaagagaaaaggggctggaggaagatccggagggcaggggtgttccctctgctgatgatggatgcccctaacacctgtgcctaacacccctactgaaccccacagctccagccttagtttttggagtcaagtgttaaaggtttctggccagaggaattggggtcttgccatccctgcaatagcccttttatgggctctgggagacagctttagggaataaatggggattttcccctttttctacccactcctttgcttcctccaagacttacccaactccttccccctcagagaaccaaatagcctgaggaagcaggagagttcctggttatggcagtttcttggtgatttggggcttcaagacagtaggtgagagatgctgtcaggacgtatcttcttcataccaaagtcactggtcctttctcagcctctctcgtgcttttctcctaatgaccatatttttgccaaaaattgggatatgttatctgacagaccagaatatttgaagtttgggctgtcctgaaagtctggactttggtggtaccctcctcccccagcccatctgttgcacattatactccgtgtgttcttcaactttcggcgcccttattcccctgccttcctggcttgattgaaggaaagcttgaaaaggcgcagagccctatacctcatttcctccatgataaaaggatccaagtgaggccctgtcacagcctgtgggtaggggatgcggcgggatcctcattgccatggtactcaaaggtagaagagcctggagtttgttgcttctctttgctattctttcatatcctcttgggcctggtgattaattagcaattctcattcctctcagccaaaggcntgcactgggctttatttgtctttttttattttttaagcactgcctgccagagatgggcctggggctgatgaggaccttagcgctgctcgttctccttttctgttcatgcacacattcctccatggggtggggaaggcaggcatggggtgtggccctcggagaagttaggagtcccccagctcaagatacagtggcaaagacctagtggtcccctacccccacttctctcagttcctggcatgaggagagaagaccctgctctggtggagctgacaacctttgaggctgggaggagagcagcctctgggcatcgttcccagtgtccctcacactaaaacggcgtagatggcaaccccccacccccaccccgctgctcaactcttgtgtttgttgttctgtttgccccatttatctgttgctgtttttgtgttgtcttcccctgctccgcattttgtaaaatggcccctgggggagtgtttttgctggatctgctccctctcgctctctcactccactactttttggaacaaagtgatggcagaatgcggtggtggtgggggtcttttgtactgttggattaataaaatgattttaaaatcccaaaaaaaaaaaaaaaaaaaaaaaaaaaaaaaaaaaaaaaaaaagggcggccgctctaaaaaatcccncaaggggcccaagct

SEQ ID NO: 1059 - DNA, 809 bp, Homo sapiens
  misc_feature (466)..(466): n equals a,t,g, or c
  misc_feature (645)..(645): n equals a,t,g, or c
  misc_feature (676)..(676): n equals a,t,g, or c
  misc_feature (686)..(686): n equals a,t,g, or c
  misc_feature (772)..(772): n equals a,t,g, or c
gctgccggtgtcgtctttgcttcagccgcagtcgccactggctgcctgaggtgctcttacagcctgttccaagtgtggcttaatccgtctccaccaccagatctttctccgtggattcctctgctaagaccgctgccatgccagtgacggtaacccgcaccaccatcacaaccaccacgacgtcatcttcgggcctggggtcccccatgatcgtggggtcccctcgggccctgacacagcccctgggtctccttcgcctgctgcagctggtgtctacctgcgtggccttctcgctggtggctagcgtgggcgcctggacggggtccatgggcaactggtccatgttcacctggtgcttctgcttctccgtgaccctgatcatcctcatcgtggagctgtgcgggctccaggcccgcttccccctgtcttggcgcaacttccccatcaccttcgcctgctatgcggncctcttctgcctctcggcctycatcatctaccccaccacctatgtccagktcctgtcccacggccgttcgcgggaccacgccatcgccgcaccttcttctcctgcatcgcgtgtgtggcttacgccaccgaagtggcctggacccgggcccggcccggcgagatcactggctatatggncaccgtacccgggctgctgaaggtgctgganaccttsgtgnctgcatcatcttcgcggtcattaagcgamcccaacctgtacarcamcagcggcctgatgtcgtggcggggacgcattgttatctancgggcatcggcaatcctggttggaacctggggggaag

SEQ ID NO: 1060 - DNA, 1960 bp, Homo sapiens
  misc_feature (1940)..(1941): n equals a,t,g, or c
  misc_feature (1947)..(1947): n equals a,t,g, or c
ctccgggctctgggtggcggcggctgtgagcggcggcactgcggcgcagcggcggctggccctgtcggccgcgggatgaggaagcggaccgagcccgtcgccttggagcatgagcgctgcgccgccgcgggctcgtcctcctccggctcggccgccgcggcgctggacgccgactgccgcctgaagcagaacctacgcctgacgggcccggcggcggctgagccgcgctgcgcagccgacgcgggaatgaagcgggcgctgggcaggcgaaagggcgtgtggttgcgcctgaggaagatacttttctgtgttttggggttgtacattgccattccatttctcatcaaactatgtcctggaatacaggccaaactgattttcttgaatttcgtaagagttccctatttcattgatttgaaaaaaccacaggatcaaggtttgaatcacacgtgtaactactacctgcagccagaggaagacgtgaccattggagtctggcacaccgtccctgcagtctggtggaagaacgcccaaggcaaagaccagatgtggtatgaggatgccttggcttccagccaccctatcattctgtacctgcatgggaacgcaggtaccagaggaggcgaccaccgcgtggagctttacaaggtgctgagttcccttggttaccatgtggtcacctttgactacagaggttggggtgactcagtgggaacgccatctgagcggggcatgacctatgacgcactccacgtttttgactggatcaaagcaagaagtggtgacaaccccgtgtacatctggggccactctctgggcactggcgtggcgacaaatctggtgcggcgcctctgtgagcgagagacgcctccagatgcccttatattggaatctccattcactaatatccgygaagaagctaagagccatccattttcagtgatatatcgatacttccctgggtttgactggttcttccttgatcctattacaagtagtggaattaaatttgcaaatgatgaaaacgtgaagcacatctcctgtcccctgctcatcctgcacgctgaggacgacccggtggtgcccttccagcttggcagaaagctctatagcatcgccgcaccagctcgaagcttccgagayttcaaagttcagtttgtgccctttcattcagaccttggctacaggcacaaatacatttacaagagccctgagctgccacggatactgagggaattcctggggaagtcggagcctgagcaccagcactgagcctggccgtgggaaggaagcatgaagacctctgccctcctcccgttttcctccagtcagcagcccggtatcctgaagccccrgggggccggcacctgcaatgctcaggagcccagctcgcacctggagagcacctcagatcccaggyggggaggcccctgcaggcctgcagtgcccggaggcctgagcatggctgtgtggaaagcgtgggtggcaggcatgtggctctccttgccgcccctcaacctgagatcttgttgggagacttaatggcagcaggcagccatcactgcctgsttgatgctgcactgagctggacagggggagtccgggcaggggactcttggggctcgggaccatgctgagctttttggcaccacccacagagaacgtggggtccaggttctttctgcaccttcccagcacatgcagaatgactccagtggttccatcgtcccctcctgccctgtgtacctgcttgcctttctcagctgccccacctcccctgggctggcccactcacccacagtggaagtgcccgggatctgcacttcctcccctttcacctacctgtacacctaacctggccttagactgagctttatttaagaataaaatcgtggtggtggtcaaaaaaaaaaaaaaaagggggccgcttaagggtccannttaagnaaggggaattgga

SEQ ID NO: 1061 - DNA, 1127 bp, Homo sapiens
  misc_feature (1104)..(1104): n equals a,t,g, or c
aatccccctctggcgcacatttggttccgtgctggggctgatggcatttttctacttcttcgcccgtttgacgctgttttgcgcggcgtggattgccaccgccgaatataaagacgacccgcgaatgccggggaaaacgcagccttaaaatargccggatgcggcgtaaacgccttatccggcatacgattttattcggcctggctccccgtaggccggataagatgcgccagcatcgcatccggctataatgcgcacataacctcttgaaactcgtccccagagcctcttcagccatctatttgggagcaaacaatttcattccaactcataaccccagcatataaatccagttggtaacttttatttaacctgaaaccagttttatccactatttataaaattatgtgaagcatttcatagaagaaaaatcactggcctaaacattatcccctttttgcctgatttttgaccatttccgcgatttgttacacattgaaatatcacttttgctgtgcgtaatatggctattcgttagccaaaaaataagaaaagattatgcaagcaacagccacaacactcgaccacgagcaagaatacacgccgatcaactcgcgtaataaagtccttgtcgcctctctcattggcacagccattgagttcttcgacttttacatttacgccactgcggccgttattgtgtttccgcatatcttcttcccgcagggcgatcctacggcagcaacgctacagtcgctcgccaccttcgccatcgccttcgtcgcgcgccccattggctctgccgtttttggtcattttggcgatcgcgttgggcgtaaagcgacgctggtcgcctcgttgctaacgatggggatttcgaccgtggtgattggtctgctgccgggctatgccacgattggtattttcgccccgctgctgctggcgctggctcgatttggtcagggtctgggcttaggcggsccggtacccaattcgccctatagtgagtcgtattacaattcactggccgtcgttttacaacgtcgtgactgggaaaaccctggcgttacccaacttaatcgccttgcagacatcccctttcgncaagctggcgtaatagcgaagag

SEQ ID NO: 1062 - DNA, 610 bp, Homo sapiens
  misc_feature (5)..(5): n equals a,t,g, or c
  misc_feature (10)..(10): n equals a,t,g, or c
  misc_feature (37)..(37): n equals a,t,g, or c
  misc_feature (227)..(227): n equals a,t,g, or c
  misc_feature (585)..(585): n equals a,t,g, or c
  misc_feature (597)..(597): n equals a,t,g, or c
cgganaatcntcctcactaaagttgaacaaaagctgnagctccaccgcggtggcggccgctctagaactagtggatcccccgggctgcaggaattcggcacgagcggcgttggtccggtgcgtcctgttctacagctatggccgggccagctgcagctttccgccgcttgggcgccttgtccggagctgcggccttaggcttcgcttcctacggggcgcacggcgcncaattcccagatgcctacgggaaggagctgtttgacaaggccaacaaacaccacttcttacacagcctggccctgttaggggtgccccattgcagaaagccactctgggctgggttattgctagcttccggaacgaccttattctgcaccagcttttactaccaggctctgagtggagaccccagcatccagactttggcccctgcgggagggaccctgctactcttgggctggcttgccttggctctttgagctcccttttgcttaattactgggttttctgggcagttttttttttaaagagttggagtaagaagaggattaaaaaggaaaggcaaataaaaaaaaaaaaaaaaanctcggggggggncccggaaccaaat

SEQ ID NO: 1063 - DNA, 1548 bp, Homo sapiens
  misc_feature (90)..(90): n equals a,t,g, or c
  misc_feature (1540)..(1540): n equals a,t,g, or c
aggtggccacggccctgggactcaaatccctcaccaagcacctgccccccttggtcggcagatttgtgccctttgcagcagtggcagctncaactgcattcaacatccccctggatgaggcagagagagctgcaggtgggcatcccggtggctgatgaggcaggtcagaggcttggctactcggtgactgcagccaagcagggaatcttccaggtggtgatttcaagaatctgcatggcgattcctgccatggccatcccaccactgatcatggacactctggagaagaaagacttcctgaagcgccgcccctggctgggggcacccctgcaggtgggactggtgggcttctgcctggtatttgcaacccccctgtgctgtgccctattcccccagaagagctccatacacataagcaacctggaaccagagctgagagctcagatccatgagcaaaaccccagcgttgaagtggtctactacaacaaggggctttgaggagggtcagcctctgtcccctccctcacttccttgggctgctgctttagtggagtcatgtcacccctaccacttggctatctgcctagcactgggcaggggccttggtgggcagatggcaattgagggtagcaacctattagggtgggggagggacctccataaggcttttcctcccttctctggtttcaaagatcagagcacataacccctcctgtgcttgagtgtccatgcatatacatacatgatacacatgtgtatgtgtacattgggtcctgaaagctagaagcaggcatgctagcctagtatgttctgacatctggcttcccttctcagcctcatgtccacctgcctgccagccaggctacaggtgtgacttccttctctaaactgttacaccagccaagttatttttgatggcacctcatcccttctagaaataggaggagccccaggatctcaggacagagacttatagacactagtaggacaaagcgggctgaatccttcaggtttctgatacctagctccccaagctgactgggctggcagaggagaacatgttgagacaagggaggcaggggacttatgcatccctcagtgccatcccttgtatcctggratagctccatttcccctcctcctctctaccagacaaaggagtgcctgtktcctgtackgscctcgctgtctcccccaccaccctacttgacagcgtgggcatcttcaggcacagccttgggagttcctggtgtgctctgacatcatgacctcaaatctaaatcctccaatcccaactccctttcccaaacaaaaagccacagaggcagagcaagcattcccctttaagagcttccactgcaccccctcccaagggacacagcggtaggaatggtgcttaaactccacaggtatcagagagggtgtaactaggacatcctcaagggcagctaggccccgaatgtacaatgttaagacagggaattttgtgttccattgacttttttttttttttaaaggggtttcactattttgcccaggntggagtgc

SEQ ID NO: 1064 - DNA, 990 bp, Homo sapiens
  misc_feature (898)..(898): n equals a,t,g, or c
  misc_feature (906)..(906): n equals a,t,g, or c
tcatgaaggtgggttcaccatgccccagacgccagaaagtcagccgttgatcaatgaaggctgagaccatgatgcttgggcttaggatcttgaggcctgtcacatgggcagcatgtgcacaggggacagagtattcctctagcacacgcagctggggtaccagcccagcctctyccacagcctcttctagctgtagcatctccacagcaagcacgaagacatggagggatccatcttcactgccactggccacgagatggtggccctcacgggtgggcaaggtgtgcaggctgttgataccacagctgtgggcctggagagtcagggagggggtgccaagccggtagggaagcccaggatccactggaggctccaggacagtggagtcatggtctagcatggtggtgagatcccagaaagccaggctgccatcagtagctgcgctgcacaggaggagcctccgcctctggttgggtgcctcgtgtgtaaaggagtggaccttgaggacacatcgcttatggtggaaggtttcagcaaggagctgcagaatccgcccagaatcctgcaaaagaaagagccttacggccccatcactacaggctgcagccacaagggggccaaggccgggctggtcaagttcacacacagcaagggacatgtacctggtctctgggtctaccttaaccatccgatgccgattgcgttgccggtcccaatactcatctagccggtgggacgaaaggtgcatgacatggcaggcgaggcggcttggggtgctggggtccggagtaaccatgatgctgaagcagtgcatctcagcccgcccccccgcagacaccacatgggcagtcaggcctggctgaggatcctgagggccacctggggtgccaatgccccncacagccncagcacgtaccgaggagatatggttacaaacagctgtgagtgcgtgggctgagcctgtggttgtagggagtgctaggacacagc

SEQ ID NO: 1065 - DNA, 2227 bp, Homo sapiens
  misc_feature (543)..(543): n equals a,t,g, or c
gcagcagcctgtctattgggacagcttggtcagcaaggggtgacctttgacctccagcccatggaatgratggctgcagccacacatgccttgtctgcccctgcagaggttcggttgactccaccaggtagttgtggattctatgatggcctccttatccttctgttgcagctcctcactgagcaggggaaggctagcctaatcagggatatgtccagttcagaaatgtggaccgttttgtggcaccgcttctccatggtcctgaggctccccgaggaggcatctgcacaggaaggggagctttcgctatccagtccaccaagccctgagccagactggacactgatttctccccagggtatctttctatcacatggaagtatcctcatgtccatcctgaagcatctgctttgccccagcttctgaatcaactgcgccaggcgcctcatgggtctgagtttctccctgtcgtggtgctctctgtctgccagctcctttgcttccctttgcgctggacatggatgctgacctccttatagatgncttggccgacctcagggactcagaagttgcagcccatctgctgcaggtctgctgctaccatcttccgttgatgcaagtggagctgcccatcagccttctcacacgcctggccctyatggatcccacctctytcaaccagtttgkgaacacagtgtctgcctcccctagaaccatcgtctcgtttctctcagttgccctcctgagtgaccagccactgttgacctccgaccttctctctctgctggcccatactgccagggtcctgtctcccagccacttgtcctttatccaagagcttctggctggctctgatgaatcctatcggcccctgcgcagctcctgggccacccagagarttctgtgcgggcacacacttataggctcctgggacacttgctccaacacagcatggccctgcgtggggcactgcagagccagtctggactgctcagccttctgctgcttgggcttggagacaaggatcctgttgtgcggtgcagtgccagctttgctgtgggcaatgcagcctaccaggctggtcctctgggacctgccctggcagctgcagtgcccagtatgacccagctgcttggagatcctcaggctggtatccggcgcaatgttgcatcagctctgggcaacttgggacctgaaggtttgggagaggagctgttacagtgcgaagtaccccagcggctcctagaaatggcatgtggagacccccagccaaatgtgaaggaggctgccctcattgccctccggagcctgcaacaggagcctggcatccatcaggtactggtgtccctgggtgccagtgagaaactatccttgctctctctggggaatcagtcactgccacacagcagtcctaggcctgcctctgccaaacactgcaggaaactcattcacctcctgaggccagcccatagcatgtgattccagattcctgcggtccagcctccaactttggttgccagctctttcttattctactacacaagccgccaactcaactgagagctaaagagactagaaaagagataagctgccaactcaactgagaacaagaaactagaagagatttatatataaagcttcttccttctcccagatgcaggatgttttcaaccagtaaattttattgctgttggtgccagagaagagtcctttcttctctacatccaggggccttttctccaataatgtgcctttaactctagggacctgcctcacggaccttagggaaaaacctcaacctgaaagatctcttcctttctggagctcctttaatcttcccagcaggtttttgccttagacgtgctggccccaggacagtgatgaagacagagcctgtctcagctctaggctgtggggatcaatgccatcagtccctgttattgagggattatcccttagccaacattcctatctgtgggtgggcgtggagagtgtatctttttttggggtgtgtgtgtatatgtgtgtgtgtatgtgtgtgtgtgtttaatagttctgtttgtaaactcttttaataaaagttgtgcctcaccatacttgaagctcccaggacaagggttgagaggctcaacccctctttcagcttctatgtggtgttggaggtgctggtatcgtgttcacacaaraaaaaaaaaaaaaaaaaaaaaaaaaaaaaaaaaaaactcga

SEQ ID NO: 1066 - DNA, 555 bp, Homo sapiens
ggccctttgatgggcatatgcagaattcagggagaggcaagrasccttgggagccacttcggcagaarcagarcttggacgttggtgawgggagcccagtgaccccagccagcctttctggctgagcgactgcactggcatgaaaccaagatggggttcggctcctgaggtttcctccttcctgcccctgattgcttttcccacctcactgtctttcccctactcccaccagtctgctgtatggggctcctgcccttgcccacttcttacctttccatttgtctccttcccttcatcgacccgaagcatcttcctcatcctccttggararatggtttgctggttcacgtgtatctctcactccaaaactatggccaaaatcctgtgtaattatttacttagtaaaratatttgttcctgctctctcagtttttatagcagtgatgtgaatcatttctatttcctcactttaaaggaaaatgcttttattattttaaagaaaattaattaaaacttcattttctttaaaggaaattaaaatatctattttcttat

SEQ ID NO: 1067 - DNA, 785 bp, Homo sapiens
  misc_feature (2)..(2): n equals a,t,g, or c
  misc_feature (6)..(6): n equals a,t,g, or c
  misc_feature (15)..(15): n equals a,t,g, or c
  misc_feature (22)..(22): n equals a,t,g, or c
  misc_feature (25)..(25): n equals a,t,g, or c
ancttnagggggcgnatcaaanggnaatcttccaataaagywtgagctgttggaatcccaactcagagtagcctctttgcaagacatgtcttgccaactactggtgaatgctgaaggaacagactgtttagaagccaaagaaaaagtccatgttattggaaatcggctcaaacttctcttgaaggaggtcagtcgtcatatcaaggaactggagaagttattagacgtgtcaagtagtcagcaggatttgtcttcctggtcttctgctgatgaactggacacctcagggtctgtgagtcccacatcaggaaggagcaccccaaacagacagaaaacgccacgaggcaagtgtagtctctcacagcctggaccctctgtcagcagtccacatagcaggtccacaaaaggtggctccgattcctccctttctgagccagggccaggtcggtccggccgcggcttcmtgttcagagtcctccgagcagctcttccccttcagcttctcctgctcctcctcatcgggcttgcctgccttgtaccaatgtcagaggaagactacagctgtgccctctycaacaactttgcccggtcattccaccccatgctcagatacacgaatggccctcctccactctgaactaagcagatgccatctgcagaagtgctggtagcataaggaggatcgggtcataagsaatyccaaactaccaacaagaggaccttgatcttggcgaaagccctcggtgtggcaagctttagcccttcttcagatcacatgtgtgcaa

SEQ ID NO: 1068 - DNA, 1011 bp, Homo sapiens
  misc_feature (996)..(996): n equals a,t,g, or c
  misc_feature (1006)..(1006): n equals a,t,g, or c
ggtggcaggcaggcaggctggccccggggacttctctctggccctgctccctccgagcgctccgccgttgcccgcctggcccctacggagtccttagccaggatggaggctgttgtgaacttgtaccaagaggtgatgaagcacgcagatccccggatccagggctaccctctgatggggtcccccttgctaatgacctccattctcctgacctacgtgtacttcgttctctcacttgggcctcgcatcatggctaatcggaagcccttccagctccgtggcttcatgattgtctacaacttctcactggtggcactctccctctacattgtctatgagttcctgatgtcgggctggctgagcacctatacctggcgctgtgaccctgtggactattccaacagccctgaggcacttaggatggttcgggtggcctggctcttcctcttctccaagttcattgagctgatggacacagtgatctttattctccgaaagaaagacgggcaggtgaccttcctacatgtcttccatcactctgtgcttccctggagctggtggtggggggtaaagattgccccgggaggaatgggctctttccatgccatgataaactcttccgtgcatgtcataatgtacctgtactacggattatctgcctttggccctgtggcacaaccctacctttggtggaaaaagcacatgacagccattcagctgatccagtttgtcctggtctcactgcacatctcccagtactactttatgtccagctgtaactaccagtacccagtcattattcacctcatctgggatgtatggcaccatcttcttcatgctgttctccaacttctggtatcactcttataccaagggcaagcggctgccccgtgcactycacaaaatggagctccaggtattgccaaggtcaaggccaactgagaagcatggcctagataggcgcccacctaagtgcctcaggactgcaccttaggnaagtgtcaantcagt

SEQ ID NO: 1069 - DNA, 1330 bp, Homo sapiens
  misc_feature (1265)..(1265): n equals a,t,g, or c
aattcggcmcagcagatgaggaagtggcaggcaggcaggctggccccggggacttctctctggccctgctccctccgagcgctccgccgttgcccgcctggcccctacggagtccttagccaggatggaggctgttgtgaacttgtaccaagaggtgatgaagcacgcagatccccggatccagggctaccctctgatggggtcccccttgctaatgacctccattctcctgacctacgtgtacttcgttctctcacttgggcctcgcatcatggctaatcggaagcccttccagctccgtggcttcatgattgtctacaacttctcactggtggcactctcmctctrtgcttccctggagctggtggtggggggtaaagattgccccgggaggaatgggctctttccatgccatgataaactcttccgtgcatgtcataatgtacctgtactacggattatctgcctttggccctgtggcacaaccctacctttggtggaaaaagcacatgacagccattcagctgatccagtttgtcctggtctcactgcacatctcccagtactactttatgtccagctgtaactaccagtacccagtcattattcacctcatctggatgtatggcaccatcttcttcatgctgttctccaacttctggtatcactcttataccaagggcaagcggctgccccgtgcacttcagcaaaatggagctccaggtattgccaaggtcaaggccaactgagaagcatggcctagataggcgcccacctaagtgcctcaggactgcaccttagggcagtgtccgtcagtgccctctccacctacacctgtgaccaaggcttatgtggtcaggactgagcaggggactggccctcccctccccacagctgctctacagggaccacggctttggttcctcacccacttcccccgggcagctccagggatgtggcctcattgctgtctgccactccagagctgggggctaaaagggctgtacagttatttccccctccctgccttaaaacttgggagaggagcactcagggctggccccacaaagggtctcgtggcctttttcctcacacagaagaggtcagcaataatgtcactgtggacccagtctcactcctccaccccacacactgaagcagtagcttctgggccaaaggtcagggtgggcgggggcctgggaatacagcctgtggaggctgcttactcaacttgtgtcttaattaaaagtgacagaggaaaccanaaaaaaaaaaaaaaaaaactcgaggggggcccgtacccaaatcgccggtatgatcgtaaacaatc

SEQ ID NO: 1070 - DNA, 724 bp, Homo sapiens
  misc_feature (623)..(623): n equals a,t,g, or c
  misc_feature (688)..(688): n equals a,t,g, or c
  misc_feature (697)..(697): n equals a,t,g, or c
  misc_feature (717)..(717): n equals a,t,g, or c
  misc_feature (719)..(719): n equals a,t,g, or c
agcattgggctcatgttctacctggctaacgtctgtggctgtgccgtctccctcctggggctggtggagtctgtgcttgatgtcttcggggccgatgccacagggcccagtgggctccgggtcctgccccagggctacggctggaacctgctgtatggctccctgctgctgggccttgtgggtggggtctgcaccctgggagccggcctctatgcccgggcctcattcctcacattcctgctggtctctggctccctggcctctgtgctcatcarttttgtggctgtggggccgarggacatccgcttgactcctargcctggccccaatggctcctccctgccgccccggtttggccacttcaccggcttcaacagcagtaccctgaaggacaacttgggcgctggctatgctgaggactacaccacgggagccgtgatgaattttgccagcgtctttgctgtcctctttaacggctgtacaggcatcatggctggggccaacatgtcaggggagctgaaggaccccagccgggcgatccctctgggcacgatcgtcgccgtcgcctacamcttcttsgtctatgtcctgcttttcttttctcagttcacttgtgacagganctgctgcaagaagatatggggtcttcggggcaataagcttttggccccaactggtgtttaatcgnaactatccnaaagggtttaagggtccatnanctcgc

SEQ ID NO: 1071 - DNA, 376 bp, Homo sapiens
  misc_feature (371)..(371): n equals a,t,g, or c
gagccacatgcccccgagctggatccagtggtggagcacctcgaactggcggcaaccgctgcagcgcctgctgtggggtctggaggggatactctacctgctgctggcactgatgttgtgccatgcactcttcaccactggctcccacctgctgagctccttgtggcctgtcgtggccgcggtgtggcgccacctgctaccggctctcctgctgctggtgctcagtgctctgcctgccctcctcttcacggyctccttcctgctgctcttctccacactgctgagccttgtgggcctcctcacctmcatgactcacccaggcgacactcaggatttggatcaatagaagggcaaccccatcccactgctgngtctg

SEQ ID NO: 1072 - DNA, 555 bp, Homo sapiens
  misc_feature (484)..(484): n equals a,t,g, or c
  misc_feature (511)..(511): n equals a,t,g, or c
  misc_feature (523)..(523): n equals a,t,g, or c
  misc_feature (551)..(551): n equals a,t,g, or c
gcccacgcgtccgcggggactgaagatggcgccgcgaggtaaacggttgtcctccaccccgctggaaatcctgttctttctgaacgggtggtataatgctacctatttcctgctggaacttttcatatttctgtataaaggtgtcctgctaccatatccaacagctaacctagtactggatgtggtgatgctcctcctttatcttggaattgaagtaattcgcctgttttttggtacaaagggaaacctctgccagcgaaagatgccrctcagtattagcgtggccttgaccttcccatctgccatgatggcctcctattacctgctgctgcagacctacgtactccgcctggaagccatcatgaatggcatcttgctcttcttctgtggsttttcttcagcacagacatttgggcaagcaactcagcataaggccagtgggtaccatcttctaaaccaggaccatcagcccaagagactcttntacacttcaagtatagggaggggcaanggtattcccatnctggccctttttaagaacagtcccctgntgaa

SEQ ID NO: 1073 - DNA, 519 bp, Homo sapiens
  misc_feature (463)..(463): n equals a,t,g, or c
  misc_feature (467)..(467): n equals a,t,g, or c
  misc_feature (472)..(472): n equals a,t,g, or c
  misc_feature (476)..(476): n equals a,t,g, or c
  misc_feature (491)..(491): n equals a,t,g, or c
gcagagcatgagattattcttttacatgattacataatattttattgtgagagcataactttattgaatttatttataaacactagtggcgagcatccatytttcagcttttcasaattaaaaacaacactgtgatgagccatccttatayatggattctttctggaataagaaataaatggactgaaaaattagaatgtacaattctagaggtcccacgttgtcaaattatgttsaraaatgtgcaccrcgaaaaagtctaaaagttcagccaagattcacatgggtcatttctgggcaaaaggaccaggcatgrttttgktgktcttcctattcttctgtcctcctcagcttttctattctaagtgtgtccttcggtatgctgatgcaagttggcaattttacattgccaagaatatatggtttaatccacgcaagtgtcgctctgacgatgctctctttncagntcctnctgnaccacacttgctctnatcatctgctacagggggaagggacctg

SEQ ID NO: 1074 - DNA, 1058 bp, Homo sapiens
  misc_feature (645)..(645): n equals a,t,g, or c
  misc_feature (647)..(647): n equals a,t,g, or c
  misc_feature (1036)..(1036): n equals a,t,g, or c
tctcctgtacgccctagactaggggccgccatctccatggccacggccgtgagccggccctgcgccggcaggtcgcgggacatactgtggcgcgttttgggctggaggatasttgcaagtattgtttggtcagtgctatttctacccatctgcaccacagtatttataattttcagcakgattgatttgtttcatcctatacagtggctgtctgattctttcagtgacctgtatagttcctatgtaatcttttacttcctgctgctgtcagtggtaataataataataagtattttcaatgtggagttctatgcagttgtgccttctattccttgctccagactagctctgatagggaagatcattcatcctcagcaactcatgcactcatttattcatgctgcaatgggaatggtgatggcctggtgtgctgcagtgataacccagggccagtacagctttcttgtggttccctgcactggtactaacagctttggtagccctgctgcgcaaacctgcttaaatgaatatcatctttttttcctactgctggagcatttatgggctatagctatagcctcctgtattttggtacaacatgaactatctccatttcccatcatacagcaatacaagttcttgcgntntaggagatctctgctcttattagttaaacacagttgtgtggaatcactgttcctggttagaaatttctgcattttatattattttcttggctatattcccaaagcttggattagcactgctatgaaccttcacatagatsagcaggttcataggccacttgacacagtgagtggcctccttaaatctctcgttaccctaccatgccctggctggtgtggtgtctttctcctgacgacttggtatgtctcatggatactcttcaaaatctatgccacagaggctcatgtgttttcctggttcaaaccaccatttggcaagaaaggggtcagatgagtgccttcccaaaaagtggttaaaataagcaatcctcccccccaatcataaagtntttaggcccttgcagggaacct

SEQ ID NO: 1075 - DNA, 1505 bp, Homo sapiens
  misc_feature (13)..(13): n equals a,t,g, or c
  misc_feature (372)..(372): n equals a,t,g, or c
gatcctggcaganagtttgttccggatgggccccacctgcacctctaccatgagaaccactggataaagttaatgaattggcagcacagcaccatgtacctattctttgcagtctmaggaattgttgacatgctcacctatctggtcagccacgttcccttgggggtggacagactggttatggctgtggcagtattcatggaaggtttcctcttctactaccacgtccacaaccggcctccgctggaccagcacatccactcactcctgctgtatgctctgttcggagggtgtgttagtatctccctagaggtgatcttccgggaccacattgtgctggaacttttccgaaccagtctcatcattcttcangggaacctggttctggcagattgggtttgtgctgttcccaccttttggaacacccgaatgggaccagaaggatgatgccaacctcatgttcatcaccatgtgcttctgctggcactacctggctgccctcagcattgtggccgtcaactattctcttgtttactgccttttgactcggatgaagagacacggaaggggagaaatcattggaattcagaagctgaattcagatgacacttaccagaccgccctcttgagtggctcagatgaggaatgagccgagatgcggagggcgcagatgtcccactgcacagctggaatgaatggagttcatcccctccacctgaatgcctgctgtggtctgatcttaagggtctatatatttgcacctcctcattcaacacagggctggaggttctacaacaggaaatcaggcctacagcatcctgtgtatcttgcagttgggatttttaaacatactataaagtctgtgttggtatagtacccttcataaggaaaaatgaagtaatgcctataagtagcaggcctttgtgcctcagtgtsaagagaaatcaagagatgctaaaagctttacaatggaagtggcctcatggatgaatccggggtatgagcccaggagaacgtgctgcttttggtaacttatccctttttctcttaagaaagcaggtactttcttattagaaatatgttagaatgtgtaagcaaacgacagtgcctttagaattacaattctaacttacatattttttgaaagtaaaataattcacaagctttggtattttaaaattattgttaaacatatcataactaatcataccagggtactgcaataccactgtttataagtgacaaaattaggccaaaggtgatttttttttaaatcasgaagctggttactggctctactgagagttggagccctgatgttctgattcttcaaagtcmccctaaaagaagatctgacaggaaagctgtataatgagatagaaaaacgtcaggtatggaaggctttcagttttaatatggctgaaagcaaaggataacgaattcagaattagtaatgtaaaatcttgataccctaatcttgcttctggatctgttctttttttaaa

SEQ ID NO: 1076 - DNA, 951 bp, Homo sapiens
  misc_feature (206)..(206): n equals a,t,g, or c
gtgggcattagaagattccgtgcttgtggtgaaggcgaggcagccaaagcctttctttgctgccggaaatacatttgagatgacttgcaaagtatcttccaagaatattaagtcgccacgctactctgttctcatcatggctgagaagcctgtcggcgacctctccagtcccaatgaaacgaagtacatcatctctctggaccaangatttctgtggtgaarctkgagaattggacagatgcatyacgggtggatggcgttgttttagaaaaagtgcaggaggatgagttccgctatcgaatgtaccagactcaggtctcagacgcagggctgtaccgctgcatggtgacagcctggtctcctgtcaggggcagcctttggcgagaagcagcaaccagtctctccaatcctattgagatagacttccaaacctcaggtcctatatttaatgcttctgtgcattcagacacaccatcagtaattcggggagatctgatcaaattgttctgtatcatcactgtcgagggagcagcactggatccagatgacatggcctttgatgtgtcctggtttgcggtgcactcttttggcctggacaaggctcctgtgctcctgtcttccctggatcggaarggcatcgtgaccacctcccggagggactggaagagcgacctcagcctggagcgcgtgagtgtgctggaattcttgctgcaagtgcatggctccgaggaccaggactttggcaactactactgttccgtgactccatgggtgaagtcacsaacaggttcctggcagaaggaggcagagatccactccaagcccgtttttataactgtgaagatggatgtgctgaacgccttcaagtatcccttgctgatcggcgtcggtctgtccacggtcatcgggctcctgtcctgtctcatcgggtactgcagctcccactggtgt

SEQ ID NO: 1077 - DNA, 1214 bp, Homo sapiens
  misc_feature (794)..(794): n equals a,t,g, or c
  misc_feature (1214)..(1214): n equals a,t,g, or c
ggcacgargagacagcagcccatcccctcagcccacacccctgcgccctgtgggcaccgacaccacagaagccaatgtttggagatttgcacaacctcccgttcccccacatggagaagggaagtaagttgaggcagccgtgggatggtggtaggttccctcttagtcttgctgctgttgctggaattccaaagtgaccttagaaaccacgtgggggaaggcagtgctcactacttagaagggttgcttctragccgcctggtcccccaagagcacaacaggcctcctccctctgaccacagggtcatgcctcctccctctgaccacagggtcatgcctcctccctctgaccacagggtcatgccagcctccatttgcgctgcgggagaaaagcccatctctagcacaccttgaccccaggaaccgggttcccgtatggaactgggaagaaaccgcccctgtgccagctcccgcgggccctcctcgttccctcccagcctccatggccgccctctagagcctccctgctgtacggagctctgggctccacctatttgcaatgttactctgaagtttctggtgctatttttgtgttgtaatgtgaayacaggcttccttgattttttttttttaatgggggtattgggtgggacagacggggtcagggaggccccaccatggcttgtcgagggcacgggcacctgcatggcggcgctctccctgcctcccctgccgggctgcaagcctgaggtctgtgctgccggacggggatgctcagggctggggctgcaganccgctgccctggccagggcaccctcatgcaccgacccaacccaggcctgggacgcacgtgtcctctcacagcgtcgtgcctgtgaaggtgggtcaaagggtgagagggcttccttctcacccttctctccataagtatcttgaagatccatggtttgttttgctctattgtttagtttttacttgggtgcaatgtgtacgtcaaaagtttttattttgatatttgaaagagaccaaatcaggcccagaccgcctctctggaaggtgttgtaggccattcaaaacgcctccggagtgtcgcaaaccaagtgcggaggggccctgaggttgtactgtaaacatcatagtgacttgtcttttcaaatatattcccactattttcgcagaaaaaaaaaaaaaaaaaaaaaacttcgaggggggn

SEQ ID NO: 1078 - DNA, 652 bp, Homo sapiens
  misc_feature (502)..(502): n equals a,t,g, or c
  misc_feature (522)..(522): n equals a,t,g, or c
  misc_feature (525)..(525): n equals a,t,g, or c
  misc_feature (560)..(560): n equals a,t,g, or c
  misc_feature (599)..(599): n equals a,t,g, or c
  misc_feature (630)..(630): n equals a,t,g, or c
agacaggtgagcgacgaacttctgagacagcagttgtgtccctgtggctttggtgcgcctgtgtgcactttctccctccacctggagcatgggctaacaccggaggaaaggaaaagacagagtcagacagggagcctggggaggggccatggtgccaatgcacttactggggagactggagaagccgcttctcctcctgtgctgcgcctccttcctactggggctggctttgctgggcataaagacggacatcacccccgttgcttatttctttctcacattgggtggcttcttcttgtttgcctatctcctggtccggtttctggaatgggggcttcggtcccagctccaatcaatgcagactkagagcccagggycctcaggcaatgcacgggacaatgaagcctttgaagtgccagtctatgaagaggccgtggtgggactagaatcccagtgccgccccaagagttggaccaaccacccccctacagcaactggtggngatacccccagcaccctganganggaacaacctagcccattccagaaggggtccaggnagaagccaaaactgggaacagaggccgaatgggccttanaagggggtcccatgggccccaggaagggaancccctgggaagaacttccaaat

SEQ ID NO: 1079 - DNA, 1273 bp, Homo sapiens
  misc_feature (928)..(928): n equals a,t,g, or c
  misc_feature (1079)..(1079): n equals a,t,g, or c
  misc_feature (1182)..(1182): n equals a,t,g, or c
  misc_feature (1227)..(1227): n equals a,t,g, or c
  misc_feature (1269)..(1269): n equals a,t,g, or c
tgagcaaccctctttggccaccagctccaatcagactagcatgcaggatgaacaaccaagtgattcattccaaggacaggcagcccagtctggtgtttggaatgacgacagattgttagggcctagtcaaaattttgaagctgagtcaattcaagataatgcgcatatggcagagggcacaggtttctatccctcagaacccatgctctgtagtgaatcggtggaagggcaagtgccacattcattagagaccttgtatcaatcagctgactgttctgatgccaatgatgccttgatagtgttgatacatcttctcatgttggagtcaggttacatacctcagggcaccgaagccaaagcactgtccatgccggagaagtggaagttgagcggggtgtataagctgcagtacatgcatcctctctgcgagggcagctccgctactctcacctgtgtgcctttgggaaacctgattgttgtaaatgctacactaaaaatcaacaatgagattagaagtgtgaaaagattgcagctgctaccagaatcttttatttgcaaagagaaactaggggaaaatgtagccaacatatacaaagatcttcagaaactctctcgcctctttaaagaccagctggtgtatcctcttytggcttttacccgacaagcactgaacctaccagatgtatttgggttggtcgtcctcccattggaactgaaactacggatcttccgacttctggatgttcgttccgtcttgtctttgtctgcggtttgtcgtgacctctttactgcttcaaatgacccactcctgtggaggtttttatatctgcgtgattttcgagacaatactgtcagagttcaagacacagattggaaagaactgtacaggaagaggcacatacaaagaaaagaatccccgaaagggcgngtttgtgatgctcctgccatcgtcaactcacaccattccattctatcccaaccccttgcaccctaggccatttcctagstcccgccttcctccaggaattatcgggggtgaatatgaccaaagaccaacacttccctatgttggagacccnatcagttcaytcattcctggtcctggggagacgsccagcagkttcctccaytgagaccacgctttgatcagttggccactttcaggacctaaccccatcttgncagggcgaaggccgggcccaatgacagaattccctttagacccancaagggtcgggccaacttatgggcccggttgcaattcaaggngaat

SEQ ID NO: 1080 - DNA, 2025 bp, Homo sapiens
gcccgagaggcccggttcctttaggccgcctgcccgcctccagctctcggggtcggctccaggaggcgccctcaggagaggggcgggcgctctattccagagaccgagtggcagggcggccactgtggcggggctctttccccgtttcgcctcagctacccctcagctccggtagtcgccagtccggggtcgtcgccgtttggggcgggagctgctcggccccgccgccgtccccgtcgccgcttccgggtccaggcccctcgggccgcctgccgccgtcatgaggctgcgggtgcggcttctgaagcggacctggccgctggaggtgcccgagacggagccgacgctggggcatttgcgctcgcacctgaggcagtccctgctgtgcacctgggggtacagttctaatacccgatttacaattacattgaactacaaggatcccctcactggagatgaagagaccttggcttcatatgggattgtttctggggacttgatatgtttgattcttcaagatgacattccagcgcctaatataccttcatccacagattcagagcattcttcactccagaataatgagcaaccctctttggccaccagctccaatcagactagcatrcaggatgaacaaccaagtgattcattccaaggacaggcagcccagtctggtgtttggaatgacgacagtatgttagggcctagtcaaaattttgaagctgagtcaattcaagataatgcgcatatggcagagggcacaggtttctatccctcagaacccatgctctgtagtgaatcggtggaagggcaagtgccacattcattagagaccttgtatcaatcagctgactgttctgatgccaatgatgccttgatagtgttgatacatcttctcatgttggagtcaggttacatacctcagggcaccgaagccaaagcactgtccatgccggagaagtggaagttgagcggggtgtataagctgcagtacatgcatcctctctgcgagggcagctccgctactctcacctgtgtgcctttgggaaacctgattgttgtaaatgcactgaacctaccagatgtatttgggttggtcgtcctcccattggaactgaaactacggatcttccgacttctggatgttcgttccgtcttgtctttgtctgcggtttgtcgtgacctctttactgcttcaaatgacccactcctgtggaggtttttatatctgcgtgattttcgagacaatactgtcagagttcaagacacagattggaaagaactgtacaggaagaggcacatacaaagaaaagaatccccgaaagggcggtttgtgatgctcctgccatcgtcaactcacaccattccattctatcccaaccccttgcaccctaggccatttcctagctcccgccttcctccaggaattatcgggggtgaatatgaccaaagaccaacacttccctatgttggagacccaatcagttcactcattcctggtcctggggagacgcccagccagtttcctccactgagaccacgctttgatccagttggcccacttccaggacctaaccccatcttgccagggcgaggcggccccaatgacagatttccctttagacccagcaggggtcggccaactgatggccggctgtcattcatgtgattgatttgtaatttcatttctggagctccatttgtttttgtttctaaactacagatgtcaactccttggggtgctgatctcgagtgttattttctgattgtggtgttgagagttgcactcccagaaaccttttaagagatacatttatagccctaggggtggtatgacccaaaggttcctctgtgacaaggttggccttgggaatagttggctgccaatctccctgctcttggttctcctctagattgaagtttgttttctgatgctgttcttaccagattaaaaaaaagtgtaaattaaaaaaaaaaaaaaaaaaactygaggggggcccsggacccaattsccctatagggggc

SEQ ID NO: 1081 - DNA, 1587 bp, Homo sapiens
  misc_feature (75)..(75): n equals a,t,g, or c
  misc_feature (130)..(130): n equals a,t,g, or c
  misc_feature (132)..(132): n equals a,t,g, or c
  misc_feature (195)..(195): n equals a,t,g, or c
  misc_feature (1581)..(1581): n equals a,t,g, or c
  misc_feature (1583)..(1583): n equals a,t,g, or c
attaatgcagctggcacgacaggtttcccgattggaaagcgggcagtgagcgcaacgcaattaatgtgagttagntcactcattaggcaccccaggctttacactttatgcttccggctcgtaatgttgngnggaattgtgagcggataacaatttcacacaggaaacagctatgaccatgattacgccaagctngaaattaaccctcactaaagggaaacaaaagctggagctcccaccgcggtggcggccgctctagaactagtggatccccccgggctgcaggaattcggcacgagggcgctgattgcggacaccccgtaccacctgtatccggcctatggctgggtgatgttcgtcgctgtcttcctctggctggtgacaatcgtcctcttcaacctctacctgtttcagctgcacatgaagttgtacatggttccctggccactggtgttaatgatctttaacatcagcgccaccgttctctacatcaccgccttcatcgcctgctctgcggcagttgacctgacatccctgaggggcacccggccttataaccagcgcgcggctgcctcgttctttgcgtgtttggtgatgatcgcctatggagtgagtgccttcttcagctaccaggcctggcgaggagtaggcagcaatgcggccaccagtcagatggctggcggctatgcctaaaccacctgtgccacggccccctctggggctgaagccgccgctgggtcacagagcagggtcaccctgcaagcctgaagctggggagccctgcgtggagtcagcccaacagggactgcatttgctcctctctgcccgtcagayataagctctcacagcgctaaggaagcaggcccaggctggcaggcatctcggcttgcaggaggccaactgctgagacctcttctccatcccccttattcagtggaagatgacgggggatctgaggctgtgtctctgccttgtctttagaggacttcagcgtccaagactggggcccacccttctcaccagcactaaatgcactaacaaggactccagacctgcagccccagacccgccgtagtataagcctaacaagcaacacgtagcaccttagtctttgttccaggagagctgagcaagctggtgaaaccactgctccttcctttaaacaccgtttcaaccaacctctccctggagccaacctgtaaaaagtgggttgattgctgacagcatggtcttccctccctgcatttcagacataccagttactgaaagcaaatcagttttaagtgatttctcagtgctgaaaagcctgtccaggtttccttccctttcccaagcctctctctgtaatactccctttgggcgaagctaacatcggtgcctccccgaccttgctgactaggcacatgggacgcaaaggagggagggaagcaaggccttgcctggcgagttgtcatgtggttggtggtgactgttttattttttttaataaaaataaagatgagagaaattaaaaaaaaaaaaaaaaaaaaaaaaaaaaaaaaaaaaaaaaaaactcgagggggggcccgtacccaatcgccngngatg

SEQ ID NO: 1082 - DNA, 1393 bp, Homo sapiens
aattcggcacagcgggagttcctgcacgctgcagagaccccggtgcccagcgtcggggagtacctcaagaaggagattggccagcacgtggccggctggacagaggatgaggaccaggaagctgaagctggccgtcctgaactccttcttcaacctggaatgctgtgtgagcggcacccacagcatggacctggtggccctggcaccctttggggagtataccgtgctgccggggctggactgcaccttttctaagggctatcaaggactcacaaactgcatgatggccgccctgccggaggacactgtagtttttgagaagcctgtgaagaccatccactggaacgggtccttccaggaggcagcctttcccggggagacctttccagtgtcggtagagtgtgaggatggagaccggttcccggcgcaccatgtcatcgtcaccgtgcccttaggttttcttagggaacatttggacaccttctttgaccctcccctgccggctgagaaggcagaagcaatcaggaagataggctttgggaccaacaacaaaatcttcctggagtttgaggagcccttctgggagccagactgccagctgatccagctggtgtgggaggacacgtcgcccctggaggatgctgcccctgagctacaggacgcctggttccggaagctcattggctttgtggtcctgcctgcctttgcgtctgtccacgttctctgtgggttcattgccggacttgagtctgagttcatggagactctgtcggatgaagaagtacttctgtgtctcacccaagtgctccggagagtgacaggaaacccacggctccccgcgcccaagagcgtcctgcggtctcgctggcacagcgccccgtacactagggggtcctacagctacgtggccgtgggcagtactgggggcgacctggacctgctggctcagcccctccctgcagacggcgccggcgcccagctccagatcctgtttgcgggggaagccacacatcgcacgttttactccacgacgcacggggctctgctgtcgggatggarggaggccgaccgcctcctcagtctgtgggccccgcaggtgcagcagcccaggccgaggctctagctgggcccagcctactctgttccacccgtgtcgggggtaggctgggaccgtcatttcttctgacagatttcagtctggcttgaaatttggggatgttaatgagggtcctctggtttttggtaaccagggccaccttctcagttcttgtgtctgttattggagtctggccagggttgacttgagctgagacaccagatgctcacggagatgctggacacataaagcaagttacagccacaaaaaaaaaaaaaaaaaaaaaaaaaattactg

SEQ ID NO: 1083 - DNA, 595 bp, Homo sapiens
  misc_feature (551)..(551): n equals a,t,g, or c
  misc_feature (575)..(575): n equals a,t,g, or c
  misc_feature (577)..(577): n equals a,t,g, or c
  misc_feature (587)..(587): n equals a,t,g, or c
ctgacctgcatgctgtttttccttgtttcggtcatctacaagaagttccaacttggctgtgctataggccacaatgaaacagcaatggagagtgaagctctcgtgggactccccagccaaggactcaacagcagctgtgaggcccagatgttcacagttgactcacagatgtcctacacagtgcccattatggcttttgcttttgtctgccaccctgaggtgctgcccatctatacggagctctgccggccctccaagcgcaggatgcaggccgtggccaacgtgtccattggggccatgttctgcatgtatgggctcacagcaacctttggatacctcaccttctacagcagtgtgaaggcggagatgctgcacatgtacagccagaaggacccgctcatcctctgtgtgcgcctggccgtgctgctcgcggtgaccctcactgtgccagtcgtgctgttccctatccgscgggccctgcagcagctgcttttcccaggcaaggccttcagctggccacgacatgtggccatagctctgatcctgcttgntttggtcaatgtccttgcatctgngngccaaccatncgggatat

SEQ ID NO: 1084 - DNA, 1410 bp, Homo sapiens
  misc_feature (648)..(648): n equals a,t,g, or c
gggacagccgggatgaactgctggccagcatgatggcgggcgtgaagtgccgcctggacagtagcctgccccccgtgcgacgcctgggcatgatcgtggcagaggtcgttagtgcccggatccaccccgaggggcctcccctgaaattccagtacgaagaggatgaactgagcctcgagctgctggccttggcctccccccagcctgcgggtgacggcgcctcggaggcgggcacgtccctcgttccagccacggcagagccccctgcagagacccccgcagagatcgtggatggcggcgtcccccaagcacagctggcgggctctgactcggacctggacagcgatgatgagtttgtcccctacgacatgtcgggggacagararctgaagagcagcaaggctcctgcctacgtccgggactgcgtggaagccctgaccacgtctgaggacatagagcgctgggaggcagccctgcgggccgcttgagggcctggtctacaggagccccacagccactcgggaggtgagcgtggagctggccaaggtgcttctgcatctggaggagaagacctgtgtggtgggatttgcagggctgcgcagagagccctggtggccgtcacggtcacagacccggccccggtggccnacttatctgacctcacagttctatgccctcaactacagcctccggcagcgcatggacatcctggatgtgctgactctggctgcccaggagctgtctaggcctgggtgcctcgggaggactccccaacctggctccccaagtcccaacaccccgtgcctgccagaggcagccgtctctcagcctggcagtgccgtggcgtctgactggcgggtggtggtggaggagcggatcagaagcaagacccagcggctctccaagggtggcccgaggcagggcccggcaggcagccccagcagattcaactccgtggccggccacttcttcttccccctccttcagcgctttgacaggcctctggtgaccttcgacctcttgggagaagaccagctggttctcggaaggctggcgcacaccttaggggccctgatgtgcctggctgttaacaccacggtggctgtggccatgggcaaggccctgctggaattcgtgtgggcccttcgcttccacatcgatgcctacgtgcgccaggggctgttgtcggccgtctcctccgtcctgctcagcctgcctgctgcgcgcctgctggaggacctgatggacgagctgctggaagcccggtcctggctggcggacgtggctgagaaagacccggacgaggactgmagacgctkgcactgaggccctgctgytytgagagactcaagaacaggttcttccacccgtctcctagtcctggaggctccaggacaccccgccacagca

SEQ ID NO: 1085 - DNA, 538 bp, Homo sapiens
  misc_feature (213)..(213): n equals a,t,g, or c
  misc_feature (439)..(439): n equals a,t,g, or c
  misc_feature (505)..(505): n equals a,t,g, or c
  misc_feature (509)..(509): n equals a,t,g, or c
  misc_feature (520)..(520): n equals a,t,g, or c
gcttctgggtggcctaccgcaatgaggaccgctgggcgtggctcctgcaggacacactgggcatttcctactgcctgttcgtcctgcaccgtgtgcggctgcccactctcaagaactgctcctccttcctgctggccctgctggcctttgatgtcttctttgtcttcgtcacccccttcttcaccaaaaccgggtgagagcatcatggcgcangttgccttgggccctgcagagtcttcaagccatgagaggctgcccatggtactcaaagtgccccggctaagagtctccgscttgaccctgtgcagccagcccttctccatccttggcttcggtgacattgtggtccccggcttcctggttgcttactgttgccgctttgatgtgcaagtctgctcccgtcagatctacttcgtggcctgaccgkggcctatgctgngggcctgtggtcacattcatggcatggcctcatgcagatggccaacctgccttggttacctagggncaanacctgttacancctgctgggtgctgcgca

SEQ ID NO: 1086 - DNA, 1014 bp, Homo sapiens
  misc_feature (955)..(955): n equals a,t,g, or c
gaacgccctctcgaaattacccctcactaaagggaacaaaagctggagctccaccgcggtggcggccgctctagaactagtggatcccccgggctgcaggcatgggatgcggcgattttccacttgatgacccacgcgttctttaaagcgctgctgttcctggcatccggttccgtcattctggcctgccatcacgaacagaacatcttcaagatgggcggtctgcgtaaatctattccgctggtttatctctgcttcctggtgggcggcgcagcactgtcggcactaccgctggtcactgcgggcttcttcagtaaggatgagatcctcgcgggtgcgatggcgaatggtcatatcaatctgatggtggcaggtctggycggtgcgtttatgacctcgctctacaccttccgtatgattttcatcgtcttccacggaaaagamcaaattcacgctcacgccgtgaaaggggtwactcacagcctgccgctgattgtgctgctgatcctttccaccttcgttggcgcactgattgtaccgccgctgcarggcgtgcttccgcaaacgacggaactggcgcacggcagcatgttkaccctggaaattacctctggcgtggtcgcggtggtcggcattctgctggcagcctggctgtggctgggtaaacgtactctggtgacctccatcgccaacagtgcgccgggccgtctgctgggcacctggtggtacaacgcctggggatttgactggctgtatgacaaagtgttcgtcaagccgttcctgggtattgcctggttgctgaaacgcgatccgctgaactcaatgatgawcatcccggctgtcctttcccgctttgcaggtaaaggtctgctgttaagtgagaacggctatctgcgctggtatgtggcatccatgagcatcggtgcggtcgtggtgctggcactgttgatggtantgcgttgagttaaggattgtgggattgcccctgggcatataagaacgtgggggggcccg

SEQ ID NO: 1087 - DNA, 821 bp, Homo sapiens
  misc_feature (34)..(34): n equals a,t,g, or c
  misc_feature (36)..(36): n equals a,t,g, or c
  misc_feature (39)..(39): n equals a,t,g, or c
  misc_feature (53)..(53): n equals a,t,g, or c
  misc_feature (59)..(59): n equals a,t,g, or c
  misc_feature (68)..(68): n equals a,t,g, or c
  misc_feature (111)..(111): n equals a,t,g, or c
  misc_feature (121)..(121): n equals a,t,g, or c
  misc_feature (810)..(810): n equals a,t,g, or c
  misc_feature (813)..(813): n equals a,t,g, or c
  misc_feature (818)..(818): n equals a,t,g, or c
atgcttccgggctcgtatgttgtgtgaaattgtnancgnataccattttcacncagaancagctatgnccatgattccgccaagctcgaaattacccctcactaaagggancaaaagctgnagctccaccgcggtggcgsccgctctagaactagtggatcccccgggccgcaaattcttggcgttgctggcatggataccagcgccgtcttcgtcactacctgtctgatcgctgcattcggcagtattatgatgggactgtttgctaacctgccagttgcactggcacccgctatgggcctgaatgcgttcttcgcttttgtcgttgtacaggcgatgggcttgccgtggcaggtcgggatgggcgcaatcttctggggcgcgataggtctgctgttactgacgattttccgcgttcgctactggatgatagccaacattccggtgagtctgcgtgtgggtattaccagcggtatcggtctgttcattggcatgatggggctgaaaaacgcaggtgtgattgtcgctaacccggaaacgctggtgagcatcggtaatctgacttctcacagcgtacttctgggtatcctcggcttcttcatcattgctattctggcctcgcgcaacattcacgcagcggtgctggtttctatcgtggtgacgacgctgctgggctggatgctgggtgatgtgcactacaatggcatcgtttctgcgccgccgagcgtaatgacagttgtgggtcatgtagatttagccgggtcgtttaacctcgggctggcagaagggcccggaagcattccagtaggnacnccgtnaag

SEQ ID NO: 1088 - DNA, 1053 bp, Homo sapiens
  misc_feature (1047)..(1047): n equals a,t,g, or c
atcctgaggctgcccgcctccttcctcagcccctccctggtcaggcgctcctggtgggtggsgggggtagtccaggcttgtcttgcaactgtatgttctcttcagacccctccctggcgatgccagattcactgggctggcagattctgcccccaaacctgtccaaccagttgtttgagaggagggggtagctgggaggggcagcaggagatgccaggaacagcttcccctagcacagcacagactacagacaggggagcctctggggctgcagacactgcagacggacggacagacagatggacaacagctggaggcttggcccggccatagggctctctgcgggacagtcccagctgctagtgtcgctgttgctgctactgacccgtgtccagcctgggacagacgtggctgccccagagcacatcagctatgtgccccagctctcaaacgacaccttggcggggaggctcaccctgtccaccttcacgctggagcagcctctaggccagttcagcagccacaacatctctgacttggataccatctggctggtggtggccctcagcaacgccacccagagcttcacggccccacggacaaaccaggacatccctgctcctgccaacttctcccagaggggctactatctcacactgagggccaaccgggtgctgtaccagaccagaggccagctccatgtcctccgcgtcggcaatgatacccactgccaaccaacaaaaattggctgcaaccatcccctaccaggacccggcccctacagggtgaagttcctggtgatgaatgacgaaggacccgtggctgaaaccaagtggtccagcgacactcgcctgcagcaagcccaggcayttcgggctgtccccggcccccagagcccgggcacgtggttcatcatcgccatcctgtctatcctcctggccgtctyctwmaggtctctggctgtgctcatatacactggactgcttcttccaaagttcttttggggctttggcatggacagaagacagcaacagaagcatgtagatntatggt

SEQ ID NO: 1089 - DNA, 1529 bp, Homo sapiens
  misc_feature (85)..(85): n equals a,t,g, or c
  misc_feature (1476)..(1476): n equals a,t,g, or c
  misc_feature (1514)..(1514): n equals a,t,g, or c
atgtctggaacatcatgcctactttggaggggtgggtggttctgtggcagcagaaagctgcagaggcacttaccccaacccaggnggcacaaggggaaacggagcctactgaacaggcacctgaygccttggagcaagcagcagacacttctagacggaacgcagaaactccagaggccaccacacagcaggaaacggacactgatctcccagaggcccctccaccccccctagaacctgctgtcatcgcacgccctggctgtgtaaacctgtccctccatgggattgtggaggatcggaggccaaaggaaaggatctcttttgaggtgatggtgctggccgagctgtttctggagatgctccagagggattttggctatagagtttataagatgctactgagccttcctgaaaaggtcgtgtccccacctgaacctgagaaggaggaggcggccaaggaagaagccaccaaggaggaagaagccatcaaagaggaggtggtcaaggagcccaaggatgaggcacagaatgagggcccggctacagagtcagaggccccgctgaaggaggatgggcttttgcccaaaccactctcttctgggggagaggaagaagaaaaaccccggggcgaggcttctgaggacctgtgtgagatggccctggacccagaactgttgcttctgagggatgatggagaggaggagtttgcaggagcaaagctggaggattcggaggtccggtccgttgcctcaaaccagtcagagatggagttctcttcacttcaggacatgcccaaggagctggatccctctgctgtgctccccttagactgtctgcttgcttttgtgttctttgatgccaactggtgtggctacttgcaccggcgagacttagagaggatcctccttacccttgggatccggctcagtgcagagcaggccaagcagctggtcagcagggtggtgacccagaacatctgccagtaccggagccttcagtacagccgccaggagggcctggatggtggccttcccgaggaggtgctcttcggaaacctggacctgctgccccctcctgggaaaagcacgaagccaggtgctgcccccacagaacacaaagccttggtgtcccacaatggcagcctgattaacgtggggagcctgctgcagcgcgcggagcagcaggacagcggccggctctacctagagaacaagatccacacactggagctgaagctggaggagagccataaccgtttctcagccactgaagtaaccaataagacgctggcggcagagatgcaggagctgcgagtccggctggcggaggccgaggagaccgcccggacggcggagcgacagaagagccagctccagcggctgctgcaggagctccgcaggcgtctgacccccctgcagctggagatccagcgggtggtggaaaakgtaagstgggtggasaggagrcaacacaatnacctgacgaatgcattgtagcaacgtggccgcaattanctcgtacaaacacag

SEQ ID NO: 1090 - DNA, 394 bp, Homo sapiens
  misc_feature (394)..(394): n equals a,t,g, or c
gaattcggcacgagatgtggtctccagtggccatgctttgctgcgccaggcctgtgacatctgtgccattgccatgagcctggtggcttatgtgatcaacagcctggtcaacatctgcctcatcggcactcagaacctcttttccctggtgctggccctgtgggatgcagtgaccgggcctctgtggaggatgacagacgtagtggctgccttcctagcccacatttccagcagtgctgtggccatggccatcctcctttggacaccctgccaactagccctggagctgctggcctcagctgcccgcctcctggccagctttgtgcttgtcaatctcactggcttggtgttgctagcttgtgtgctggcagtramggtactrtrwwgcatccan

SEQ ID NO: 1091 - DNA, 789 bp, Homo sapiens
  misc_feature (188)..(188): n equals a,t,g, or c
  misc_feature (496)..(496): n equals a,t,g, or c
  misc_feature (745)..(745): n equals a,t,g, or c
  misc_feature (786)..(786): n equals a,t,g, or c
tactgactagtcttctgcacttgggccgcggagtcttgctttcattgctggccttgatcgaagccgtggtccggttcacatgtgggggcttgcaggccttgtgtactctgctgtatagctgctgctctggcctagagagcctaaagctcctggggcacctggcctctcatggggcactgcggacaggnagatactgcaccggggcgtcctcaatgtggtctccagtggccatgctttgctgcgccaggcctgtgacatctgtgccattgccatgagcctggtggcttatgtgatcaacagcctggtcaacatctgcctcatcggcactcagaacctcttttccctggtgctggccctgtgggatgcagtgaccgggcctctgtggaggatgacagacgtatggctgccttcctagcccacatttccagcagtgctgtggccatggccatcctcctttggacaccctgccaactagccctggagctgctggcctcanctgcccgcctcctggccagctttgtgcttgtcaatctcactggcttggtgttgctagcttgtgtgctggcagtgacggtgactgtgttgcatccggacttcaccctgaggctggctacccaggcactcagccagctccatgcccggccatcctaccaccgtcttcgagaggatgtcatgcggctctctcgcctagcactgggctcagaggcctggcgccgagtctggagccgmatctgcagctggcganttggccaaaccggggaagggcactggagctccccaggtgancta

SEQ ID NO: 1092 - DNA, 2351 bp, Homo sapiens
  misc_feature (72)..(72): n equals a,t,g, or c
  misc_feature (141)..(141): n equals a,t,g, or c
  misc_feature (294)..(294): n equals a,t,g, or c
  misc_feature (303)..(303): n equals a,t,g, or c
attctacagcagaatatacttggaaaaactcaagtttttccacatacttggaaaaactctctagcatttgtnggaatttagtgtaattaagtgaaacctacctagcaactgtagtaattaaaagcgtggggtgtgcttttngttgagatccgtgaatgtttctgtaaacacaattttgattgtgttgcgcttcttaaaggttgtgatgacaacggtaattttaaccacttgaccgtatatcgttttcatccttgaagactgtcatatatttccaagtgtctttcctccctggtnattttaggntaaagatcgaggtccggaagccactaggagattttttaattggttttattggagcattaacctgggagcgatcctgtcgttaggtggcattgcctatattcagcagaacgtcagctttgtcactggttatgcgatccccactgtctgcgtcggccttgcttttgtggycttcctctgtggccagagcgttttcatcaccaagcctcctgatggcagtgccttcaccgacatgttcaagatactgacgtattcctgctgttcccagaagcgaagtggagagcgccagagtaatggatgcagacaacatatgttttacagagtcttcatttgaggattccagaaatttcaaatattacaaccactcctcacacgctccctgcagcctggctgaccatgtttgatgctgtgctcatcctcctgctcatccctctgaaggacaaactggtcgatcccattttgagaagacatggcctgctcccatcctccctgaagaggatcgccgtgggcatgttctttgtcatgtgctcrgcctttgctgcaggaattttggagagtaaaaggctgaaccttgttaaagagaaaaccattaatcagaccatcggcaacgtcgtctaccatgctgccgatctgtcgctgtggtggcaggtgccgcagtacttgctgattgggatcagcgagatctttgcaagtatcgcaggcctggaatttgcatactcagctgcccccaagtccatgcagagtgccataatgggcttgttctttttcttctctggcgtcgggtcgttcgtgggttctggactgctggcactggtgtctatcaaagccatcggatggatgagcagtcacacagactttggtaatattaacggctgctatttgaactattactttttccttctggctgctattcaaggagctaccctcctgcttttcctcattatttctgtgaaatatgaccatcatcgagaccatcagcgatcaagagccaatggcgtgcccaccagcaggagggcctgaccttcctgaggccatgtgcggtttctgaggctgacatgtcagtaactgactggggtgcactgagaacaggcaagactttaaattcccataaaatgtctgacttcactgaaacttgcatgttgcctggattgatttcttctttccctctatccaaaggagcttggtaagtgccttactgcagcgtgtctcctggcacgctgggccctccgggaggagagctgcagatttcgagtatgtcgcttgtcattcaaggtctctgtgaatcctctagctgggttcccttttttacagaaactcacaaatggagattgcaaagtcttggggaactccacgtgttagttggcatcccagtttcttaaacaaatagtatcacctgcttcccatagccatatctcactgtaaaaaaaaaaattaataaactgttacttatatttaagaaagtgaggatttttttttttttaaagataaaagcatggtcagatgctgcaaggattttacataaatgccatatttatggtttccttcctgagaacaatcttgctcttgccatgttctttgatttaggctggtagtaaacacatttcatctgctgcttcaaaaagtacttactttttaaaccatcaacattacttttctttcttaaggcaaggcatgcataagagtcatttgagaccatgtgtcccatctcaagccacagagcaactcacggggtacttcacaccttacctagtcagagtgcttatatatagctttattttggtacgattgagactaaagactgatcatggttgtatgtaaggaaaacattcttttgaacagaaatagtgtaattaaaaataattgaaagtgttaaatgtgaacttgagctgtttgaccagtcacatttttgtattgttactgtacgtgtatctggggcttctccgtttgttaatactttttctgtatttgttgctgtatttttggcataactttattataaaaagcatctcaaatgcgaaatmmaaaaaaaaaaaaaaaaaattggcggccgc

SEQ ID NO: 1093 - DNA, 1422 bp, Homo sapiens
ccgcctccttgccgcccagccggtccaggcctctggcgaacatggcgcttgtcccctgccaggtgctgcggatggcaatcctgctgtcttactgctctatcctgtgtaactacaaggccatcgaaatgccctcacaccagacctacggagggagctggaaattcctgacgttcattgatctggttatccaggctgtcttttttggcatctgtgtgctgactgatctttccagtcttctgactcgaggaagtgggaaccaggagcaagagaggcagctcaagaagctcatctctctccgggactggatgttagctgtgttggcctttcctgttggggtttttgttgtagcagtgttctggatcatttatgcctatgacagagagatgatatacccgaagctgctggataattttatcccagggtggctgaatcacggaatgcacacgacggttctgccctttatattaatcgagatgaggacatcgcaccatcagtatcccagcaggagcagcggacttaccgccatatgtaccttctctgttggctatatattatgggtgtgctgggtgcatcatgtaactggcatgtgggtgtaccctttcctggaacacattggcccaggagccagaatcatcttctttgggtctacaaccatcttaatgaacttcctgtacctgctgggagaagttctgaacaactatatctgggatacacagaaaagtatggaagaagagaaagaaaagcctaaattggaatgagatccaagtctaaacgcaagagctagattgagccgccattgaagactccttcccctcgggcattggcagtgggggagaaaaggcttcaaaggaacttggtggcatcagcacccccctcccccaatgaggacaccttttatatataaatatgtataaacatagaatacagttgtttccaaaagaactcaccctcactgtgtgttaaagaattcttcccaaagtcattactgataataacattttttccttttctagttttaaaaccagaattggaccttggatttttattttggcaattgtaactccatctaatcaagaaagaataaaagtttattgcacttctttttgagaaatatgttaaagtcaaaggggcatatatagagtaaggcttttgtgtatttaatcctaaaggtggctgtaatcatgaacctaggccaccatggggacctgagagggaaggggacagatgtttctcattgcataatgtcacagttgcctcaaatgagcaccatttgtaataatgatgtcaatttcatgaaaagcctgagtgtattgcatctcttgatttaatcatgtgaaacttttcctagatgcaaatgctgactaataaagacaaagccaccctgaaaaaaaaaaaaaaaaaaaaaaaaaaaagggcggccgc

SEQ ID NO: 1094 - DNA, 1134 bp, Homo sapiens
gtggtgtctttctccgctgagattttgtcacggacactatgtgaaccccttgtggcgtctctctggatgaaactggggaacacgggggccatgagaaggtgtgtgaagctaacagtcgctcttgagactgctgaatgtgaattcccccctcacctggatgtatatatagaagacccacacttgcctccctcactaggactacttccaggagcccgggtccacttcagccagttggagaaaagggtttccagatctcacaatgtttattgttgyttccggtcatccacttatgtgcaggtcctgagttttccccctgagaccaccatcagcgktcccctgccccacatctacctggctgaacttctgcagggtggtcagtccccattccaggccactgcctcttgcatatcgctctgtcttcagccttcagctcttctgggtgtgtgcttattgtaccagcatctgccggcagtcttcagccagggttgacgagcccatgaccatgktcctctggacactttgkactarcccctctgtcctccgtcctattgtgctttcttttgagctggaaaggaaaccgtcgaagatcgtcccattagaacctcctcggctacagcgattccagtgtggagagctccctttcctgactcacgtgaaccccaggctccgattgtcctgcctttctatccgagagtcagagtactccagctctctggggatccttgcttcctcctgttaactgaactgcaaggatggcctgagagtccttccttgctgaaaacctgaaggcctaggtcctggctcctctccctacttgttctgtgattgaaccaaggactccagattcacaaactgctactccactataatttcccttctttggtgttctggtgccagcctgccttggcaaaattgtggcaacaggaaatcatggccctattaatatgtcctctgattgggacaaggcacctgcattcacaggcggccctgagcacctgggttctgactttgtcgcaggagctgagggaacaaaagacttgctcgctgtggggtgatggtgacaggcctattgacctgcaatgaagccctctggtgtcatttmaaaaaaaaaaaaaaaaaaaaaaaaaaaaaaaa

SEQ ID NO: 1095 - DNA, 1715 bp, Homo sapiens
ggcacagcccacacgcccccgccgcccgcgccccgtccacccgcgccccgctcccgrggactgggagaacaggatagcagcaggagtcggggggccgccgaagatggggaacactacctcgtgctgcgtgtcgtccagtcccaagctccggaggaatgcccactcccggctggagtcctaccggccagacacggacctgagccgcgaggacacgggctgcaacctgcasacatcagcgaccgggagaacatagacgatttgaacatggaattcaatccttcagatcatcctcgggccagcacaatattcctcagtaaatctcagacrgacgtgagagaaaaacgcaagagtctcttcattaaccatcatcctccaggacaaatagcaaggaaatacagttcctgctccaccattttcctagatgatagcacagtcagtcaaccaaacctcaagtatacaattaaatgtgtcgctcttgcaatatattatcacatcaaaaacagggacccagatggaaggatgctcttagatatttttgatgaaaatcttcaccctctttcgaaatccgaagtgccaccagattatgacaaacacaacccagagcagaagcagatttaccggttcgttcggacactgttcagtgctgctcagctgacggctgaatgtgccatcgtcaccctggtgtaccttgaaagacttttaacatacgcagagatagatatctgtccggccaactggaagcggattgttttaggggcgatcctgctggcctccaaggtgtgggatgaccaggctgtatggaatgtggattactgccagatcctgaaagacatcacggtggaggacatgaacgagctagagcgacagtttcttgaattgctgcagttcaacatcaatgttccttccagtgtctatgccaagtattattttgatcttcgttctctggcagaagcgaacaacctgagctttcccttggagcccctgagcagggagagggctcacaagcttgaggccatctctcgcctctgcgaggacaagtacaaggacctaagaagatccgcgaggaagcgctcagccagtgcagacaacctgactctgccccggtggtccccagccatcatctcttaactacggaggcccgccggaggccacaccatcccttagtttctcctttagtttgagaaaagacagacttggggtgggtttgtttttgttttttctttccttttctttttttacgcatagctccgtcaagctgcctggatgagcgcccatgcagcaaggcttggaggaagcgtcagtgccctggagatcccagctcgctctccccactgtcagcaacagcacttccttcgtggaggaagtggactcgaatcctggaggaggaaataaagggaaagggaagtcgtggagaggcagggaaaatggttaagcagcccggccctctggagtccccatgggggcggtagctgaagttggcgagcgcagcggtggatgcagagctggctgcacccagggctgggccagtgtgtcctgtaagacttcttgcattccttctgctgcttttttgggatgggggtatttttgttcatttgtttttgccctgttttgattttggtcccacagagcaggggatgtagtttgtacccaccatggcgcagacttccaaataaatagtactggtcatttcaaaaaaaaaaaaaaaaaaaaaaaaa

SEQ ID NO: 1096 - DNA, 981 bp, Homo sapiens
  misc_feature (446)..(446): n equals a,t,g, or c
ggtcaacaccttctcccagagcgtcagcagcctgttcggcgaggacaacgtgcgcgccgctcagaagttcttggccaggctgactgagagatttgtgctgggagtggatatgttcgtggagacactgtggaaagtctggaccgagctcttggatgttcttggacttgacgtctccaacctgtcccagtatttcagcccagcctcggtgtccagcagcccggcccgcgcgctcctgctggtcggcgtcgtcctcctggcctactggttcttgtccctgaccctgggcttcactttcagcgtcctgcacgtggtgttcggccgcttcttctggatcgtgcgggtcgtcctgttttccatgtcctgcgtgtacatcctgcacaagtacgagggcgagccggagaacgcggtgctgccgctgtgcttcgtggtggccgtctacttcatgnaccgggcccatgggcttctactggcgaamagtcccagcggccccagcaaccccagcaaccccagcgtggaggagaagctggagcacctggagaagcaggtcagactgctcaacatccgtstcaaccgggtgctcgagagcctggaccgctccaaggacaagtgaaggtcagccggccgggcgggtccacagttaccagcacgctgtctcagaaaacgaaaacggaggaaaaaaaccccaaaccccaaacaatcttaataaacacgactgagcaagaaagtggcgctgtgtarggctatttccacccacccggcagctcttaggacacattcccagaagagcggaaagatcattgacgtggaactacacacgaagtgtaattagtgggggaaaaaatattttttaaacaaaggatataaccatatttagttgtacagtaagagaaatttatctgtgcatagagcataaagttaattttttcaagcatttaaatacatcttttgtaaggttttttaataaaggcagattgagtcaag

SEQ ID NO: 1097 - DNA, 1474 bp, Homo sapiens
gacccacgcgtccgcgcagaaccaggaaagtaacggctacagacagtgagaaatagtttcgctcgccggctagaaaaactctgtcggtaccaaccccagagcgttgagagcagcccacctccacgcttccttaacggagaggtgcaggactcagacttcaccagcccactcggtcccagccttgtacgcaaagagacgtcaaggacgcgctctcccgcgtccaggcagccccagcttgctggcttgcctgcccgcctgcgtgcagcactcggccggcgtgcagcatgaccctgtggaacggcgtactgcctttttacccccagccccggcatgccgcaggcttcagcgttccactgctcatcgttattctagtgtttttggctctagcagcaagcttcctgctcatcttrccggggatccgtggccactcgcgctggttttggttggtgagagttcttctcagtctgttcataggcgcagaaattgtggctgtgcacttcagtgcagaatggttcgtgggtacagtgaacaccaacacatcctacaaagccttcagcgcagcgcgcgttacagcccgtgtcggtctgctcgtgggcctgragggcattaatattacactcacagggaccccagtgcatcagctgaacgagaccattgactacaacgagcagttcacctggcgtctgaaagagaattacgccgcggagtacgcgaacgcactggagaaggggctgccggacccagtgctctacctggcggagaagttcacaccgagtagcccttgcggcctgtaccaccagtaccacctggcgggacactacgcctcggccacgctatgggtggcgttctgcttctggctcctctccaacgtgctgctctccacgccggccccgctctacggaggcctggcactgctgaccaccggagccttcgcgctcttcggggtcttcgccttggcctccatctctagcgtgccgctctgcccgctccgcctaggctcctccgcgctcaccactcagtacggcgccgccttctgggtcacgctggcaaccggcgtcctgtgcctcttcctcggaggggccgtggtgagtctccagtatgttcggcccagcgctcttcgcacccttctggaccaaagcgccaaggactgcagccaggagagagggggctcacctcttatcctcggcgacccactgcacaagcaggccgctctcccagacttaaaatgtatcaccactaacctgtgagggggacccaatctggactccttccccgccttgggacatcgcaggccgggaagcagtgcccgccaggcctgggccaggagagctccaggaagggcactgagcgctgctggcgcgaggcctcggacatccgcaggcaccagggaaagtctcctggggcgatctgtaaataaacctttttttcttttgttttttaaaaaaaaaaaaaaaaaaaaaaaaagggcggccgc

SEQ ID NO: 1098 - DNA, 1037 bp, Homo sapiens
ggccgctctcccccctccccgacacacactcacaggccgggcattgatggtaatgtatgcgaggaaacagcagagactcagtgatggctgtcacgaccggaggggggactcgcagccttaccaggggggtgatgttttacaggcacttaagtattcatcgaagagtcaccccagtagcggtgatcacagacatgaaaagatgcgagacgccggagatccttcaccaccaaataaaatgttgcggagatctgatagtcctgaaaacaaatacagtgacagcacaggtcacagtaaggccaaaaatgtgcatactcacagagttagagagagggatggtgggaccagttactctccacaagaaaattcacacaaccacagtgctcttcatagttcaaattcacattcttctaatccaagcaataacccaagcaaaacttcagatgcaccttatgatyctgcagatgactggtctgagcatattagctcttctgggaaaaagtactactacaattcggcacgagacaagatggcagtcaacagcttcccaaaagatagggattacagaagagaggtgatcacagacatgaaaagatgcgagacgccggagatccttcaccaccaaataaaatgttgcggagatctgatagtcctgaaaacaaatacagtgacagcacaggtcacagtaaggccaaaaatgtgcatactcacagagttagagagagggatggtgggaccagttactctccacaagaaaattcacacaaccacagtgctcttcatagttcaaattcacattcttctaatccaagcaataacccaagcaaaacttcagatgcaccttatgattctgcagatgactggtctgagcatattagctcttctgggaaaaagtactactacaattgtcgaacagaagtttcacaatgggaaaaaccaaaagagtggcttgaaagagaacagagacaaaaagaagcaaacaagagcagagactcacagtagttctacgccagtacagcaccccatcaaaccagtggttg

SEQ ID NO: 1099 - DNA, 775 bp, Homo sapiens
  misc_feature (8)..(8): n equals a,t,g, or c
aacggggntcttctactggaaaagccccacactaatttaatgtatgggaaggcgtaatataaaaggcctccaccaactgcctgaagcacggttaaaattgggaagaagtaaagtgcagcataaatacttttaaatcgatcagatttccctaacccacatgcaatcttcttcaccagaagaggtcggagcagcatcattaataccaagcagaatgcgtaatagataaatacaatggtatatagtgggtagacggcttcatgagtacagtgtactgtggtaacgtaatctggacttgggttgtaaagcatcgtgtaccagtcagaaagcatcaatactcgacatgaacgaatataaagaacaccaactggatcactcacaagtaaggtgataatagctgccatgctgcattcaaataatgcagtgatgtgttggaaaagtgcgctggaactctttttccccgagtaccattcaatgaagaaccaatgtaaaaccagaggaagcattgccataaatccaagatagagccaatcataaagttcaggagattctgtgcaaggctgacaatatttctgtgcattcgttctctgtcctcttgggcataccccacattctccatatatttcagttgagccatttttaaataatagggtcttcccacaataaagtccaaggcatgctggttgaatatcgacagccatgggccgcctgaaggtttttttcgagaagcactagatcagcggatctggcagctgcaccgaacatccgggccacagct

SEQ ID NO: 1100 - DNA, 1120 bp, Homo sapiens
  misc_feature (1111)..(1111): n equals a,t,g, or c
  misc_feature (1118)..(1118): n equals a,t,g, or c
ccgccgagctcgctgtggcccggatgttcggtgcagctgccagatccgctgatctagygcttctcgaaaaaaaccttcaggcggcccatggcatgccttggactttattgtgggaagaccctattatttaaaaatggctcaactgaaatatatggagaatgtggggtatgcccaagaggacagagaacgaatgcacagaaatattgtcagccttgcacagaatctcctgaactttatgattggctctatcttggatttatggcaatgcttcctctggttttacattggttcttcattgaatggtactcggggaaaaagagttccagcgcacttttccaacacatcactgcattatttgaatgcagcatggcagctattatcaccttacttgtgagtgatccagttggtgttctttatattcgttcatgtcgagtattgatgctttctgactggtacacgatgctttacaacccaagtccagattacgttaccacagtacactgtactcatgaagccgctacccactatataccattgkatttatctattacgcattctgcttggtattaatgatgctgctccgacctcttctggtgaagaagattgcatgtgggttagggaaatctgatcgatttaaaagtatttatgctgcactttacttcttcccaattttaaccgtgcttcaggcagttggtggaggccttttatattacgccttcccatacattatatwagtgttatctttggttactctggctgtgtacatgtctgcttctgaaatagagaactgctatgatcttctggtcagaaagaaaagacttattgttctcttcagccactggttacttcatgcctatggaataatctccatttccagagtggataaacttgagcaagatttgccccttttggctttggtacctacaccagcccttttttacttgttcactgcaaaatttaccgaaccttcaaggatactctcagaaggagccaatggacactgagtgtagacatgtgaaatgccaaaaacctgagaagtgctcctaataaaaaagtaaatcaaaaaaaaaaaaaaaaaactcgagggggggcccggtacccaattcgcccnagagtanta

SEQ ID NO: 1101 - DNA, 759 bp, Homo sapiens
  misc_feature (114)..(114): n equals a,t,g, or c
  misc_feature (666)..(666): n equals a,t,g, or c
  misc_feature (732)..(732): n equals a,t,g, or c
gggtcgacccacgcgtcckgtgacacgtagcaacggggctggttcagggtctgaaacagagtttgggggttgtttgggattagtgaagctactgcctttgccgccagcgcagcntcagagtttgattatttgcaatgtcaggctttgaaaacttaaacacggatttctaccagacaagttacagcatcgatgatcagtcacagcagtcctatgattatggaggaagtggaggaccctatagcaaacagtatgctggctatgactattcgcagcaaggcagatttgtccctccagacatgatgcagccacaacagccatacaccgggcagatttaccagccaactcaggcatatactccagcttcacctcagcctttctatggaaacaactttgaggatgagccacctttattagaagagttaggtatcaattttgaccacatctggcaaaaaacactaacagtattacatccgttaaaagtagcagatggcagcatcatgaatgaaactgatttggcaggtccaatggktttttgccttgcttttggagccacattgctactggctggcaaaatccagtttggctatgtatacgggatcagtgcaattggatgkctaggaatgtttggttattaaacttaatgagtatgacaggtgtttcatttgnttgtgtggcaagtgtccttggrtattgkcttctgsccatgatcctactttccagtttgcagtgatnttttctttgcaaggatggtagggattc

SEQ ID NO: 1102 - DNA, 3674 bp, Homo sapiens
ggcagagctacttcttgctgcctcacggttgctgttgcagacccaggagtctctgaaggcttccgcggctttggggccggttgtgagatgccaggcagaggccgctgcccggactgcggctccacggagctggtggaagactcgcactattcgcagagccagctggtgtgctccgactgcggctgcgtggtcaccgagggggtccttaccactaccttcagcgacgagggcaatctccgagaggtaacatattcccgaagcacaggggaaaacgaacaagttagtcgcagccagcaacgaggtctccggcgaktgagagacctttgtcgagttctgcagttgccaccaacatttgaggataccgcggttgcctactaccaacaggcatatcggcactctggcatccgagcggccaggctgcaaaagaaggaggtgttggttgggtgctgcgtcttaatcacctgccgacagcataactggcccctaacaatgggggccatctgcacgctgttgtatgcagatttggatgtgttttctagcacttacatgcagatagtgaagctcctgggactggatgtgccatctctgtgcttggcagaactggtgaagacctattgcagcagcttcaaactgttccaagcttcaccttctgtgccagccaaatacgtggaagacaaagagaagatgctgtctcgaacaatgcagttggtggagctggcaaatgagacgtggctggtgaccgggaggcatcccttgcccgtcatcactgctgcgactttcctggcttggcagtcgctgcagcctgcagatcggctttcatgttcccttgcccgattttgtaaattggcaaatgtggacctgccctacccggcgtcctcccgcctgcaggagctgctggctgtgctgctgcggatggctgagcagctggcctggttacgagttctgagacttgacaaacggtctgtggtgaagcacatcggtgaccttctccagcaccgccagtcactggtccgctctgcctttcgggatgggacagcagaagtggagacccgagagaaggagccaccggrgtggggacaggggyaaggagaagsggaggtgkgaamyaattccttaggtttaccccaggggaagcggccggccagtcctgcccttctcttgccaccctgcatgttgaagtccccgaagcggatctgccctgtaccccctgtctccactgtcactggagatgagaacatttctgatagtgaaatagaacagtatttgcgtacccctcaggaagttagggactttcagagagcccaggctgctagacaggctgccacgagtgtccctaaccctccctgatggatatccactgggagcacttcatcctgttctgacagcttgataacattcctgttataaccaaggatggaagtgtacaccagtccgtaggtattgcttttcttgtttgaaggaaccaagaggggctctgccattagttggaccctgggtcctggagtaaagtcaggagtgcagggatgactataggtaggagagattcccatcccttggtgtgggagagcaagttgcctatgtccatgttctgtgagatggctttcctcatagatggatgggaaaatgtcaggctctttgctgctggtttgaattggacacactgctgcggctcctcctgcaggcctgagggggcttccctctgcttgtggagtggttggcattcccagcagtatcaaccctcagaggagcgggaactggggaattctggccctacgtgcattcacaggcaatgatgggtttgtgtgtatggtgtcatgagatcctctacctcataacaaaaggacagtgggtagactaaggcagtagctcaaagggctttgcaaaattttaatatattaaaacaagaggcatctgctagaaaacattctattgtataaaacccgagttcttaaaaacatgttttctttggcactttcattccctccctcccctttccccagcatattgcaaaaagctctccagtgctaaggcattggcagggtgtgtaaacagcagccagcatatgtggaagaataatacaaagcttttttttttcttctaatatgtctgtgcagcaagcataaataacaggacccattccaaggagtgtgtgtgggttttccccctcccctgtgtcctctgtcaccttggtgatgaggccagagtgatgtgaagactgggagggaaccctaggtcagaccttggtttcctgttgttcttcccaagacccagggttccctcggtttccatttggtcctgtagtgaaatgctggtggttggttttaggttggggaaaagacgggtgctggtgtttaaaaggagtaaaggcataggcccctcatgacctgcagggaccccagccactgcctctgggcttggcttgagctcctgggagtcgggaagctggtttgacattttgtaggtttctctctactgtggagctggagatcaaatgattgggatggttcttcctctggccttacggaggcaaggaagtgctcttccttagtcccgtggtgttgtaaggctgagactagggagatgggtcttgtaactgaaaagtaactgcttctccaaacaccacctgcagctttctggggcaccattgtttacaggactagctttagggcatgactagattctgccccagttccacctgccctctccctctactcccctcagttcacccacaggcacctggcagtcagctgttgaggtgcagggcctcagctttgtcccggtgtgccacctctgaaccctgctgtctggtttaagtaccactcctgtgggaatggtggcattgttcctagttgtgcccggttcccactcccctcccccaggactggttgatgtctagagctgcctttcacgtggccccaccctcccctcttgcatagtggatctgaaaagcagcaccttgtgacttaacatcacctgcttcatgtgctgggctagctctcgtgccagccaaactcgggaggaaaagggacctaggatctaggcaggggctgggctgaaatcagtagagggcagggaggaaagaacacagttcccacgctctcatctctgctttgctggtgaggctgatggcccccagtgaggccgcatggacagtaggcggggtgggagtacttggggagggtgcacctgggatgtgctgtgccctttcacacagacggaggccttccccgttcctgggagggcaccgacagtcagactgccccgggctggacggaaatgtattatgcgtgtttctgggattgtctgtcgctaccccagagggatgccctctaggcaagtggggaacatccscctgtgggcttcctccagccatcggctcctctgcctccaacctgctgactacggagacaccttggagggccccgaggagcgggggaacgagccgcgtggccagcccgtctaccgcgtcgcccgccccaccttagacggtagtttcgctcttccagagtccggtcttcatgcagccgccgctggctacctccgcgcccatcagggtgacgtcgtcgtacttgccccccttgggggcgccgtttaggctggcggcgttgagcgggtacgagcggcgatggctctccttctccagcgcgccgccgcccttgagactgtcgcggctg

SEQ ID NO: 1103 - DNA, 1857 bp, Homo sapiens
ggggccgctgcgcggtatcgacgagtactcggacgcggsacggcggycgcgccctgcaggacgcggackggccctggcggcatcaacatgctgctcaacaacggcttcagggagtcggaccagcttttcaaacaatacagaaatcatagcccactaatgagttttggagccagctttgtcagttttttgaatgccatgatgacatttgaggaagaaaaaatgcagttggcatgtgatgacttaaaaaccacagaaaaactgtgtgaaagtgaagaggctggagtaattgaaacaatcaagaataaaattaagaagaacgttgatgtccgaaaatccgccccctctatggttgatcggcttcagaggcagataatcatagctgactgccaggtttacctggctgtgctttcatttgtaaaacaagaattgtcagcttatatcaaaggtgggtggatccttaggaaagcctggaagatttacaataaatgctatctggacatcaatgcccttcaggagctgtatcagaagaagctaactgaagagtccttgacttctgatgctgcaaatgataatcacattgtggctgaaggggtgtctgaggagtctctgaacagactgaaaggtgctgttagctttggatatggcctttttcacctttgcatatccatggtgcccccaaacctgctcaaaatcatcaacctgctgggttttcctggagaccgcctacaggggctttcttcactgatgtatgcaagcgaaagtaaggacatgaaggcccctttagctacattagctctgctctggtatcatactgtagtccgcccgttttttgccttggatggcagtgataacaaggcaggcctggatgaagctaaggaaattctccttaaaaaagaagctgcttatccaaattcttccctctttatgtttttcaagggacggatacaacgactagagtgtcaaatcaacagtgccttgacatctttccacactgctttggaacttgcagtagaccagagagaaattcaacatgtctgtctgtatgaaattggttggtgcagcatgatagagctcaatttcaaggatgcatttgattcctttgagaggctaaaaaatgagtccaggtggtcccagtgctattatgcctacttgactgcagtttgtcagggagccactggtgatgtggatggggcacagattgtctttaaagaagttcagaaactcttcaaaaggaaaaacaatcagattgaacagttctcggtgaaaaaggcagagcgatttcggaagcaaaccccaaccaaagcgctctgtgtgttggcgtctattgaagtgttgtacttgtrraaagctcttccaaactgttccttccccaacctgcagaggatgagtcaagcttgccatgaagtggatgactcatctgttgttggattaaagtatttgcttcttggtgccatacacaaatgtctaggaaactcagaagatgctgttcagtacttccagcgagctgttaaagatgaattgtgtcgtcagaataatttatatgttcagccgtatgcctgttatgaacttggctgtcttctattagacaaaccagagactgtaggaagaggcagagctctacttcttcaagcaaaggaggatttctctggctacgactttgaaaacagattgcatgtccgcatccatgctgctctggcctctctgagggaattggttcctcagtgacagacccggaacacccgctccgtccctccccacccagggtccgcactttaaaataaaagcagaggacaaaaaaaaaaaaaaaaaaaaaaaaaaaaaaaaaaaaaaaaaaaaaaaaaaaaaaagggcggccgc

SEQ ID NO: 1104 - DNA, 1545 bp, Homo sapiens
  misc_feature (1111)..(1111): n equals a,t,g, or c
  misc_feature (1122)..(1122): n equals a,t,g, or c
  misc_feature (1182)..(1182): n equals a,t,g, or c
cgctgctactgtggctgttgccgcgtttaccagcattagcgcgccggatatgaaggtcaacgatcgtgtcgcggctgaacgccaacatgtgctggcgtttgccctcgcgggcggcgtgctgctgttgatggctgtggtggtggcgctgtcgtttggtcgtgatgcgcacggctggacgtgggcgagcggggcgttgctcgaggatttaatgccctggcgctggccgcgaattatggcggcgctgtttgcgggcstcatgctggcggtkgcgggctgtattattcascractgaccggaaacccratggcaagcccggaagtgctggggattagctccggcgcggcgtttggcgtggtgttgatgctgtttctggtgccgggtaatgcctttggctggctgttacctgcaggcagtctcggcgcgscggtgacgctgttgatcattatgatcgccgccggccgcggtggattttccccacaccgtatgttactggcggggatggcgttaagcaccgcgttcaccatgcttttgatgatgttgcaggcaagtggtgacccgcgaatggcgcaagtgctgacctggatttccggttcgacctacaacgcgaccgatgcgcaggtctggcgcaccggaattgtatggtattttgctgcgattaccccgctgtsccgcgctggctgaccattttaccgctgggtggtgataccgcccgagccgtaggaatggcgctgacgccgacgcgaattgcgctgctgctgttagcggcttgcctgacggcgaccgcgacgatgactattggaccgttgagttttgttggtttaatggcaccgcatattgcgcggatgatgggctttcgacggacgatgccacacatcgtaatttcggcgctggtgggtggtttactgctggtgttcgctgactggtgtgggcggatggtgctgtttccattccagatcccggcggggctgctgtcaacctttatcggcgcgccatattttatctatttgttgagaaagcagagccgttaatttttccatataacggccctgtacgcctggacggataaagcgtttacgcgacaacggatgcccgatgcgacgctggcgcgtnttatcgggccnacaaacggccccgaattgtaggtcggataaggcgttcacgccgcatccgacaaaccatgntggatcacaacttcgcaaacacccgacgtgcagcatcgatggtgttattgatatcttccatgctgtgcgccacggacataaagcccgcttcaaacgctgacggtgccaggtaaacaccttcgtccagcatcatatggaagaaacgyttaaagcgttccacgtcacaggccatcacatcctgatagcacgtcacggactcggcgtcggtaaagaaaataccgaacatgccgccaacgtggttaacgaccagcggaattccggcttcttctgccgcttccagcagaccttttgccagacgtgttgtcagctcatccagcgtttcgtgaacgcccggctgcgcgacttcattcagacaggcgaaac

SEQ ID NO: 1105 - DNA, 1710 bp, Homo sapiens
  misc_feature (10)..(10): n equals a,t,g, or c
  misc_feature (125)..(125): n equals a,t,g, or c
ggcacgagcngatgcatctggctgtgagctgtgactagtcatatactagttgtgtcattttgaacaggttacctaacctctggctcctcagtttgttcatctgtttaaaaattgtgggaataacngttcctgctgggtcattgcaagatgtcagggagacgtgtcaagtgcttagaatagggcttggcataagtagagtctcagtagggtaggtgttatttaatcccagaaataactgacaactttggaagatgagagtgaatgtctccgatcattaatttatttaacaaatacttatctagtactatgtgcccggcgctgtagacactgccatgttttatctcattcaatattcacagtgactgcccagtgaatggtattgcctccatcctctgagaaggtaaagagcctatcccagaccccacgagtggaggcgtcagggaggggttcttggcaggagatgggtcttgtagaaaggcttctgctttgctttcactcacggcctgtggcagtttgctcagacagctcccatcaggacaccattggcagcttttgcatgaccctgcctcccagggtcttcctgcgtttttccttaagttgccttattctttggttgtttccctacttgtttttgttagactgtgggaggaagaaatccatttcaaatctgctgaaacctgttaccaagcaacagcagtgattaaaagcaacctgatgagtgagtaaagaattagggtttcagacctgtagttaatgatggtctctgtctccctgctgccctgcattcccttcccttccgttcactgctgggtgaaggagggcttgctgcattttggaagttaagggaaccaataaggtgactcttttgcagattggaatatggtgctcagccagccatatggaagcactgtcctggcgtgatctgccctgggctgttggctctctgagtgctgtcttgggaggagcactgcccttcagaacagaagagatggcttccagtcccctctcccccttctcccagtctctctgaggctgcttgttgggtattgggcgtgctgtgtactaactcactcccgtctcttgtctcattatctgaaatgcatccccttttgcagaaagggctcaaacggagccttcagttctgctcctctgcatagccgtagctcagatcctagctcargatgtcttgtctgggaagggcaaaacatggtccccagtgtagcattttcactgggttgattatctcagtggtggatcatctatcacccttgtgtggtgactttgtgaattatctgcctgagtgccacttcccttccaccctaatcactgcaggctcagggagcaagaaataaaatcatgaaatgcattccaaataaaattaccttttggctgggtgcagtggctcacacctgtaatctgagcactttgggaggctgaggtgggtggatcgcttgaggtcaggagttcaagaccagcctggccaacatggcaaaaccccatctctacaaaaaatacaacagcaaaaaaatcagccaggctagctggtgtgcgcctataatcccagctacttgggagggaggctgaggcacaagaattgcttgaacccaggaggtggaagttcagtgagccgagatcgcacccctgcactccagcctgagcaacagagtgagactctgtctcaaaaataaaaaaaaaaaaaaaaaactcgag

SEQ ID NO: 1106 - DNA, 374 bp, Homo sapiens
gatgtttgtctacatcgtcttcttgttcgggttttccacagcggtggtgacgctgattgaagacgggaagaatgactccctgccgtctgagtccacgtcgcacaggtggcgggggcctgcctgcaggccccccgatagctcctacaacagcctgtactccacctgcctggagctgttcaagttcaccatcggcatgggcgacctggagttcactgagaactatgacttcaaggctgtcttcatcatcctgctgctggcctatgtaattctcacctacatcctcctgctcaacatgctcatcgccctcatgggtgagactgtcaacaagatcgcacaggagagcaagaacatctggaagctgcaaagagccatca

SEQ ID NO: 1107 - DNA, 1404 bp, Homo sapiens
ctcttgcccggctgcacaggagtttctttaaggagtttccccggtgtgcctcggcagccttgcgctgctctaatggtccggacttccgtgtgctccccacaggtgcaggaagccgccgcccagccatggacggggaggagcagcagccaccgcacgaggccaacgtggaacctgttgtgccgtcagaggcttcagagccggtgcccagggtgctttctggagacccccagaacctgtccgacgtggacgccttcaacctgctcctggagatgaagctgaagcggcggcgtcagcggcccaacctgccgcgcactgtgacccagttggtggctgaggacgggagcagggtgtacgtggtggggacagcccacttcagcgacgacagcaagagggacgttgtgaagaccatccgggaggtgcagcctgacgtggtggtcgtggagctctgccaatatcgtgtgtccatgctgaagatggacgagagcacgctgctgcgggaggcccaggagctcagcctggagaagctgcagcaggccgtgaggcagaacgggctcatgtcggggctgatgcagatgctgctgctgaaggtgtctgcacacatcaccgagcagctgggcatggccccaggtggcgagttcagggaggccttcaaggaggccagcaaggtgcctttctgcaagttccacctgggtgaccgacccatccccgtcaccttcaagagggccatcgcagcgctctccttctggcagaaggtcaggctggcttggggcctgtgcttcctgtcagaccccatcagcaaggatgacgtggaacgctgcaagcagaaggacctactggagcagatgatggccgagatgattggcgagttcccagacctgcaccgcaccatcgtctcggagcgcgacgtctacctaacctacatgctgcgccaggccgcgcggcgcctcgagctgcctcgggcctctgacgccgarcccargaagtgcgtcccctccgtggtcgtgggcgtcgtgggcatgggccacgtgcctggcatcgagaagaactggagcaccgacctcaacatccaggagatcatgaccgtgcccccgccgtccgtctccggcagagtgtctcggttggccgtgaaggccgccttcttcggcctgctgggctacagcctgtactggatgggccgccgcaccgcgagcctggtcctgtcgctgcccgccgcgcagtactgcctgcagagggtgaccgaggcccggcacaagtaggagactgctccccgcccgctcgggcccctgaggagccagtgcccccgcggcayttctgggtgccaagtgcatcctaagcccgcccgaggcccttgscamcmcccatgggggktcttgggcccggctttggttgccttcctgggccagt

SEQ ID NO: 1108 - DNA, 2776 bp, Homo sapiens
  misc_feature (162)..(162): n equals a,t,g, or c
  misc_feature (1271)..(1271): n equals a,t,g, or c
cgcgctcgcccacccckcggccccgcaggatgaagaaggacgagtcgttcctgggcaagctgggcgkcaccctggccaggaagcggagggcgcgcgaggtgagtgacctgcaggaagaaggcaagaatgccatcaactcaccgatgtcccccgccctggcgnatgttcaccctgaagacacccagctcgaggagaacgaggagcgcacgatgattgaccccacttccaaggaagaccccaagttcaaggaactggtcaaggtcctcctcgactggattaatgacgtgctggtggaggagaggatcattgtgaagcagctggaggaagacctgtatgacggccaggtgctgcagaagctcttggaaaaactggcagggtgcaagctgaatgtggctgakgtgacacagtccgaaatagggcagaaacagaagctgcagacggtgctggaagcagtacatgacctgctgcggccccgaggctgggcgctccggtggagcgtggactcaattcacgggaagaacctggtggccatcctccacctgctggtctctctggccatgcacttcagggcccccatccgccttcctgagcatgtaacggtgcaggtggtggtcgtgcggaaacgggaaggcctgctgcattccagccacatctcggaggagctgaccacaactacagagatgatgatgggccggttcgagcgggatgccttcgacacgctgttcgaccacgccccggataagctcagcgtggtgaagaagtctctcatcacttttgtgaacaagcacctgaacaagctgaatttggaggtgacggaactggagacccagtttgcagatggcgtgtacctggttctgctcatgggccttctggaagactactttgttcctctccaccacttctacctgactccggaaagcttcgatcagaaggtccacaatgtgtccttcgcctttgagctgatgctggacggaggcctcaagaaacccaaggctcgtcctgaagacgtggttaacttggacctcaaatccaccctgagggttctttacaacctgttcaccaagtacaagaacgtggagtgacgggggagctgtggatggtggcaggagtgtcccagcaagaaaggcggcatccgtctgtgccctgtgcctttccagggagcmaggcgccatgggcttctggtcctgcagctcacactttgagggagccccaggatcccagccaggagaagcctcaggccggagaactggaggccggagaggagcttgcgnctgtgtgtgcggctgcctacactatagaattactggacactgtggccttaaacctgcaccgcatagacaaggatgtgcagaggtgtgaccgcaactactggtacttcacgccccccaacctcgagaggctcagagacgtcatgtgcagctacgtgtgggagcacctggacgtgggctatgtgcagggcatgtgcgatctgctggcgcctctcctggtcaccctcgacaatgatcagctggcctacagctgcttcagccacctcatgaagaggatgagccagaacttccccaacggggtgccatggacacccactttgccaacatgcgctccctcatccagatcctggactcagagctgtttgagctgatgcatcagaatggagactacacccacttctacttctgttatcgctggttcctgctggattttaagagagaactgctgtatgaggatgtgtttgctgtgtgggaggtgatctgggcagccaggcacatctcatcggagcactttgtcctgttcatcgccctcgccctggtggaggcctaccgagagatcatccgtgacaacaacatggacttcactgacatcatcaagtttttcaatgaacgtgctgagcatcacgatgcccaggagatcctgcggattgcccgggacctcgtccacaaggtacttccctgaaaaccacgtgtaagaagtgatgcttttgccagtggatgatctggaatgcgaccggagcacttgctctgaggaatcccagggtgactctgtcggggaagaatccggtcacagcctcccctcagagacaggcctcagttcgagggcagcccattatctgtcgcagaatctgccatgtccctgagactgcgggaggcaggggatgcatgggtgtccccatctgtccctggtgagaagcaaggctagctctgccttccacatgcttctcaggatgccaagaggcctaggaacccagaaacccccttggaggagctgtgtatgcgggggtgccaggaagggcatagctcctgcccccaggcctaggcatgctgcttgctcggccatccccacttcctcctctaccccaacacatgcaggctaggccttgccctggaacgtggaggccctgcccggggctggggcctagtccagcagccaccaaagtctggcagactttctgcatttgagaaacatgacaaagggccccgcagcccttctgcacccagcacagcctgcccagcccagccctgcccccgggcactgcacagcctgtctgggggccagaccaccccattgtccatccttgttgtccgtgagtccttggcctccaccaagcacgtgtggccattgtgtgcctgccttagtgactccgtggttttgtgaggagcagagtgtgtatgatttttgcctcagaaactatactcttctgtgtaacagaccaataaacaacatttgtcaacaaaaaaaaaaaaaaaaaaaaaaaaaaaaaaaaaaaaaaaaaaaaaaaaaa

SEQ ID NO: 1109 - DNA, 1634 bp, Homo sapiens
  misc_feature (9)..(9): n equals a,t,g, or c
  misc_feature (1611)..(1611): n equals a,t,g, or c
ttcaaaaanctattttaggtgacactatagaaggtacgcctgcaggtaccggtccggaattcccgggtcgacccacgcgtccgtyagagagtaaaacttgtctcggcacagagtcaagtaaagaaagccaacatacagtggagcccctggggagcagtccctgctgtcatcagatggacgtgcaaacagattccccaagcctttcggtaactgcaggaaaggaccacatggaggagctgctctgcaggctgaagccacgttagcgctccacacccagtcctccgagacagcagggagcccgtctgggccagactcttctgaggatgcttgtgaggatgacagtcgcttgcagctggctcaaacagaggcctgccaggatgtggccagaatagagggcattgctgaagaccctaaggtgtttctttccagcaagtcaaagacagagccgttgatttcaccaggctgtgaccgtatacctcctgcattgatttctgagggtaaatattcacaggctcagaggaaagaactccgtttgccacttcgggatgcttctgaggcgttgcccacagaccaacttgagaacaatgaattaaatgagctgcagcagcctgatcttacagacagtgatggaaaatcaccacaggcgcaggctgactcagacggttctgagaatgtgctctgtggaaataatcaaatatctgacttargcatactgcttccagaggtgtgtatggccccagaggaaaagggagataaagacgaccaactcaacaaagaaacagaagactatttgaacagccttttagaaggatgtttaaaaratactgaagattccctttcctatgaagataaccaagacgacgactccgatctccttcaagatctctctcctgaagaagcatcctatagtctccaggagaatctgccttctgatgagagctgtctttctcttgatgatcttgccaaaaggatagagattgcagaggttgttcctactgaaggattggtctccatattaaagaagaggaatgatactgtaggagatcatcctgcccaaatgcaacacaaaccatctaagcgaagagtgagattccaagaaatagacgatagcttggatcaagatgaagttggaggtggctcctgtattttgctggtcttgctgtgcatagcaacggttttcctcagtgttggaggaactgcattatactgcactttcggtgacatggagtcacctgtttgtactgactttgcagacaacatggacttctattacactaagttacttcagggagtggcagaactgaagcactggatctacctctcctagcagcattccagacacagacatgctggcagtgagagtgaaaggcgggagactttctaaacagtttttctttcaggaattctgtagcattcccccttccctctgttaggaaccaaggacatcagaaatagcaactttaagtggcaagccggaggaactctgttagaataatccacacagtgaggcaaatatcaatctaagcattgtggatgggaaggaatggtctttgggagagagcatatccatctcctyctcactgcctcctaatgtccatggaggtacactgnagcagaatttaaacagggtagtt

SEQ ID NO: 1110 - DNA, 1270 bp, Homo sapiens
aggaggaaacgcaacctgggcggctcctaggacgcagagacgccgtccccgccttcattgagcccaacgtgcgcttctggatcaccgagcgccaatcctttattcgacgatttcttcaatggacagaattattagatcctacaaatgtgttcatttcagttgaaagtatagaaaactcgaggcaactattgtgcacaaatgaagatgtttccagccctgcctcggcgggaccaaaggcaacagtgcatcccgacagcagcaacctgatccccaagctttttcgacctgcagcgttcctgcctttcatggcgcccacggtatttttgtcaatgacgccactgaaagggatcaagtccgtgattttacctcaggttttcctctgtgcctacatggcagcgttcaacagcatcaatggaaacagaagttacacttgtaagccactagaaagatcattactaatggcgggagcgttgcttcttcaactttcttaggagtaatccctcagtttgtccagatgaagtatggcctgactggcccttggattaaaagactcttacctgtgatcttcctcgtgcaagccagtggaatgaatgtctacatgtcccgaagtcttgaatccattaaggggattgcggtcatggacaaggaaggcaatgtcctgggtcattccagaattgctgggacaaaggctgttagagaaacgctagcatccagaatagtgctgtttgggacctcagctctgattcctgaagtcttcacctacttttttaaaaggacccagtatttcaggaaaaacccagggtcattgtggattttgaaactgtcttgtactgtcctggcaatgggactgatggtgccattttcttttagtatatttccacagattggacagatacagtactgtagtcttgaagagaaaattcagtctccaacagaagaaacagaaatcttttatcacagaggggtgtaggcgtgagttttaggtgaatttatgtggttcctgcttgaaaaccttcccctctccaggttcggtttagagaactttgccacaggtcttctggggtttttaaggctggctggagaagacagtgggagggtgccccgtctgacacccctggggttgctgagggaacggttggagtggggatcggcctgcgaaaggatactgtgaaatcactaattaactaataaacctgtctcaagttgaggatttgaaraaaaaaaaaaaaaaaaaaaaaaaaaagtcgtatcgatgtcgagcgatcatgat

SEQ ID NO: 1111 - DNA, 986 bp, Homo sapiens
  misc_feature (278)..(278): n equals a,t,g, or c
attttttttttttttttccaaagaaaagtcacaaatacatatgtacacatgcacgccaaccccactgggacagacaccaggatgttgggatgtggggagtggggagtgggggttcccaagcacagcagggtggtgggtgggaccctccaaccccagcccgccccaccctctccacgtccccaccgatgaaatgggaaggggtggtgggggggtgagggggcagtgctcagctcaggccccactcccctgccttgcctccctccctgcctgctgtgcancctgggagcatgagacagagaagcagaggagcctgggaagcttctcgaaggatggagggcgcccacctcctggaccccttgggtctccttggcttccccacggctgttggcgctggtggacaggacaggtgaagacacaggcagcctgggggcgggggccacaccgctgctggcctccacaggacccagccacccagcaggcatgggggacgcaagtcttgcgcagggaaggaggacgctggccctgtgagggcacgtgttggcgaatgcacgaagacgtggcatctgttgtgctcctctccagccagggcagtgagcaggtcygggttcagttctcctggggtgataagtccagagcagacatcctcctccagtgtgagggtgacgcttggccaggatgcacaggcccatctgaagcccactgaccgccgggcgatggccatgacacagatgcttccagagagactgctgcttcgagcagtgacagcagaggtggctgcaaggatgccgtgaagcccaggtggggactgtctcttggatccacagrstggctccgccagtggccccgagccacctgcccaggcctacatgccttggtctggccttggggctggtcttgggtttgacatggtggggtgcagccatgaatgggcaaccggggtctcaggcccccaggctgcctgtgtcttcacctgtccttggcttccc

SEQ ID NO: 1112 - DNA, 439 bp, Homo sapiens
atccgcattcccatttacgtgatgatcatcgcctcggtggtcagcgctgtacagatgctgatcaacgcctacgcctttggcctgtatcaatcattagggatttttattccgctgattgtcactaactgtatcgttgtgggccgcgctgaagccttcgccgccaaaaaaggtccggcgctttcggcactggacggcttttcaattggtatgggcgcaacctgcgccatgttcgtgctgggttcactacgcgaaattatcggcaatggcacattgtttgacggtgcagatgcgctgttaggtagctgggcaaaagtattacgcgtggagattttccacaccgactcccctttcctgctggcgatgctgccaccargtgcatttattggcctgggactgatgctggcaggaaaatacctgattgatgaaagaatgaaaagcg

SEQ ID NO: 1113 - DNA, 1785 bp, Homo sapiens
ctgggcgggcctgcgtcaggttgcagtttcacttttagctctgggcacctccagctcctgctcgccggacggctcccagggagagcagacgcgccagacgcgccaccctcggggcgccgacggtcacggagcatggggtcggcctttgagcgggtagtccggagagtggtccaggagctggaccatggtggggagttcatccctgtgaccagcctgcagagctccactggcttccagccctactgcctggtggttaggaagccctcaagctcatggttctggaaaccccgttataagtgtgtcaacctgtctatcaaggacatcctggagccggatgccgcggaaccagacgtgcagcgtggcaggagcttccacttctacgatgccatggatgggcagatacagggcagcgtggagctggcagccccaggacaggcaaagatcgcaggcggggccgcggtgtctgacagctccagcacctcaatgaatgtgtactcgctgagtgtggaccctaacacctggcagactctgctccatgagaggcacctgcggcagccagaacacaaagtcctgcagcagctgcgcagccgcggggacaacgtgtacgtggtgactgaggtgctgcagacacagaaggaggtggaagtcacgcgcacccacaagcgggagggctcgggccggttttccctgcccggagccacgtgcttgcagggtgagggccagggccatctgagccagaagaagacggtcaccatcccctcaggcagcaccctcgcattccgggtggcccagctggttattgactctgacttggacgtccttctcttcccggataagaagcagaggaccttccagccacccgcgacaggccacaagcgttccacgagcgaaggcgcctggccacagctgccctctggcctctccatgatgaggtgcctccacaacttcctgacagatggggtccctgcggagggggcgttcactgaagacttccagggcctacgggcagaggtggagaccatctccaaggaactggagcttttggacagagagctgtgccagctgctgctggagggcctggagggggtgctgcgggaccagctggccctgcgagccttggaggaggcgctggagcagggccagagccttgggccggtggagcccctggacggtccagcaggtgctgtcctggagtgcctggtgttgtcctccggaatgctggtgccggaactcgctatccctgttgtctacctgctgggggcactgaccatgctgagtgaaacgcagcacaagctgctggcggaggcgctggagtcgcagaccctgttggggccgctcgagctggtgggcagcctcttggagcagagtgccccgtggcaggagcgcagcaccatgtccctgccccccgggctcctggggaacagctggggcgaaggagcaccggcctgggtcttgctggacgagtgtggcctagagctgggggaggacactccccacgtgtgctgggagccgcagcccagggccgcatgtgtgcactctacgcctccctggcactgctatcaggactgagccaggagccccactagcctgtgcccgggcatggcctggcagctctccagcagggcagagtgtttgcccaccagctgctagccctaggaaggccaggagcccagtagccatgtggccagtctaccatggggcccaggagttggggaaacacaataaaggtggcatacgaaggaaaaaaaaaaaaaaaaaaaaaaaaaaaaaaaaaaaaaaaaaaaa

SEQ ID NO: 1114 - DNA, 1538 bp, Homo sapiens
  misc_feature (689)..(689): n equals a,t,g, or c
  misc_feature (1493)..(1493): n equals a,t,g, or c
  misc_feature (1508)..(1508): n equals a,t,g, or c
  misc_feature (1532)..(1532): n equals a,t,g, or c
atttcttatcagtgtaaccgtcagagaaaacgtgctccagcccaaaaaaacgttacaattgccgcccattactgaaaaccacagtaaagcgaggttttatgcgtaccgttttgaacattctgaactttgtgcttggcggatttgccaccactctgggctggctgttggcgactctggtcagtattgtgctgatttttaccttaccgctgacacgatcctgctgggagatcactaaactgtctctggtgccttatggcaatgaagctattcatgtcgatgaactgaacccggctggcaaaaatgtgctgctgaatactggcggtacggtattgaatattttctggctgattttctttggctggtggttatgcctgatgcacattgcaacgggcatcgcacaatgtatttcaatcattggcattcctgtcggcattgcgaactttaaaattgccgctattgcactatggccggttggtcgtcgcgtggtatcggtagaaacagcgcaagcgcgcgtgaagccaatgcacgtcgtcgttttgaataatccactaatatggcctttatgctaagtcctttgctcaaacgctatacctggaacagcgcctggctgtattacgcgcgtatttttattgcgctttgtggaaccacagcgtttccgtggtggctgggtgatgtaaaactgacgattncctaacgctggggatggtggcagcggcgctgaccgatctcgatgaccgactggcgggacgtttgcgtaacctcatcattacgctgttctgcttttttatcgcctcggcctcagtagaattgctgtttccctggccctggctatttgcgattggcttaacgctctctaccagcggcttcattttgctcggcggtctgggtcaacgctatgcaacaattgccttcggtgcattgctgatcgccatttacactatgttgggaacatcactgtatgagcactggtatcagcagccgatgtatctgctggccggtgccgtctggtacaacgtcctgacacttattggtcatctgctgttcccggtccgcccgctgcaggacaacctggcgcgttgctatgaacaactggcgcgttatcttgagctcaagtcgcgcatgtttgatcctgatattgaagatcaaagccaggcaccgctgtacgatttggctctcgccaacggtctgctgatggcgacattgaatcagacgaaactctcgctgctgacccgcttacgtggcgatcgtggtcaacggggaacgcgtcgcacgctggcattattactttgtcgcacaggatattcacgagcgtgccagctcttctcatattcagtatcaaacattgcgtgaacattttcgccacagcgacgtgctgttccgttttcagcggctgatgtcgatgcagggccaggcgtgccagcaactgtcacggtgtattttgttgcgtcagctttattcaacatgatccgcatttttgagcgcgctttttacgnatattgatgctgcgntggagcggatgcgcgattaacggnggaacc

SEQ ID NO: 1115 - DNA, 704 bp, Homo sapiens
ccgctggaccctgggcctggcctggccccactgggggctatgggctgggctcaccctctcctctgcgggggtggagggccaccagccttggctgttacaatcttacaccggacagtattgggctccctccctctccccarggccccacgttctgcagccttaaggttgaacatgagtgcacgtccatgtcagtgctgtgggactcctgtgcgtgcctcggactgcgtgtgtcggcgggacgcaggcacacgtgggtgtgtgtgcatgtgtgtttgtgtgagggcagcgtgtcctccagtgtgcatggtgtgtgggcttgggccccatccctggcccgagcatttcatcctgtgggggaggggtgctgacctagtgggaggagccccactgtgatccatgagctgccctgcccacgcctcccctccctgtagcaacacctctgggtgtttggagtttagcttttgtgggtttgctctccctatcccatctcctgtactacacagttcatggcagggtggggaggggtggggttggttcgggtgggtgagggtctttttcctctgtgtgcgatgttgttatctgacagttctccgtccctactggcctttctcctcgtcttcatatttgtacggtacaagcaataaagacactcatttcagaaaaaaaaaaaaaaaaaaaaaaattctcggccgcaagggaattca

SEQ ID NO: 1116 - DNA, 1625 bp, Homo sapiens
  misc_feature (1619)..(1619): n equals a,t,g, or c
  misc_feature (1624)..(1624): n equals a,t,g, or c
tgtctacacctttggcacctgcattgccttcctaatcatcattggcgaccagcaggacaagattatagctgtgatggcgaaagagccggagggggccagcggcccttggttacacagaccgcaagttcaccatcagcctcactgccttcctcttcatcctgcccctctccatccccagggagattggtttccagaaatatgccagcttcctgagcgtcgtgggtacctggtacgtcacagccatcgttatcatcaagtacatctggccagataaagagatgaccccagggaacatcctgaccaggccggcttcctggatggctgtgttcaatgccatgcccaccatctgcttcggatttcagtgccacgtcagcagtgtgcccgtcttcaacagcatgcagcagcctgaagtgaagacctggggtggagtggtgacagctgccatggtcatagccctcgctgtctacatggggacaggcatctgtggcttcctgacctttggagctgctgtggatcctgacgtgctcctgtcctatccctcggaggacatggccgtggccgttgcccgagccttcatcatcctgagcgtgctcacctcctaccctatcctgcacttctgtgggcgggcggtggtggaaggcctgtgctgcsctaccagggggtgccagtggaggaggacgtggggcgggagcggcggcggcgagtgctgcagacgctggtctggttcctgctcaccctgctgtggcgctcttcatccctgacatcggcaaggtgatctcagtcattggaggcctggccgcctgcttcatcttcgtcttcccagggctgtgctcattcaagccaaactctctgagatggaagaggtcaaaccagccagctggtgggtgctggtcagctacggagtcctcttggtcaccctgggagccttcatcttcggccagaccacagccaacgccatctttgtggatctcttggcataaccactgcctcccagggaacacaaggcctttgccattggtcgcaggaacccatctcttagagctatggggccattcttagtccacgatcattccaactggtgggatgacatccggacatcctcttccagggactggggcaaactcaggccccacacctctggacagctcaaatccagtccccttcctgctccccagtcctggcagtgccgtggatggcggcaggaagtctcacatcatagaggacccctcctcctctcccagttctcaacttctccatgcctggaatccacgggtgaagagagtcggtagatctcataagaaagaatccagtctgacttccctctggagaatgactatggacagaaggccaccatcctccacagagcaccctgtcctgagtaggggttgtgctcattaccccaggccagtggtagcttcctcaggagcctggccacttccaacggtagcactgaagtcatgcaaatgcatagtcaggtagattcagaccttgtccacaccttyytgggcaacccccaccatgaacctgtcagcctctttcccatagctaatagacatttcccaggccttaaaaaaaaaaaaaaaaaaaaaaaaaaaaaaaaaaaaaaaaaaaaaaaaaanaaaana

SEQ ID NO: 1117 - DNA, 2612 bp, Homo sapiens
attgacaagagctatctagaaaacttgcagtcggattcgtctattgtcaccatggctttcccaactctccaagccatccttgctcaggatatccaggaaaataactttgcagagagcttagtgatgacaaccactgtcagccacaatacgactatgccattcaggatttcaatgacttttaagaacaatagcccttcaggcggcgaaacgaatgygtcttctggaacttcaggcttgccaacaacacaggggggtgggacagcagtgggtgctatgttgaagaaggtgatggggacaatgtcacctgtatctgtgaccacctaacatcattctccatcctcatgtcccctgactccccagatcctagttctctcctgggaatactcctggatattatttcttatgttggggtgggcttttccatcttgagcttggcagcctgtctagttgtggaagctgtggtgtggaaatcggtgaccaagaatcggacttcttatatgcgccacacctgcatagtgaatatcgctgcctcccttctggtcgccaacacctggttcattgtggtcgctgccatccaggacaatcgctacatactctgcaagacagcctgtgtggctgccamcttcttcatccacttcttctacctcagcgtcttcttctggatgctgacactggggcctcatgctgttctatcgcctggttttcattctgcatgaaacaagcaggtccactcagaaagccattgccttctgtcttggmtatggctgcccacttgccatctcggtcatcacgctgggagccacccagccccgggaagtctatacgaggaagaatgtctgttggctcaactgggaggacaccaaggccctgctggctttcgccatcccagcactgatcattgtggtggtgaacataaccatcactattgtggtcatcaccaagatcctgaggccttccattggagacaagccatgcaagcaggagaagagcagcctgtttcagatcagcaagagcattggggtcctcacaccactcttgggcctcacttggggttttggtctcaccactgtgttcccagggaccaaccttgtgttccatatcatatttgccatcctcaatgtcttccagggattattcattttactctttggatgcctctgggatctgaaggtacaggaagctttgctgaataagttttcattgtcgagatggtcttcacagcactcaaagtcaacatccctgggttcatccacacctgtgttttctatgagttctccaatatcaaggagatttaacaatttgtttggtaaaacaggaacgtataatgtttccaccccagaagcaaccagctcatccctggaaaactcatccagtgcttcttcgttgctcaactaagaacaggataatccaacctacgtgacctcccggggacagtggctgtgcttttaaaaagagatgcttgcaaagcaatggggaacgtgttctcggggcaggtttccgggagcagatgccaaaaagactttttcatagagaagaggctttcttttgtaaagacagaataaaaataattgttatgtttctgtttgttccctccccctcccccttgtgtgataccacatgtgtatagtatttaagtgaaactcaagccctcaaggcccaacttctctgtctatattgtaatatagaatttcgaagagacattttcactttttacacattgggcacaaagataagctttgattaaagtagtaagtaaaaggctacctaggaaatacttcagtgaattctaagaaggaaggaaggaaggaaggaaggaaagaagggagggaaacagggagaaagggaaaaagaagaaaaagagaaagatgaaaataggaacaaataaagacaaacaacattaagggccatattgtaagatttccatgttaatgatctaatataatcactcagtgcaacattgagaatttttttttaatggctcaaaaatggaaactgaaagcaagtcatggggaatgaatactttgggcagtatcttcctgatgtcttcttagctaagaggaggaaaaaaaggctgaaaaaatagggaggaaattccttcatcagaacgacttcaagtggataacaatatttataagaaatgaatggaaggaaatatgatcctcctgagactaactttgtatgttaaggtttgaactaagtgaatgtatctgcagaggaagtattayaaagatatgtcattagatccaagtgctgattaaatttttatagtttatcagaaaagccttatattttagtttgttccacattttgaaagcaaaaaatatatatttgatatacccttcaattgccaaatttgatatgttgcactgaagacagaccctgtcatatatttaatggcttcaagcaggtacttctctgtgcattatagaatagattttaataatcttatagcattgtatattattattgctgttgtcactgttattattattgtggatactggcccttggtgtgttgcatagctccctatgtattctctgtttccatctttaagttcccagaccaatatacattaagagttttgaaaaaaaaaaaaaaaaaaaaactcgtag

SEQ ID NO: 1118 - DNA, 641 bp, Homo sapiens
  misc_feature (625)..(625): n equals a,t,g, or c
  misc_feature (641)..(641): n equals a,t,g, or c
ttttttttttaagggcagtaaatacatttgttcaaagttataaaacaacggcattccgttctaactgggactatttacagtgggagatggtacatactgttgaggctgtagtgggaggaagaggtgggccaccgctggacactcttgggccgaggggcaagggtggacatagcattggcatggcagcaagagacttggctgagggcaggggtggaaggatgtctactgctgaagaccaaatcccttgccactctgtcggttgctactaagtcaaacgcaaacagaaacaggaaaagacagcaggagcacagaggccagcatctccctttccttatgccatggagccaggtgccaggcgtgggctggtccatctccctcctcagcctctgccaaagggctgctccagtgctcccctcagtggaactcctcagccaggcgctctgaaaccaaccacagtccactgaagttgaccaccctaccgagacagaccaaggctcacaggtgaaaacccctttcaacaaaattccttccaggtaggaatcagaatatgatgcgtttyccatctgccgggttctgctccatgggacagtassgacacttcagctttcctccattaatgagcttnttgagtgcatctcggn

SEQ ID NO: 1119 - DNA, 2242 bp, Homo sapiens
  misc_feature (1748)..(1748): n equals a,t,g, or c
  misc_feature (2226)..(2226): n equals a,t,g, or c
ttgggcttgggagccggcaggtgcgggccgagggcgggcacagcggccggcggagctgaggcgcgcggcggggaaagctcggccggcctcccgggccccagccttctccagaacccctgctacccacgactaagccccgaacaatctgcccttgggcttgttctcttcgcagttgtcggccctgggccgggagctggagtcccagactcataggtcccggcccagcccccgaagagccgcctcagccggggggagttgctcggactcaaacgtccagtcctcgtgcgaccgcgctgggtcggaagtgagcaggctgaggccaccatggagcagtgtgcgtgcgtggagagagagctggacaaggtcctgcagaagttcctgacctacgggcagcactgtgagcggagcctggaggagctgctgcactacgtgggccagctgcgggctgagctggccagcgcaggtgggtggccacccttgcaagtgccctgcgacacctccctgaggacatgggagacccgaagctactgagtgacagggttccggaagacgatgatgaggatgttggtacctgcatctgtaggcctccttgaaaccggccctccagggaccctctctcagccaccctctctctggtgatgtcacagtgctgccggaagatcaaagatacggtgcagaaactggcttcggaccataaggacattcacagcagtgtatcccgagtgggcaaagccattgacaggaacttcgactctgagatctgtggtgttgtgtcagatgcggtgtgggacgcgcgggaacagcagcagcagatcctgcagatggccatcgtggaacacctgtatcagcagggcatgctcagcgtggccgaggagctgtgccaggaatcaacgctgaatgtggacttggatttcaagcagcctttcctagagttgaatcgaatcctggaagccctgcacgaacaagacctgggtcctgcgttggaatgggccgtctcccacaggcagcgcctgctggaactcaacagctccctggagttcaagctgcaccgactgcacttcatccgcctcttggcaggaggccccgcgaagcagctggaggccctcagctatgctcggcacttccagccctttgctcggctgcaccagcgggagatccaggtgatgatgggcagcctggtgtacctgcggctgggcttggagaagtcaccctactgccacctgctggacagcagccactgggcagagatctgtgagacctttacccgggacgcctgttccctgctggggctttctgtggagtccccccttagcgtcagctttgcctctggctgtgtggcgctgcctgtgttgatgaacatcaaggctgtgattgagcagcggcagtgcactggggtctggaatcacaaggacgagttaccgattgagattgaactaggcatgaagtgctggtaccactccgtgttcgcttgccccatcctccgccagcagacgtcagattccaaccctcccatcaagctcatctgtggccatgttatctcccgagatgcactcaataagctcattaatggaggaaagctgaagtgtccctactgtcccatggagcagaacccggcagatgggaaacgcatcatattctgattcctacctggaaggaattttgttgaaaggggttttcacctgtgagccttggtctgtctcggtagggtggtcaacttcagtggactgtggttggtttcagagcgcctngctgaggagttccactgaggggagcactggagcagccctttggcagaggctkaggagggagttgctcggactcaaacgtccagtcctcgtgcgaccgcgctgggtcggaagtgagcaggctgaggccaccatggagcagtgtgcgtgcgtggagagagagctggacaaggtcctgctgtcttttcctgtttctgtttgcgtttgacttagtagcaaccgacagagtggcaagggatttggtcttcagcagtagacatccttccacccctgccctcagccaagtctcttgctgccatgccaatgctatgtccacccttgcccctcggcccaagagtgtccagcggtggcccacctcttcctcccactacagcctcaacagtatgtaccatctcccactgtaaatagtcccagttagaacggaatgccgttgttttataactttgaacaaatgtatttactgcccttctcatttctcctngggcaacctttaggct

SEQ ID NO: 1120 - DNA, 3159 bp, Homo sapiens
aagaaagcgatcctgaccaccattggtgtgctggaggagcccctggggaatgcccgtctgcatggcgcccgcctcatggcagcactgctgcacacaaacacacccagcatcaaccaggagctctgccggctcaacacgatggacttactgctggacttgttctttaagtacacctggaataactttttgcacttccaagtggaactatgcatagccgctattctctcccacgctgcccgtgaggagaggacagaagccagcggatccgagagcagggtggagcctccgcatgagaacgggaaccggagcctggagactccccagccggccgccagcctccctgacaacacaatggtgacccacctgttccagaagtgctgcctggtgcagaggatcctggaggcctgggaagccaacgaccacacgcaggcagcgggtggcatgagacgtgggaacatgggccacctcacacggatcgccaacgcggtggtgcagaacctggagcggggccctgtgcagacgcacatcagcgaggtcatccgagggctccctgcggactgccgtggccgctgggagagcttcgtggaggagacgctgacggagacgaaccgcaggaacactgtggacctggccttctctgactaccagatccagcagatgacagccaacttcgtggatcagtttggcttcaatgatgaggagtttgccgaccaggacgacaacatcaatgccccgtttgacaggatcgcagagatcaacttcaacatcgacgctgacgaggacagtcccagcgcagctctgtttgaggcctgctgcagtgaccgcatccagccctttgatgatgatgaggacgaggacatctgggaggacagtgacactcgctgtgctgcccgggtgatggccagacccaggtttggagccccccatgcttcagagagttgctcaaagaatggcccagagcgtggaggccaggatgggaaggcgagcttggaagcacacagagatgcacctggggcaggtgccccaccggcccccgggaagaaggaagccccccctgtggagggtgactcagaaggcgccatgtggacggcagtgtttgatgagccagcgaactcaacgcccacagccccaggagtggtgarggacgtgggttccagtgtgtgggcagctggcacctcagctccagaggagaaaggctgggccaagttcactgacttccaacctttctgctgctccgagtcagggcccaggtgcagctctccggtggacacagaatgcagccatgctgagggcagccggagccaaggccctgagaaagccttcagcccggcttctccatgtgcctggaacgtgtgtgtcaccaggaaggcccccctgctggcctctgacagtagctcctctgggggctcccacagcgaggatggcgaccagaaggcagcgagtgccatggatgcggtgagcaggggtcccggccgggaggcccccccgctgcccacagtggccaggacagaggaggckgtcggcagggtcgggtgtgctgacagccggctgttaagccctgcctgccccgcgccaaaggaagtgactgctgccccagccgtggctgtgccccccgaggctactgtggccatcaccacagcactgagcaaggctggccccgccatacccaccccagcagtctcttctgcactggccgtggcggtccccctagggcccatcatggcagtcacagcagccccagccatggtggccaccctggggacagtgacaaaggacgggaagacagatgccccgccagaaggagctgccttaaatggcccagtgtgatgctgctgccgcccgccacggcccaccctggtcaggctgcctccttaatcgagaaaactacctggtgatgcaatcttttttttttttaatttaatttaattttaaaataaatgctgcattggtaaagctggcagttgaaaccagttggacggcccagcttgcgtctcttctgcctgagtgggcctctcaggtcactcgtgccctgctggaggacagaggggcacctcagccgcccccaagcccagagcacagcaataaggtcggcctgcaggagccggggtgggggtgggggtggggggggcaggaccctgagatgccaccaggacctgatgggccaggaagggcgtggacatggaggctgtttttacagttttttttttgttgttgttttgtttttaaagaatacagaaggagccaagcttttttgcactttgtatccagctgcaagctcagggcagagtcaagggcctgggttggaaaaacctgactcacaggaatgcataattgacccttgcagctacccaatagcccttggagctggcactgaaccaggctgcaagatttgactgccttaaaaacacaaggccctctaggcctggcagggatgtccctgtgcccagcactgggggctcgaagactggtttctagcactaccggtcacggccatgtcgtcctagaagggtccagaagattattttacgttgagtccatttttaatgttctgatcacctgacagggcaccccaaacccccaactcccaataaaagccgtgacgttcggacaaaccgcgtactgtgaaccttccggccccaaagccccggcccggccaggkgtgggagagtctcctccagcacctcttttgtgggcccgccaccccccagcgttatccccgtgtaatgggtggaggcggaacaggccacatcacggcatcaggtctctacagcttagcaaatactgacatttttccgtttgggggatggggggaaccacttcgcctaacgctcaaacacatcaaccccaggacttccttttgtgccagctccccctcccagaagcctgggccccaccttgtcctcagtggctgagtgggaggggcaggtggagaccagacccccaccccgccccagcgagcttgtctttccaccacggttgggggtggagggaacccgctcagctccccagaggccgagtctctgccccagctacacattgagtgccttgttctcaccgcctaccctgtgcctggcattygtcctctccccccacagacgtggaacagggagggcagggtcctttctccccttactctgacctgtgggttttccctgtgcc

SEQ ID NO: 1121 - DNA, 962 bp, Homo sapiens
  misc_feature (895)..(895): n equals a,t,g, or c
  misc_feature (910)..(910): n equals a,t,g, or c
  misc_feature (919)..(919): n equals a,t,g, or c
  misc_feature (952)..(952): n equals a,t,g, or c
  misc_feature (954)..(954): n equals a,t,g, or c
  misc_feature (960)..(960): n equals a,t,g, or c
tggttacggggtcgggcaaagggcagaggtcaccgtccaggttggacagcagcacctttgagcgatggcggcgtctggggaaccccagaggcagtggcaagaggaggtggcggcggtggtagtggtgggctcctgcatgaccgacctggtcagtcttacttctcgtttgccaaaaactggagaaaccatccatggacataagttttttattggctttggagggaaaggtgccaaccagtgtgtccaagctgctcggcttggagcaatgacgtccatggtgtgtaaggttggcaaagattcttttggcaatgattatatagaaaacttaaaacagaatgatatttctacagaatttacatatcagactaaagatgctgctacaggaactgcttctataattgtcaataatgaaggccagaatatcattgtcatagtggctggagcaaatttacttttgaatacggaggatctgagggcagcagccaatgtcattagcagagccaaagtcatggtctgccagctcgaaataactccagcaacttctttggaagccctaacaatggcccgcaggagtggagtgaaaaccttgttcaatccagcccctgccattgctgacctggatccccagttctacaccctctcagatgtgttctgctgcaatgaaagtgaggctgagattttaactggcctyacggtgggcarcgctkcagatgctggggaggctgcattagtgctcttgaaaaggggctgccaggtggtaatcattaccttaggggctgaaggatgtgtggtgctgtcacagacagaacctgagccaaagcacattcccacagagaaagtcaaggctgtggataccacgggtgctggtgacagctttgtgggaactctggccttntactggcttactatncaaatctgncttggaagacatgctcacagatccaattcattnancagcantg

SEQ ID NO: 1122 - DNA, 1764 bp, Homo sapiens
  misc_feature (618)..(618): n equals a,t,g, or c
gcgcactgtaccgcgagtctgagatacttacagagagctacaatggaaaagtcctggatgctgtggractttgttgaaagatggctaatagccttggcttcatggtcttgggctctctgccgtatttctcttttacctttaatagtgacttttcatctgtatggaggcattatcttacttttgttaatattcatatcaatagcaggtattctgtataaattccaggatgtattgctttattttccagaacagccatcctcttcacgtctttatgttcccatgcccactggcattccacatgaaaacattttcatcagaaccaaagatggaatacgtctgaatcttattttgatacgatacactggagacaattcaccctattccccaactataatttattttcatgggaatgcaggcaacataggtcacaggttgccaaatgcattacttatgttggttaacctcaaagttaaccttttgctggttgattatcgaggatatggaaaaagtgaaggagaagcaagtgaagaaggactctacttagattctgaagctgtgttagactacgtgatgactagacctgaccttgataaaacaaaaatttttctttttggccgntccttgggtggagcagtggctattcatttggcttctgaaaattcacataggatttcagccattatggtggagaacacatttttaagcataccacatatggccagcactttattttcattctttccgatgcgttaccttcctttatggtgctacaaaaataaatttttgtcctacagaaaaatctctcagtgtagaatgccttcacttttcatctctggactctcagatcaattaattccaccagtaatgatgaaacaactttatgaactctccccatctcggactaagagattagccatttttccagatgggactcacaatgacacatggcagtgccaaggctatttcactgcacttgaacagttcatcaaagaagtcgtaaagagccattctcctgaagaaatggcaaaaacttcatctaatgtaacaattatataatgtttccctttttgattattgcattgtattttaatttgtgcagaatgataaagaatgttccttttagaagtgtgttatgtctgtacctgtctgaagagtgacattaaactttgaaaggacttcactgctcctttacgatattccaaatagttttttacattggaaaaactaattcttgggattctttcatacattttcatcaaaactttcagtgtgattatgtattcatatcttcagtttaatatgtcagtataatagatattgttcaaaagtttcttgttgctaaagtggtgtaatctgttacacagatgaatagctagatgtggaaagagatatgtaaacaagaaacctttgggtattgtttcttaagtaaatattgggacaatcatggtaagcaaacttagttctgtaactgcatttttcaccttaaaagttaaatgaaatgcatgatggtattttattccttgaattatgcaatgcaacattttacatgtaaatagcactggtcatatactgatgtatatggttatctgggttatatctatttttatgtaaactctattttgtttttggcaagaagtgaaattgagacttatgtgcaggttgccattgaattttgctctggtgaatgctgagatccagctttttcttacaaataaatgggaccctgttttccaataaaaaaaaaaaaaaaaaaaaaaaaaaaaa

SEQ ID NO: 1123 - DNA, 801 bp, Homo sapiens
  misc_feature (660)..(660): n equals a,t,g, or c
  misc_feature (744)..(744): n equals a,t,g, or c
  misc_feature (762)..(762): n equals a,t,g, or c
  misc_feature (773)..(773): n equals a,t,g, or c
  misc_feature (791)..(791): n equals a,t,g, or c
  misc_feature (801)..(801): n equals a,t,g, or c
cgggggtcatcttcttcctggccctgctgctgtgcattgcgcttctktcgtcctactccatccacctcctgctgacctgtgctggtattgcagggactggttcttgaagggaaacctcctcatcatcatcgtcagtgtgttaatcatcctgcccctcgccctcatgaaacacttgggctacctggggtacaccagtggtctctctctgacctgcatgctgtttttccttgtttcggtcatctacaagaagttccaacttggctgtgctataggccacaatgaaacagcaatggagagtgaagctctcgtgggactccccagccaaggactcaacagcagctgtgaggcccagatgttcacagttgactcacagatgtcctacacagtgcccattatggcttttgcttttgtctgccaccctgaggtgctgcccatctatacggagctctgccgttccacgacctctacacctcaggccctccaagcgcaggatgcaggccgtggccaacgtgtccattggggccatgttctgcatgtatgggctcacagcaacctttggatacctcaccttctacagcagtgtgaaggcggagatgctgcacatgtacagccagaaggacccgctcatcctctgtgtgcgcctggccgtgctgcttcgcnggtgacccctcactgtgccagtcgtgctggttcctatccgccgggccctggaagcaactgcttttcccaggcaagggcctttancttggccacgacattgtnggccattagcntttgaatccttgctttgntttgggtcan

SEQ ID NO: 1124 - DNA, 1059 bp, Homo sapiens
tcgatacgacttttttttttttttttttttttttttttccgcagtgaaaacatttattttacaacagtaatctttattttaggccaacattcagacatacaagacggagatcaccatgcggaaccagcctggcccttagatgtgtgtgctcgagccaggatcagccggagtctgacagcgcctgcaccccaacacggtcggattccaggacgccagtgacaaaaccagtgcatggacaagcagcttccatgcgtgtgcatttgatttttaaaaacaatacatatttcagtgttaacttcccccctcacctggcttgaaacattttccccattttccagggaaacaaactctaccaaaaggtgccgcctgcaggaccccgggcccagccccttctggaggtggtgctgtgtggactcctctggggcggacccggggccagcacagggccccttcccaggccgcccttcagatgcagctttgccactgaccgtatctgctgctcagaaaatcagctttcatgtttcaaggcagggaagggcttccagtcccctcctcgatttcacaccgggacacacacctgggtcaggtgagcatgacacacagcccccaggatgggcaccccaccctgcagagcagaggccaatgctggtgggggccgtggcagtgccctgggcacacaccctctgcacacagtgggctcagcgcttccttctgtgcacctgctgggaaagcctcctgcaggtccctgcccgactcccaagaaaccagaggccatttcagagccacctttaattgtacttgtcacttcaccaggggacagcagcatgaatgacactcctgctgcgtgatatatacatatacacatatgtacacacacggacacaccacagcccacactcacagcatgtracgacgcaaactgttgctggtaaggacagtaaaaatgtagcttttgccaattccacaggagaatgatttacaaccaaaataacagacacaggccagtcctgcgccacaggggttcacagctctgaatactgggaaagggtgagatcagct

SEQ ID NO: 1125 - DNA, 1542 bp, Homo sapiens
  misc_feature (1449)..(1449): n equals a,t,g, or c
  misc_feature (1490)..(1490): n equals a,t,g, or c
  misc_feature (1500)..(1500): n equals a,t,g, or c
  misc_feature (1520)..(1520): n equals a,t,g, or c
tcgacccacgcgtccgccgctgtgctctcgacccctcctcctgtagagagtggtgctgccctctcgggatgtacctgcaggtggagacccgcaccagctcccgcctccatctgaagagggctccaggcatccggtcctggtccctgctggttggaatcttgtcgattggcctggctgctgcctactacagcggagatagcctgggctggaagctcttctacgtcacaggctgcctgtttgtggctgtgcagaacttggaggactgggaggaagccatcttcgacaagagcacagggaaggttgttttgaagacgttcagcctctacaagaagctgctgactcttttcagagctggccacgaccaggtggtggtcctgctccatgatgtccgtgatgtgagcgtggaggaggagaaggtccggtacttcgggaaaggctacatggtggtgctccggcttgcgacgggcttctcccaccccctcacgcagagtgcagtcatgggccaccgcagtgatgtggaagccatcgccaagctcatcaccagcttcctggagctgcactgccttgagagccccacagagctgtctcagagcagcgacagtgaggccggtgaccctgcaagccagagctgacagccccactgtgcctgagcccgtgcaccgyccacaggacccrtggcacattcccggtgtgcctgagcccgtgcaccgcccacaggacccgtggcacattcccggtgtgcctgagcccgtgcaccgcccacaggacccgtggcacattcccggtgtgcctgagcccgtgcaccgcccacaggacccgtggccttggcttcagttggtgcctccagccgagttggcctattgcctgctcatgctgctgcttgcacactgcatgaaacagcaggccagaccaggacatccagactttctccatcgtgaggcctgggcctgcctttctgcagccggaggtctcgccagccctggactcctgctttgggccacagcaagacctcgggcgagtggagaggcggggccaggccgggcccttgtgggtgctgatgctgcatgttgtccccgacacagcgtcctctccctggtggacatccccagcggtcaggtgcttccccaagggcagtgaggggtgaacatccagggcctacctggctgtgcacgctgcagccacactgtggaagctgcccctccccgaggacccgcctcccttgctgatgccaggatctcggcgcatagaccactctgccccagcggtcgtcacagaaaggtctctctgttcctcacactcagcttcagcataagctgtgaggccagaaaaaaggtcagctcttctagtatcgtgcagtgcttaaaaaccgggagctccagccgggcgcagtggttcatgccagtaatcccagcacttttcggagggccgaggttgggaggatttgctttnagggccagggggtttcaaggaccaggcctgggggaaaacanaggcaaggtncctgtttttttgttaaaaanaaaattaaacccaaaacaggga

SEQ ID NO: 1126 - DNA, 586 bp, Homo sapiens
  misc_feature (567)..(567): n equals a,t,g, or c
  misc_feature (578)..(578): n equals a,t,g, or c
  misc_feature (584)..(584): n equals a,t,g, or c
gttattcgccggaattatgctgggctttatgcgtgctaaccacccgaccttcggttacattccgcaggtgcattaagcatggtgaaagagttcggcttgatggtgtttatggcaggcgttggtctgagcgccggtagcggtattaataacggcctgggcgcgattggcggtcagatgttgattgccggattgattgtcagtctggtgcccgtggttatctgtttcttgttcggtgcttatgtattgcgaatgaaccgcgcgctgttgttcggcgcaatgatgggcgcacgtwcctscgcgccggcaatggagatcatcagtgatacagctcgcagtaacatcccggcgctgggctatgcgggcacctatgcaatcgccaacgtcctgytgacgytggcagggacaatcatcgtcatggtatggccaggattaggrtaaaactgaagttgccctgcaaaatgaaatttttttgcacaaccgcagaacttttccgcagggcatcagtcttaattagtggccatgcttttctttgaatgtccccattttgtggaagcccatcaaccccgncatttcgggtncaaggnag

SEQ ID NO: 1127 - DNA, 1674 bp, Homo sapiens
  misc_feature (465)..(465): n equals a,t,g, or c
  misc_feature (1628)..(1628): n equals a,t,g, or c
actatagacttttaccctttatgacctttcaaaggtacctatagattgtaaaattcagttttccatctgttacatagtatatactaggtccataaatccagtaaatctgttttcatgatgacctcatccatcccatgatgtccacctatttggcttaataggacaatatgcctggaggaccaaccgtctgtgcagactgtggcagaatttaagtgatgggtatgactagaacggtagcctacctggataggctgaacccctcagtgatagtcccattacctccattacaagagagtctcaagcccaccatgcacacaatttaaaacaaggtccaaacctcagaagagggcaggctgacaaggctaaaagcctctaggtggtcttgttccaggaataagccaactaaaacttctccaatgaaggccaagttgtagaggtgataggtggagaagctgratwatctgnaagatagagagtccatttttccaaaacacacattcagtgtctgtcctcccattcactcaacctaactttccccaagttatagaacttgaaatcagtaatccacaaagcaaagaagcaggctataggattaacacaggtggcataattaaaataaaagaggggagggagattttaaarcaatctgccagagaaaaatgacaaatgatttggctttgtagctccttctggcttgagcagttaggagcctgagggctgaggcagcaggggcagcaggacctaaagatgacaagcaggcagagctcatctgggccaggtcactttcaagagctggggctgcaacacagaacatcaccactggccctgagagcacatttagctgttttttgcaggaaccaagggattgagacagtggcagaaccctcactggagaaaaaggaagatgacagraagccacactgacaaagaaaaattgcaaatacacaggccacaatcataaccctaccatcaaccctcaattttccagggtaataaccaaaggtaggcttattaacttggccctcagaccaccccatcaccacgcagagaacaagaaacttatcaaaatcctcctcccatgctttcccagtcctgcaaagaaataaaaaggagcagctaagcacctgaaagcaaagcagtgagcagaaagagaagcaagggaaagagccatggccccagtactccctgagattaccccagttagcatccacaaataagaactcacggtcataagatcgaatgcttttgcacgatggcaagagggaagaggacatctagggcaagatattctgtcacaggcaagttcacatgaagccagtgaaggaggcagaagataacccacctgacctccacttgactaacacgtacacctccccagtcgccttgccccagtaggctcccaaatcgagtctttaaagcaccttttcccaaaagagcatcagtaagttctcccattatcatcccactcaaccagtcttccatttacccatcactaagcccaagcctccattttgtccctggttggaaatgtcatattttttgccccagatcctcgatccccagccctacaataaaagcacagaagagtccttaattccccacccaaccctagcatccctatttggttngcttgcaccccaccctttcccagattctatacctttcactcgtgcc

SEQ ID NO: 1128 - DNA, 846 bp, Homo sapiens
  misc_feature (2)..(2): n equals a,t,g, or c
  misc_feature (6)..(6): n equals a,t,g, or c
  misc_feature (751)..(751): n equals a,t,g, or c
  misc_feature (803)..(803): n equals a,t,g, or c
  misc_feature (816)..(816): n equals a,t,g, or c
  misc_feature (827)..(827): n equals a,t,g, or c
  misc_feature (846)..(846): n equals a,t,g, or c
gnttgntacgccagytcgaaattaaccctcactaaagggaacaaaagctggagctccaccgcggtggcggccgctctagaactagtggatcccccgggctgcaggaattcggcacgagcctgtgtaagccctgtgtgaagttttgactttaatctaccagatcactccttcaccctccataaagatgtctgaacctgacacttcctcaggattttcgggaagtgtggagaatggaacttttcttgagctgtttcccacatccctgtccacgtcagtggacccatcctcaggccacctgtcaaacgtctacatctatgtgtccatattcctcagccttttagcgtttctgcttctgcttttaatcattgccctccagaggctcaaaaatatcatctcctccagttcctcctacccagagtatccaagcgacgctggaagttctttcaccaatttggaagtctgcagcatttcctctcagaggtccactttttcaaacctttcatcctgaggaaaatggaagagtccttgagtgtggcagcagttttgacatccccttacggaagtgtcccgtgaggcattgcctcatgaaagaaatgatccttttggtgtagacctgcttctccttctcctttttctctgatttcttttctgtcatgatgcttttcatttggggatggagacaccgatgttggtggaaatgtgtgcaaaccccaaggtgcagaatttyacacaaatggcttgatgaatctanactgggcttcttcaagtaagtcaagttcattctacttttgttggacccctanactcatctgaggnggcctttccgnggatgctggacatggactn

SEQ ID NO: 1129 - DNA, 1222 bp, Homo sapiens
  misc_feature (1198)..(1199): n equals a,t,g, or c
  misc_feature (1219)..(1219): n equals a,t,g, or c
gcctgggttcccascggcttcsccagaggtggaagaaacccgaracgttccgaagtcaacgcaagcaaaggggagtgcgggtcggggaggaatattcttttggaaacgtaatattggccttggggctctccagccctttgggacttccaatgggatcttagaagcagccgaagcagcgtgagggcggcasccagggccagccacgatttgaacgctctgccttgcagctcttctggaccgaggagcccaaagccctaccctcaccattcaccaggtcctgtgggaagagcagcgtggagrtgggctgaggttagaaggtgcagagcgtggaagaagattgtgagctgagtattggacatctgttcttgaatagtccctgggcctgccataggaaaggaagttctccagggttacagttcttatccgcgtgaatacacatggctctgttacgaaaaattaatcaggtgctgctgttccttctgatcgtgaccctctgtgtgattctgtataagaaagttcataaggggactgtgcccaagaatgacgcagatgatgaatccgagactcctgaagaactggaagaagagattcctgtggtgatttgtgctgcagcagggaggatgggtgccactatggctgccatcaatagcatctacagcaacactgacgccaacatcttgttctatgtagtgggactccggaatactctgactcgaatacgaaaatggattgaacattccaaactgagagaaataaactttaaaatcgtggaattcaacccgatggtcctcaaagggaagatcagaccagactcatcgaggcctgaattgctccagcctctgaactttgttcgattttatctccctctacttatccaccaacacgaagaaagtcatctatttggacgatgatgtaattgtacaaggtgatatccaagaactgtatgacaccaccttggccctgggccacgcggcggctttctcagatgactgcgatttgccctctgctcaggacataaacagactcgtgggacttcagaacacatatatgggctatctggactaccggaagaaggccatcaaggaccttggcatcagccccagcacctgctctttcaatcctggtgtgattgttgcaacatgacagaatggaagcaccarcgcatcaccaagcaattggagaaaggatgcaaaagaannggaggaaaacctttttgcangtt

SEQ ID NO: 1130 - DNA, 1179 bp, Homo sapiens
  misc_feature (9)..(9): n equals a,t,g, or c
  misc_feature (14)..(14): n equals a,t,g, or c
tgttttcangcaanctggatcaatcactgttccaatttctctgaactccccagagtatttaacatatgcccaagtacaaagaaatatcagtgctaaccccatgacaaggttacacaagacagctatagagtttaggccaatgaagccagtcagtcctgagattatatacatagsaaacatgaccgcaaacagtgtggctggggtacgagcagcatagaagatatttttgccatyattgtgctttataaaatttgsataggtttcttcaatttcagcttcaagctggtcctgataacgacggcagaaytcatytccacccatcttttttactgaacgaaattgttttatcgccacttccttgagatccaagtgttttcgctccagatctgaaggtgcaatgtaaggcttgtcccctccacatacctgttccatacttttacaataggtatctcttgctcctgctactgcagcaagattattagcttcagctgttgcctgaagcatggactttggatgtggaagttcttctccttgatagattttgatgtaagccttaaaatattctacaagatctctacaagtgactttagatccacttatctctttttctaccaaattttcaggggcaagcagcaatggaaccagatttcgaagctctcgtttaaagtcttcatcaatatctttcaatctcccatcaaaactaggattagttgcaactttaagaccaggatgtggcaaaaggaagcaaccaagatttgagaaacaattgtgtatgtgcttccttacattctgaagctcttcatgttgattttgttttacctgtaatctcttttcaagaaattgctttccaccttccaaaccatatgaatgktcataaggatagctccaatctcgaatcaaaaacattaatgtctgaaatggtttctggtagatttcttccatcgcaagtcttccatactctgtaaataattgcaaatgttgaagatcatcttcttgaatattctgagacagattatatacctggacagagctagtcatagtgctcagagcaaacaccgtgcacagtctttgatagttgactggctatcaaaggcaccctgggtatccataagcagcacagcaactttagttccattaggtctgtcaatcacaaatacttcattccaaacttgtatgccc

SEQ ID NO: 1131 - DNA, 1192 bp, Homo sapiens
  misc_feature (1138)..(1138): n equals a,t,g, or c
  misc_feature (1155)..(1155): n equals a,t,g, or c
  misc_feature (1160)..(1160): n equals a,t,g, or c
aaaaaagaaagaactctttgggtgagggttggatgtgagaaatagtgagatggctgggccaatgggttcagkgctgtagcctcttaaatcccagtaaacttataggtgtgtcacaaaagagttggggggatttcttaaaatgcacagtgcccccttcatatgcagattggttatttatactctgtttcattcaattttatgttcattcattcatttagcaatgtgtatccaagcattcaaacctctcccaatccttcaaagcttactcaaattctacctatttcagaaagcttccttgcccatcacagcatagcacctatctgtgcctttwatttcaggaaccacattcttctttgtcatgcatctgtattatcattggcctcaatttctttctggacacagaatccatgtcctaagcatctttgtatccctaaagccaccagaatagcaccatgtaaatagtatagcaggttctcagtaaataagaactgcatgaatgaataagttggagggatggctgagtggccctagatcaagcactattttctatattttctgagctgaacaaagaagggagtgtagcaagttcaattctggtttagccatggaggttggtggggtgagggaagcaatgagaaggtaaagacgattgctgagggcagctatttgtgatcctgctgcttaaagataacactaaaggctggatgtgctggctcacacctgtgatcccatcactttgtggaggtgaagcaggaggactgcttgaccccagtagttcgagaccaggttggacaacataaacagacccagtatctacaaaaaacaaaaaaacgtagccagtcactcacacctgtaataccagcattttggaaggcagaggtgggtgagtcacttgggcacagtttgagaccagcttgggcaacatggtgaaatcccatctctacaaaaaatacaaaaactagccgggtgtcgtagtacgcacctgtagtcccagctacttgggaggctgaggtgggaagatggcttgagcccaggaagtcgargccacaatgagccatgattgtgctactccactccagcctgggcaacagarcaaaactctgtctaaaaaawtaataaggctgaaccgcagtggctncatgcctgttgatcccnaccanttttggggaaaggctgaagttgggttggattc

SEQ ID NO: 1132 - DNA, 1054 bp, Homo sapiens
agtcgggcggtcttgtgcatcttggctacctgtgggtcgaagatgtcggacatcgagactggttcggagcatcccggcgatcacgcgctattggttcgccgccaccgtcgccgtgcccttggtcggcaaactcggcctcatcagcccggcctacctcttcctctggcccgaagccttcctttatcgctttcagatttggaggccaatcactgccaccttttatttccctgtgggtccaggaactggatttctttatttggtcaatttatatttcttatatcagtattctacgcgacttgaaacaggagcttttgatgggaggccagcagactatttattcatgctcctctttaactggatttgcatcgtgattactggcttagcaatggatatgcagttgctgatgattcctctgatcatgtcagtactttatgtctgggcccagctgaacagagacatgattgtatcattttggtttggaacacgatttaaggcctgctatttaccctgggttatccttggattcaactatatcatcggaggctcggtaatcaatgagcttattggaaatctggttggacatctttattttttcctaatgttcagatacccaatggacttgggaggaagaaattttctatccacacctcagtttttgtaccgctggctgcccagtaggagaggaggagtatcaggatttggtgtgccccctgctagcatgaggcgagctgctgatcagaatggcggaggcgggagacacaactggggccagggctttcgacttggagaccagtgaaggggcggcctcgggcagccgctcctctcaagccacatttcctcccagtgctgggtgcrcttaacaactgcgttctggctaacactgttggacctgacccacactgaatgtagtctttcagtacgagacaaagtttcttaaatcccgaagaaaaatataagtgttccacaagtttcacgattctcattcaagtccttactgctgtgaagaacaaataccaactgtgcaaattgcaaaactgaaaaaaaaaaaaaaaaa

SEQ ID NO: 1133 - DNA, 676 bp, Homo sapiens
  misc_feature (2)..(2): n equals a,t,g, or c
  misc_feature (51)..(51): n equals a,t,g, or c
  misc_feature (55)..(55): n equals a,t,g, or c
  misc_feature (616)..(616): n equals a,t,g, or c
  misc_feature (642)..(642): n equals a,t,g, or c
cngtacgactcactatagggagagagctatgacgtcgcatgcacgcgtaanttgnggcccctcgagggatcctctagagcggccgcccttttttttttttttttactaataacaagtatattttattaaaaacttcatttatcatgaaaattagtgagattacgaagattaaactataactgaatttcataccctaatgggtcaagtccctggtctaggagcattagagaggactctctgagcttctgcagcaacttccttagctcttccttagaaaataccaggtacagtttgtggcgctcagaggataccatatctgctaactgtaggcattcctgatactgaccagtactgtgcaatatcgtatgaagcagaaaacacaacattggcagacaaagctttctcagtaagaccatttgatgtgttctttcatggtcttctttggcatcctctctaacatccaccatccaccctccatcaacaaacaacaagacgttatacattttctccttcacatcagcagttagggcatccaaatgccctttccaaataccaaaatccatttcatatttcttttctttgtgttcatgcggacsctgggtcgacccgggaattncggaccggtacctgcaggcgtccttntatagggcacctaaatagcttttgcaaaagccta

SEQ ID NO: 1134 - DNA, 1218 bp, Homo sapiens
  misc_feature (1)..(3): n equals a,t,g, or c
  misc_feature (11)..(11): n equals a,t,g, or c
nnnttagcttncgcaaagctatttaggtgacactatagaaggtacgcctgcaggtaccggtccggaattcccgggtcgacccacgcgtccgccagaggcctgggcccagtgaactccccctctctgattacccccttcgggaggcatttgagctcctgggattagagaacctggtgcaggtgtttacctgtgttcttttagagatgcaaatccttctctactcacaagattatcaacgcctgatgactgtggcagaaggcatcaccacacttttgttcccatttcaatggcaacatgtttatgtgcccattctacctgcttctctgctacattttcttgatgctcctgtcccttatctgatgggccttcagtcaaaagaaggaactgaccgttctaaactagaacttcctcaagaggctaatttgtgttttgtggacattgacaaccattttattgagttgcctgaagaatttccacagttccccaataaagtggattttatccaagaactctctgaggttcttgttcaatttgggatccctcctgagggcagcctacattgcagtgagagtaccagcaaactgaagaatatggttctgaaagacttggtcaatgacaaaaagaacggcaatgtctgtactaataacatcagcatgtatgagttactgaagggcaatgaaaccatagcccgcttgcaggctctggccaagcgtactggtgtggctgtggaaaaaatggacctctctgcttctctgggtgaaaaagacaaggatttaaaactgcattgtgaagaggcagaactaagggactaccagctcaatgtacagctccgagaggtctttgctaaccgttttacacagatgtttgcagattacgaagcatttgtcattcagactgcccaggacatggaatcctggctgaccaaccgggaacagatgcagaactttgacaaagtaaaaagaaccatagttttccttttgtggttattagtggctttattattgattttaacatttttaaattttttattcttctgtgcctatgcttacccatatattattgattttgttaaccttttttaaatgcagactttttgtcttccagccccattaagaacttttctttaccaagtatttttacattagataaaataattttacaagcaaataaaccagctcattgaactggtmattaaattgtgcgttaaattgcctgtaa

SEQ ID NO: 1135 - DNA, 1710 bp, Homo sapiens
gggccctcaaaaggaaatgtttgtggggccaccaaaagcaaatgtctcttgaacctagtcacctggggggacaagtgtgggaaagtgcacctgtgttcccatgagacccactcaagaggagcagaaatcctgttttgctatttccttaattgctactagggctgggattttttcatgtttattggcccctctacatttttttctttaaaaaaattcacaaagcatgtttatatttgttagctcttttgattctccctatgatagtgtgaagacagggacaaaacgctaccatttcacactcccagatctaacaatagctaccaagtaattatgccatgcgtttcttctaaccttcgcaatatcactacgaggtagttcttactatcctcattttacagataaggaaactgaggctaagtgacgctggyagacttgcccaaggccacacagctggtaacagggactggtagtcacttgagtcctacatcagcacccttgctactacagcagctcctcccctttctagaggcctagatggaaagatgctggtgtcagcggggggcacaaaggtccacccagtcccacacatgcagagaggcatcatttgttgctgataacaaagtccttggtctgcagggatgccaggtgtgggtggtgaccaaaggagcagggtccatcccatttccatctaggaagatgtgacctctgtgagtgaagagaggttctacttggctccgtgttccatcttggctccgtgttccatcccaagatgtggcatcatagacctggactgtaccatcaaaacctgagatggccaagcaattcttccagcctggggcccaagtcactygcagcagctctgggtcagggctaggtacggatactgggcactggactgagctcacaggatggcagagatcccgggggtcaagaagacaaagacgcccatctgagcaaggctggcaatgctgccccagccctggccccagctcccaacttcagcacaccatctctctccaccagacccagggccagggctgcgattctccaacggtgcccacttctgccgggtgtcaacaagccccagccggccygaagcacagcagaaggcaaaggtgtctgcatctaggacctgcaggctactcagctcctcactgtcactgacatctgaggtgtacgtggtcttccgggactccagatcaacgacctgcagactkcggagcctcgccccatggaggactccgggtgccaatgtggagaagacggccaccctaggccagagactctcctctttctcatgcacagcaatggtgctgacagctttaatgacatcactgtcctctgcaacctgccacacctgcagataacaacctggaaggccactggtaaccagcaatctggtatgtggcacatgctttagatcaaagatagacctgtctgaaaatcctccatggcgcactttgaaatctctttctgggaataagcccttgttttcctttacagaaagtctgagaggtaatttcagatgaagaatttcattctttttcaggctttcatagccagcaacaaagactcctttgtcatcaatccattcaaggactcgagtggctcctgacaggtcgaatgcatagaaatcctggtacaagcgcaaggattccaccagccagtcgtccccaggatccatggcaacgaccgcttccggcgtctcac

SEQ ID NO: 1136 - DNA, 975 bp, Homo sapiens
tttattttttttttttttttttttttgcacctaagacaatgttatttaattgtaaaatctccaccccctgagcatatgttttcaggtctgggtgactaattagactgggaaacaagggcaggaacgatggccctgtgcttgctctgcccgctgcctctgtggatgtgtgggccgctggcttcagtcctgcttttttgatggccgttgtttacgctatgtatttttgcaggaggcctgaggtgggctgggttctcctcctatggcagggcttcactctcctcctccgttggggcttcgctgtcccttgagaatccttcttcatcttcttgtaatgaccttcggtgacaacagatctcaatgaggcagagaagtataatcaaaatcgttagtattccagtcacaattaacgccaagatgagttttttggtatagccatatcctggaagttcttttgtgaactcaagcgacttctctttctgttcactctgggcttctgtgctctcattaatgtagttctcagtcttccattggtccgtatcccattctatcttggatgcctttacttcctgctgcccactgagaagcttcatcaggtggcctgtcctggagacgagcttggcacaggtcacttgcacatgggccccagagcagtccatcttcaaggtccggataacatgagcaatgagccttctcacattgttgttggggataasggactgyagctgctgggttagctgaatttcaaactgatcacctggggacgagagcaatgggtaattgaagcttttgggctcgggggacaggtcagtgcccacgttgttgtattcccattttgtctcagtttgtttaacagttggcyctaagttgaatgcagtccyagyggaatctgcctcakgargatgattgtagtttgtgttttcagagatggtkccttctggcatgttagtgttttccataaaatccggacgcgtgggt

SEQ ID NO: 1137 - DNA, 612 bp, Homo sapiens
cgctctagaactagtggatcccccgggctgcaggaattcggcacgagcaccatccagaaccgagcagatctcgtgataaatgaagtgatgtggtgggaccatggagtgtattactgcaccattgaggctccaggggacacatcaggagaccccgataaggaagtaaagctcatcgtcctacactggctgacagtgatcttcatcatcctgggagccctcctcctcctgctgctgattggagtgtgctggtgccagtgctgtcctcagtattgctgctgctatatccgctgtccctgctgtcctgcccactgctgctgtcctgaggaagccctggcccgccaccgctacatgaagcaggcccaggccctaggtcctcagatgatgggaaaacccctgtactggggggcggacaggagctcccaggyttcatcttatccaatgcacccgctgctgcagcgagatttgtccctgccgtccagcctcccgcagatgccaatgacccagaccaccaatcascctyccatcgccaatggtgtcctggagtatttggagaaagaactgcggaacctcaacctggcccagcctctgccccctgacctcaaaggcagattc

SEQ ID NO: 1138 - DNA, 1619 bp, Homo sapiens
gtggatcccccgggctgcaggaattcggcacgagctttccttacctgtttttccagctcacccactgccagcagagaatgctgtccagtttcaacgagtggttttggcaggacaggttctggttaccacccaatgtcacgtggacagagctagaagaccgggatggccgtgtctacccccacccccaggacttgttggcagccctgcccctggcgctggtcctcctggccatgcgccttgcctttgagagattcattggcctgcccctgagccggtggctgggtgtgagggatcagaccaggaggcaagtgaagcccaacgccacgctggagaaacacttcctcacggaagggcacaggcccaaggagccccagctgtctctcctggccgcccagtgtggcctcacgctgcagcagacccagcgatggttccggagacgccggaaccaggatcgaccccagctgaccaagaagttctgtgaggccagctggaggtttctcttctacctgtcctccttcgtgggcggcctctcggtcctgtaccacgagtcatggctgtgggcaccagtaatgtgctgggacaggtacccaaaccagactctgaagccatccctgtactggtggtacctcttggagctgggtttctacctctcactgctaatcaggctgccctttgatgtcaagcgcaaggatttcaaggagcaggtgatacaccacttcgtggcggtcatcctgatgaccttctcctacagtgccaacctgctgcgcattggctctctggtgctgctgttacaygattcctctgactacctgctggaggcctgtaagatggtcaactacatgcagtatcagcaagtgtgcgacgctctcttcctcatcttctcctttgtcttcttctacacccgactggtcctctttcccacccagatcctctacaccacatactacgagtccatcagcaacaggggccccttcttcggctactacttcttcaacgggcttctgatgttgctgcagctgctgcacgtgttctggtcttgcctcattctgcgcatgctctatagcttcatgaagaagggccagatggagaaggacattcgtagtgatgtagaagaatcagactccagtgaggaggcggcggcggcccaggaacctctgcagctaaagaacgggacagctggagggcccaggccagcccccactgatggccctcggagccgggtggccgggcgtctgaccaacaggcacacaacagccacatagccgggcggggctggctgtaaggggttgcccccccgccagtgccttggatatttctggggtgactggactggcgcccctgggccacctttctggagacagggagggccccacccggggtgggtgggaaggctgatgatctgtctccagccccttccttctgcccacccrcccttcttccctctgggcaactggacagatctggsagccagcagctggatgctgtggctggccagagacacctccaggctgtrgcctgggggctggggggagccccaggctgaaaagggtccaattaaaacaaatggagccaaaaaaaaaaaaaaaaaaaaaaaaaaaaaaaaaaaaaaaaaactcgag

SEQ ID NO: 1139 - DNA, 1772 bp, Homo sapiens
tgtgaatgcttgagtaatactgttattcctctgctgcttcctccaagaaatatttttaacaacaggttaaatttttcagaccaaccaaatctgactcagtggattagaacaatatctcagcaaataaaagcattacagtttcttaggaaagaagaaagtactcctaataatgcctctacaaagaattcagaaaatgtggatgaattacagctccctgaagggttcaggcctgattttcgtcctaagatcccttattctgagagcataaaagaaatgctaacgacatttggaactgctacctacaaggtgggactaaaggttcatcccaatgaagargatcctcgtgttcccataatgtgttggggtagctgcgcgtacaccatccaaagcatagaaagaattttgagtgatgaagataaaccattgtttggtcctttaccttgcagactggatgactgtcttaggtcattgacgagatttgccgcagcacactggacagtggcatcagtttcagtggtgcaaggacatttttgtaaactttttgcatcactggtgcctaatgacagccatgaggaacttccatgcatattagatattgacatgtttcatttattggtgggcttggtgcttgcatttcctgcgttgcagtgtcaggatttttcagggatcagccttggcactggagaccttcacattttccatctggttactatggcacacatcatacagatcttacttacctcatgtacagaagagaatggcatggatcaagaaaatcccccttgtgaagaagaatcagcagttcttgctttgtataaaacacttcaccagtatacgggaagtgccttgaaagaaataccatccggctggcatctgtggaggagtgtcagagctggaatcatgcctttcctgaagtgttctgctttattttttcattacttaaatggagttccttccccacccgacattcaagttcctggaacaagccattttgaacatttatgtagctatctttccctaccaaacaacctcatttgcctttttcaagaaaatagtgagataatgaattcactgattgaaagttggtgccgtaacagtgaagttaaaagatatctagaaggtgaaagagatgctataagatatccaagagaatctaacaaattaataaaccttccagaggattacagcagcctcattaatcaagcatccaatttctcgtgcccgaaatcaggtggtgataagagcagagccccaactctgtgccttgtgtgcggatctctgctgtgctcccagagttactgctgccagactgaactggaaggggaggatgtaggagcctgcacagctcacacctactcctgtggctctggagtgggcatcttcctgagagtacgggaatgtcaggtgctatttttagctggcaaaaccaaaggctgtttttattctcctccttaccttgatgactatggggagaccgaccagggactcagacggggaaatcctttacatttatgcaaagagcgattcaagaagattcagaagctctggcaccaacacagtgtcacagaggaaattggacatgcacaggaagccaatcagacactggttggcattgactggcaacatttataattattgcaccaccaaaaaacacaaacttggatttttttaacccagttggctttttaagaaagaaagaagttctgctgaatttggaaataaattctttatttaaactttmaaaaaaaaaaaaaaaaaactcgacggcacga

SEQ ID NO: 1140 - DNA, 1846 bp, Homo sapiens
  misc_feature (1628)..(1628): n equals a,t,g, or c
  misc_feature (1738)..(1738): n equals a,t,g, or c
gaaaggtgtaagaaactaggaaacaatgccttgctgttgaattctgtgatgtctgccttccgggctgagttcatcgccacaaggtctatggatttcattggcatgattaaagagtgtgatgaatctggtttccccaagcatcttctttttcgatcactgggattaaacttggccttggctgatcctcctgagagtgaccgacttcagattctcaacgaagcttggaaagtcatcactaagctgaagaacccacaggactacattaattgtgccgaagtgtgggtggaatacacctgcaagcatttcacgaaacgagaggtgaataccgttttggcagatgtcatcaagcacatgactccagatcgtgcatttgaagattcctacccccagcttcagttaataattaagaaagttattgcccacttccatgacttctcagttcttttctcagtggraaaatttctgccgtttctggacatgttccaaaaagagagtgtgcgggtggaggtttgcaaatgcatcatggacgcctttatcaagcatcaacaagagcccaccaaggacccggtcatcttgaatgcccttttgcatgtttgcaagaccatgcatgactctgtgaatgcactcactcttgaggatgagaaaagaatgctgtcatatttgattaatggatttataaaaatggtttcctttggccgtgattttgaacaacagctgagtttttatgttgagtccaggtcgatgttttgcaatctggagcctgttcttgtgcagttgattcatagtgtgaaccggttggcaatggagacaagaaaagtaatgaaaggaaatcattccagaaagacagctgcatttgtccgggcctgtgttgcctactgcttcatcaccatcccctccctggcgggcatcttcacacgtctcaatctctacctgcattctggtcaggtggccttggccaaccagtgcctctcccaagctgatgcttttttcaaagccgctataagccttgttccggaagttccaaagatgattaatattgaygggaagatgcggccatcggaatcgttccttctggaattcctctgcaatttcttttctactttattaatagttccggatcatcctgaacatggggtcctgtttcttgttcgagagcttctcaacgtgatccaggactacacctgggaggacaacagcgatgagaaaatccgcatctacacctgcgtcctgcatctcctctccgccatgagccaggagacgtacctttaccacatagacaaagtggactccaacgacagcctctacgggggagactccaagttcctggcagaaaacaacaagctgtgtgagacggtgatggctcagatcctagagcatctgaaaaccctggccaaggacgaggccctgaagcgccagagctcgttgggcctttccttctttaacagcatcttggcccatggggacctacgcaacaacaagctcaaccagctctccgtcaacctgtggcacctggcacagaggcacggctgtgcagacaccaggaccatggtgaaaacgctagaatacatcaagaagcaaagcaaacaaccagacatgactcatctgacggagctggccctyagactccntctgsaaacaaggacctgacccccgggcccatccccaggctyarggactctggtgccaaatccagaaagatctgctctgctgccctgaactcttacggcaatttaggttnctcatttttcttttctttttacatatgtacaaattgttttaagctttggcctctatccaggttattctgacaatgaagaaatgggagttgtcagagcattaaaatgca

SEQ ID NO: 1141 - DNA, 710 bp, Homo sapiens
  misc_feature (2)..(2): n equals a,t,g, or c
  misc_feature (5)..(5): n equals a,t,g, or c
gntcngtgattttggacactgctcacacttcattktkatmamcagccccaacttctgcacctcagcaaaggatgcctttgtcattctggtggagaatgctttgcgagtggctaccatcaacacagtaggagattttatgttattccttggcaaggtgctgatagtctgcagcacaggtttagctgggattatgctgctcaactaccagcaggactacacagtatgggtgctgcctctgatcatcgtctgcctctttgcttycctagtcgctcattgcttcctgtctatttatgaaatggtagtggatgtattattcttgtgttttgccattgatacaaaatacaatgatgggagccctggcagagaattctatatggataaagtgctgatggagtttgtggaaaacagtaggaaagcaatgaaagaagctggtaagggaggcgtcgctgattccagagagctaaagccgatgctgaagaaaaggtgactggtctcatgagccctgaagaatgaactcagaggaggttgtttacatgaggttctcccactcaccagctgttgagagtctgcgattatgaagagcaggatcttattacttcaatgaaagcatgtaacaagtttctcaaaccaccaacagccaagtggatttggtacagtgcggctgtctaataaataatcaaaagcaaaaaaaaaaaaaaaaaaaactcgag

SEQ ID NO: 1142 - DNA, 606 bp, Homo sapiens
  misc_feature (528)..(528): n equals a,t,g, or c
  misc_feature (534)..(534): n equals a,t,g, or c
  misc_feature (556)..(556): n equals a,t,g, or c
  misc_feature (571)..(571): n equals a,t,g, or c
  misc_feature (592)..(592): n equals a,t,g, or c
ggtcaagggcaccctggaaggtgatgtttgtggtgtggagcctcctggcccaggagacacagtagtccagggagacctgcaggagaccaccgtggtgacaggcctgggaccagacacacaggacctggaaggccagagccctccacagagcctgccttcaacccccaaagcagcttggatcagggaggagggccgctgctccagcagtgacgatgacaccgacgtggacatggagggtctgcggagacggcggggcggaccggccacctcagcccatggtgcccctggctgtggagaaccaggctgggggtgagggtgcaggcggggagctgggcatctccctcaacatgtgcctccttggggccctggttctgcttggcctgggggtcctcctcttctcaggtggcctctcagagtctgagactgggcccatggaggaagtggagcggcaggtcctcccagaccccgaggtgctggaagctgtgggggacaggcaggatgggctaagggaacagctgcaggccccantgcctnctgacaagtgtcccagccttgnaaaacatgggtcttntgctggacaaagctggccaangagaaccaggacat

SEQ ID NO: 1143 - DNA, 451 bp, Homo sapiens
  misc_feature (323)..(323): n equals a,t,g, or c
  misc_feature (420)..(420): n equals a,t,g, or c
  misc_feature (424)..(424): n equals a,t,g, or c
  misc_feature (432)..(432): n equals a,t,g, or c
tcgacccacgcgtccgaagcccagcagtatctgatggataatccaacttttgcagaagatgaggagttacaaaatatggacaaagaagatgcattaatttgctttgaagaacacattcgggctttagaaaaggaggaagaagaagaaaaacagaagagtttgctgagagaaaggagacgacagcgaaaaaatagggaatctttccagatatttttagatgaattacatgaacatggacaactgcattctatgtcatcttggatggaattgtatccaactattagttctgatattagatcactaatatgcttggtcagcctggntcaactgcacttgatcttttcaagttttatgttgagggatcttaaagcacgttatccatgacgagaagaaggttaataaaagacattctaaagggantttnttaagaanaaaaagaagggggggggaa

SEQ ID NO: 1144 - DNA, 990 bp, Homo sapiens
  misc_feature (871)..(871): n equals a,t,g, or c
  misc_feature (909)..(909): n equals a,t,g, or c
  misc_feature (980)..(980): n equals a,t,g, or c
  misc_feature (990)..(990): n equals a,t,g, or c
gggtccggcgggcatcggcaagaccatggcggccaaaaatatcctgtacgactgggcggcgggcaagctgtaccagggccaggtggacttcgccttcttcatgccctgcggcgagctgctggagaggccgggcacgcgcagcctggctgacctgatcctggaccagtgccccgaccgcggcgcgccggtgccgcagatgctggcccagccgcagcggctgctcttcatcctggacggcgcggacgagctgccggcgctggggggccccgaggccgcgccctgcacagaccccttcgaggcggcgagcggcgcgcgggtgctaggcgggctgctgagtaaggcgctgctgcccacggccctcctgctggtgaccacgcgcgccgccgcccccgggaggctgcagggccgcctgtgttccccgcagtgcgccgaggtgcgcggcttctccgacaaggacaagaagaagtatttctacaagtwyttccgggatgagaggagggccgagcgcgcctaccgcttcgtgaaggagaacgagacgctgttcgcgctgtgcttcgtgcccttcgtgtgctggatcgtgtgcaccgtgctgcgccagcagctggagctcggtcgggacctgtcgcgcacgtccaagaccaccacgtcagtgtacctgcttttcatcaccagcgttctgagctcggctccggtagccgacgggccccggttgcagggcgacctgcgcaatctgtgccgcctggcccgcgagggcgtcctcggacgcaaggcgcaatttgccraaaaggaactggagcaactggagcttcgtggctccaaaagtgcagacgcttgtttctcagcaaaaaggagctgcccgggcgtgctgganacagaggtcacctaccagttcatcgaccaagagctttncaggagttcctcgcgggcacttgtcctaccttgctggaaggacgggcggggtggcccaaggaaccgccggnttgggcggcn

SEQ ID NO: 1145 - DNA, 1057 bp, Homo sapiens
gccaccatcggctactgccagggcctgaacaggctggcggccattgccctgctggtcctagaggaggaggagagcgccttctggtgcctggtggccattgtggagaccatcatgcccgctgattactactgcaacacgctgacggcatcccaggtggaccarcgggtgctccargacctgctctcggagaagctgcccaggctgatggcccatctggggcagcaccacgtggatctctccctcgtcaccttcaactggttcctcgtggtctttgcggacagtctcattagcaacatcctccttcgggtctgggatgccttcctgtacgaggggacgaaggtggtgtttcgctatgccttggccattttcaagtacaacgagaaggagatcttgaggctacagaatggcctggaaatctaccagtacctgcgcttyttcaccaagaccatctccaacagccggaagctgatgaacatcgccttcaatgacatgaaccccttccgcatgaaacagctgcggcagctgcgcatggtccaccgggagcggctggaggctgagctgcgggagctggagcagcttaaggcagagtacctggagaggcgggcatcccggcgcagagctgtgtccgagggctgtgccagcgaggacgaggtggagggggaagcctgacttggccacctcccctccccacagccttcctcacccttggctggcagacccactggaggtcaggcacggaccagtggcccagccctgggtgtcccatcaccatgtgaccttggacatgtcccttcccctctctggccctcagtttccccactgggacattgtgtgctgcaaagccattggttgggctacttcttcataggcacttacttacccagggatgccaccctttcgtcacctcttccacagagcactttggcatgtaaacaagcaagagcactgcctctatagggtaacctggaacattctctaggttatatcaatataaaacaatgtaaatggtggaaaaaaaaaaaaaaaaaaaaaaaaaaaaaaaaaaaaaaaaaaaaaa

SEQ ID NO: 1146 - DNA, 733 bp, Homo sapiens
  misc_feature (726)..(726): n equals a,t,g, or c
  misc_feature (729)..(729): n equals a,t,g, or c
gacaacgtccagccgttccttcaagcactcccgctctgctgccgtcacctcagagttccacttggtgcctagccgcagcatgaatgggcagccactgacttgtgtggtgtcccatcctggcctgctccaggaccaaaggatcacccacatcctccacgtgtccttccttgctgaggcctctgtgaggggccttgaagaccaaaatctgtggcacattggcagagaaggagctatgctcaagtgcctgagtgaagggcagccccctccctcatacaactggacacggctggatgggcctctgcccagtggggtacgagtggatggggacactttgggctttcccccactgaccactgagcacagcggcatctacgtctgccatgtcagcaatgagttctcctcaagggattctcaggtcactgtggatgttcttgacccccaggaagactctgggaagcaggtggacctagtgtcagcctcggtggtggtggtgggtgtgatcgccgcactcttgktctgccttctggtggtggtggtggtgctcatgtcccgataccatcggcgcaaggcccarcagatgacccagaaatatgargaggagctgaccctgaccagggagaactycatccggaggctgcattcccatcacacggaccccaggagccarccggaggaragtgtagggctkaragccgagggccaccctgatagtctyaaggrccaatngtntttg

SEQ ID NO: 1147 - DNA, 572 bp, Homo sapiens
aggaaaaacaaaattaatcacttaaatgaaaatacttttgcacctctccagaaactggatgaattggatttaggaagtaataagattgaaaatcttccaccgcttatattcaaggacctgaaggagctgtcacaattgaatctttcctataatccaatccagaaaattcaagcaaaccaatttgattatcttgtcaaactcaagtctctcctagaagggattgaaatttcaaatatccaataaaggatgtttagacctcttatgaatctctctcacatatattttaagaaattccagtactgtgggtatgcaccacatgttcgcagctgtaaaccaaacactgatggaatttcatctctagagaatctcttggcaagcattattcagagagtatttgtctgggttgtatctgcagttacctgctttggaaacatttttgtcatttgcatgcgaccttatatcaggtctgagaacaagctgtatgccatgtcaatcatttctctctgctgtgccgactgcttaatgggaatatatttattcgtgatcggaggctttgacctaaagtttcgtgg

SEQ ID NO: 1148 - DNA, 1166 bp, Homo sapiens
  misc_feature (1147)..(1147): n equals a,t,g, or c
ctgcatgcatgggacaggatgctttcatggagcccttcggtgacacacttggggtctttcagtgcaaaatatacctccttctcttcggtgcttgctcggggctgaaggtgacagtgccatcacacactgtccatggcgtcagaggtcaggccctctacctacccgtccactatggcttccacactccagcatcagacatccagatcatatggctatttgagagaccccacacaatgcccaaatacttactgggctctgtgaataagtctgtggttcctgacttggaataccaacacaagtttcaccatgatgccacccaatggcatctctgcttatcaacccatgcagttccctgatgaaggcaattacatcgtgaaggtcaacattcagggaaatggaatctatctgccmgtcagaagatacawgtcacggttgatgatcctgtcacaaagccagtggtgcagattcatcctccctctggggctgtggagtatgtggggaacatgaccctgacatgccatgtggaagggggcactcggctagcttaccaatggctaaaaaatgggagacctgtccacaccagctccacctactccttttctccccaaaacaatacccttcatattgctccagtaaccaaggaagacattgggaattacagctgcctggtgaggaaccctgtcagtgaaatggaaagtgatatcattatgcccatcatatattatggaccttatggacttcaagtgaattctgataaagggytaaaaktaggggaagtgtttactgttgaccttggagaggccatcctatttgattgttctgctgattctcatccccccaacacctactcctggattaggaggactgacaatactacatatatcattaagcatgggcctcgcttagaagttgcatctgagaaagtagcccagaagacaatggactatgtgtgctgtgcttacaacaacataaccggcaggcaagatgaaactcatttcacagttatcatcacttccgtaggactggagaagcttgcacagaaaggaaaatcattgtcacctttagcaagtataactggaatatcactatttttgattatatccatgtgtcttctcttcctatggaaaaaatatcaaccctacaaagntataaaaaaaaaaaaaaag

SEQ ID NO: 1149 - DNA, 739 bp, Homo sapiens
  misc_feature (678)..(678): n equals a,t,g, or c
ggcacaggcaaatacctgtatccccagtatttccagtattggtaatttttcctgatgcgtgcagatcctccaaagtttaataggatatggccgaatatttcttcccttgaggtttctaacccaaaacaagttgctcccaaattagctttgtcaacagtttcttctgttcaagttgcaaaccacaagagagcgaatgtctgcgacaacgagctcctgcactgccagaacggagggacgtgccacaacaacgtgcgctgcctgtgcccggccgcatacacgggcatcctctgcgagaagctgcggtgcgaggaggctggcagctgcggctccgactctggccagggcgcgcccccgcacggctccccagcgctgctgctgctgaccacgctgctgggaaccgccagccccctggtgttctaggtgtcacctccagccacaccggacgggcctgtgccgtggggaagcagacacaacccaaacatttgctactaacataggaaacacacacatacagacacccccactcagacagtgtacaaactaagaaggcctaactgaactaagccatatttatcacccgtggacagcacatccgagtcaagactgttaatttctgactccagaggagttcggcagctgttgatattatcactgcaaatcacattgccagctgcaganatattgtggattggaaaggctgcgacagcccccaaacagggaagacacaaaacacacacat

SEQ ID NO: 1150 - DNA, 909 bp, Homo sapiens
  misc_feature (2)..(2): n equals a,t,g, or c
  misc_feature (9)..(9): n equals a,t,g, or c
gnaaattanttttcaagaggaaatttaaataacgactcatagtaaaccaaatacaaaacaaaagcttttttttttttagtttgtttcacagtatctaaaatggcagagatttcaggaaagtctaatcacacttgaccatgagtgttgagttgcttttccttcctctgaggccaagagttacttatatccaagaccgtgaagaactctttttgacctgttggatatgatcttgtgactgggtcgaggaaaatgaactcccagggttgttggagtagagctgtttccaccaaaagacagaactgtatgcagctaataagagctccagcacagtgaagatgagcatcaccactaggacacctgttaaactgacactggtcaggagacaatctttgatttcatatattggataatagtactccgaataaggcaatgaggatagataatccatttctgagccacaatgttgagaggcagtcctcagggctaccatgctgtcagcaaggaggaagaggcctgctcctgcagtaacagaactcactgcatttgaggtcaarctgctcaggtcaaagggcttagttgattgttttccagagataattgagagggatccagtaatgccaaacccaagaacggtggtttctgttggcagcccgttctgcaggtaatcytcgttttggtacatgtgtccaggtttctctctttgagggatagtgatgccctttggtgtaaagctgtgagaaacccccatggtttgggattgtaatagcatgatgctgatgatgctgttctcgcagcctggtcctgtgtgctgtggctggggatcagctcacctctggggagcgctcagctggaacctcccactggctgttcctgccagaacratcttggtgctctgccccacgcgtccgc

SEQ ID NO: 1151 - DNA, 915 bp, Homo sapiens
  misc_feature (111)..(111): n equals a,t,g, or c
  misc_feature (172)..(172): n equals a,t,g, or c
  misc_feature (724)..(724): n equals a,t,g, or c
  misc_feature (825)..(825): n equals a,t,g, or c
  misc_feature (845)..(845): n equals a,t,g, or c
  misc_feature (848)..(848): n equals a,t,g, or c
  misc_feature (855)..(855): n equals a,t,g, or c
  misc_feature (886)..(886): n equals a,t,g, or c
ggagcgcaacgcaattaatgtgagttagctcactcattaggcaccccaggctttacactttatgcttccggctcgtatgttgtgtggaattgtgagcggataacaatttcncacaggaaacagctatgaccatgattacgccaagctcgaaattaaccctcactaaagggancaaaagctggagctccaccgcggtggcggccgctctagaactagtggatcccccgkkctgcaggaattcggcacgagaggacataacagaagcaatagagactaccattagtcttgaaacagcacgtgcagaccatccgaagcctgtaactgtgaaaccagtaacaacggaacctcagagtccagatctgaacgatgccgtgtccagtttgcgaagtcctattcccctcctcctgtcgtgtgcctttgttcaggtggggatgtatttcatgtagaaggtggaagaaggctgctatgactctttggatgggagtctggcaagaggaaattggaagataaaataaataataagtgaaataaaaaaaaaaaaaaaaaaaaaaaaaaaaactcgagggggggcccggtacccaattcgccctatagtgagtcgtattacaattcactggccgtcgttttacaacgtcgtgactgggaaaaccctggcgttacccaacttaatcgccttgcagcacatccccctttcgccagctggcgtaatagcgaagaggcccgnaccgatcgccttccaacagttgcgcaacctgaatggcgaatggcaaattgtaaagcgttaatattttggtaaaattcgcggtaaattttggtaaatcaagntcattttttaaccaataggnccnaatcggnaaaatcccttataaatcaaaaggaatttganccgggaatagggttgaatggttgttccaa

SEQ ID NO: 1152 - DNA, 1380 bp, Homo sapiens
gggcaggtgtccgaccatgagcgtccgggtcgcacgggtagcgtgggtcaggggcttgggcgccagctaccgccgcggcgcctcgagcttcccggtgcctccgccgggcgcccagggtgtagcggagctgctgcgagatgcgaccggggcggaggaggaggcgccctggkcggcgacggagcggcgaatgccgggccagtgctccgtgctgctcttcccgggccagggcagccaggtggtgggcatgggccgcggtctgctcaactacccgcgcgtccgcgaactctacgccgccgcccgccgcgtgctgggctacgacctgctggaactgagcctgcacgggccgcaggagaccctggaccgcaccgtgcactgtcagcccgcgatcttcgtggcatcgctggccgctgtcgagaaactacatcacctgcagccctcggtgattgagaactgtgttgctgctgctggattcagtgtgggagagtttgcagccctagtgtttgccggagccatggaatttgctgaaggtttgtatgcagtgaaaatccgagctgaggccatgcaggaagcttcagaagctgtccccagtgggatgctgtctgtcctcggccagcctcagtccaagttcaacttcgcctgtttggaagcccgggaacactgcaagtytttaggcatagagaaccccgtatgtgaagtgtccaactacctctttccagattgcagggtgatttcaggacaccaagaggctctacggtttctccagaagaattcctctaagtttcatttcagacgcaccaggatgttgccggttagtggcgcattccacacccgcctcatggagccagccgtggagcccctgacgcaagctttaaaggcagtcgacattaagaagcctctggtttctgtctactccaacgtccacgsgcatagatacaggcatcccgggcacatccacaagctgctggcccagcagctggtctccccagtgaagtgggagcagacgatgcatgccatatacgaaaggaaaaagggcagggggttcccccaaactttcgaagtaggccctggcaggcagctgggagccatcctgaagagctgtaacatgcaggcctggaagtcctacagcgccgtggatgtgctgcagaccctcgaacatgtggacctggaccctcaggagcccccgagatgactgcagggggctcaaatgcratgaccccctctgtcctcctgaggagaggctgtaggctgtgcctgtcgccccctaccttcctaatggctcctcctctgaggagtgaaagggatttgtttgcaacgtgctttgaaggccacataaaaagccctaaaaatgaaaaaaaaaaaaaaaaaaaaaaaaaaaaaaaa

SEQ ID NO: 1153 - DNA, 1947 bp, Homo sapiens
cgctgcgactcagacctcagctccaacatatgcattctgaagaaagatggctgagatggacagaatgctttattttggaaagaaacaatgttctaggtcaaactgagtctaccaaatgcagactttcacaatggttctagaagaaatctggacaagtcttttcatgtggtttttctacgcattgattccatgtttgctcacagatgaagtggccattctgcccgcccctcagaacctctctgtactctcaaccaacatgaagcatctcttgatgtggagcccagtgatcgcgcctggagaaacagtgtactattcygtcgaataccagggggagtacgagagcctgtacacgagccacatctggatccccagcagctggtgctcactcactgaaggtcctgagtgtgatgtcactgatgacatcacggccactgtgccatacaaccttcgtgtcagggccacattgggctcacagacctcagcctggagcatcctgaagcatccctttaatagaaactcaaccatccttacccgacctgggatggagatcaccaaagatggcttccacctggttattgagctggaggacctggggccccagtttgagttccttgtggcctactggaggagggagcctggtgccgaggaacatgtcaaaatggtgaggagtgggggtattccagtgcacctagaaaccatggagccaggggctgcatactgtgtgaaggcccagacattcgtgaaggccattgggaggtacagcgccttcagccagacagaatgtgtggaggtgcaaggagaggccattcccctggtactggccctgtttgcctttgttggcttcatgctgatccttgtggtcgtgccactgttcgtctggaaaatgggccggctgctccagtactcctgttgccccgtggtggtcctcccagacaccttgaaaataaccaattcaccccagaagttaatcagctgcagaagggaggaggtggatgcctgtgccacggctgtgatgtctcctgaggaactcctcagggcctggatctcataggtttgcggaagggcccaggtgaagccgagaacctggtctgcatgacatggaaaccatgaggggacaagttgtgtttctgttttccgccacggacaagggatgagagaagtaggaagagcctgttgtctacaagtctagaagcaaccatcagaggcagggtggtttgtctaacagaacactgactgaggcttaggggatgtgacctctagamtgggggctgccacttgctggctgagcaaccctgggaaaagtgacttcatcccttcggtcctaagttttctcatctgtaatgggggaattacctacacacctgctaaacacacacacacagagtctctctctatatatacacacgtacacataaatacacccagcacttgcaaggctagagggaaactggtgacactctacagtctgactgattcagtgtttctggagagcaggacataaatgtatgatgagaatgatcaaggactctacacactgggtggcttggagagcccactttcccagaataatccttgagagaaaaggaatcatgggagcaatggtgttgagttcacttcaagcccaatgccggtgcagaggggaatggcttagcgagctctacagtaggtgacctggaggaaggtcacagccacactgaaaatgggatgtgcatgaacacggaggatccatgaactactgtaaagtgttgacagtgtgtgcacactgcagacagcaggtgaaatgtatgtgtgcaatgcgacgagaatgcagaagtcagtaacatgtgcatgtttgttgtgctccttttttctgttggtaaagtacagaattyagcaaataaaaagggccaccctggccaaaagcggtcaaaaaaaaaaaaaaaaaaaaaaaaaaaaaaaagggcggcc

SEQ ID NO: 1154 - DNA, 2787 bp, Homo sapiens
  misc_feature (2787)..(2787): n equals a,t,g, or c
aacattgactgcstcmggtctcaagcaccagtcttcaccgcggaaagcatgttgtggctgttccaatcgctcctgtttgtcttctgctttggcccagggaatgtagtttcacaaagcagcttaaccccattgatggtgaacgggattctgggggagtcagtaactcttcccctggagtttcctgcaggagagaaggtcaacttcatcacttggcttttcaatgaaacatctcttgccttcatagtaccccatgaaaccaaaagtccagaaatccacgtgactaatccgaaacagggaaagcgactgaacttcacccagtcctactccctgcaactcagcaacctgaagatggaagacacaggctcttacagagcccagatatccacaaagacctctgcaaagctgtccagttacactttgaggatattaagacaactgaggaacatacaagttaccaatcacagtcagctatttcagaatatgacctgtgagctccatctgacttgctctgtggaggatgcagatgacaatgtctcattcagatgggaggccttgggaaacacactttcaagtcagccaaacctcactgtctcctgggaccccaggatttccagtgaacaggactacacctgcatagcagagaatgctgtcagtaatttatccttctctgtctctgcccagaagctttgcgaagatgttaaaattcaatatacagataccaaaatgattctgtttatggtttctgggatatgcatagtcttcggtttcatcatactgctgttacttgttttgaggaaragaagagattccctatctttgtctactcagcgaacacagggccccgagtccgcaaggaacctagagtatgtttcagtgtctccaacgaacaacactgtgtatgcttcagtcactcattcaaacagggaaacagaaatctggacacctagagaaaatgatactatcacaatttactccacaattaatcattccaaagagagtaaacccactttttccagggcaactgcccttgacaatgtcgtgtaagttgctgaaaggcctcagaggaattcgggaatgacacgtcttctgatcccatgagacagaacaaagaacaggaagcttggttcctgttgttcctggcaacagaatttgaatatctaggataggatgatcacctccagtccttcggacttaaacctgcctacctgagtcaaacacctaaggataacatcatttccagcatgtggttcaaataatattttccaatccacttcaggccaaaacatgctaaagataacacaccagcacattgactctctctttgataactaagcaaatggaattatggttgacagagagtttatgatccagaagacaaccacttctctccttttagaaagcagcaggattgacttattgagaaataatgcagtgtgttggttacatgtgtagtctctggagttggatgggcccatcctgatacaagttgagcatcccttgtctgaaatgcttgggattagaaatgtttcagatttcaattttttttcagattttggaatatttgcattatatttagcggttgagtatccaaatccaaaaatccaaaattcaaaatgctccaataagcatttcccttgagtttcattgatgtcgatgcagtgctcaaaatctcagattttggagcattttggatattggatttttggatttgggatgctcaacttgtacaatgtttattagacacatctcctgggacatactgcctaaccttttggagccttagtctcccagactgaaaaaggaagaggatggtattacatcagctccattgtttgagccaagaatctaagtcatccctgactccagtgtctttgtcaccaggccctttggactctacctcagaaatatttcttggaccttccacttctcctccaactccttgaccaccatcctgtatccaaccatcaccacctctaacctgaatcctaccttaagatcagaacagttgtcctcacttttgttcttgtccctctccaacccactctccacaagatggccagagtaatgtttttaatataaattggatccttcagtttcctgcttaaaaccctgcaggtttcccaatgcactcagaaagaaatccagtttccatggccctggatggtctggcccacctccagcctcagctagcattacccttctgacactctctatgtagcctccctgatcttctttcagctcctctattaaaggaaaagttctttatgttaattatttacatcttcctgcaggcccttcctctgcctgctggggtcctcctattctttaggtttaattttaaatatgtcacctcctaagagaaaccttcccagaccactctttctaaaatgaatcttctaggctgggcatggtggctcacacctgtaatcccagtactttgggaggccaaggggggagatcacttgaggtcaggagttcaagaccagcctggccaacttggtgaaaccccgtctttactaaaaatacaaaaaaattagccaggcgtggtggtgcacccctaaaatcccagctacttgagagactgaggcaggagaatcacttgaacccaggaggtggaggttccagtgagccaaaatcatgccaatgtatttccagtctgggtgacagagtgagactctgtctcaaaaaataaataaataaaataaaatgaaatagatcttaaaaaaaaaaaaaaaaagggcggccgctctagaggakccamgctkacgtacgcgtgcatgcgacgtn

SEQ ID NO: 1155 - DNA, 1233 bp, Homo sapiens
  misc_feature (49)..(49): n equals a,t,g, or c
  misc_feature (72)..(72): n equals a,t,g, or c
  misc_feature (93)..(93): n equals a,t,g, or c
  misc_feature (135)..(135): n equals a,t,g, or c
  misc_feature (163)..(163): n equals a,t,g, or c
atggaaaaacgccagcaacgcggcctttttacggttcctggccttttgntggccttttgctcacatgttctntcctgcgttatcccctgattntgtggataaccgtattaccgcctttgagtgagctgataccgntcgccgcagccgaacgaccgagcgcagngagtcagtgagcgaggaagcggaagagcgcccaatacgcaaaccgcctctcccccgcgcgttggccgatttcattaatgcagctggcacgacaggtttcccgactggaaagcgggcagtgagcgcaacgcaattaatgtgagttagctcactcattaggcaccccaggctttacactttatgcttccggctcgtatgttgtgtggaattgtgagcggataacaatttcacacaggaaacagctatgaccatgattacgccaagctcgaaattaaccctcactaaagggaacaaaagctggagctccaccgcggtggcggccgctctagaactagtggatcccccgggctgcaggaattcggcacgagcatggttgttgcaaaactttcttctatttcttctcctcctggtattctcattactctgtttcaccttgtgtagttgtcccacagtcttggatatcatcttctgttcttttcagtgtttcttttctttagttttcgaagtttctgatgataaatcctcaagctcagagattctttactcagctgagtccagtctactaataagccatcagaggtattcttcagttatttaacacattttttaccactacattatgttgaagtttcttacgatgtctgtctttctgattacattacccatctacacttgaatgctgtctacttcattcattagacccttagcatattctccagaggtttaaaaaaatttccaaaatcataactttgtctgcttctgaagcttgctctgttgacacaaattgtatttttttctttttttggattttagtatgccttgcaattttttccctttattctcatgcatgaagcaccccactaaargtgactgytgttagtatagctttartaatgcggtgatgargtgacagggcaggtgatgctctcttagtctctttargctactataacaaaatactttagactgagccsaataaaaaaaaaaaaaaaaaaaaaaaaaaaaaaaaaaaaaaaaaaaaaaaaaactcgagggggggcccgacccaattcgccctactacgtgcgtcga

SEQ ID NO: 1156 - DNA, 754 bp, Homo sapiens
  misc_feature (729)..(729): n equals a,t,g, or c
gtcgacccacgcgtccgcccacgcgtccgcccacgcgtccggtttataaacagaagtttaaacttgtaagcttaagcttccgtttataaacagaagtttaaaattataggtcctgtttaacattcagctctgttaactcactcatctttttgtgtttttacactttgtcaagatttctttacatattcatcaatgtctgaagaagttacttatgcagatcttcaattccagaactccagtgagatggaaaaaatcccagaaattggcaaatttggggaaaaagcacctccagctccctctcatgtatggcgtccagcagccttgtttctgactcttctgtgccttctgttgctcattggrttgggagtcttggcaagcatgtttcatgtaactttgaagatagaaatgaaaaaaatgaacaaactacaaaacatcagtgaagagctccagagaaatatttctctacaactgatgagtaacatgaatatctccaacaagatcaggaacctctccaccacactgcaaacaatagccaccaaattawgtcgtgagytatatagsaaagaacmagagcacaaatgtaagccttgtccaaggagatggatttggcataaggacagctgttatttcctaagtgatgatgtccaaacatggcaggagagtaaaatggcctgtgctgctcagaatgccagcctgttgaagataaacaacaaaaatgcattggaattngtaaaatcccagagtggcaatagga

SEQ ID NO: 1157 - DNA, 1842 bp, Homo sapiens
aattcggcagagtttcagggtcttgttcccaatcagtttccagccaacaccagggtgtcctagtccgcagaggtgtgggggacacactccataatctctacttttctttttgtgcagctgagtcatggagctttcagccccagcacatggctcctccttaactgcgtctgctcaacctccctcagccctgtgaacagcatccccgcacacagacgcagagcaggactctctctgctgccacttcaccttcctgagagaggaccagcggccagagcctcagtgactgccaccctggaggacagggcacaacaaccgtttctggagagaatgggaggattccagaggggcaaatatggaactatggctgaaggtagatcagaagataacttgtctgcaacaccaccggcattgaggattatcctagtgggcaaaacaggctgcgggaaaagtgccacagggaacagcatccttggccagcccgtgtttgagtccaagctgagggcccagtcagtgaccaggacgtgccaggtgaaaacaggaacatggaacgggaggaaagtcctggtggttgacacgccctccatctttgagtcacaggcygatacccaagagctgtacaagaacatcggggactgctacctgctctctgccccggggccccacgtcctgcttctggtgatccagctggggcgtttcactgctcaggacacagtggccatcaggaaggtgaaagaggtctttgggacaggggccatgagacatgtggtcatcctcttcacccacaaagaggacttagggggccaggccctggatgactatgtagcaaacacggacaactgcagcctgaaagacctggtgcgggagtgtgagagaaggtactgtgccttcaacaactggggctctgtggaggagcagaggcagcagcaggcagagctcctggctgtgattgagaggctggggagggagcgagagggctccttccacagcaatgacctcttcttggatgcccagctgctccaaagaactggagctggggcctgccaggaagactacaggcagtaccaggccaaagtggaatggcaggtggagaagcacaagcaagagctgagggagaacgagagtaactgggcatacaaggcgctyctcagagtcaaacacttgatgcttttgcattatgagatttttgtttttctattgttgtgcagcatactttttttcattatttttctgttcatctttcattacatttaaatctctggaccctggagcacttctaatgtatcaccccatggagtcattgttctaataatcaccaattcagactcagatcctcgtggtctatggagcatgctgcttgctgtctgtgcagctcccatttccccttcttcctgatagacttggagctgtgtgcctccactccaaggctgcctgcctgctgtaaacactattccactctgtctgccaacaactgcttcaggaatgggcctgagatcccatgcaggtccctgagaagtgagtaaaagtccgcagaggtggggatggaagatctctccttagatagaacctgtcttcctccctggcattgtggggtctgggcgtgacactgggactctcagcagctttgtgctgccaacctgagattgaaggcagtgcctcagagcagcacagagagttggggccccctgagccctgagccaccagccctgcagcctgccctatctccgcatttccagttgtattagccaataratttcctacttatttaagctatttgagctccgggtctcttctacctgcattctaaaacattcaaagtaataaaaatttctccacattaaaaaa

SEQ ID NO: 1158 - DNA, 460 bp, Homo sapiens
  misc_feature (226)..(226): n equals a,t,g, or c
ggtcaagtggcttcttctgagcgctgagggaggggagcgtgcgtaggggatggtgccagcgctgcgttatttggttggtgcctgcggacgggcccgcgggcttttcgccggtggctcccctggggcgtgcgggttcgcgtctgggaggccaagaccgctgtgtggaggtagccgcagcgccagcaccagctcatttgatatagtcatcgttggtggcggaattgtngggcttgcctctgccagagcactcatcctgcgacatccatcactttctattggtgttctggaaaaggagaaagatttagctgttcaccagactggacataacagtggtgtyatacatagtggaatttattataaaccygagtctctgaaaagccaaattatgtgtacaaggtgcagccctcctctatgagtactgtcagcaaaagggaatttcctacaagcagtgtggcaagct

SEQ ID NO: 1159 - DNA, 1924 bp, Homo sapiens
ccgtgacattaaaaaaacgtacgcctgcaggtcccggtccggaaattcccgggtcgacccacgcgtccggcgatgagtgcctctgcggccaccggggtcttcgtgctgtccctctcggccaycccggtcacctatgtcttcaaccacctggcggcccagcatgattcctggactattgtaggggttgctgccctcatcctgttcctggtagcactgctggctcgtgtcctcgtcaaaagaaaaccaccccgggacccactgttctatgtgtatgcagtttttggatttaccagcgtggtgaacctcatcataggactggagcaagatggaatcattgacgggttcatgacacactacttgagagagggtgaaccgtatctgaacaccgcatatgggcacatgatctgctactgggatggctctgcttcattatctgatgtacctggtgatggtggcagccatagcatgggaggaaacttatagaaccattggcctatattgggttggatctattattatgagtgttgttgtttttgtgccaggaaacattgtagggaagtatggaacacgaatttgccctgcttttttcttaagcataccatatacttgtcttcctgtctgggctggtttcagaatctataatcagccatcagaaaattataattacccctcaaaggttattcaagaagcccaagcgaaagacctgctgagaagaccatttgatttaatgttggttgtgtgtctcctcctggcaactggattttgcctgttcagaggtttgattgctttggattgcccatctgagctctgccgattatatacgcaatttcaagagccctatctaaaggatcctgctgcttatcctaaaattcagatgctggcatatatgttctattctgttccttactttgtgactgcactgtatggcttagtggttcctggatgttcctggatgcctgacatcacattgatacatgctggaggtctggctcaggctcagttttctcacattggtgcatctcttcatgctagaactgcttatgtctacagagtccctgaagaagcaaaaatcctttttttagcattaaacatagcatatggagttcttcctcagctcttggcctatcgttgtatctacaaaccagagttcttcataaaaacaaaggcagaagaaaaagtggaataaaaatattacttcatgttcctcctttctaaattactaacttttgttatactggtactgatattttgtcccatttcactctcttctcatacgtgagtacttaagaatatgtacattcttgctctgcactgtatgtgtgagctatatggtattgtgtaaattttttttgaaggaaaatggaaattcttgagaaacagtttgtttaaagaaatatattcaaaatcatttgtgaataaacttgatcatccatctcaatattgtttgacatataaaataattataagtgtaaaaaattacaatttagtgccaacagtagtgagcatgaaatgaaactattcaaaagagaatatggcctgtgcatattaaaaaattcaaaacagtgaatgcagactggaggagtaacttttgcaaataagatgaatatgcttcattattaaactcaatataaaaggcaaatcatcagaatatttttaaatgttgtttgaaaaatgttttcccaaggaaagtttattatttgctgctgtttcaagaaaattacttttactaaatttttttgtgtgaatttaaacagctaaatagggatcagtaactttatctctatccttaatgaacatttgttttattggtggctggaaatatttctattgtatttctgtgtatatttttaataaaattatttttggcctcttaaaaaaaaaaaaaaaaaaaaaaaaaaaaaaaaaaaaaaaaaaaaaactcgag

SEQ ID NO: 1160 - DNA, 736 bp, Homo sapiens
tccgggaattcccgggtcgacccacgcgtccgctcaggatgactgtggagaaggaggcccctgatgcgcacttcactgtggacaaacagaacatctccctctggccccgagagcctcctcccaagtccggtccatctctggtcccggggaaaacacccacagtccgtgctgcattaatctgcctgacgctggtcctggtcgcctccgtcctgctgcaggccgtcctttatccccggtttatgggcaccatatcagatgtaaagaccaatgtccagttgctgaaaggtcgtgtggacaacatcagcaccctggattctgaaattaaaaaraatagtgacggcatggaggcagctggcgttcagatccagatggtgaatgwgagcctgggttatgtgcgttctcagttcctgaagttaaaaaccagtgtggagaaggccaacgcasagatccagatcttaacaagaagttgggaagaagtcagtaccttaaatgcccaaatcccagagttaaaaagtgatttggagaaagccagtgctttaaatacaaagatccgggcactccagggcagcttggagaatatgagcaagttgctcaaacgacaaaatgatattctacaggtggtttctcaaggctggaagtacttcaaggggaacttctattacttttctctcattccaaagacctggtatagtgccgagcagttctgtgtgtccaggaattcacacctgacctctgg

SEQ ID NO: 1161 - DNA, 1375 bp, Homo sapiens
aaacaggaaataaatacgaatgaaactgagctctaagcagcatgtaacctggcctgcatccaggaaatagaggacttcggatccttctaaccctaccacccaactggccccagtacattcattytctcaggaaaaaaaacaaggtccccacagcaaagaaaaggaataggatcaagagatacgtggctgctggcagagcaagcatgaattcgatgacttcagcagttccggtggccaattctgtgttggtggtggcaccccacaatggttatcctgtgaccccaggaattatgtctcacgtgcccctgtatccaaacagccagccgcaagtccacctagttcctgggaacccacctagtttggtgtcgaatgtgaatgggcagcctgtgcagaaagctctgaaagaaggcaaaaccttgggggccatccagatcatcattggcctggctcacatcggcctcggctccatcatggcgacggttctcgtaggggaatacctgtctatttcattctacggaggctttcccttctggggaggcttgtggtttatcatttcaggatctctctccgtggcagcagaaaatcagccatattcttattgcctgctgtctggcagtttgggcttgaacatcgtcagtgcaatctgctctgcagttggagtcatactcttcatcacagatctaagtattccccacccatatgcctaccccgactattatccttacgcctggggtgtgaaccctggaatggcgatttctggcgtgctgctggtcttctgcctcctggagtttggcatcgcatgcgcatcttcccactttggctgccagttggtctgctgtcaatcaagcaatgtgagtgtcatctatccaaacatctatgcagcaaacccagtgatcaccccagaaccggtgacctcaccaccaagttattccagtgagatccaagcaaataagtaaggctacagattctggaagcatctttcactgggaccaaaagaagtcctcctccctttctgggcttccataacccaggtcgttcctgttctgacagctgaggaaacgtctctcccactgtttgtactctcaccttcattcttcaattcagtctaggaaaccatgctgtttctctatcaagaagaagacagagattttaaacagatgttaaccaagagggactccctagggcacatgcatcagcacatatgtgggcatccagcctctggggccttggcacacacacattcgtgtgctctgctgcatgtgagcttgtgggttagaggaacaaatatctagacattcaatcttcactctttcaattgtgcattcatttaataaatagatactgagcattcaaaaaaaaaaaaaaaaaaactcga

SEQ ID NO: 1162 - DNA, 1207 bp, Homo sapiens
  misc_feature (113)..(113): n equals a,t,g, or c
  misc_feature (130)..(130): n equals a,t,g, or c
  misc_feature (152)..(152): n equals a,t,g, or c
tcattaggcaccccaggctttacactttatgcttccggttcgtatgttgtgtggaattgtgagcggataacaatttcacacaggaaacagctatgaccatgattacgccaagntcgaaattaaccctcantaaagggaacaaaagctggagntccaccgcggtggcggccgctctagaactagtggatcccccgggctgcaggaattcggcacgmgtgggctgcagtaggtcccggcaaccgcaggctcgcggcgggcgctgggcgcgggatccgactctagtcgtaatggaggcgggcggctttctggactcgctcatttacggagcatgcgtggtcttcacccttggcatgttctccgccggcctctcggacctcaggcacatgcgaatgacccggagtgtggacaacgtccagttcctgccctttctcaccacggaagtcaacaacctgggctggctgagttatggggctttgaagggagacgggatcctcatcgtcgtcaacacagtgggtgctgcgcttcagaccctgtatatcttggcatatctgcattactgccctcggaagcgtgttgtgctcctacagactgcaaccctgctaggggtccttctcctgggttatggctacttttggctcctggtacccaaccctgaggcccggcttcagcagttgggcctcttctgcagtgtcttcaccatcagcatgtacctctcaccactggctgacttggctaaggtgattcaaactaaatcaacccaatgtctctcctacccactcaccattgctacccttctcacctctgcctcctggtgcctctatgggtttcgactcagagatccctatatcatggtgtccaactttccaggaatcgtcaccagctttatccgcttctggcttttctggaagtacccccaggagcaagacaggaactactggctcctgcaaacctgaggctgctcatctgaccactgggcaccttagtgcmaacctgaaccaaagagacctccttgtttcagctgggcctgctgtccagcttcccaggtgcagtgggttgtgggaacaagagatgactttgaggataaaaggaccaaagaaaaagctttacttagatgattgattggggcctaggagatgaaatcactttttattttttagagatttttttttttaattttggaggttggggtgcaaytttagaatatgcc

SEQ ID NO: 1163 - DNA, 1727 bp, Homo sapiens
  misc_feature (16)..(16): n equals a,t,g, or c
  misc_feature (18)..(18): n equals a,t,g, or c
  misc_feature (353)..(353): n equals a,t,g, or c
  misc_feature (758)..(758): n equals a,t,g, or c
  misc_feature (1726)..(1727): n equals a,t,g, or c
acggagtcaggatacncncctctggtgggcagagaggatagtaagccccacagtctgagaggtgactccataaaacaagaagaggcccagaaaagctttgttgacagctggagacagagatcaaacactcaaggttccattttgataaacctgctcctgaagcagcctttgatcccagggtcatccctaagcctttgccacctcctgagtagtagttctgagtctcctgctggcacccccctgcagccaccagggtttggcagtaccttggctggaatgtcaggcctcaggaccacaggttcttatgatgggtcattttccctctcagccctgagagaagcacagaacctggncattcactggactgaatctggttgcccggaatgagtgctcacgtgatggagacccagcagagggaggcagaagggccttcccactctgccagcttcctggagccgtgcatttcctcccccttgtacagttcttcatcggcttacactgccaggccctgcaggacttggcagctgctaagagaagcggagcacctggggactcaccgacacattcctcctgcgtgagctctggggtagagaccaaccctgaggactcagtgtgcatcctggaaggcttctctgtgactgcacttagcattcttcagcacctggtgtgccacagcggagcagtcgtctccctattactgtcaggagtgggggcagattctgctgctggggaaggaaacaggagcctggttcacaggnttagtgatggagatatgacctcagccctaaggggggttgctgatgaccaaggacagcacccactgttgaagatgcttcttcacctgttggctttctcttctgcagcaacaggtcaccttcaagccagtgtcctgacccagtgccttaaggttttggtgaaattagccgaaaacacttcctgtgatttcttgcccaggttccagtgtgtgttccaagtgctgccaaagtgcctcagcccagagacacccctgcctagcgtgctgctggctgttgagctcctctccctgctggcggaccacgaccagctggcacctcagctctgttcccactcagaaggctgcctcctgctgctgctgtacatgtacatcacatcacggcctgacagagtggccttggagacacaatggctccagctggaacaagaggtggtgtggctcctggctaagcttggtgtgcaragccccttgcccccagtcactggctccaactgccagtgtaatgtggaggtggtcagagcgctcacggtgatgttgcacagacagtggctgacagtgcggagggcagggggacccccaaggaccgaccagcagaggcggacagtgcgctgtctgcgggacacggtgctgctgctgcacggcctatcgcagaaggacaagctcttcatgatgcactgcgtggaggtcctgcatcagtttgaccaggtgatgccgggggtcagcatgctcatccgagggcttcctgatgtgacggactgtgaagaggcagccctggatgacctctgtgccgcggaaaccgatgtggaagaccccgaggtggagtgtggctgaggccctgagtgtccagccacatggtggcaccagcaccactcctttccttaccacatcaactgattaaagcagtgaccagcaggaactgcccagagaactggaaaaaaaaaaaaaaaaaaaaaaaaaaaaaaaaaaaaaaann

SEQ ID NO: 1164 - DNA, 1223 bp, Homo sapiens
tctgattggtgacgggtgaggcggcccgaaatcgtaggacttccgaaagcagcggtggcgtttgcttcactgcttggaagtgtgagtgcgcgaagatgcgaaaggtggttttgatcaccggggctagcagtggcattggcctggccctctgcaagcggctgctggcggaagatgatgagcttcatctgtgtttggcgtgcaggaacatgagcaaggcagaagctgtctgtgctgctctgctggcctctcaccccactgctgaggtcaccattgtccaggtggatgtcagcaacctgcagtcggtcttccgggcctccaaggaacttaagcaaaggtttcagagattagactgtatatatctaaatgctgggatcatgcctaatccacaactaaatatcaaagcacttttctttggcctcttttcaagaaaagtgattcatatgttctccacagctgaaggcctgctgacccagggtgataagatcactgctgatggacttcaggaggtgtttgagaccaatgtctttggccattttatcctgattcgggaactggagcctctcctctgtcacagtgacaatccatctcagctcatctggacatcatctcgcagtgcaaggaaatctaatttcagcctcgaggacttccagcacagcaaaggcaaggaaccctacagctcttccaaatatgccactgaccttttgagtgtggctttgaacaggaacttcaaccagcagggtctctattccaatgtggcctgtccaggtacagcattgaccaatttgacatatggaattctgcctccgtttatatggacgctgttgatgccggcaatattgctacttcgcttttttgcaaatgcattcactttgacaccatataatggaacagaagctctggtatggcttttccaccaaaagsctgaatctytcaatcctctgatcaaatatctgagtgccaccactggctttggaagaaattacattatgacccagaagatggacctagatgaagacactgctgaaaaattttatcaaaagttactggaactggaaaagcmcwttagggtcamtattcaaaaaacagataatcaggccaggctcagtggctcatgcctataattccagcactttgggaggccaaggcagaaggatcacttgagaccaggagttcaagaccagcctgagaaacatagtgagcccttgtctctacaaaaaaaaaaa

SEQ ID NO: 1165 - DNA, 1249 bp, Homo sapiens
  misc_feature (1138)..(1138): n equals a,t,g, or c
  misc_feature (1196)..(1196): n equals a,t,g, or c
  misc_feature (1202)..(1202): n equals a,t,g, or c
  misc_feature (1225)..(1225): n equals a,t,g, or c
acgtcccgcgcgtcggcggccgcggagcagcgcagggagccaggcgggctgccggcgggtgtgaagaaaaaaatgacactccaatgggctgcagtggcaacctttctttatgccgaaataggactcattttaatcttctgcctaccttttattcctcctcagagatggcagaagattttttcatttaatgtctggggtaaaattgcaactttttggaacaaggctttccttaccattatcatcctattgattgttctatttctagatgctgtgagagaagtaaggaaatattcctcagttcataccattgagaagagctccaccagcagacctgatgcctatgaacacacacagatgaaactttttaggtctcaaagaaatctttacatttctggattttccctatttttttggctagttttgagacgtctggttacgcttattactcaactggcaaaagaactgtcaaacaaaggtgtacttaaaactcaagcagaaaatactaacaaggctgccaaaaaatttatggaagaaaacgaaaaactaaaaaggattttgaaaagccatggtaaagatgaagaatgtgttttggaagcagaaaataaaaaactagtagaagaccaggagaaactgaaaactgaattaaggaagacttcagatgccctttctaaggcacaaaatgatgtgatggaaatgaagatgcagtcagagagactttcgaaagaatatgatcaactcctgaaagaacactctgaacttcaggatcgtttagaaagaggcaacaagaaaagactgtgaactttataaaagacacttgcaatatactgtgtcaaaatgataattttgttatgttagcctctagaaaatttaagttcagaaaaatgcactatgaccggttcgtaatttttttaatgccacacataggttgtattgtaatggcattatcaaaatatttgatgatgtttcagatatattgcaaagtctgtattccagctcttaagaaaaatataagcatgttaaataccatatttacatattgataatgtcattggtatatggtggctgtttaccaataaaaggaaaaaattcattaaccggttgcttccaaaattaggaagwtytamgttgcatgaaaccnttaataggccttggaaagctttggattaaggttttccaggtaattaataacccctttnaattcnggatggatggtgtgtttggaaanaggtgttccatttccggccaattt

SEQ ID NO: 1166 - DNA, 455 bp, Homo sapiens
gcagatccctatcatcttgggaaacagtagcccagaggttcaggaagatgttaacttaaatgttcggggtgccccagtctgttcagcatggctraaatccacactccgtattcttccttgaagaaactgttatctttactcaatggcttcgtggctgtgtctggcatcatcctagttggcctgggcattggtggtaaatgtggaggggcctctctgacgaatgtcctcgggctgtcctccgcatacctccttcacgttggcaacctgtgcctggtgatgggatgcatcacggtactgcttggctgtgccgggtggtatggagcgactaaagagagcagaggcacgctcttgtttgttggagatgtggccttggaacacaccttcgtgaccctgaggaagaattacagaggktacaacgagccagacgactattctacacagtggaacttggtcat

SEQ ID NO: 1167 - DNA, 2796 bp, Homo sapiens
  misc_feature (2419)..(2419): n equals a,t,g, or c
acagggctattgggtacgggccccccctacgagttttttttttttttttttttttttttttttttttttttttttttttttttttttcactttgcaatttcaatgtttatttctgataccaaaacttgacagcacacaaggggaaaaaaagcagtagacaaggaacagcaaataaatttatcttgcatgccactttcagtcaacaggatgtggctctctagatagctgtgtttagaaggaatctgaggcttcagcctcacacaggggaaagactactgcgattgatagcaatatccaacatctcactcaacccagaagaaaccaatggcaccaaagttggcagcgaagttggcactggctgtaccaccaggaccaataatgggaccggcaaaggtctgagggaatctggagcgggcattctggtggtatctggcccagaaggtaaatggaattctggaccagggatctccaaaatctccttcctcatcccaggtcagcagctcaaactcaatgtcatcccagctccagggcccagacacagcctcatctccaattcccatgcgggttcttgcttcagcccgggcttcggcctcagctgcagcagcatccagagcatccaaggcctcatctgcagcctccatgaactgtgcagtccagtcacgagggtctcttttctgaacctctgcaatgaatctcagcactttcatcttgctagtctcatggtaggaacggaggccccagaggaactcatactccggggggttgctgttgggcactcgtctgtagtccaggtatttctgctttacaaactcataggtgagaagtttccttagatctccaaggaggggatgtctcaccccaggacgcagtcccatcttgcgtagtgcctcccagaggacagcctcactggcacggttgccattcatgaagatgacacccagaatcaccaagaggagaccgagcttgggtgtgtctttggtcgttcccagtatgccagccagggactcgggggtactgatgagaatatacaggtgttcttctttgtcaatttctttcagttgaatcccaaatttcttctctaggacaaagcatgcacgttcaatgatttctggataaacatcagtgtattcacggatgatatctctcagcatttctgagcgcttgatgggcacctttgtgtagtccttaagcatcaagtacttgaccaacttatttgctctttcctgaagaagggccacatctcggggctgtgcagcacctgggttctgtgaggcacgcgagttgggagaagggcgcaggttaggcgaggggcgcaggttctgccagtcaggtggaattggccaatcagcggggatccagtcaggtggtagtggccagtcagtgggaagtggccaatcaggtggcagtggccagtcgggtggtagcggccagtcaggaggaccttgccagtctggaggaccctgccagcccggtggggtctgccatccaggtggagtctgccatccaggtggattctgccaggccagtggattcggccagacaacagggccgggccagacaatggggtttggccagatcactgggttctgccagattactgggtttggccaaatcactgggttctgccaagcgactgggttctgccaggctggtggggtctgcctagctggagggctctgacgtgctggtggggtctgcctggctgtctggttttgccagcctgaggggttctgccaagccaatggcgtctgccagagcacattggggggtgcgccaggtgggttctgagtggtcactggaactggtgcagacctccaggtccctgcagccagtggggcccgcctctgatccccactgctgttctcttcaacattcaagttattaatcttgcgggtcctcttgccccgaattattgtccgggactccagattctgagcctgggaaccatctgctgatgtctgtgcagttgcaccgtcaggttcagagatacctgggtcggtctctatgtcagcctgggaagtggccattttggcctgatttacattctgggtctgggtatcagctgttggggccttagtggtatcattccaagccttgaaaggggtcttaggcctgctgttggccaggtcattggcattgagagactgagagaaattgtaggtggcatttgggcccactttagtagtggcattctgggccttgaaggccatctcagacttgttagcagctaactcaccagtggttgctgcctgggaaaaatcataggcagcatttggaccctttggggtagcattttgggacttaaaggctgccttgggctgcgtgttgggcacatccttggcattatgagcctgagagaaatcatagacaccatttgggccttttgtggtggcattctggactttaaaggctgacttangcctagcggcagctgctgaaacctgaatgtcagccatctcattggcagttgggggctgtgaactctggggactagcagctgcggtggcctggttagtaggtggagcctctgagatctggatggcctccatcaaggtctgcataagcaaggcgctgtcttctacggaggcctcagcctggaagccgaggaggcccgcaccacagtccattttctgagccatggctcctgtccctctggcaagagcggagcctgggggcttgcctcaggccccaaccccaaccccctcgctgcctcccttcttcacgactcagaggatcgggattgctgggctcggctctcagcagccgcactctctccttgtccaggagaaaatgccc

SEQ ID NO: 1168 - DNA, 680 bp, Homo sapiens
  misc_feature (267)..(267): n equals a,t,g, or c
  misc_feature (357)..(357): n equals a,t,g, or c
  misc_feature (680)..(680): n equals a,t,g, or c
agcagaccctgtccagccaggagcgcatggaggaggactccttgctggctgccttgcaccggcagttcctgatgtgggcccagtcccctttgtkaagagcactgacccttcttccagctactttgtcatcttgaactctgctgccttctttaaggtgggaagccagcttgaggtgctggttcatgtgcaggattttcaaagaaagcccaagaagtatggtggrgactacctgcaggccagaattcactccctcaagctgcagstggngytgtgggcagggtggtggrttaccagaatgggttttacaaggttttctttactttgctakggcmaggcaaagttaaagtatccgtatcnctggtccaccccagtgaagggatcagagttcttcagcgcttacaggaagataaaccagacagggtctatttcaagagtctcttccgttcaggaagaatttctgaaactactgagtgcaacgtgtgtcttcctgggaatctgcccctgtgtaactttacagacctctacactggggagccctggttctgcttcaaaccaaagaagctcccttgcagcagcagaattacccatttcaaaggtggatacctgaaaggtctcctaaccgctgcagagagtgctttcttccagagtggtgtcaatatcaaaatgccagtcaactccan

SEQ ID NO: 1169 - DNA, 1566 bp, Homo sapiens
  misc_feature (3)..(3): n equals a,t,g, or c
  misc_feature (7)..(7): n equals a,t,g, or c
  misc_feature (9)..(9): n equals a,t,g, or c
  misc_feature (577)..(577): n equals a,t,g, or c
  misc_feature (723)..(723): n equals a,t,g, or c
aantaantnaggaaaggtgttgcagcacaggcagttttcttctccttctgctcccctgtttctcatacccccaaactcagatgctggagctcaggcccgccgtgtgtgcacccaggcaggagcgggcgctgtccaggctgggccgcccccttggctctccctcctgttccaggggagccataggagggaaagcaggtggcccgggggggatatgggggccccagccctgtcccaaagctccctgctcggctgcccctcgcccgcctttatataaattctctgaatcacctttgcatagaaaataaaagtgtttgctttgtaagaaaagtctggaaagtagcagaatcatctcaaggtgtcaaaggagccttcagtcatcgtctggggggcaggacaggcagaggggttggtccacttaggtgttgcctgtgggacccgggccttcctaggagggggccagggactgcggcaaggtaggggacagcgcgatgtttgagggcagagatgtgatttggggtggaggagccacgttctccggaggcagcgactggaagaagtacaacttacagcccatggncaggagggcgtggagcagcacgaccacggacagcagcactgtggccaccagcctggtgtcctcacggaccacgggccagagggtgawtaccagcccggyggytgacaggcccagggccagcgcccccaaagagccactgtagccanaggcacagggaatgagccacaggaccaccatggggatgaagacaaagagggagtagccgtagatgcacacagtctccaggaaggtgtagggccccatgcgctcctggacacccttgcgccaccgcaggaagccccacagggccaggggcaccagccacgtatagcagtagatgctgatgcctgccacggtcaccttgtggaactgggggctgtagtggatggaggggtccctcctctgggccagcaccagcgtcaggttgccagtgacggccaggacaaaggccaacgtggcacagatccagaaggggccatacagatccggccgattccgsaratggtgccgcacaaagttgtggccaggccggggcagcagtgagcctttgatccggtccaggacctgtgaggtgtccacgtcaaagaagctctgatagtagctgaaggtccagaatcccggctgctgctgctgctgctgctcctgcaggagcgcggccttgtcactctcctcctccacctcatcctcggctccatagctgccacctgarcccacggccacagccacgtgcccttgtggggtcagctgatcgcttctgctggtggtggctgcatctggggtgtcagccagaagattagtggcctcctcgaattcatggaaggtcagctcgtcggccgatgccatggtcgttcaggggcgtctccgcatccctcgctggcgaccaactgcacccacggaggcttgaactcgtcgtcccgtccccacaggtgcgtccgccccccctcacctgmrgccacctgggccggcgtggctgggctctactgcctgccgtctcgcctacccgtcagact

SEQ ID NO: 1170 - DNA, 1485 bp, Homo sapiens
gatcaaaccggacacaaggtgctgtgctccatcatcgccggtaccttgcactatctctacctggccaccttcacctggatgctgctggaggccctgtacctcttcctcactgcacggaacctgacggtggtcaactactcaagcatcaacagattcatgaagaagctcatgttccctgtgggctacggagtcccagctgtgacagtggccatttctgcagcctccaggcctcacctttatggaacaccttcccgctgctggctccaaccagaaaagggawttawatggggcttccttggacctgyctgcgccatcttctctgtgaatttagttctctttctggtgactctctggattttgaaaaacagactctcctccctcaatagtgaagtgtccaccctccggaacacaaggatgctggcatttaaagcgacagtcagctgttcatcctgggctgcacgtggtgtctgggcatcttgcaggtgggtccggctgcccgggtcatggcctacctcttcaccatcatcaacagcctgcagggtgtcttcatcttcctggtgtactgcctcctcagccagcaggtccgggagcaatatgggaaatggtccaaagggatcaggaaattgaaaactgagtctgagatgcacacactctccagcagtgctaaggctgacacctccaaacccagcacggttaactagaaaaatcttctgaataagatyttccctctttgcccgtggaaaatctgaacaatctttgagccatctagaggggaaagaaaagactttgttctgtgtgtttcaagaaattcaccatgtcagcaatatgaaggatgttatggaaggcgtgcttggcattcaattcctgcagaaaccggaaatcttccaygccctgcaatgtgctcatcaaactctcagcatatggacggccagctgtggcccatatcttggycactctgaagcacamtatttatgaagctatagaacgttaagacctctttcacagcctctccttcctacaaagactcctccaaatcttaaaatgaagcaggaaaacgagcctaagaggactttcataccgacaacatctgaaaggactagaatgttcacaccacgatctggatttcttaattttttgtttttgtttttgttgttctctagttctacgggtttgattatttagtcatgtgaaaaatattgattactcacacatagatcaagagagacrcggctcctgccttcatggagcttttaggggaaaatgaagtggctcttgcagctagagttgactcagaagccgaaattcctagaaatcaggtttctactgctaggcaattgaagtataaactattttataaacactgtcttctttcatcttcacaccaacatgcagaaaagtttctaatctcagatcagggatgtgcaacaaattccatttcaaaggaatgacctgcaaaactcctaaatattccaagcaaatgccctt

SEQ ID NO: 1171 - DNA, 1275 bp, Homo sapiens
ctcgagtttttttttttttttttttttttttttttttagttcaacctcattttaatgacatatacaatgtgctcattttagcattatatgtagtggccagaaactgtgccaaatatcaaaataaattgtggtatgtttatacaacagaatacagcaatgacaatggatgaactaatggtacacacaatttgtggattaaccttataactgtcaggtaaataatccacacacacaagtgcataatgtataaatccatttatataaagttcaaaaacaggcaaaatgaatcaaaggtgatgaaactcagaaaaactgctatgtttgggaggtaatggctgagaaaaggcaggaatgaggctgtgaagtgttgccaatattctacatcttcactttggcagtggttacacaggtgttcacgacataaatatctatcagactgtatacagttttgtccactttttgaatgcatggtatacttcagtaaaagtttactaaaaaataaaaataaaaaagacattgtgcttcttgttaccaaaataaaaccatggcagatattttggtaaatattctatttttcccatcttctactgttgctgatgacagggatggtattcaggtgaacactttgtcacttagaatatcatttagctttagcctgtgcagccaatgcagcttcttcacgccacttagctttctttgccaagttccaacttgttaaggattcatgtcgttctacagcccttttggctgacactatcacagcaaagcaggcgataattgtgagtccaatcattatgtaacaagctttcactcgagctttgtttcttgcggtgtctatcatttctggcgggatccgaggcgggatctcctccatcgatttgaaacgccctgtccacagcaggattttcttgtcgaactgcgaaggcctgcgctgcgtggggactcggtgaatctccccgtgaccttggggcccagaattgctgggggccccgccgctggagtagcaggggagaccccggggcggaagagccggtgcgggccgtcgcgtggcctcgagaggcgccccggggccgcagcggactgttagcccgcggccaaggcgcagtaggctcccgaccgccctgagcatgctgcccgcttgtcccgcgccgcacccgcactccggacccagccacaggcgttgtccccgcagctctcctcgtcccgccccggcctgccgcgcgctggagagcctgggacgtgcagctggaacccctggcgctcgcacactcagct

SEQ ID NO: 1172 - DNA, 777 bp, Homo sapiens
  misc_feature (699)..(699): n equals a,t,g, or c
  misc_feature (754)..(754): n equals a,t,g, or c
gggcatggctgacgacgcgggtttggagaccccgctgtgttccgagcagttcggctccggggaggcacggggctgccgcgccgccgcggacgggagcctgcagtgggaggtcgggggctggcgctggtgggggctctccagggccttcacggtcaaacctgaaggacgagatgcgggcgaagtgggggcttccggggccccctcaccgcccctctccgggctccaggccgtgttcctgcctcasggcttccctgatagcgtcagcccggactacttgccctaccagctgtgggattccgtgcaggcgtttgcttccagcctctccggctccctagccacccaggcagtcttgctgggcataggggtggggaacgcaaaagccactgtttcagctgccacggccacctggctcgtraaagattcaactggcatgctgggccgcatcgtctttgcctggtggaaagggagcaaactggactgcaatgccaagcagtggaggctttttgcggacatcctcaatgacgtagccatgttccttgagattatggctcctgtatacccaatctgtttcaccatgaccgtstccaccagcaacctarccaagtgcatcgtgagtgttgctggtkgggccactcggctgccctgaccgtgcaccaggctcggaggaacaacatggctgacgtgtcacaaggacagcanccaggagacgctggtgaacctggcggggctcttggtcagcctcctgatgctcctntggtgtcaagttgccctggctta

SEQ ID NO: 1173 - DNA, 1410 bp, Homo sapiens
aatagccatccaccacatggccaaataaaccatgacaggaccaattgccagtcagcaatgagaagcagctaactgttgacatgccaaaagcttgcacgggcctcaaggttgtcatgcggcatgaaagacactcatctcaggccacacaggattccatttatccaacattcctgagacaacagaattctggtgatggagcaaaggtcagcggtggccaggggctgggtgtggctatgaaggggtggctgccttgtgatgattcaatatgctatgtttttcctttgtggttttctgtatctatgttttatcttattttttttgagctctgtcacccaggctggaatcagtggcacgatcttggctcactgcaacctccacctcctgggttcaagcaattctcctgcctcagctgcccaagtagctgcgactacaggcatgcgccaccatgtccggctaatttttgtacttttttttgagacagagtttcgttcttgttgcccaggctggagtgcaatgccgcaatctcggctcactacaacccccacctcctgggttcaagagattctcctgcctcagcctcccgagtagctgggattacaggcgcccactgccacaccccgctaatttttgtatttttagtaaagatggagttgcaccatgttggccaggctggtctcaaactcctgacctcaggtgatccacccgcctcagcctcccatagtgctgggattacaggcatgagccaccatgcccggcccaatttttgtatttttagtagagacacggtttcaccatattggccaggctggtctcgaacttctgacctcggatccacccgcctcagcctcccaaagtgctgggattacaggtgtgagccactgcgcctggccctgtcaagtattctttgaggactgggcaccaggtccttgtgaagcaggtagtgtgtgtyacctattggacaaatgcccaacaaccccacracacatgttattgttgttgaagtgcttgatttacagacagggaaaccgaggctaaagaaggttaacggacctcatgtctaagactgcagaatgggtgagtcaggatttgaacccacacccacgttttcactttgtctgtgcaggaagggtatctgggctgtgagggggaggagggtgcccttctcataccaacaaatagctccggtggccctggggggactccttggccatcagggtctccgccagcgcctygtacagctcatccaaaggttccgtgtggacagcctcgtgctgggggcagacagagtgagagcttgtttgctttwgttctaatcygtaammatggccagatgattttcaccaagtttgcaggggagatttgggatggaatggtgtgataccagccagcttgcatataaaatattcactt

SEQ ID NO: 1174 - DNA, 1812 bp, Homo sapiens
ggcaggcacgaggtggcctagagatgctgctgccgcggttgcagttgtcgcgcacgcctctgcccgccagcccgctccaccgccgtagcgcccgagtgtcggggggcgcacccgagtcgggccatgaggccgggaaccgcgctacaggccgtgctgctggccgtgctgctggtggggctgcgggccgcgacgggtcgcctgctgagtgggcagccagtctgccggggagggacacagaggccttgttataaagtcatttacttccatgatacttctcgaagactgaactttgaggaagccaaagaagcctgcaggagggatggaggccagctagtcagcatcgagtctgaagatgaacagaaactgatagaaaagttcattgaaaacctcttgccatctgatggtgacttctggattgggctcaggaggcgtgaggagaaacaaagcaatagcacagcctgccaggacctttatgcttggactgatggcagcatatcacaatttaggaactggtatgtggatgagccgtcctgcggcagcgaggtctgcgtggtcatgtaccatcagccatcggcacccgctggcatcggaggcccctacatgttccagtggaatgatgaccggtgcaacatgaagaacaatttcatttgcaaatattctgatgagaaaccagcagttccttctagagaagctgaaggtgaggaaacagagctgacaacacctgtacttccagaagaaacacaggaagaagatgccaaaaaaacatttaaagaaagtagagaagctgccttgaatctggcctacatcctaatccccagcattccccttctcctcctccttgtggtcaccacagttgtatgttgggtttggatctgtagaaaaagaaaacgggagcagccagaccctagcacaaagaagcaacacaccatctggccctctcctcaccagggaaacagcccggacctagaggtctacaatgtcataagaaaacaaagcgaagctgacttagctgagacccggccagacctgaagaatatttcattccgagtgtgttcgggagaagccactcccgatgacatgtcttgtgactatgacaacatggctgtgaacccatcagaaagtgggtttgtgactctggtgagcgtggagagtggatttgtgaccaatgacatttatgagttctccccagaccaaatggggaggagtaaggagtctggatgggtggaaaatgaaatatatggttattaggacatataaaaaactgaaactgacaacaatggaaaagaaatgataagcaaaatcctcttattttctataaggaaaatacacagaaggtctatgaacaagcttagatcaggtcctgtggatgagcatgtggtccccacgacctcctgttggacccccacgttttggctgtatcctttatcccagccagtcatccagctcgaccttatgagaaggtaccttgcccaggtctggcacatagtagagtctcaataaatgtcacttggttggttgtatctaacttttaagggacagagctttacctggcagtgataaagatgggctgtggagcttggaaaaccacctctgttttccttgctctatacagcagcacatattatcatacagacagaaaatccagaatcttttcaaagcccacatatggtagcacaggttggcctgtgcatcggcaattctcatatctgtttttttcaaagaataaaatcaaataaagagcaggaaaaaaaaaaaaaaaaaaaaaaaaaaaaaaaaaaaaaaaaaaaaaaaaaaaaaaaaaaaaaaaaaaaa

SEQ ID NO: 1175 - DNA, 647 bp, Homo sapiens
gcggccgcctggcacacactggtcccctggcacaggtaacaacagaggaccctcagggagagaaggctcccagcttcctctacaccctgagaaccgaagcctcggctcatctccggccgacgcttcaccttggccttgaacaccacctgggcaaagtagaggttcataagcgtcaaggtgaagaactgcaggcagacggggcagcagtagagaagccagaagggcaagggccccaggcggttggcgcggggagtatctcggaagtagaaggagaagagggtggtacgcaaggcggcccagagcagacagagggccaggaacaccgtctgatagctgagacgcttgtgcccatacagaagcaccagccagagctgggcatagacggagaagaagagcagggcatacagggtggtgtaggcagctgtcagccccagggtcacagcaggtggcagcgcaggcaccagcccggcagcaggcaccaggccagacaggttactctccatgtcagggagggaggcctggccggccgcctgccaggcgtgaagcccccacgggcctacggtcctccctcaccgggtccccggccctcctcccgcgcccgggcagccatcccagccagggaggaggttcccggacgcgtgggtcga

SEQ ID NO: 1176 - DNA, 2007 bp, Homo sapiens
  misc_feature (1973)..(1973): n equals a,t,g, or c
  misc_feature (1994)..(1994): n equals a,t,g, or c
  misc_feature (2005)..(2005): n equals a,t,g, or c
gatcacccctttgtttgccatttcctacaggtgaaacgccatcattaggattcactgtaacgttagtgctattaaactcactagcatttttattaatggccgttatctacactaagctatactgcaacttggaaaaagaggacctctcagaaaactcacaatctagcatgattaagcatgtcgcttggctaatcttcaccaattgcatctttttctgccctgtggcgtttttttcatttgcaccattgatcactgcaatctctatcagccccgaaataatgaagtctgttactctgatattttttccattgcctgcttgcctgaatccagtcctgtatgttttcttcaacccaaagtttaaagaagactggaagttactgaagcgacgtgttaccaagaaaagtggatcagtttcagtttccatcagtagccaaggtggttgtctggaacaggatttctactacgactgtggcatgtactcacatttgcagggcaacctgactgtttgcgactgctgcgaatcgtttcttttaacaaagccagtatcatgcaaacacttgataaaatcacacagctgtcctgcattggcagtggcttcttgccaaagacctgagggctactggtccgactgtggcacacagtgcggcccactctgattatgcagatgaagaagattcctttgtctcagacagttctgaccaggtgcaggcctgtggacgagcctgcttctaccagagtagaggattccctttggtgcgctatgcttacaatctaccaagagttaaagactgaactactgtgtgtgtaaccgtttcccccgtcaaccaaaatcagtgtttatagagtgaaccctattctcatctttcatctgggaagcacttctgtaatcactgcctggtgtcacttagaagaaggagaggtggcagtttatttctcaaaccagtcattttcaaagaacaggtgcctaaattataaattggtgaaaaatgcaatgtccaagcaatgtatgatctgtttgaaacaaatatatgacttgaaaaggatcttaggtgtagtagagcaatataatgttagttttttctgatccataagaagcaaatttatacctatttgtgtattaagcacaagataaagaacagctgttaatattttttaaaaatctattttaaaatgtgattttctataactgaagaaaatatcttgctaattttacctaatgtttcatccttaatctcaggacaacttactgcagggccaaaaaagggactgtcccagctagaactgtgagagtatacataggcattactttattatgttttcacttgccatccttgacataagagaactataaattttgtttaagcaatttataaatctaaaacctgaagatgtttttaaaacaatattaacagctgttaggttaaaaaaatagctggacatttgttttcagtcattatacattgctttggtccaatcagtaattttttcttaagtgttttgtgattacactactagaaaaaaagtaaaaggctaattgctgtgtgggtttagtcgatttggctaaactactaactaatgtgggggtttaatagtatctgagggatttggtggcttcatgtaatgttctcattaatgaatacttcctaatatcgttggctctactaatattttccaatttgctgggatgtcacctagcaatagcttggattatatagaaagtaaactgtggtcaatacttgcatttaattagacgaaacggggagtaattatgacacgaagtacttatgtttatttcttagtgagctggattatcttgaacctgtgctattaaatggaaatttccatacatcttccccatactattttttataaaagagcctattcaatagctcagaggttgaactctggttaaacaagataatatgttattaataaaaatagaagaagaaagaataaagcttagtcctgtggsnttaatttggcaaaattttacngaagtctttcngt

SEQ ID NO: 1177 - DNA, 1118 bp, Homo sapiens
ggaaccgtgttaagacccagcacccctattcccaggagcttctggcctgaccatctgcagccaaagcactaacagggacagatatgggaatgtccacctttgatccgcatcctkcacaatagtggtcccaccatggctgccacttttttatactatttggagaaaagaccttgtataaattcgaggcccgartgactaacgtctctgtcacacggaaatgggtacttggtggcatagagaaacacaattagccactttttcagctacacttctcactcagctgcaccctacacttctcactcaggtgcacccccttctgctgtcctttccccaacgtactgggtcccgagcgtggtgggtatttgccacactgggtgccagctcagcagccccccacctctctttattctctccaaagctggtctttctgactatcattgtggtagggggaggacagatgctaaaggtggaagctgacctggagaaagagacacacggggtgactgtggcaaaggacagctggaaaagaaactctatcacttcttcattggcaaccacaaggcacctgaggccatggcactcccaraggctgtgcgcagagccaagcctctcaacctcttctggccctgcgtcctgcagcgaagtctctgctgtaagacagtagactccttcgatgaggtgctcaaaaatgctacccggggtggtggtgtctggcttgcagtctggcccagttcagagaaagttgcagagatcaggggccaaggatgtcatagccccaggttgtcctcagggtcccaatcctagggcagggtgtgcatggaagcaagaactatggaaacctagctccagtctgcaggctctgagcccctagttcctcactccagcggggctccctcactgcacagaacccaccccttctgtgtgggcactgctgaccacasagatgacccagacccaaagagcctggcagaagctctgtggttggagctgggctccgtctccaggtctggttcagggggatcaggaaggctcttttccacctgtggcttcactggccctttgagatttcctatctcaccgttacttcagttacccttgcagggggccagggagtcaac

SEQ ID NO: 1178 - DNA, 1317 bp, Homo sapiens
agggcagggttcagaaagactgaatgtaaagctgggctctgagtctgccaggcccttcgtgtgttgctctgcacattaattaaagggtctacgaggtcagcaaggacgcccaagaagactcagtcatgaaaggtgaactgctcctgttttccagtgtgattgtcctgctccaggtggtatgcagctgcccggacaagtgttactgtcagtcatctacaaattttgtagactgcagccagcagggtctggccgaaatcccttcccatttacctcctcagactcgaacgctgcatttacaagataatcagatacaccatcttcctgcttttgcatttaggtcagtgccatggctcatgaccttaaacttgtccaacaattccctttcaaatctggcccctggagctttccatgggcttcagcacttgcaggttttaaatctaacccagaattcactcctttccctggaaagcagacttttccattccctccctcagctgagggagcttgatttgtcatcaaacaacataagccaccttcccacatccttgggagagacttgggagaacctaactatacttgcggttcaacaaaaccagcttcagcagcttgatcgagcgctcctggaatccatgcccagtgtgaggcttttacttctcaaggacaacctctggaaatgcaattgccacttgctcggtcttaaactctggctggagaaatttgtctataaagggggactaacagacggcatcatctgtgaatcaccagacacctggaagggaaaggacctccttaggatccctcatgagctgtaccagccctgccctcttcctgctcctgatccagtgtcctcgcaggctcagtggcccggctctgcccacggtgtggtcctgaggcctcctgagaaccacaacgcgggggagcgagaactcttggagtgcgagctcaaacccaagccaaggccggccaacctgcgtcatgccattgccactgtcatcatcactggcgttgtgtgtgggattgtgtgtctcatgatgttggcagctgccatctatggctgcacctatgcggcaatcacagcccagtaccatgggggacccttggctcaaaccaatgatcctgggaaggtggaagaaaaagagcgatttgacagctcaccagcctgagagcttttgtctcaaataggattggtcattgcaggccagaagatagtgtctgagtagggctgatgtgtttcctgttagtctgattttgcttttgccaaaagacaaaaaaaaaaaaaaaaaaaaamactcgaggggggcccgtacccaatcgccg

SEQ ID NO: 1179 - DNA, 882 bp, Homo sapiens
tggagagtcaaaggcatctcccttcattagctgctctgagcatcaagaattagaagtctttcagtggaattgtacaagagtccctttgaagataataatcttggctcagtttgtataaactgtcaaattttcaaataataggtagggggctttcactaggaaaatcatgtgctcagaagaggaaatgactcgtagtcaggttcaggagttagtggagtatttggactttggtactgctgtcttccaaggtagctctaagttttgatgtgtgggcttctgagtttatattctgaaaggaaatacacttcttttgaacatccccactaggttcttttccattgtcaataaggagcatcagccagtgaatctgtttcaggtttccattctgcagaactcctccaaagcatgtgctagtggcaagacagtggttcttatgatgttttcccttaacttttccttgtatgttcttgggtggttcctaagggaaagggaagcacatgatcatgggaatgatagcccagaacaaaaagaaatcttgtcttaccacagtgttttataggagagattgggagaaatcatcctgttttctctgtgacctgatttcagaagagactgatccaaaaattataacggcagggaacctagtgcatttggcactgagatttaaatgcaaccagaattgtcctcaaggcccagccataaaagcattgtctctctygaccttctggtatcttgttagagagcttttcactgtgaggaagtgtggaaaaatagctctgtgtgtgtgtgtgtgtgtgtgtgtgtgtaatctgttaggttggggataggttttctgctagccaatattaaaagagacctgcaataaaaaaattaccctgaaaa

SEQ ID NO: 1180 - DNA, 1562 bp, Homo sapiens
  misc_feature (7)..(7): n equals a,t,g, or c
  misc_feature (12)..(12): n equals a,t,g, or c
ccccccncgggntttttttttttttttttttttttttytgggaatgtcactttatttggatttggttcgtggggtgggggtctcagaacaaactagaaggccttacataggcagctgggcccagccagctgggctcctgacccaggacttcattctggcctgtccccccaaagcatagcctccaccttctcacccttctccagaggagtctcctccacccccacaggagctgtggacaggccctgcagccctagggaaggaggaagggtcctgcaagtagacactaaggcacagcgcggcccaggggtcataagggctcttctggcggtggcatctgctggggcttccagctgggcgggggctccacgcaaccgctgaccatccagaagtagtttgggtgcacctggccctgcacggcctcgctaaccatcaattccccatccactgcaaacacacctttcccatccttgggctccaagcggaaggcgaccacgggcacatataccaagtaggggcattcatactccatatgcctgcccttctccatggccaggaagaggcgcagcagcatggcacgagacactcccgcccgcacgtagaacagatgcatgacgccagctgcacagcggcccatgggtgcagcaaacatctcactgcccaggtgcgagtgcagcagtgccaggactagcacaaagtcctcgtcgggcaccactgtccagtgagagggcactggctcctccagtggcacaaggtgtgcatctaccgggccctgctggaccacaacgggggaggcaggtgtcttggaacccactcttcctacagggaggtaggccagtcggccgcggtaggtgcgcagggctgccagacgcaggaaggtgcccagagtgaagcgcatctcccccagacgccgatacttctcactctctaggtccacatcagcaatgaagccccaggccaggctgagcacagagaagaggcgcagccccgaagccgtgtgcagagacagcaggttcatgggtgacagcagccggcggcacagcaatagcgtgcagttggtcaggaggtcttcattggtgacctgctcatagccagcataatggttcaaggaagctgccagcgcgttgccagagcctgctgggaggctacacaggggcttctggatggcggtctcccagtcaggccgctccatgagcccgttcaccacctcgtgcatcagcccgtctccagacatgaccaccagagcgtcccagcggcccagctcctccgaccgcaccagctcccgcgcgtggttccgccgctcagtgagcatcagcgtgaaggagatttcagcctcagccaaaaggggctgcacgtgactccggaagagctgcaaggccttgcccttgccgccgcgcgggttcagcagcaccagcacgcggcagggccgcgggagcacgccccgggggccgcccgctgagaaaacaaaaccaaagaggccacgtccgcaaccgaccactagggggccacgggtaacaatggggcactagtgtgggaacttggtgcccgaaacaccccggtaattc

SEQ ID NO: 1181 - DNA, 1591 bp, Homo sapiens
  misc_feature (1565)..(1565): n equals a,t,g, or c
  misc_feature (1576)..(1576): n equals a,t,g, or c
acccacgcgtccggctgaactaatgactgccgccataagaagacagagagaactgagtatcctcccaaaggtgacactggaagcaatgaacaccacagtgatgcaaggcttcaacagatctgagcggtgccccaragacactcggatagtacagctggtattcccagccctctacacagtggttttcttgaccggcatcctgctgaatactttggctctgtgggtgtttgttcacatccccagctcctccaccttcatcatctacctcaaaaacactttggtggccgacttgataatgacactcatgcttcctttcaaaatcctctctgactcacacctggcaccctggcagctcagagcttttgtgtgtcgtttttcttcggtgatattttatgagaccatgtatgtgggcatcgtgctgttagggctcatagcctttgacagattcctcaagatcatcagacctttgagaaatatttttctaaaaaaacctgtttttgcaaaaacggtctcaatcttcatctggttctttttgttcttcatctccctgccaaatatgatcttgagcaacaaggaagcaacaccatcgtctgtgaaaaagtgtgcttccttaaaggggcctctggggctgaaatggcatcaaatggtaaataacatatgccagtttattttctggactgtttttatcctaatgcttgtgttttatgtggttattgcaaaaaagtatatgattcttatagaaagtccaaaagtaaggacagaaaaaacaacaaaaagctggaaggcaaagtatttgttgtcgtggctgtcttctttgtgtgttttgctccatttcatttcgccagagttccatatactcacagtcaaaccaacaataagactgactgtagactgcaaaatcaactgtttattgctaaagaaacaactctctttttggcagcaactaacatttgtatggatcccttaatatacatattcttatgtaaaaaattcacagaaaagctaccatgtatgcaagggagaaagaccacagcatcaagccaagaaaatcatagcagtcagacagacaacataaccttaggctgacaactgtacataggggtaacttctatttattgatgagacttccgtagataatgtggaaatcaaatttaaccaagaaaaaaagattggggcaaatgctctcttacattttattatcctggtgtacagaaaagattatataaaatttaaatccacatagatctattcataagctgaatgaaccattactaagagaatgcaacaggatacaaatggccactagaggtcattatttctttctttctttttttttttttttaatttcaagagcatttcactttaacattttggaaaagactaaggagaaacgtatatccctacaaacctcccctccaaacaccttctyacattcttttccacaattcacataacactactgcttttgtgccccttaaatgtagatwtgtgctgagagaaaaaaaaacgcccaactcttgaagtccattgctgaaactgcagcccaggggttgaaagggatgcanacttgaaaaantctgaaggaactgaa

SEQ ID NO: 1182 - DNA, 1997 bp, Homo sapiens
ctgggccgcgccgaggcagctggctgactccagtttagccgccgccggagaggacgkgcgccgagccggggctgcggacttcggcctgcccctcacctcactcccgctgcttgcacctcccggatggtgctgactgctccctaagcggcggcggcggcgagtcgtgaggacgcgccgcggaggctgttcggggtcgaggcttcccgtcgccggcacttcctcttgcggcgcccgtgcgcggccggcccggcaggcgggatggcggccgcggctccrgggaacggccgcgcatcggcgccccggctgcttctgctctttctggttccgctgctgtgggccccggctgcggtccgggccggcccagatgaagaccttagccaccggaacaaagaaccgccggcgccggcccagcagctgcagccgcagcctgtggctgtgcagggccccgagccggcccgggtcgagaaaatatttacaccagcagctccagttcataccaataaagaagatcctgctacccaaactaatttgggatttatccatgcatttgtcgctgccatatcagttattattgtatctgaattgggtgataagacattttttatagcagccatcatggcaatgcgctataaccgcctgaccgtgctggctggtgcaatgcttgccttgggactaatgacatgcttgtcagttttgtttggctatgccaccacagtcatccccagggtctatacatactatgtttcaactgtattatttgccatttttggcattagaatgcttcgggaaggcttaaagatgagccctgatgagggtcaagaggaactggaagaagttcaagctgaattaaagaagaaagatgaagaatttcaacgaaccaaacttttaaatggaccgggagatgttgaaacgggtacaagcataacagtacctcagaaaaagtggttgcattttatttcacccatttttgttcaagctcttacattaacattcttagcagaatggggtgatcgctctcaactaactacaattgtattggcagctagagaggacccctatggtgtagccgtgggtggaactgtggggcactgcctgtgcacgggattggcagtaattggaggaagaatgatagcacagaaaatctctgtcagaactgtgacaatcataggaggcatcgtttttttggcgtttgcattttctgcactatttataagccctgattctggtttttaacaagctgtttgttcatctatatttagtttaaaataggtagtattatctttctgtacatagtgtacattacaactaaaagtgatggaaaaatactgtattttgtagcactgattttgtgagtttgacccattattatgtctgagatataatcattgattctatttgtaacaaggagttttaaaagaaacctgacttctaagtgtgggtttttcttctctccaacataattatgttaatatggtcctcatttttcttttggtgcagaaccgttgtgcagtggggtctaccatgcaattttctttcagcactgacccctttttaaggaatacaaattttctccttcatcacttaggtgttttaagatgtttaccttaaagtttttcttggggaaagaatgaattaatttctatttcttaaaacatttccctgagccagtaaacagtagtttaatcattggtcttttcaaaactaggtgtttaaaaaaagagacatatatgatattgctgttatatcaataacatggcacaacaagaactgtctgccaggtcattcttcctcttttttttttaattgggtaggacacccaatataaaaacagtcaatatttgacaatgtggaattaccaaattaaaagagaatactatgaatgtattcatattttttctatattgaataaacaatgtaacatagataacaatataaataaaagtggtatgaccagtgaaaaaaaaaaaaaaaaaaaaaaaaaaaaaaaaagggcggcc

SEQ ID NO: 1183 - DNA, 884 bp, Homo sapiens
  misc_feature (23)..(23): n equals a,t,g, or c
  misc_feature (717)..(717): n equals a,t,g, or c
  misc_feature (816)..(816): n equals a,t,g, or c
  misc_feature (837)..(837): n equals a,t,g, or c
  misc_feature (872)..(872): n equals a,t,g, or c
  misc_feature (874)..(874): n equals a,t,g, or c
  misc_feature (877)..(877): n equals a,t,g, or c
ctttttaagaagcccttgcgccntgaatttggttaaattcggctggcgccagatccaggctcctggaagaaccatgtccggcagctactggtcatgccaggcacacactgctgcccaagaggagctgctgtttgaattatctgtgaatgttgggaagaggaatgccagagctgccggctgaaaattacccaaccaagagaaatctgcaggatggactttctggtcctcttcttgttctacctggcttcggtgctgatgggtcttgttcttatctgcgtctgctcgaaaacccatagcttgaaaggcctggccaggggaggagcacagatattttcctgtataattccagaatgtcttcagagagccgtgcatggattgcttcattaccttttccatacgagaaaccacaccttcattgtcctgcacctggtcttgcaagggatggtttatactgagtacacctgggaagtatttggctactgtcaggagctggagttgtccttgcattaccttcttctgccctatctgctgctargtgtaaacctgttttttttcaccctgacttgtggaaccaatcctggcattataacaaaagcaaatgaattattatttcttcatgtttatgaatttgatgaagtgatgttccaaagaacgtgaggtgctctacttgtgattaaggaaaccagctcgatccaagcactgcagtgtgtgtaactngtgtgtgcaccgtttcgaccatcactgtgtttgggtgaacactgccatcgggggcctggaaaaatcaggtacttcctcatctaagtcttgaccttgaangcctcgggttgcaaccgtcgnccattgtgagcaccacttttctgggccacttgggngngangtccaga

SEQ ID NO: 1184 - DNA, 823 bp, Homo sapiens
  misc_feature (1)..(1): n equals a,t,g, or c
  misc_feature (8)..(8): n equals a,t,g, or c
  misc_feature (13)..(13): n equals a,t,g, or c
  misc_feature (21)..(21): n equals a,t,g, or c
ntctcaancccanctccccantggaagccttcaaattttaatwacccttcctacsgtgatgtttaaggccaggagcattcatttctcaaccttgtatcaatycaggatccatcggactaggtttcattaggcaagagagtagttcgttcctcctctgtgctgaggatgttttgagatttagacctttttctccttgaatactccagtagataaaacaagcccatggctaatccacttatcagagcccatagaccttgtatagctgctgcccattcaaaaccaattttctcatacagaaatccacccagcgttggtcccataaaagcaccaattgaccacattgcactaaaaagacctgatacaagtcccaatgtacttaatccctcttcaaacccattttcatgtgcacaactgagaatttccgggaaagttggaattatactcattccagcagagaggccacttacaactaatatcagcaccagcagccagagctgacttttaatatgcaagattgggacaggccctaagagcatgtagcacccggctgtgattaagttgccaaacaccagaagccatttccttagaggtggccttttatcacttaggagaccaaatagtggtgaagagatggcataggacagtgccatacccaggaatactagtcccacatatccagctggtaaattgaacttctccaaaacaaagagagacagagtaggatcgaggaagccaaaacacgagctgagtgagttgatgacgaaggctataaggccaactttgggtaaagcgatcagtttccagaatgagtgttcacctggat

SEQ ID NO: 1185 - DNA, 1701 bp, Homo sapiens
ggaatttttcagctgtctgaattttaaccctctggcggctttacagtaccttacgctatactagccactgaaaatgccggttcactttcttcgaatcggctttcaatgtgtatttcacacaaattaatcaacttccccttccgaggatctggcctgaaaggtcggataagatatgttaaacagtattttagtcatactctgcttgatcgctgtaagtgcgttcttctcgatgtccgagatctcgcttgccgcctcacgcaaaatcaaacttaaactgctggctgatgaaggcaatataaatgcccaacgcgttctgaatatgcaggaaaatcccggcatgttctttaccgtggtccaaatcggtctgaacgcagtggcgattctcggcggtatcgtcggtgatgcggcattttctccagcttttcacagcctgttctcccgctatatgtcggcagagctctctgagcaactgagctttattctctctttctcgttagtgactggcatgtttatcctgtttgcggatttaaccccgaaacgcatcggtatgattgcgccagaagctgtggctttgcgtatcatcaacccgatgcgcttctgcctgtacgtttgcaccccgctggtgtggttcttcaacggcctggcgaacataatcttccgtattttcaaactgccaatggtacgtaaagatgacatcacttctgatgacatctacgcggtagtggaagccggtgcgctggcgggcgtgttacgtaaacaggaacacgagctgattgaaaacgtctttgagctggaatcccgtaccgttccgtcttcaatgacaccgcgtgaaaacgtgatttggtttgatctccacgaagatgagcaaagcctgaagaataaggtggcggaacatccgcactctaagttcctcgtctgtaatgaagatattgaccacatcatcggttatgtcgattctaaagacctgctgaaccgcgtgctggctaaccaaagcctggcactgaacagcggcgtacaaattcgcaacacgctgattgtgccggatacgttaaccctttcagaggcgttggaaagttttaaaaccgcaggtgaagacttcgcggtgatcatgaacgagtacgcgctggtggtggggatcatcaccctcaatgacgtgatgaccacgctgatgggcgatctggtcggtcaggggctggaagagcagattgtcgcccgtgatgagaactcatggctgattgacggcggcaccccaattgacgacgtcatgcgcgtgctggatattgacgagttcccgcagtcgggcaactacgaaaccatcggcggctttatgatgtttatgctgcgtaagatcccgaaacgcaccgattcggtgaaattcgccggctacaaatttgaagtggtggatatcgataactaccgcatcgaccagctgctggtgacccggatcgacagcaaggccaccgccctttcgccaaaactgcctgacgctaaagataaagaagaaagcgtcgcgtaacccccagaaacatcaacggctcctgaatcaggagccgtcttattactgcatagcactttttactgcatagcactttggttaagccatctctgtttgcagacgcataacctgacggttaacttcggacatcactgacaaatgcagcttatccttcacttttgggataagaatcttacccttatcga

SEQ ID NO: 1186 - DNA, 3798 bp, Homo sapiens
ccacgcgtccggggcttcatacaggaaatctattgctgtgtcaagttccagagaaaagcttctgttcgtccaagttactaaccaggctaaaccacatagacgtgaaggaaggggctagaaggaagggagtgccccactgttgatggggtaagaggatcctgtactgagaagttgaccagagagggtctcaccatgcgcacagttccttctgtaccagtgtggaggaaaagtactgagtgaagggcagaaaaagagaaaacagaaatgctctgcccttggagaactgctaacctagggctactgttgattttgactatcttcttagtggccgaagcggagggtgctgctcaaccaaacaactcattaatgctgcaaactagcaaggagaatcatgctttagcttcaagcagtttatgtatggatgaaaaacagattacacagaactactcgaaagtactcgcagaagttaacacttcatggcctgtaaagatggctacaaatgctgtgctttgttgccctcctatcgcattaagaaatttgatcataataacatgggaaataatcctgagaggccagccttcctgcacaaaagcctacaagaaagaaacaaatgagaccaaggaaaccaactgtactgatgagagaataacctgggtctccagacctgatcagaattcggaccttcagattcgtaccgtggccatcactcatgacgggtattacagatgcataatggtaacacctgatgggaatttccatcgtggatatcacctccaagtgttagttacacctgaagtgaccctgtttcaaaacaggaatagaactgcagtatgcaaggcagttgcagggaagccagctgcgcatatctcctggatcccagagggcgattgtgccactaagcaagaatactggagcaatggcacagtgactgttaagagtacatgccactgggaggtccacaatgtgtctaccgtgaactgccacgtctcccatttgactggcaacaagagtctgtacatagagctacttcctgttccaggtgccaaaaaatcagcaaaattatatattccatatatcatccttactattattattttgaccatcgtgggattcatttggttgttgaaagtcaatggctgcagaaaatataaattgaataaaacagaatctactccagttgttgaggaggatgaaatgcagccctatgccagctacacagagaagaacaatcctctctatgatactacaaacaaggtgaaggcatctgaggcattacaaagtgaagttgacacagacctccatactttataagttgttggactctagtaccaagaaacaacaacaaacgagatacattataattactgtctgattttcttacagttctagaatgaagacttatattgaaattaggttttccaaggttcttagaagacattttaatggattctcattcatacccttgtataattggaatttttgattcttagctgctaccagctagttctctgaagaactgatgttattacaaagaaaatacatgcccatgaccaaatattcaaattgtgcaggacagtaaataatgaaaaccaaatttcctcaagaaataactgaagaaggagcaagtgtgaacagtttcttgtgtatcctttcagaatattttaatgtacatatgacatgtgtatatgcctatggtatatgtgtcaatttatgtgtccccttacatatacatgcacatatctttgtcaaggcaccagtgggaacaatacactgcattactgttctatacatatgaaaacctaataatataagtcttagagatcattttatatcatgacaagtagagctacctcattctttttaatggttatataaaattccattgtatagttatatcattatttaattaaaaacaaccctaatgatggatatttagattcttttaagttttgtttatttcttttaagttttgtttgtggtataaacaataccacatagaatgtttcttgtgcatatatctctttgtttttgagtatatctgtaggataactttcttgagtggaattgtcaggtcaaagggtttgtgcattttactattgatatatatgttaaattgtgtcaaatatatatgtcaaattccctccaacattgtttaaatgtgcctttccctaaatttctattttaataactgtactattcctgcttctacagttgccactttctctttttaatcaaccagattaaatatgatgtgagattataataagaattatactatttaataaaaatggatttatatttttggtcatgtttgtaagagagtgaatgcacgtgtgagaacattagcttcttctgaactcattatatctccacagaggtgttgatacttgatgcctaacagttttgcagatgtgctacattggaattgtgtatttttatggtgtacattctattgtgatatatttattgaataattaatgtctattgaccatataagtggcgaaaaatgcaccatagaggacatggggtatttatttacaaactatgagctacataataagcaagtggccatgggatggcatgaccctcccctccatatttttgtggagcaaaatattggcaatgtttatgtaaatcattgttaatatcatgaaattatttttaattaaaaacataagtctatttgctccatagcagaaaaaacatgagaagttttttcatcatgatagaaattgaaacaaaatatattcattcttcaatcataccatctgagatttttaagacagctattttgtcttataagtatatttttctccctctagacatttcagttactatggattttgtcctcaaagggacctttagtctattttggatgtaaagctaatctaatgacacttggcacatgatattttgatcaagccattttgacttgaccaaaaagcagtgtccattaggtttctgcatataaatattaccaagcaatgttcacaatagacatcattacactgtccttgaaatttattaattcttcatccaaccctggttgagctgaggctcatagttaggttcaagactatctgtttaaatattactgaaaaacaaagtaagacagtactatgcttacctcttaacttgataatgtcaaaacaggcatgttaaatgacatcatagaaaagacttcaagataatttatagaagttaaattatattgtacagaaaataattgtatgaaaatctctactatggggctggaacatggttgaacattagaatgatataaaaaattatatatattctccaaatccacgctagacctgtcaaattagagaatctagagattagacctggcgtgtcagcaaggtcatccaggaagcagaggctgagacggagttaggtgtgattacttacatagtcgattacattttacaaataacattttatatgtctcatttactgtgctttctccccatcccattttgtatcttttcctttgctttgctagatttgtcaattttctctctctttctgtctctctctctttcaatatctctaataatttgaaagtaattcatcataactaaatatctattggggttatgcttcacttacaaacttctgaaaacggctttactgagatataattgatatatttaagtgtacagtttgttaaattttgcacatatttaaaatgtggactttggtaaatgttgacatagttttacatctgtgaaaccatcagcataatcaagataataaacttgtccatcaccccccaaaaaaaaaaaaaaaaaaaaa

SEQ ID NO: 1187 - DNA, 1397 bp, Homo sapiens
  misc_feature (1356)..(1356): n equals a,t,g, or c
acaatttctcaccacccacaccaaagtcctaccactgcctgacaaaagcagagagaggggtgtgtgtgtactcgcatgtgttggcgggaccaaggcagggaggtaggataaaagggggaggaaggagagagtagccagggaatggtggtcctcagggctggggctgccccgccacgtccttgtccttcgtgggagtgggttggtacatgggctgctgctgctcctccatgtcctcattagcctcctctgtccctgagccccgctccacctcggggtacacgaccacacacatcttctggctcaccagggttagcagctcaatgaagtcactgaaacacttgggcttgtgttgccagtaaacacccaggaaatagacaggcactcctgtcagcatgatggccaggccaatgccacacaccaccggctctgaccacaggctgaagaccagcaggaaggcccagaacagcaagtagatgatggggaacagcaggttgatcttgatggggcgggggatatcaggcttcttccagcgaaggactatctgtccagcaaccgtgaccccatagaagaggtagttgatgaagcccacgtagttgatgagtgtgtacatgtcgctggtgaccagcatcagcagggtggagatgcatgtgaagagcagggctgggattggggtgcagcgcttcacgtggatcatggccaacacactgggaaggtggccctctcgggctccagcgaagaacagccgagaggaggtgaagagagacccattaactcctccaaatgtggacagggcaacagaaatgggcatgatccaggccatgactcctaggagcttctctccaaaagtcacagcgacggcgttgatgccagcagctcctggggggacattgcagtgacataagcgacattggcaaagacatacacaaatgtgaccagtgggatggagatgaagatggctctgggaaggttcttgtagggatcaacaagctcctcagtcacgtaattcagaaagttccagcctccataggcaaaggagccctgaaggaaagccagtgcgacgaggccgatgtcaggttcctggaaattctcaaatgcattctttggctccagccagaagtactctcctttgcatatctgtacaatccccatgatgataatcagggccaaggccaggagcttcccagctgtgaagatgtcttgaacccgggtggcccaccgcacactggaacagttgacccatgtgaggagcaataagcagattggcagccaggagccgaaccaggactctggggggggaaacaggttggggaagaacggcttcagcacgtagtttggaagaagggttgaggggcgatngacagcctgggtttgggttgggggtagattcaccaagcaca

SEQ ID NO: 1188 - DNA, 1600 bp, Homo sapiens
ttctgcgtcggggtcgaagccggaccgaactttttttccattttttttcgcgatgggaaaaattacctaatgttagcactggtgatggttggcagtgcgctggtgatcgccttagggttaggtaagctgtttggctgggatattggcctgacggccggtatgttagcaggctctatgacgtcgacaccggttctggtcggtgctggcgatacactgcgtcattccggcatggaaagcaggcagctctcactggcactggataatctgagcctcgggtatgccttaacctatttaatcggtctggtgagtttgattgttggtgcgcgttacttgccgaaattgcagcatcaggacttacagaccagcgcccagcaaatcgcccgcgaacgtggcctggacactgatgccaaccgtaaggtttatttaccggtgatccgcgcctatcgcgtcggcccggaactggtggcctggaccgacggcaaaaatctgcgtgaactgggtatttatcgacaaaccggctgctacattgaacgtattcgacgtaacgggattctggcaaatccagacggtgatgccgtgctacaaatgggcgatgaaatagcgttggtaggctatcccgacgcccatgcccgactcgatcccagcttccgtaacggtaaagaagttttcgatcgtgaccttctcgacatgcgtatcgtcactgaagaagtggtcgttaaaaaccataacgctgtaggtaaacgtctcgcacaactgaagttgaccgatcacggttgcttccttaaccgcgtcattcgtagccagattgagatgccgatagatgacaacgtcgtgcttaacaaaggtgacgttttacaagtcagcggcgatgcccgccgcgtaaaaaccatcgccgatcgcatcggctttatctcgattcacagccaggtcactgacctgctggcattctgcgccttctttgttattgggctgatgatcgggatgatcaccttccagttcagcacattcagtttcggcatggggaacgctgccgggttgttattcgccggaattatgctgggctttatgcgtgctaaccacccgaccttcggttacattccgcagggtgcattaagcatggtgaaagagttcggcttgatggtgtttatggcaggcgttggtctgagcgccggtagcggtattaataacggcctgggcgcgattggcggtcagatgttgattgccggattgattgtcagtctggtgcccgtggctggtgcatccactgaaagtcgacgcggatgcctcggtggtcgataacgtgccggtacatgtggcgctgcgcccggaaaaaatcatgctttgcgaagagccgcccgccaatggttgtaacttcgcggtgggggaggtgatacacattgcctatctcggcgatctttcggtgtatcacgttcgtctgaaaagtgggcagatgattagcgcccagctacaaaacgcccatcgtcatcgtaaagggttaccgacctggggcgacgaagtgcgtttgtgctgggaagtggacagctgtgtggtgctgacggtttaaggagcaaagatgagtacacttgaacctgctgcccag

SEQ ID NO: 1189 - DNA, 1377 bp, Homo sapiens
  misc_feature (54)..(54): n equals a,t,g, or c
cttcctcttcacagacacgctggacttgaacaaacccagccttctatacaaccntggagccagggcaagggagagacagaaggagcaagtgacccagggagacaaacacttggagatacttggggctgagtttgagcaagactccctaacctgtgtctggacaagtctgatgtcctgtgtggcccaagaagaactgaccccgtgtctggagctcccaccgttattgcatccctgctgtggctcacctgctgctgtctccaggagcccctgagaagatttgcytcctctcccctgctaagctccaggtcctgagattgaattaggggctggagctcactgcactccagcagtcatgggacccaggatagggccagcgggtgaggtaccccaggtaccagacaaggaaaccaaagccacaatgggcacagaaaacacacctggaggcaaagccagcccagaccctcaggacgtgcggccaagtgtgttccataacatcaagctgttcgttctgtgccacagcctgctgcagctggcgcagctcatgatctccggctacctaaagagctccatctccacagtggagaagcgcttcggcctctccagccagacgtcggggctgctggcctccttcaacgaggtggggaacacagccttgattgtgtttgtgagctattttggcagccgggtgcaccgaccccgaatgattggctatggggctatccttgtggcsctggcgggcctgctcatgactctcccgcacttcatctcggagccataccgctacgacaacaccagccctgaggatatgccacaggacttcaaggcttccctgtgcctgcccacaacctcggccccagcctcggccccctccaatggcaactgctcaagctacacagaaacccagcatctgagtgtggtggggatcatgttcgtggcacagaccctgctgggcgtgggcggggtgcccattcagccctttggcatctcctacatcgatgactttgcccacaacagcaactcgcccctctacctcgggatcctgtttgcagtgaccatgatggggccaggcctggcctttgggctgggcagcctcatgctgcgcctttatgtggacattaaccagatgccagaaggtggtatcagcctgaccataaaggacccccgatgggtgggtgcctggtggctgggtttcctcatcgctgccggtgcagtggccytggctgccatcccctacttcttcttccccaaggaaatgcccaaggaaaaagtgagcttcatttcggcgaaaggtcttagcagtcacagaytcactgccaggaagggaaggaytytcctytaagagaaccctgggggatcacgaaaagcaggatggctttc

SEQ ID NO: 1190 - DNA, 1322 bp, Homo sapiens
  misc_feature (1132)..(1132): n equals a,t,g, or c
  misc_feature (1182)..(1182): n equals a,t,g, or c
  misc_feature (1201)..(1201): n equals a,t,g, or c
  misc_feature (1281)..(1281): n equals a,t,g, or c
  misc_feature (1301)..(1301): n equals a,t,g, or c
  misc_feature (1320)..(1320): n equals a,t,g, or c
gtgcatgcgctcgcatcatggcggctgagtgggcttctcgtttctggctttgggctacgctgctgattcctgcggccgcggtctacgaagaccaagtgggcaagtttgattggagacagcaatatgttgggaaggtcaagtttgcctccttggaattttcccctggatccaagaagttggttgtagccacagagaagaatgtgattgcagcattaaattcccgaactggggagatcttgtggcgccatgttgacaagggcacggcagaaggggctgtggatgccatgctgctgcacggacaggatgtgatcactgtgtccaatggaggccgaatcatgcgttcctgggagactaacatcgggggcctgaactgggagataaccctggacagtggcagtttccaggcacttgggctggttggcctgcaggagtctgtaaggtacatcgcagtcctgaagaagactacacttgccctccatcacctctccagtgggcacctcaagtgggtggaacatctcccagaaagtgacagcatccactaccagatggtgtattcttacggctctggggtggtgtgggccctcggagttgttcccttcagccatgtgaacattgtcaagtttaatgtggaagatggagagattgttcagcaggttagggtttcaactccgtggctgcagcacctgtctggagcctgtggtgtggtggatgargctgtcctggtgtgtcctgacccgagctcacgttccctccaaactttggctctggagacggaatgggagttgagacagatcccactgcagtctctcgacttagaatttggaagtggattccaaccccgggtcctgcctacccagcccaacccagtggacgcttccgggcccagttcttcctgcacttgtccccaagccactatgctctgctgcagtaccattatggaacgctgagtttgcttaaaaacttcccacagactgccctagtgagctttgccaccactggggagaagacggtggctgcagtcatggcctgtcggaatgaagtgcagaaaactagcagttctgaagatgggtcaatgggggaacttttcggagaagtctaagttcaaaggactcttctggcttgcttcaatcanacctacaccatttaacctaatacctcgtggaagacaggtcggcgggctgnttggacaccacgataaccnttaagcctggaacagaaccgggacttcggcctgaaccggctggattttccagggggttcttgaaaaaaggatgacttcangggcttaccgggcttttggnccaaaccagaaggatcatngg

SEQ ID NO: 1191 - DNA, 1554 bp, Homo sapiens
  misc_feature (25)..(25): n equals a,t,g, or c
  misc_feature (39)..(39): n equals a,t,g, or c
  misc_feature (1031)..(1031): n equals a,t,g, or c
  misc_feature (1553)..(1553): n equals a,t,g, or c
ggccgaccatgaatggtccatgggnttgtaaacagtccnggcgctggagtcggtgttgccgtcgggcgagttgtcggcacgaarcaaaatgcctatgttcaaccactggtgttaatgaacaaagatactgtgcgtctctggggaagacgcacctaggtggcggccactcccatggccttgtctaggactcagagaccactcggctctgagcttccaggcgcctcgtctgtgtgcatctcacgcccgacgtggcttctgaaacgtgcattcaacctcaaacttttgcataaaatagaatgaatcgttttgctctgatgaaatgtaggccttacttgtatataagactgttcctgccttcggtctgtcattttcccacctgcctcccctacccaccccccacccaccacctggggcttcctctgggggtccgagggtcttcccatcacatgaagacatcaggttgggtcctgccccactgcccctccccctgttcctgccccaagccgtcaatcagattgtggagcagtacacagtcagatgaaaatactgtaaatgcactcattgggggttttttggttttacttcatatcatgtgcaatgttgtggctttaacattttatgcaactatttatgaagacctctgttgtacctgtaataaatatatagaaaaagcacatacttcgtatggtgagctttatggttttgtgtgtgtgttggggttggcgggtgggtgggtagggtcgtagccctgtgccatcggttcaaagagacttttcgtgaaatttgttggttttgaggactgtaaaagtgatttcatactctgaatataaaactggataatagggtaatgttttaaaatttattatgctattattcagaatgccaaagtattattttttttcccaaaatcagtctggacatttactactttttagactttttgacgttgaactttctgtataaaaattggctgggttttgagcttttggtaagaaataaaagccgattaagcactggccgccccgcgctgngtacccaatgcccgagtcactgtggcagcattcgcactggtgtggggagtcctttcaactcaaggaggctgggtttctgggcaccctcgaagttttctggatgtctttttatctttctcgtgtgaactgcactacaaaagagaccagcccgcttcccaagccagccagacacctgggtcttgagccataaactggcgtagttaagctttgcagcttccagtgtattttatttattcttttgttgggtttttgtttgtttcttcttgtaaaattgtacagaaactttttaaaagaaattggattcgaaactggatgtgtattcgtaacctcataatttttatttgtgtattgtttcttttattatttcagttaaatttttacattattttgcatgtatatttctttgtacagagaccttacatgtttacacagtatgatgtgatgtaaatattttattttgccatcagttattttaaaaaattaaacatatttgcctgaaaaaaaaaaaaaaaggggggcgcnc

SEQ ID NO: 1192 - DNA, 1268 bp, Homo sapiens
  misc_feature (5)..(5): n equals a,t,g, or c
  misc_feature (17)..(17): n equals a,t,g, or c
  misc_feature (23)..(23): n equals a,t,g, or c
  misc_feature (27)..(27): n equals a,t,g, or c
  misc_feature (31)..(31): n equals a,t,g, or c
  misc_feature (1224)..(1227): n equals a,t,g, or c
  misc_feature (1230)..(1230): n equals a,t,g, or c
  misc_feature (1257)..(1257): n equals a,t,g, or c
  misc_feature (1265)..(1265): n equals a,t,g, or c
acaancccatagggaantttggnacgnctgnccgtaccggtccggaattcccgggtcgacccacggcggcggcggccggacccagactggtagtgaggckttggaccccgagccgctgcaatgccgctggagctggagctgtgtcccgggcgctgggtgggcgggcaacacccgtgcttcatcattgccgagatcggccagaaccaccagggcgacctggacgtagccaagcgcatgatccgcatggccaaggagtgtggggctgattgtgcyaagttccagaagagtgagctagaattcaagtttaatcggaaagccttggagaggccatacacctcgaagcattcctgggggaagacgtacggggagcacaaacgacatctggagttcagccatgaccagtacagggagctgcagaggtacgccgaggaggttgggatcttcttcactgcctctggcatggatgagatggcagttgaattcctgcatgaactgaatgttccatttttcaaagttggatctggagacactaataattttccttatctggaaaagacagccaaaaaaggtcgcccaatggtgatctccagtgggatgcagtcaatggacaccatgaagcaagtttatcagatcgtgaagcccctcaaccccaacttctgcttcttgcagtgtaccagcgcatacccgctccagcctgaggacgtcaacctgcgggtcatctcggaatatcagaagctctttcctgacattcccatagggtattctgggcatgaaacaggcatagcgatatctgtggccgcagtggctctgggggccaaggtgttggaacgtcacataactttggacaagacctggaaggggagtgaccactcggcctcgctggagcctggagaactggccgagctggtgcggtcagtgcgtcttgtggagcgtgccctgggctccccaaccaagcagctgctgccctgtgagatggcctgcaatgagaagctgggcaagtctgtggtggccaaagtgaaaattccggaaggcaccattctaacaatggacatgctcaccgtgaaggtgggtgagcccaaaggctatcctcctgaagacatctttaatctagtgggcaagaaggtcctggtcactgttgaagaggatgacaccatcatggaagaattggtagataatcatggcaaaaaaatcaagtcttaaaaataaagtgccattctctgaatnnnnagntaaaaaaaaaaaaaaaaaaaaaagggnggccgctntta

SEQ ID NO: 1193 - DNA, 809 bp, Homo sapiens
  misc_feature (778)..(778): n equals a,t,g, or c
ggcaaggcgaggccccgggggcgggccggggtcaccacgcctgccccagggaaccgcacaggcacctgcgctaagctgcggctacccccgcaagcaaccttccaagtccttcgtggcaatggtgcttccgtggggaccgtgctcatgttccgctgcccctccaaccaccagatggtggggtctgggctcctcacctgcacctggaaggggagcatcgctgagtggtcttcagggtccccagtgtgcaaactggtgccaccacacgagacctttggcttcaaggtggccgtgatcgcctccattgtgagctgtgccatcatcctgctcatgtccatggccttcctcacctgctgcctcctcaagtgcgtgaagaagagcragcggcggcgctccaacaggtcagcccagctgtggtcccagctgaaagatgaggacttggagacggtgcaggccgcataccttggcctcaagcacttcaacaaacccgtgagcgggcccagccaggcgcacgacaaccacagcttcaccacagaccatggtgagagcaccagcaagctggccagtktgacccgcagcgtggacaaggaccctgggatccccagagctctaagcctcaktggctcctccagctcaccccaagcccaggtgatggtgcacatggcaaaccccagacagcccytgcttgcttctgggytggccacagggaatgccacaacagcccgcagcwtwtgcctagggtgaccasgatagggytggtgccatgytcacattgggaggncagtttgaccccaccagtcattcagttacaa

SEQ ID NO: 1194 - DNA, 730 bp, Homo sapiens
gtgggaccatcttcctgtggatcttctggcctagcttcaatgctgcactcacagcgctgggggctgggcagcatcggacggccctcaacacatactactccctggctgccagcacccttggcacctttgccttgtcagcccttgtaggggaagatgggaggcttgacatggtccacatccaaaatgcagcgctggctggaggggttgtggtggggacctcaagtgaaatgatgctgacaccctttggggctctggcagctggcttcttggctgggactgtctccacgctggggtacaagttcttcacgcccatccttgaatcaaaattcaaagtccaagacacatgtggagtccacaacctccatgggatgccgggggtcctgggggccctcctgggggtccttgtggctggacttgccacccatgaagcttacggagatggcctggagagtgtgtttccactcatagccgagggccagcgcatgccacgtcacaggccatgcaccagctcttcgggctgtttgtcacactgatgtttgcctctgtgggcgggggccttggaggcatcatattggtcttatgacctcctagacccctgtgccctgtggcatgggtggcamcctcctccatggtggggggcagagaagcctcacagatcctcccctaccaccaccagggctcctgctgaagctaccctttctggactccccccccagactcccagcactac

SEQ ID NO: 1195 - DNA, 894 bp, Homo sapiens
  misc_feature (830)..(830): n equals a,t,g, or c
cgcaggaggaaacagtaccggctggaggccggtcttgcaggagcgggggactgctgggggcggggcttggtggtgaccgctggcggggcggggcctggggctcagaggggtgggctttggagatcagagggtcgacgctgcttcgttgcctggactctggtttccgccctggagcaagccggggcctggtcggcagctgggccgccatggagtccacgctgggcgcgggcatcgtgatagccgaggcgctacagaaccagctagcctggctggagaacgtgtggctctggatcacctttctgggcgatcccaagatcctctttctgttctacttccccgcggcctactacgcctcccgccgtgtgggcatcgcggtgctctggatcagcctcatcaccgagtggctcaacctcatcttcaagtggtttctttttggagacaggcccttttggtgggtccatgagtctggttactacagccaggctccagcccaggttcaccagttcccctcttcttgtgagactggtccaggcagcccttctggacactgcatgatcacaggagcagccctctggcccataatgacrgccctgtcttcgcaggtggccactcgggcccgcagccgctgggtaagggtgatgcctagcctggcttattgcaccttccttttggcggttggcttgtcgcgaatcttcatcttagcacawttccctcamcaggtgctggctggsctaataactggcgctgtcctgggctggctgatgactccccgagtgcctatggagcgggactaagcttctatgggttgactgcactggccctcatgctangcaccagcctcatctattggacctctttacactgggcctggatctttcttggtccatcagccta

SEQ ID NO: 1196 - DNA, 1949 bp, Homo sapiens
ctcgagtttttttttttttttttttttaaatggtagtcagatttcacgtgtatttttgctaaaactgaaagctgtcaggatccacattggtgttaccagtttgtactgaagcctgatacaatacccaacagtattgctctggttttttcaagcacacactccaagcaagtggtcagtctggcttaattcattatggctttttttcagggtaagagattcacacgcaagagaataaggctacaaatgctccaaacatgggtccagaactctggctcttttgtgaggcctagagtcacagaaaatgccatctgttaagaagctgcttttgcataaaaaaatataaaaagttacaaaattccatcaaagacagatacacagtataaatcgttaggtgaacacagaaggctggtctcatctcctgcagtggcccatagacctgccctgaggtctggaagttcactgtcctgagggtccaggaactcctgcctgctggctgggctctaggaagaaggagggtttggctgggcccgcccagctccccatgacactgtcactgtgatgccactgttgtaccctctgtcttctggaccagtcagtctatgagctcttctttgaaacagtcttagacccagaatggtcatctcacccccagaagacatggtttccaagggtgggaggtgttagttatgggtgccgagccccacttcctgggcgacaaggcaaaggtcaatttctccctgcttcaagaatgaagagggaactggtgctccttgaaccaaagattcttggaagggtcattgtcaccaaagtggctggtgtgggcaggagcaccaagtgcagacaaacccaccggggcctggcggggcagccctgtcatggtttctgtctttgttcctgttagtgaaacagaagacccccgacccccgccacctagcagcatggaacacctgctgcccagatacagacaaggctctgctttgtctccttgtgctggtttttggcagagacgttaaagggctgaaggcctgtgggacagaaatggggagaaggagtgggatacccaagatgccctcatacgcagcgtggtcaacagtgctgagctgaggggcaagcctggtaggctgggctcaggcagaacctgaggctgtagggggcctgctgtgtccgcagccccctctgcaactcagaagtccaggcctccgctccaacgccagcgacccctgtgaggcgcaggggtggaggcctgtgtggctcaggttgccaaggcacccgccaggccttcagtcagagtccgagtcggaattctcttcttctgtcttgtgggctgtggtctcatctgcagagtccccttgtttgaggaatttggccacgtcgttaaagatcaggtagaaatcagttgcaaacacgatggtagcaaagaagccaaacaccccagcggctttggaagccccatccgagtacttggcgatggccgtgatggagatagcaaagtagatgagggccgcggtgacacagcgcaggaagtccatcatgggccagcacaagccctgccacttgtcattcagctgcatggcatcagcaaagaggaagtacaaggccagcaggaactccagcagaggcgctgtgaggaaggcagatgctgaggacgccacatagcagataaaagtgatgaatgagagacccgactcggccagcaggaggcggcctttgagagagcagaggaaagcccgcgccggcagcagggcgcggagcccggggaccgcggggccgggacgggagccgccggcaggctcggggtccgggtcggggtcggggtctgggggccacatggcggcggcggcggtagggccggggctcggcctggctcccctcttctcgcgcccggagggaagcggaaacccgggctgtgcggaaksagggcargcgacactggctcgcgcagggtcgca

SEQ ID NO: 1197 - DNA, 396 bp, Homo sapiens
  misc_feature (314)..(314): n equals a,t,g, or c
  misc_feature (342)..(342): n equals a,t,g, or c
  misc_feature (368)..(368): n equals a,t,g, or c
tcgacccacgcgtccggagctccacaacatctacggtttttatcatcaaatggctactgcagaaggactgataaaacgatctaaagggaaggagagaccctttgttcttacacgttctttctttgctggatcacaaaagtatggtgccgtgtggacaggcgacaacacagcagaatggagcaacttgaaaatttctatcccaatgttactcactctcagcattactgggatctctttttgcggactgtacataggcgggttcattggggaatccagagacagagctgctagtgcgttggtaccaggctggagcntaccagcccttcttccgtggccatgccncatggaacaccaagcgacgagagccnggctctttggggaggaacacacccgaat

SEQ ID NO: 1198 - DNA, 1674 bp, Homo sapiens
  misc_feature (32)..(32): n equals a,t,g, or c
  misc_feature (412)..(412): n equals a,t,g, or c
  misc_feature (421)..(421): n equals a,t,g, or c
tgcccctgatggcctcctggagagcattgcgntggccaaagccttcgcatctcagaataattaccgcatcgatgccaaccaggagctgctggccatcggtctcaccaacatgttgggctccctcgtctcctcctacccggtcacaggcagctttggacggacagccgtgaacgctcagtcgggggtgtgcaccccggcgggggccctggtgacgggagtgctggtgctgctgtctctggactacctgacctcactgttctactacatccccaagtctgccctggctgccgtcatcatcatggccgtggccccgctgttcgacaccaagatcttcaggacgctctggcgtgttaagaggctggacctgctgcccctgtgcgtgaccttcctgctgtgcttctgggaggtgcantacggcatnctggccgggggcctggtgtctctgctcatgctcctgcactctgcagccaggcctkagaccaaggtgtcagaggggccggttctggtcctgcagccggccagcggcctgtccttccctgccatggaggctctgcgggaggagatcctaagccgggccctggaagtgtccccgccacgctgcctggtcctggagtgcacccatgtctgcagcatcgactacactgtggtgctgggactcggcgagctcctccaggacttccagaagcagggcgtcgccctggcctttgtgggcctgcaggtccccgttctccgtgtcctgctgtccgctgacctgaaggggttccagtacttctctaccctggaagaagcagagaagcacctgaggcaggagccagggacccagccctacaacatcagagaagactccattctggaccaaaaggttgccctgctcaaggcataatggggccacccgtgggcatccacagtttgcagggtgttccggaaggttcttgtcactgtgattggatgctggatgccgcctgatagacatgctggcctggctgagaaacccctgagcaggtaacccagggaagagaaggaagccaggcctggaggtccacggcaggggagtggggctcactggcttcctgtgggatgactggaaaatracctcgctgctgttccctggcatgaccctctttggaagagtggtttggagagagccttctagaatgacagactgtgcgaggaagcaggggcaggggtttccagcccgggctgtgcgaggcatcctggggctggcagcaccttcccggctcaccagtgccacctgcgggggagggacggggcaggcaggagtctgggaggcgggtccgctcctcttgtctgcggcatctgtgctctccgagagaaaaccaaggtgtgtcaaatgacgtcaagtctctatttaaaaataattttgtgttttctaaatggaaaaagtgatagctttggtgattttgtaaaagtcataaatgcttattgtaaaaaatacaggaaaccacccctcaccctgtccacttgggtgatcattccagacccctccccaaacatgcatatgtacctgtccgtcagtgtgtggatgtatgtttacagttctacataaatgggatcattttatacatggtgctctggaacccacatttttcatgcagtcatttgcagtgaattatttattgtgataataaatagcattagaatacaaaaaaaaaa

SEQ ID NO: 1199 - DNA, 555 bp, Homo sapiens
  misc_feature (334)..(334): n equals a,t,g, or c
  misc_feature (379)..(379): n equals a,t,g, or c
  misc_feature (462)..(462): n equals a,t,g, or c
  misc_feature (482)..(482): n equals a,t,g, or c
  misc_feature (487)..(487): n equals a,t,g, or c
ggcacgagtgaaaatgaaggaatgccttcgaatcaaggaaagatagacaatgaagaacagccaccgcacgagggaaagccagaagtagcttgtattctggaagacaagaagttagaaaacgagggaaacacagaaaacacgggcaagagagttgaggaaccgttaaaggataaagaaaagccagagagtgcgggaaaggcaaaaggagaaggaaagtcagagaggaagggaaagtcagagatgcagggaggatcaaagacagagggaaagccagagagagggggaagggcagagggtgaaggagagccagacaktgaaagagagccagagaktnagggagagccagaaaktgaaacaagggyttcaggaaagcgcccanttgaggttgttttaccccggaaagcccaaaagaaaaaccaacaggggtttgttcattacctcagcatttttaggagccttacngttttgattttcagcatttngggcntgttaggggtttttgcacttgttaggttggggttaaaggagaaagcaacagattttgggctttttttg

SEQ ID NO: 1200 - DNA, 2123 bp, Homo sapiens
  misc_feature (2003)..(2003): n equals a,t,g, or c
  misc_feature (2012)..(2012): n equals a,t,g, or c
  misc_feature (2023)..(2023): n equals a,t,g, or c
  misc_feature (2065)..(2065): n equals a,t,g, or c
  misc_feature (2089)..(2089): n equals a,t,g, or c
ggagctgccccggcgccccgcgcccccggcagccgtgctcggctgctacctcttcaactgcacggcgcgcggccgcaacgtctgcaagttcgcgctgcacagcggctacagcagctacagcctcagccgcgcgccggacggcgccgccctggccaccgcgcgcgcctcgccccggcaggaaaaggatgcgcctccacttagcaaggctgggcaggatgtggttctgcatctgcccacagacggggtggttctagacggccgcgagagcacagatgaccacgccatcgtccagtatgagtgggcactgctgcagggggacccgtcagtggacatgaaggtgcctcaatcaggaaccctgaagctgtcccacctacaggagggaacctacaccttccagctgaccgtgacggacactgccgggcagagaagctctgacaacgtgtcagtgacagtgcttcgcgcagcctactccacaggaggatgtttgcacacttgctcacgctaccacttcttctgtgacgatggctgctgcattgacatcacgctcgcctgcgatggagtgcagcagtgtcctgatgggtctgatgaagacttctgccagaatctgggcctggaccgcaagatggtaacccacacggcagctagtcctgccctgccaagaaccacagggccgagtgaagatgcagggggtgactccttggtggaaaagtctcagaaagccactgccccaaacaagccacctgcattatcaaacacagagaagaggaatcattccgccttttggggaccagagagtcaaatcattcctgtgatgccagatagtagttcctcagggaagaacagaaaagaggaaagttatatatttgagtcaaagggtgatggaggaggaggggaacacccagccccagaaacaggtgcagtgctacccctggcgctgggtttggctatcactgctctgctgcttctcatggttgcatgccgactacgactggtgaaacagaaactgaaaaaagctcgtcccattacatctgaggaatcggactacctcataaatgggatgtatctatagtaatgtaatttcaataccttggggcagggacatgttttgtttataatttatacatctattaagttctggatatttacagcttcttttgtttttaattgggccagaagattctgcaaatcccaaatctttctttattatttattgtaaaaaaagkttccttagaagtcataaaatattttgaaatttagagaggaattcatgattaaagattcctaaaaatataattctgatttatgtaagctgtccctgaaaatagaaatgtgtacttagctgagagaaaattcagcatctcaggaggtggtattaggatgactgtgttaacccattaccttttagaagccaactgttggccccttaccatgctggactgctataggcccagcttccccttgttctgtggcccttttcttcctccttgaagctcccagtattctttttcttttcccctctaaacctgtttctgagagtggatctcaagcaagttcatgccttcaatcagatgttacttagggtgggtatacctaaattataaaccttatgtacaagtcagtaagccttagggaaggtgagtgtgggtccttcctaatccctctgacgtcatgtcatataggtggctgcctccttagactgacctttgggagaaaaaaaccccagactttgaattagtaacagctctaagatggtcatgcagtgagataggaaatcaagatggaagcagagaatctggcatgccaaaaactaacagaaacttagttgaaggcaaagagagcaaggagaacgtttaatacttcattacatcaaatcaacactgctccatggtgagagcacagcaactcatttatatatatatatatagggctttgttgatgaaaaacgacaatttgaaggagaggacgttgagtgggttcctgggggtacagctttttgttaaaantgttcaccntgggcttttcntcccatgggattgagtccgatgtttttttaatgctattaaantgtttaggattgtggccctccgcntattgcccgggtttacgttttttcttggaccctt

SEQ ID NO: 1201 - DNA, 1997 bp, Homo sapiens
  misc_feature (152)..(152): n equals a,t,g, or c
cggacgcgtgggggagcagacccttgacaagaagctgatgtcagatctgaggaggaaacgtactgcacatgagcgtgccaaggaactttacagttcgggggagttttccagtggcagaaagtggggagatgatgctcccaaggaagaagtanataccggggctgtgaacttgattgagtcaggagcttgtggagcttttgttcatgggttggaagatgagatgtatgaggttcgtattgctgctgtggaggccctctgcatgttggcccagtcttcaccctcttttgctgagaagtgccttgatttcctagttgacatgttcaacgatgaaattgaggaagtacgtctgcagtctatacataccatgagaaaaatctctaacaacatcaccctccgagaagatcagcttgacactgtcctggctgtgctagaggattcatccagagatattcgagaggctcttcatgaactcttatgctgtactaatgtttcaaccaaagaagggattcatcttgcattggtggagctgctgaaaaatttaaccaagtaccctactgatagggactccatatggaagtgcttgaagtttctgggaagtcggcatccaaccctggtgcttcccttggtgccagagcttctgagcacccacccattttttgacacagctgaaccagacatggatgatccagcttatattgcagttttggtacttattttcaatgctgctaaaacctgtccaacaatgccagcattgttctcagatcacaccttcaggcactatgcctacctccgagacagtctttctcatcttgttcctgccttgaggttaccaggtagaaaactggtgtcatcagctgtttctcccagcatcatacctcaagaggatccttcccagcagttcctgcagcagagccttgaaagagtgtatagtcttcagcacttggaccctcagggagcccaggagctgctggaattcaccatcagggatctgcaaagacttggagaacttcaatctgaattggcaggagtagctgatttctctgccacctatcttcgctgtcaactacttctcatcaaggccttgcaggaaaagttgtggaatgtagctgcccctttgtatttgaagcagagtgatttggcctcagcagcagcgaaacagattatggaagagacctacaaaatggaattcatgtacagtggtgtggagaataagcaggtggtgattatacatcacatgaggctgcaggccaaagctttgcaacttatagtaacagcacgaactacacgaggacttgaccccttatttgggatgtgtgaaaaatttttacaggaagtagacttttttcagaggtatttcatcgctgatttgccccacttgcaggacagctttgtggacaaactccttgaccttatgccccgactcatgacatccaaacctgcagaagtggtcaaaattctacagaccatgctgcgacagagtgcctttctgcatctcccgcttccagagcagatccacaaagcctcagccaccatcatcgagccagcgggcgagtcagacaaccctttgcggtttacctctgggttggtggttgccctggatgttgatgcaactccagtgctcgcattccaaaatgcccctggatggagggtggtgagatgtcaccacaggtggaaaccagcatcgagggcaccattcccttcagcaagcctgtaaaagtttatataatgcccaaacctgcacggcgctaaggcaaaaacagtcttcccaaccgtggcctagagggcccttcttaggtgtcagaatgagccaagcctgaagcacttcacctggaattgatgtgtaggcttaaggagtatgtgacccttacagtctcatctggtatcaaacacaggataaattgtttcttcattaaaaaataaaaaaccttcaagtctacttacccttctcctgtccacaataaagttgagaaaacaaaaaaaaaaaaaaaaaaaaaatt

SEQ ID NO: 1202 - DNA, 1257 bp, Homo sapiens
cttttaggtgacactatagaaggacgcctgcaggtaccggtccggaattcccgggtcgacccacgcgtccggcgagctggggccgcgcaatgtcgcacggagccgggctcgtccgcaccacgtgcagcagcggcagcgcgctcggacccggggccggcgcggcmcagcccagcgcgagccccttggaggggctgctggacctcagctacccccgcacccacgcggccctgctgaaagtggcgcaaatggtcaccctgctgattgccttcatctgtgtgcggagctccctgtggaccaactacagcgcctacagctactttgaagtggtcaccatttgcgacttgataatgatcctcgccttttacctggtccacctcttccgcttctaccgcgtgctcacctgtatcagctggcccctgtcggaacttctgcactatttaatcggtaccctgctcctcctcatcgcctccattgtggcagcttccaagagttacaaccagagcggactggtagccggagcgatctttggtttcatggccaccttcctctgcatggcaagcatatggctgtcctataagatctcgtgtgtaacccagtccacagatgcagccgtctgatgaggccacaacccctaggcccctcaggagctttgcagagaggaggacgtgtactccaggcgaggcctctggacctgtgttcctgtgccaaagtcctgtcaggctggtgggcaccaggaaaggcctgcaccctcttcctgctctcccaggaagccagctccctgagctcctgagccagccggaaactcttcctccagccttccggggagaacatccctcccattctgggaaaggaaagcagcctccagggaaatgttttctgccttcctgcttctagaaccacctcaggtactgatgaaccccacttagcacagctgaaggggtttgtgaatactcccgcctaaatcccttctacttcactcctcaggggagtgaagtgccttaagaaacaaagccctgtcctaatttatctagcttgtcagtccggtcttagagataccctctttcctgaagtgaggcgtgcctgtagaaacactatgtggtcagcctgtccccaaggagatcttgtgtctcctctccatctctgcctttgttaccagtgtgcatgtgtttgtgtgttttttaataaaatattgactcggccagttaaaaaaaaaaaaaaaaaaaaaaagggggccgttttaaaggatccaagtttacg

SEQ ID NO: 1203 - DNA, 1503 bp, Homo sapiens
  misc_feature (829)..(829): n equals a,t,g, or c
tatggctgagascttcaaggagctggaccctgattccagcatggggaaggccttggagatgagctgtgccatccagaatcagctggcccgcatcctggccgagtttgagatgaccctggagagggacgtcctgcagccactcagcaggctgagtgaggaggagctgccagccatcctcaaacacaagaaaagcctccagaagctcgtgtccgactggaacacactcaagagcaggctcagtcaggcaaccaagaattcaggcagcagtcaaggcctaggaggcagcccgggtagtcacagccatacgaccatggccaacaaggtggagacgctgaaggaggaggaggaggagctgaagaggaaagtggagcaatgcagggacgagtacttggctgacctgtaccactttgttaccaaggaggactcctatgccaactacttcattcgtctcctggagattcaggccgattaccatcgcaggtcactgagctcgctggacacagccctggctgagctgagggagaaccacggccaagcagaccactccccttcgatgacagccacccacttccccaggtgtatggggtgtcgctggcaacccacctgcaagagctgggccgggagattgccctgcccatcgaggcctgcgtcatgatgctgctttctgarggcatgaaggaagarggtctcttccgtctggctgctggggcctcggtgctgaagcgtytmaagcagacaatggcctcggacccccamagcctggaggagttctgctccgamccgsamgctgtggcaggtgccctcaagtcctatctgcgggagctgccanagcctctgatgaccttcgacctctatgatgactggatgagggcagccagcctgaaggagccaggggcccggctgcaggccctccaagaggtgtgcagccgcctaccccccgagaacctcagcaacctcaggtacctgatgaagttcctggcacggctggccgaggagcaggaggtgaacaagatgacacccagcaacatcgccatagtcctgggacccaacttgctgtggccacctgagaaagaaggggaccaggcccagctggatgcagcctccgtgtcttccatccaggtggtgggcgtcgtcgaggcgctgatccagagcgcagacaccctcttccctggagacatcaacttcaacgtgtcaggcctcttctcagctgttaccctccaggacacagtcagtgacaggctggcctctgaggaacttccgtccactgccgtgcccaccccagccaccamcccggctccggctccggctccagctccagctmcggscccagccttggcttcagcagctaccaaggaaaggmcagagtctgaggtgcctcccagaccagcctyccccaaggtcaccaggagtcccccggagacagctgccccagtggaggacatggctcggaggaccaagcgcccggcgccagccggcccaccatgccgccccccaggtytccgg

SEQ ID NO: 1204 - DNA, 1706 bp, Homo sapiens
gggctgtcccccgccctgcccggcccgagccccgcgggccgccgccgccaccgccgccatgaagaagcagttcaaccgcatgaagcagctggctaaccagaccgtgggcaggaaaattaaagaaataatgctgagaggaaggtagacgtgtggtaatggcggctgatgtttcaaggaacagtttacaagcacatgataatttcttagctgagaaaacagaagtccttagtgaagatctattacagattgagagacgcctggacacggtgcggtcaatatgccaccattcccataagcgcttggtggcatgtttccagggccagcatggcaccgatgccgagaggagacacaaaaaactgcctctgacagctcttgctcaaaatatgcaagaagcatcgactcagctggaagactctctcctgggatgctggagacgtgtggagatgctgagaatcagctggctctcgagctctcccagcacgaagtctttgttgagaaggagatcgtggaccctctgtacggcatagctgaggtggagattcccaacatccagaagcagaggaagcagcttgcaagattggtgttagactgggattcagtcagagccaggtgggaaccaagctyacaaatcctcaggawccaactttcaggggcttccatcaaaaatagatactctaaaggaagagatggatgaagctggaaataaagtagaacagtgcaaggwtcaacttgcagcagacatgtacaactttatggccaaagaaggggagtatggcaaattctttgttacgttattagaagcccaagcagattaccatagaaaagcattagcagtcttagaaaagaccctccccgaaatgcgagcccatcaagataagtgggcggaaaaaccagcctttgggactcccctagaagaacacctgaagaggagcgggcgcgagattgcgctgcccattgaagcctgtgtcatgctgcttctggagacaggcatgaaggaggagggccttttccgaattggggctggggcctccaagttaaagaagctgaaagctgctttggactgttctacttctcacctggatgagttctattcagacccccatgctgtagcaggtgctttaaaatcctatttacgggaattgcctgaacctttgatgacttttaatctgtatgaagaatggacacaagttgcaagtgtgcaggatcaagacaaaaaacttcaagacttgtggagaacatgtcagaagttgccaccacaaaatwttgttaactttaggtatgtatgattgagctacaatgactctggagtgaagataagtttaatgcccagcagagaagtcatttaattcaggcatacttggcacattaaaaaacaacaacaacaacaaaaaaaaccacatcactttggagagtaacttggggctactgggaatgggatttcatgtatattatgatgaatttgaagcatcagtatcatgcctgacattaatacgtaagttggcttatcattttcccactacagctattagcaataaatttcttgtgaaaagtttgagtgactgtatgttgggtttggagtccaaatcatccagtatgttaaaaggcaaaattaatcaataattgtacattctgtaatgtcttttatatatgctacttaatttaaagtataaatcatcttactaaataaaatttcaaagaatggagat

SEQ ID NO: 1205 - DNA, 2537 bp, Homo sapiens
atgtattgggtattgagctgaaacaacaaaaagctgtgaaaatcaaaacaaaagattctggtcttttttgcgttccattgacagcgctattagaacaagatcagaggaaagtaccaggaatgcgaatacccttgatctttcaaaaactgatttctcgaattgaagagagaggtttggaaacagaaggcctcttacggatccctggagctgccattagaatcaagaatctttgccaagaactagaagcaaagttttatgaagggacttttaattgggaaagtgtcaaacagcatgatgccgccagcctgctgaagctcttcattcgggagttgccccagccactgctcagtgtggagtatctcaaagcstttcaggctgtccagaatcttccaaccaagaagcagcaactacaggctttgaaccttcttgtcatcctcctacctgatgcaaacagggacacactgaaggcccttcttgaatttctccaaagagtaatagataataaagaaaaaaataaaatgacagtcatgaatgtagcaatggtcatggccccgaatctctttatgtgtcatgcattgggattgaagtccagtgaacagcgagaatttgtaatggcagctgggacagcaaataccatgcacttattgattaagtaccaaaaacttctgtggacaattcccaagtttattgtaaaccaagtgaggaagcaaaacacggaaaatcataaaaaggataaaagagccatgaagaaattgctgaagaaaatggcttatgaccgagaaaaatatgaaaagcaagataagagtacaaatgatgctgacgttcctcagggagtgattcgagtgcaagctccccatctttcgaaagtttccatggcaatacagctaactgaagaactaaaagccagtgatgtacttgccaggtttctcagccaagaaagtggggttgcccagactctcaagaaaggagaagtttttttgtatgaaattggaggaaatattggggaacgctgccttgatgatgacacttacatgaaggatttatatcagcttaacccaaatgctgagtgggttataaagtcaaagccattgtagaagacttaacaagctgcagataaccatgtggacttctgtcataattcttgctgagtcaagagtgtaaataaaagaaatggcaggactcatattattcagttgtacccaagtatttaaaaatgactctcttaagccttaaaaagtcatagatttgtgctgctgccagaattatattaattattattaatgttattattagaaaaaaaatttctggagtgagagtaaagaggcttaattagtttgtgggcagttttcatatgctctgtgaaatgtgtccagatgtgacatagttttttttttttaatatgtggaaatgtcttctcttcccattcttttctcctaaaatcatatatactgtaatatatgctctctcacctctattacctcctcacatctaccctttcccagttaggtttgctttttgaccaaaaagataacaaataccaggtatggcaagttgtgaagacagcacattaaaacatacctaatttcacagtattcctgtcacgacagaatgttagtattcatctctttgaatcatttgctcaaataataacattccaccttttcctgctgtatcacaggaagtgatttgcattttttttcagttcatctgacttatgttcacagaaccgtatcagcgaccaagaaaataggactgtcagaagctgccagttattactgaaccattaaatacttatatactaagaataaataaaatatacccatgtgaaataataattggattatggataacaagagagtgaaagccaaagcactttctgtctactgtactcttctaaatggaattttaaaagtcatagctggctttacgtgttgtcattattagcattataaatatgcatgatagtataatccagtaatggttgaagaatgtattttacttaaagagggatttttttttttaagtcctgaataagtctactggaagaattattcttctgggtgaaaaagcttttgtttgtgttcttattttaaataatcggagtcaatttattaaaatgttcttgaaagtactattcccagggattttaatgcacaaaccatattgtgacaagagatgagcctctgtactgtaaataagaaatgaagtagagaaatgttaaatattttatgagtttagaatatagtaaataaaaggtgatgtaaatgaatgctgcacaaacggtgttcatgatacttttagtagtactttaggaaaaactacacattctcagaagctcttgatgtctctaatgaagggggggaatgctgttaatgagaacagtcataaatttttagcatataattacaagaacagcctgtggatatgatcacttaaatgattttgtggtgattcgtgccattgcttttttatttaaaagaaaattttgtaattaaatgcctttttctaaattaaaaaawaaaaaaaaaaaactcgac

SEQ ID NO: 1206 - DNA, 945 bp, Homo sapiens
gggaaattggaagacttggtggcgaacgagggtcaggacctgcatcctgcctcagagagttatcgacgtatccggaatgtgggatcagaggctggtgaggttggccctgttgcagcatctgcgggccttctatggtattaaggtgaagggtgtccgtgggcagtgcgatcgcaggagacatgaaacagcagccacggaaatagggggtaaaatatttggagtaccttttaatgcactgccccattctgctgtaccagaatatggacacattccaagctttcttgtcgatgcttgcacatctttagaagaccatattcataccgaagggctttttcggaaatcaggatctgtgattcgcctaaaagcactaaagaataaagtggatcatggtgaaggttgcctatcttctgcacctccttgtgatattgcgggacttcttaagcagttttttagggaactgccagagcccattctcccagctgatttgcatgaagcacttttgaaagctcaacagttaggcacagaggaaaagaataaagctatactgttgctctcctgtcttctggctgaccacacagttcatgtattaagatacttctttaactttctcaggaatgtttctcttagatccagtgagaataagatggatagcagcaatcttgcagtaatatttgcaccaaatcttcttcagacaagtgaaggacatgaaaagatgtcttctaacgcagaaaagaaggtacgattacaggctgcagtagtacagactcttatcgattatgcatcagatattggtaagatgtagttgcattattaacagaatttgtttaaatgaggaaaatctctgtttctttcaaaggaactatgaaggcaactgttagaaagttggtatattactgacctcacccccaccctacagtaccggcccctcctgcaaagaaaaaaaaa

SEQ ID NO: 1207 - DNA, 724 bp, Homo sapiens
  misc_feature (646)..(646): n equals a,t,g, or c
  misc_feature (709)..(709): n equals a,t,g, or c
  misc_feature (720)..(720): n equals a,t,g, or c
ggcagagtattggttgggggaaacccacgaggggacgcggcgaggagggtcgctgtccacccgggggcgtgggagtgaggtaccagattcagcccatttggccccgacgcctctgttctcggaatccgggtgctgcggattgaggtcccggttcctaacgaatctctgctggattggccgtaaccctgtccccgagcgggctcacagggtctgaaggccacgcatgaggcaaaggtaaagttctgagccacccggtgcctccttcccaggactgcaagatggaggaaggcgggaacctaggaggcctgattaagatggtccatctactggtcttgtcaggtgcctggggcatgcaaatgtgggtgaccttcgtctcaggtagggaccctcagcttggatgtcatgggtacctggggtggggatggaaataagaggggaaccgggaagtgccctaacacccctgtggtccccataccctgcaggcttcctgcttttccgaagccttccccgacataccttcggactagtgcagagcaaactcttccccttctacttccacatctccatgggctgtgcttcatcaacctctgcatcttggcttcacagcatgcttgggstcagctcacattctgggaggccagccagntttacctgctgttcctgagccttacgctggccactgtcaagccgctggtggaacccggaccanagctgcatgtnggcc

SEQ ID NO: 1208 - DNA, 644 bp, Homo sapiens
ggccgaggagggtcgctgtccacccgggggcgtgggagtgaggtaccagattcagcccatttggccccgacgcctctgttctcggaatccgggtgctgcggattgaggtcccggttcctaacggtgggatcggtgtcctcgggatgagatttggcgtttcctcggggctttggtgggatcggtgtcctcaggatgagatttagggtttcctcggggctttcgggatcttcacctaatatccggactgcaagatggaggaaggcgggaacctaggaggcctgattaagatggtccatctactggtcttgtcaggtgcctggggcatgcaaatgtgggtgaccttcgtctcaggcttcctgcttttccgaagccttccccgacataccttcggactagtgcagagcaaactcttccccttctacttccacatctccatgggctgtgccttcatcaacctctgcatcttggcttcacagcatgcttgggctcagctcacattctgggaggccagccagctttacctgctgttcctgagccttacgctggccactktcaacgsccgctggctggaaccccgcamcacagctgccatgtgggccctgcaaaccgtggagaaggagcgaggcctgggtggggaggtacca

SEQ ID NO: 1209 - DNA, 843 bp, Homo sapiens
  misc_feature (48)..(48): n equals a,t,g, or c
cccatcctgatccaagtgcccttattcaaggtgttgctgatattttgnccttcactgcccactcatartgargcaaattaycattttctgkgaacacagctcagattttggctggaatggctatggcttatgcagtggcaacttcttgttgtagtcttwttgcaaactctgattcttcagcaatatcaacgttttaacatgctcacctcagcaaaagttaagacagctgtaaatggactgatctacaaaaaggccttacttttatcaaatgtttctcracaaaagttttccactggggaaattattaacttgatgtcagcaactcatggacttgacagcaaacctcaatctcctctggtctgccccttttcaaatcctaatggccgtatatctcctttggcaagagctgggtccagcagtgttagcaggggtggcagtccttgtgtttgttataccaataaatgctttagctgcaactaaaataaaaaagttaaaggtgtccctggcaaccttgtgtgtctatttcttactggatgaaggaaacattttaacagccactaaagtgttcacatcgatgtctttgtttaatattttaaggattcctctgtttgagttaccaaccgtgatctcagctgtggtccagacaaagatatccctgggccgtttggaagactttctcaacactgaggagcttcttcctcaaagtattgaaacgaactatacaggagatcatgctattgggtttacagatgcttctttctcctgggataaaacaggaatgccagttctaaaagaggctctgtggcttatgkttctcaacaagcctggattcaaaattgccgg

SEQ ID NO: 1210 - DNA, 793 bp, Homo sapiens
gcccacgcgtccggttctcctgcttgccatcaatggagtgacagagtgtttcacatttgctgccatgagcaaagaggaggtcgacaggtacaattttgtgatgctggccctgtcctcctcattcctggtgttatcctatctcttgacccgttggtgtggcagcgtgggcttcatcttggccaactgctttaacatgggcattcggatcacgcagagcctttgcttcatccaccgctactaccgaaggagcccccacaggcccctggctggcctgcacctatcgccagtcctgctcgggacatttgccctcagtggtggggttactgctgtttcggaggtattcctctgctgtgagcagggctggccagccagactggcacacattgctgtgggggccttctgtctgggagcaactctcgggacagcattcctcacagagaccaagctgatccatttcctcaggactcagttaggtgtgcccagacgcactgacaaaatgacrtgacttcagggaagcctggacacccgaggcacctggaccagctatgggtagttctgtgggtggaacacattctgtgtaagagccccactgagggctctgcagcggagtgacagcaaccccagagatgaggcaccagagagtgccactgcatgagacacctgtgaccattcgaagtctgaaatgcggggggggagtttcatttttaagtgaagaccaaaagccctttaaaaataatagttttttatcattttatagtaaaaaaaaaaaaaaaaaaaaaaaaagggcggccgc

SEQ ID NO: 1211 - DNA, 530 bp, Homo sapiens
  misc_feature (517)..(517): n equals a,t,g, or c
gcctggcagagagactctgaaatgagggattagaggtgttcaaggagcaagagcttcagcctgaagacaagggagcagtccctgaagacgcttctactgagaggtctgccatggcctctcttggcctccaacttgtgggctacatcctaggccttctggggcttttgggcacactggttgccatgctgctccccagctggaaaacaagttcttatgtcggtgccagcattgtgacagcagttggcttctccaagggcctctggatggaatgtgccacacacagcacaggcatcacccagtgtgacatctatagcacccttctgggcctgcccgctgacatccaggctgcccaggccatgatggtgacatccagtgcaatctcctccctggcctgcattatctctgtggtgggcatgagatgcacagtcttctgccaggaatcccgagccaaagacagagtggcggtagcaggtggagtctttttcatccttggaagcctcctgggattcattcctgntgcctggaatctt

SEQ ID NO: 1212 - DNA, 1379 bp, Homo sapiens
ggctcgctcctggggctcggcgggctggacgccgagtgcggccggcccctcttcgccacctactcgggcctctggaggaagtgctacttcctgggcatcgaccgggacatcgacaccctcatcctgaaaggtattgcgcacgatgcacggccatcaagtaccacttttctcagcccatccgcttgcgaaacattccttttaatttaaccaagaccatacagcaagatgagtggcacctgcttcatttaagaagaatcactgctggcttcctcggcatggccgtagccgtccttctctgcggctgcattgtggccacagtcagtttcttctgggaggagagcttgacccagcacgtggctggactcctgttcctcatgacagggatattttgcaccatttccctctgtacttatgccgccagtatctcgtatgatttgaaccggctcccaaagctaatttatagcctgcctgctgatgtggaacatggttacagctggtccatcttttgcgcctggtgcagtttaggctttattgtggcagctggaggtctctgcatcgcttatccgtttattagccggaccaagattgcacagctaaagtctggcagagactccacggtatgactgtcctcactgggcctgtccacagtgcgagcgactyctgaaggggaacarcgcggagttcaaggagtccaagcacaaagcggtcttttacattccaacctgttgcctgccagccctttctggattactgatagaaaatcatgcaaaacctcccaacctttctaaggacaagactactgtggattcaagtgctttaatgactatttatgcgttgactgtgagaatagggagcagtgccatgggacatttctaggtgtagagaaagaagaaactgcaatggaaaaatttgtatgatttccatttatttcagaaagtttgtatgtaacaattacccgagagtcatttctacttgcaaaaggattcgtaacaaagcgagtataattttcttgtcattgtatcatgcttgttaaattttaatgcagcatcttcagaacttgtcctgatggtgtcttattgtgtcagcaccaaatatttgtgcattatttgtggacgttccttgtcacaggaagattcttcttctgttgccttattgtttttttttttttaagtctcttctctgtctttgtactggaatcgaaatcataagataaacagatcaaacgtgcttaagagctaactcgtgacactatgcagtattgtttgaagacctgttgttcaacctctgtctctttatgttaactggatttctgcattaaatgactgcccccttgttaaaaaaaaaaaaaaaaaaaaaaaaaaaaaaaaaaaaaactcgta

SEQ ID NO: 1213 - DNA, 1482 bp, Homo sapiens
  misc_feature (1482)..(1482): n equals a,t,g, or c
cggggaggatgaggaagatgaagacgaggcctggaactgtcaagcggtggctggacggagatgcctgggatcctgtggatggagcctacgcagccgcctgactttgccctggcctatagaccgagcttcccagaggacagagagccacagataccctacccggagcccacctggccacccccgctcagtgcccccagggtcccctaccactcctcagtgctctccgtcacccggcctgtggtggtctctgccacgcrtcccacactgccttctgcccaccagcctcctgtgatccctgccacacacccagctttgtcccgtgaccaccagatccccgtgatcgcagccaactatccagatctgccttctgcctaccaacccggtattctctctgtctctcattcagsacagcctcctgcccaccagccccctatgatctcaaccaaatatccggagctcttccctgcccaccagtcccccatgtttccagacacccgggtcgctggcacccagaccaccactcatttgcctggaatcccacctaaccatgcccctctggtcaccaccctcggtgcccagctaccccctcaagccccagatgcccttgtcctcagaacccaggccacccagcttcccattatcccaactgcccagccctctctgaccaccacctccaggtcccctgtgtctcctgcccatcaaatctctgtgcctgctgccacccagcccgcagccctccccaccctcctgccctctcagagccccactaaccagacctcacccatcagccctacacatccccattccaaagccccccaaatcccaagggaagatggccccagtcccaagttggccctgtggctgccctcaccagctcccacagcagccccaacagccctgggggaggctggtcttgccgagcacagccagagggatgaccggtggctgctggtggcactcctggtgccaacgtgtgtctttttggtggtcctgcttgcactgggcatcgtgtactgcacccgctgtggcccccatgcacccaacaagcgcatcactgactgctatcgctgggtcatccatgctgggagcaagagcccaacagaacccatgccccccaggggcagcctcacaggggtgcagacctgcagaaccagcgtgtgatggggtgcagacccccctcatggagtatggggcgctggacacatggccggggctgcaccagggacccatgggggctgcccagctggacagatggcttcctgctccccaggcccagccagggtcctctctcaaccactagacttggctctcaggaactctgcttcctggcccagcgctcgtgaccaaggatacaccaaagcccttaagacctcagggggcgggtgctggggtcttctccaataaatggggtgtcaaccttaaaaaaaaaaaaaaaaaaaaactcgagggggggcccgtacccaattcgccatatagtgcccn

SEQ ID NO: 1214 - DNA, 4721 bp, Homo sapiens
ccacgcgtccggacagaggctggagaaggctggagaaggatgtatggcctgccctgggcttgtctgttccctcctgagcctgagccccttaccttcctgaccccatgaagcacacactggctctgctggctcccctgctgggcctgggcctggggctggccctgagtcagctggctgcaggggccacagactgcaagttccttggcccggcagagcacctgacattcaccccagcagccagggcccggtggctggcccctcgagttcgtgcgccaggactcctggactccctctatggcaccgtgcgccgcttcctctcggtggtgcagctcaatcctttcccttcagagttggtaaaggccctactgaatgagctggccttcgtgaaggtgaatgaggtggtgcggtacgaggcgggctacgtggtatgcgctgtgatcgcgggcctctacctgctgctggtgcccactgccgggctttgcttctgctgctgccgctgccaccggcgctgcgggggacgagtgaagacagagcacaaggcgctggcctgtgagcgcgcggccctcatggtcttcctgctgctgaccaccctcttgctgctgattggtgtggtctgtgcctttgtcaccaaccagcgcacgcatgaacagatgggccccagcatcgaggccatgcctgagaccctgctcagcctctggggcctggtctctgatgtcccccaagagctgcaggccgtggcacagcaattctccctgccccaggagcaagtctcagaggagctggatggtgttggtgtgagcattgggagcgcgatccacactcagctcaggagctccgtgtaccccttgctggcggccgtgggcagtttgggccaggtcctgcaggtctccgtgcaccacctgcaaaccttgaatgctacagtggtagagctgcaggccgggcagcaggacctggagccagccatccgggaacaccgggaccgcctccttgagctgctgcaggaggccaggtgccagggagattgtgcaggggccctgagctgggcccgcaccctggagctgggtgctgacttcagccaggtgccctctgtggaccatgtcctgcaccagctaaaaggtgtccccgaggccaacttctccagcatggtccaggaggagaacagcaccttcaacgcccttccagccctggctgccatgcagacatccagcgtggtgcaagagctgaagaaggcagtggcccagcagccggaaggggtgaggacactggctgaagggttcccgggcttggaggcagcttcccgctgggcccaggcactgcaggaggtggaggagagcagccgcccctacctgcaggaggtgcagagatacgagacctacaggtggatcgtgggctgcgtgctgtgctccgtggtcctattcgtggtgctctgcaacctgctgggcctcaatctgggcatctggggcctgtctgccagggacgaccccagccacccagaagccaagggcgaggctggagcccgcttcctcatggcaggtgtgggcctcagcttcctctttgctgcacccctcatcctcctggtgttcgccaccttcctggtgggtggcaacgtgcagacgctggtgtgccggagctgggagaacggcgagctctttgagtttgcagacaccccagggaacctgcccccgtccatgaacctgtcgcaacttcttggcctgaggaagaacatcagcatccaccaagcctatcagcagtgcaaggaaggggcagcgctctggacagtcctgcagctcaacgactcctacgacctggaggagcacctggatatcaaccagtataccaacaagctacggcaggagttgcagagcctgaaagtagacacacagagcctggacctgctgagctcagccgcccgccgggacctggaggccctgcagagcagtgggcttcagcgcatccactaccccgacttcctcgttcagatccagaggcccgtggtgaagaccagcatggagcagctggcccaggagctgcaaggactggcccaggcccaagacaattctgtgctggggcagcggctgcaggaggaggcccaaggactcagaaaccttcaccaggagaaggtcgtcccccagcagagccttgtggcaaagctcaacctcagcgtcagggccctggagtcctctgccccgaatctccagctggagacctcagatgtcctagccaatgtcacctacctgaaaggagagctgcctgcctgggcagccaggatcctgaggaatgtgagtgagtgtttcctggcccgggagatgggctacttctcccagtacgtggcctgggtgagagaggaggtgactcagcgcattgccacctgccagcccctctccggagccctggacaacagccgtgtgatcctgtgtgacatgatggctgacccctggaatgccttctggttctgcctggcatggtgcaccttcttcctgatccccagcatcatctttgccgtcaagacctccaaatacttccgtcctatccggaaacgcctcagctccaccagctctgaggagactcagctcttccacatcccccgggttacctccctgaagctgtagggccttgtggggtgaggtgaccctgaggctgcctgtcctcccctttgatttagcctgggccacaggacttcggtagctcttgccccagagcccaggctggcatccaggcctggactgtccccagttccggcttacctggccccaccttgcctgctcctttccacccctttctgctcacgacccccatcattcacgctcagaatcacatgggacttctgtgcagctgcagagccagcaagtccctccaggtgtcaccccttacccccatgctggtggcatcctcacaggaagagcctgttctccacctgctggagcctggaccctggggtgggacagaggcctcgtccaaccccactccccttcccgtgtgtcttccccctgccaagcctccccctgccaagcctccccctgcccctctctgagcccctcgccccccacaccgtcctcatctggcctcccccctggcccccacttccctcttatgcccttcctggccctttgcttcctcccttagtcccctcttcaccatatctccactgctaccttgctggccccagagaccaccctgcccaaccaaaccactcaggtaacgccactaatcaggcaggggccaccatggcctaggtctgggctggctgcaggccctgcctcatggcctctgagccctccactgccccagggccttgggccctctgcagatctcatccaggatttattggtgtccagtggggtgagggaggcctgtctgaaggccgagcctccctgcctgcacccaagttagaaatgggggtaccagcacttagcttctctctgagtgctggctcccaaggaagggacctgggacctgggccacagtgggggcttgcccttacctcttcagaaggaagcatcttccacagcccccacccaactttcttaggagtgatctggtggccagaacaggattttgcacggccccttttatcctgcgcatgtggcctagggtcatccccagcccatccctgtgtcagccctgagtgctggacactgcgttccagaaatgaggaagaggagagagaagagatggacagacctcagatccattaaagtgttctcacttccctgagacttggttctgggtccttaaaaccaggtttcctaggctgggaccctgtacatagttggtgtttaatgagtgtttatggagaggagagttctaaggtcacctctggctgcaggcatccagggattattccagcaatctgcaggtagggagtgggtcccagcctgggagcctgctgtcaggagcaggcagacctggactcacagcctggctgtgatgcttgttcgctcagcttctccatttatgagatggggagaatagtcacagcctcctcaaagggttgtgaaaatcaaatgtgataatttgtggaaagcccttagcagtggcctggcacaaaacaaatgctcagtggatggaagctgcctattattattgtcgttgttgttgtttgccatgactgctctgggccgggggtagagctagcatccgggcatgtacgagggaagagggaggcaggcctctattcaaaggcagaaattcctttaagattgtggtctgctgggtttcagggagtgtctgtgttgtttgtttttgtttgtttgtttgttttgagacagggtctcgctctgtcacccaggctggagtgtagtggtgcagtcttggctcactgcaacctccacctcctgggctcaagcgattctcatgcctcagcctcccgagtagctgggactacaggtgtgtgccactatgcctggctaatttttgtattttttgtagagacggggttttgccatgttgcccaggctggaagtgtctatgtttaactgcatcttataaaccagcaacaagttttctactgggaattagaatggtgcatacacaatgtattattatcactgtcagatgagcatgcttgaatgtagcatgactgcctctttttgcttttcctagaggtttttttttttgcttgttactcatctgttgacctacctgggggaagtagcacccttgcatttcaaaaataaaattgatggcattacaaaaaaaaaaaaaaaaaaaaaaaaaaaaaa

SEQ ID NO: 1215 - DNA, 958 bp, Homo sapiens
cctatagaaggacttctgcaggtaccggcccggaattcccgggtcgacccacgcgtccgtggcttgtcgcgaatcttcatcttagcacatttccctcaccaggtgctggctggcctaataactggcgctgtcctgggctggctgatgactccccgagtgcctatggagcgggagctaagcttctatgggttgactgcactggccctcatgctaggcaccagcctcatctattggaccctctttacactgggcctggatctttcttggtccatcagcctagccttcaagtggtgtgagcggcctgagtggatacacgtggatagccggccctttgcctccctgagccgtgactcaggggctgccctgggcctgggcattgccttgcactctccctgctatgcccaggtgcgtcgggcacagctgggaaatggccagaagatagcctgccttgtgctggccatggggctgctgggccccctggactggctgggccacccccctcagatcagcctcttctacattttcaatttcctcaagtacaccctctggccatgcctagtcctggccctcgtgccctgggcagtgcacatgttcagtgcccaggaagcaccgcccatccactcttcctgacttcttgtgtgcctccctttcctttccctcccacaaagccaacactctgtgaccaccacactccaggaggcagccccatccccttccagcccctaagtaggccctcccctccctaaatctgcttccgcaccacctggtcttagccccaaagatgggccttctctctcccagataagttggtcctccctctgcctttcctctcaagcccccaaagagcaaaggcaacagcaagaccagcgggttcttgcaacactgtgaggggcagccagggcggccccaataaagcccttgaatactttraaaaaaaaaaaaaaaaaaaaaaaaaaaa

SEQ ID NO: 1216 - DNA, 2337 bp, Homo sapiens
  misc_feature (66)..(66): n equals a,t,g, or c
ccccgcctacctcactaaagggaacaaaagctggagctccaccgcggtggcggccgctctagaacnagtggatcccccgggctgcctgggaccgtctcttctatcgtggtgtttttcaccatgcgcattggtacctcgattatctctgccgccagcctctcatttctcggcctcggtgcgcascgccgacaccagagtggggagcaatgctcaatgaggctcgagcggatatggttatcgcgccgcatgtcgctgtttttccggccctggctatttttctgaccgtactggcgttcaatttgttgggcgatggtttacgcgatgcgctggatccgaaaattaaaggatagttacgtttgaatattgcttgaaagggtaatcacctcacaggaaattattgccctaagcaagtgttgtaactttctgctgattttgtagaatcgggtaatttggttaaaaagccgcagcaagggacaatttttgcagcggcacagcgttcagatagttattttgttaaatgtattaacatgctgagtttatacgaaaagataaagataaggctgataattttatttttattggcagcactgtcatttattggtctttttttcatcattaactatcaactggtatcggagcgcgcggtaaaacgtgccgatagccgctttgaacttattcagaaaaacgttggctatttctttaaagatattgaacgttcggccctgacattaaaggactcactgtatttattaaaaaatacagaggagattcaacgcgccgtgattcttaaaatggaaatgatgccatttttagactcggtgggactggtacttgatgataataaatattatcttttttcgcggagggcgaatgataaaatcgttgtttatcatcaggaacaagtaaatggaccgcttgtcgacgagtcagggcgggttatttttgccgattttaacccatcgaaacgaccgtggtcggtggcttcagatgactctaacaacagctggaatccggcatacaattgctttgatcgtccgggtaaaaaakggatctcttttacgctacacatcaacggcaaagatcacgatttgttagcggtggataaaattcatgtcgatttaaactggcgatatctgaacgagtatcttgatcaaatcagcgctaatgatgaagttctatttttgaaacaaggccatgagatcattgccaagaatcaactcgctcgtgaaaaactgattatttataatagcgaaggtaattataatattattgattctgtcgatactgaatatatcgaaaaaacatcagcggtgccaaacaacgcattattcgaaatctatttttattatcctggcggtaatttattgaacgcatcagataaacttttttatctgccgtttgcgttcattattatcgtattgctggtggtttatttaatgaccactcgtgtgttccgtcggcaattttctgaaatgacagagctggttaatacgctggcgtttttgcctgactcaacggatcaaatcgaggctctgaaaattcgtgaaggcgatgcgaaagagattatcagcatcaaaaattcgatcgcggaaatgaaagatgccgaaattgaacggtcaaataaattgctctcactgatctcttacgatcaggaaagtggttttattaaaaatatggcgattattgagtctaacmataatcagtatctggctgtggggatcatcaaactgtgtggtctggaagccgtggaagcggtgtttggtgttgatgagcgcaataaaatcgtcaggaaattgtgtcagcgaattgccgagaaatatgcgcaatgctgcgatatcgtgacattcaatgccgatctctatttacttctgtgtcgggaaaatgtacagacatttacccgtaaaatagcgatggtaaacgattttgacagcagctttggctaccgcaatctgcgcatccataagtctgccatttgtgaacctttgcagggggaaaacgcctggagttacgcagaaaaactgaaactggcgatttccagtatccgtgaccatatgttctcagagtttattttctgtgatgacgcgaaactcaacgaaatagaagagaatatctggattgcgcgtaatattcgccatgcaatggaaattggcgaactattcctcgtctatcaaccgatcgttgatattaacacccgcgccattctgggcgcggaggcgttgtgccgttgggtgtctgcggagcgggggatcatttcaccgctgaagttcattaccattgctgaagatatcgggtttatcaatgagctgggttatcagattattaaaacggcaatgggtg

SEQ ID NO: 1217 - DNA, 1977 bp, Homo sapiens
  misc_feature (1156)..(1156): n equals a,t,g, or c
  misc_feature (1247)..(1247): n equals a,t,g, or c
  misc_feature (1323)..(1323): n equals a,t,g, or c
  misc_feature (1940)..(1940): n equals a,t,g, or c
  misc_feature (1970)..(1970): n equals a,t,g, or c
  misc_feature (1976)..(1976): n equals a,t,g, or c
cgcctgctcccagacccccgggagtcgtaggaacccgttcctggacgctgacgtcggctttcagggatccctcgccggacgccgcggagggacagagcctgggaagccgtcgccccgccccgtccccgcccccgcgcgcagcggcccggggcgctgagacccgcgtagagcaaagcgcaaggtcccagcgccccttggatcctcggtggcagggtccgggcaagtgtcattgcgagggttcaggaagccccggcctgtgatcgtgagcggaaacccctcctggagtttccccaaagccatggacagccctagtcttcgtgagcttcaacagcctctgctggagggcacagaatgtgagacccctgcccagaagcctggcaggcatgagctggggtcccccttaagagagatagcctttgccgagtccctgaggggtttgcagttcctgtcaccgcctcttccctccgtgagcgctggcctgggggaaccaaggccccctgatgttgaggacatgtcatccagtgacagtgactcggactgggatggaggcagccgtctttcaccatttctaccccacgaccacctcggcttggctgtcttctccatgctgtgttgtttctggcccgttggcatcgctgccttctgtctagcccagaagaccaacaaggcttgggccaagggggacatccagggggcaggggccgcctcccgccgtgccttcctgctgggggtcctcgccgtcgggctgggcgtgtgcacgtatgcggctgccctggtgaccctggcygcctaccttgcctcccgagacccgccctagttgcccctacagccctcactgtgaaccctgaggccggcagcccagcaaatctgtgggcagagagtggagaatcttggtggatgaggctgcggcggcggcaggagcatctagaaacgggagcgagctggactggaacccttccccttcctggccaccgctcttcgggcggcagcaacctgagattaaacaccagacacccttgcagccaaaaaaaaaaaaaaaaaaaaaaaaaaraaaaaaaaaaagggcggmcgsccttttttttttttttttttttttttggtagggataarggcagttgtgagaaattgggctaggtaagctggcaaatgaccaggncactgaaattgggcaaggttgtctactgaaagtgaagaggtttgggatttgagtagagccctgaggagagtggtgaaaggtttgaaattgngtttgaagaggctggaaagagaaccatctaatgataagtaaaaggattggagagtaatttgtagcggtacagactntgcagttgtgattaccatttttttttaactcagtgagtggtactcagccacctgaataaaggactaatgagtatattttagtattgattgaggattctgtttttgctgggtaggtgcagtagaaaatatagcagtctaagggaattgaggatgcagtgagagaataataaattgtgatggtgagtgctgaatagggaaagacaagaagccagaaaaagactgagcttcttaggaaaacattaatggatcacaaacttggagggctgtatggtttttcatttaagaaagtaattgtcgtgcaataaagttattaagccttgtttaagaatatttttattttgtacatcaagtggagttggaaatagytggtttcataatgatatatttcaaaagtatcttgaagtcatctggttcatttcactacccagggcacacattcctcctgtaacatcccaagtggttattaagcaaaacagatttattttatttagaaaaaattagtatgactgatttgctattgattttgtacttctataataaatgtgatacatgctatattcaaaaaaaaaaaaaaaaaaaaaaaaaaaaaaaaaaaaaaaaaaaaaaagggcggccgntctagaggatccctcgaggggcccaagctnacgcgng

SEQ ID NO: 1218 - DNA, 738 bp, Homo sapiens
  misc_feature (473)..(473): n equals a,t,g, or c
  misc_feature (665)..(665): n equals a,t,g, or c
  misc_feature (711)..(711): n equals a,t,g, or c
tcgagtttttttttttttttttttatgtggataatatttatttgtatcttatctatagaacaaatatttacagatacaaacggaatcacagcaaagttgctataaaaccatccagacctctcgatggccacttctgaaaacatccacggtgaagggcagggccaggcctggctgtggagtgggccagctgagtacctccctcctgtctggcgggaggctcattctctctcgcagccactcgccctctctgcctctcacatatgcggtcacagagtgaatccgagcatcttattgctgcagggggcaggggcgtcggcatcagggaaagttaatccacgaagagcgagaacagcaccattaccacgatgcccgcacagagcagaagcagctgctgcagggagcgccacgggtcctcttcttccaagaggtcagggagcacgttcaccaaggcgatgtagagaaagccgccagangtgaagggcaggacccaggctgccgtctcctctactcccttgggggactgggtacagatggcgaacagcggcccaktrggccccccagcgctgttgaragttgcagcttkgctggctccatcggtcaaagccggcccggagcaggatggcaaagtcgcccacctcatgggggatctcatgcaggaggatggncatggttgttaggaaccccgatttttctttgcttcacaaggaaagnttggcagccaacaagccaagccccgtt

SEQ ID NO: 1219 - DNA, 1409 bp, Homo sapiens
  misc_feature (1180)..(1180): n equals a,t,g, or c
  misc_feature (1384)..(1384): n equals a,t,g, or c
  misc_feature (1392)..(1392): n equals a,t,g, or c
acaggatctaccccctctgcagcccttcaagaagaggtatgattgctaccacttttccccacaaagtgacgaaaggaaacagcgacggaagcgcaaccgaaccctggaattggtgtctcgactggtccattcccggcccacccccattaaccggctcgagccactcccaggacgaagtcaaggcctcggaaggcgactacaactcccagcaggtcgagcagctccgcccgcgctgattctccattggccttccgggggtggggattagatgggaggtggccgtggggctgcggccgggatttgtcccctcttcggcttccgtagaggaagtggcgcggaccttcatttggggtttcggttcccccccttccccttccccggggtctgggggtgacattgcaccgcgcccctcgtggggtcgcgttgccaccccacgcggactccccagctggcgcgcccctcccatttgcctgtcctggtcaggcccccaccccccttcccacctgaccagccatgggggctgcggtgtttttcggctgcactttcgtcgcgttcggcccggccttcgcgcttttcttgatcactgtggctggggacccgcttcgcgttatcatcctggtcgcaggggcatttttctggctggtctccctgctcctggcctctgtggtctggttcatcttggtccatgtgaccgaccggtcagatgcccggctccagtacggcctcctgatttttggtgctgctgtctctgtccttctacaggaggtgttccgctttgcctactacaagctgcttaagaaggcagatgaggggttagcatcgctgagtgaggacggaagatcacccatctccatccgccagatggcctatgtttctggtctctccttcggtatcatcagtggtgtcttctctgttatcaatattttggctgatgcacttgggccaggtgtggttgggatccatggagactcaccctattacttcctgacttcagcctttctgacagcagccattatcctgctccataccttttggggagttgtgttctttgatgcctgtgagaggagacggtactgggctttgggcctggtggttgggagtcacctactgacatcgggactgacattcctgaacccctggtatgaggccagcctgctgccatctatgcagtcactgkttncatggggctctgggccttcatcacagctggagggccctycgaagtattcagcgcagcytcttgkgaaggactgactacctggactgatcgctgacagatcacctgctgtcmctgccatgactgagccagcccagccggtccattgccaaatctctctttcgcggctacccatactcaggtttgttgcctttggacgtagcttanttacaganagctggtcagcagcagt

SEQ ID NO: 1220 - DNA, 3094 bp, Homo sapiens
  misc_feature (1)..(2): n equals a,t,g, or c
  misc_feature (6)..(6): n equals a,t,g, or c
  misc_feature (23)..(23): n equals a,t,g, or c
  misc_feature (34)..(34): n equals a,t,g, or c
  misc_feature (2498)..(2498): n equals a,t,g, or c
  misc_feature (3089)..(3089): n equals a,t,g, or c
  misc_feature (3092)..(3092): n equals a,t,g, or c
nncaancaacgtgctagactccnctagggttagntggtacgcccgcaggtaccggtccggaattcccgggtcgacccacgcgtccgcaaggagtgtatctacattttggaagctgctccacgtcaaagaatagagttgacctttgatgaacattattatatagaaccatcatttgagtgtcggtttgatcacttggaagttcgagatgggccatttggtttctctcctcttatagatcgttactgtggcgtgaaaagccctccattaattagatcaacagggagattcatgtggattaagtttagttctgatgaagagcttgaaggactgggatttcgagcaaaatattcatttattccagatccagactttacttacctaggaggtattttaaatcccattccagattgtcagttcgagctctcgggagctgatggaatagtgcgctctagtcaggtagaacaagaggagaaaacaaaaccaggccaagccgttgattgcatctggaccattaaagccactccaaaagctaagatttatttgaggttcctagattatcaaatggagcactcaaatgaatgcaagagaaacttcgttgcagtctatgatggaagcagttctattgaaaacctgaaggccaagttttgcagcactgtggccaatgatgtaatgcttaaaacaggaattggagtgattcgaatgtgggcagatgaaggtagtcggcttagcaggtttcgaatgctctttacttcctttgtggagcctccctgcacaagcagcactttcttttgccatagcaacatgtgcatcaataattctttagtctgtaatggtgtccaaaattgtgcatacccttgggatgaaaatcattgtaaagaaaagaaaaaagcaggagtatttgaacaaatcactaagactcatggaacaattattggcattacttcagggattgtcttggtccttctcattatttctattttagtacaagtgaaacagcctcgaaaaaaggtcatggcttgcaaaaccgcttttaataaaaccgggttccaagaagtgtttgatcctcctcattatgaactgttttcactaagggacaaagagatttctgcagacctggcagacttgtcggaagaattggacaactaccagaagatgcggcgctcctccaccgcctcccgctgcatccacgaccaccactgtgggtcgcaggcctccagcgtcaaacaaagcaggaccaacctcagttccatggaacttcctttccgaaatgactttgcacaaccacagccaatgaaaacatttaatagcaccttcaagaaaagtagttacactttcaaacagggacatgagtgccctgagcaggccctggaagaccgagtaatggaggagattccctgtgaaatttatgtcagggggcgagaagattctgcacaagcatccatatccattgacttctaatcttctgctaatggtgatgtgaattcttagggtgtgtacgtacgcagcctccagggcaccatactgtttccagcagccaacccttttctcccatcacaactacgaagaccttgatttaccgttaacctattgtatggtgatgtttttattctctcaggcagtctatatatgttaaaccaatcaaggaacttactctattcagtggaaacaataatcatctctattgcttggtgtcatttataggaagcactgccagttaaagagcattagaagaggtggttggatggagccaggctcaggctgcctcttcgttttagcaacaagaagactgctcttgactgataacagctctgtcaatattttgatgccacaataaacttgatttttctttacattccttttatttttcctttctctaaatttaatttgttttataagcctatcgttttaccatttcattttcttacataagtacaagtggttaatgtaccacatacttcagtataggcatttgttcttgagtgtgtcaaaatacagctagttactgtgccaattaagacccagttgtatttcacccatctgtttcttcttggctaatctctgtacttctgccttttaattactgggcccttattccttattttctgtgagaaataatagatgatatgatttattacctttcaattatatttttctcagttatactagaaaatttcataatcctgggatatatgtaccattgtcagctatgactaaaaatttgaaaaagataaaaatttctagcaagcctttgaagtttaccaagtatagtcacattcagtgacagcccattcattccagtaaagaatcatttcattcactttgggagaggcctataattacatttatttgcaatgtttctcttcgctagattgttacatagctcccattctgttggttttgcttacagcatatggtaaccaaggttagatgccagttaaaattccytagaaattggatgagccytgagattgcytcytaacygggacatgacatttttnctagctcytatcaagaataacaactycccacttttttttaaactgcacttttgacctttttttatggtataaaaacaataatttataaacataaaagctcattgtgttttttagacttttgatattatttgatactgtacaaactttattaaatcaagatgaaagacctacaggacagattcctttcagtgttcacatcagtggctttgtatgcaaatatgctgtgttggacctggacgctataacttattgtaaagaccttggaaatgtggacataagctctttctttccttttgttactgtatttagtttgtgataaatttttcactgtgtgatatttatgctctaaatcactacacaaatcccatattaaaatatacattgtacctgaccctttaatcatgttatttatgccaccaaggttgtggatcttaaggtatgtatggaaaggaactcatttatcaaattgtaagtaatacagacatgccatttaaaagaggtaaattcttgttttctatattttgttagtaaattctcaatgaaataaaaaaaaaaaaaaaaaaaaaaaaaaaaaaaaaccccggggggggnccngg

SEQ ID NO: 1221 - DNA, 3196 bp, Homo sapiens
  misc_feature (668)..(668): n equals a,t,g, or c
  misc_feature (3170)..(3170): n equals a,t,g, or c
agaatgtttcattaaagtgtttaattgaagtaaatgaaaccataacacagatttcatgggagaagatacatggcaaaagttcacagactgttgcagttcaccatccccaatatggattctctgttcaaggagaatatcagggaagagtcttgtttaaaaattactcacttaatgatgcaacaattactctgcataacataggattctctgattctggaaaatacatctgcaaagctgttacattcccgcttgggaaatgcccagtcctctacaactgtaactgtgttagttgaacccactgtgagcctgataaaagggccagattctttaattgatggaggaaatgaaacagtagcagccatttgcatcgcagccactggaaaacccgttgcacatattgactgggaaggtgatcttggtgaaatggaatccactacaacttcttttccaaatgaaacggcaacgattatcagccagtacaagctatttccaaccagatttgctagaggaaggcgaattacttgtgttgtaaaacatccagccttggaaaaggacatccgatactctttcatattagacatacagtatgctcctgaagtttcggtaacaggatatgatggaaattggtttgtaggaagaaaaggtgttaatctcaaatgtaatgctgnatgcaaatccaccacccttcaaatctgtgtggagcaggttggatggacaatggcctgatggtttattggcttcagacaatactcttcattttgtccatccattgactttcaattattctggtgtttatatctgtaaagtgaccaattcccttggtcaaagaagtgaccaaaaagtcatctacatttcagatcctcctactactaccacccttcagcctacaattcagtggcatccctcaactgctgacatcgaggatctagcaacagaacctaaaaaattgcccttcccattgtcaactttggcaacaattaaggatgacacaattgccacgatcattgctagtgtagtgggtggggctctcttcatagtacttgtaagtgttttggctggaatattctgctataggagaagacggacgtttcgtggagactactttgccaagaactacattccaccatcagatatgcaaaaagaatcacaaatagatgttcttcaacaagatgagcttgattcttacccagacagtgtaaaaaaaraaaacaaaaatccagtgaacaatctaatacgtaaagactatttagaagagcctgaaaaaactcagtggaacaatgtagaaaatctcaataggtttgaaagaccaatggattattatgaagatctaaaaatgggaatgaagtttgtcagtgatgaacattatgatgaaaacgaagatgacttagtttcacatgtagatggttccgtaatttccaggagggagtggtatgtttagcaaccactgaatgtgacttaactatgtacaatgttcattcacactagttgatcattttcagattgttcatactttttcttgaggaagaataagctttttcaagttgattttcaagcttactttttatattctaatctgacaaatgaaaatgtaaaatctgagttcagtgtatctaagctgctttacaattttttttcaatgctgtactactgtctcaagatttaaattttaatgcagagtactttattggtgtgaggcacacaggtaagaagaaatgtcaacattaaatgtatgacttacttggtacaaaaattttttaaaaagggaactaccttgacattgtgtattaaatgtttacctaagactataatctcaagtatgatgtttgtttaacatatacctctcaaaatttatcaccactcaatgacmctgcatcaaaattgactataaaactaattcaagaaatatttatatatattttttaatatacaaaaaatatttagcctgatggaatggctttccttttcaaacattattttctaagtttctatacaaatgaaatctttacctctgcatattaatgagccttgccataattactgtagagtggcttttcaaagatattttgttgcactaaaactgtggtagtaaactcagtgaacatgatgtgtggaagagcataattagctggtcaatatttttgtccaaaatacctgcaagagtaataaaatacatacctktcraacatgataattattagtttttttttttcctttctggaacatggattttggtacattagcagtagccttattttaatgctttatgtcctaaacatactaatagaaatgaaaagacscaragagcattycggaatackgaagtactagttttagaaatgagactttcagccaacaatctatagaaagaattttatggaccatcttgttttagttatttaatgttgatgttgttcaaatgggtaaatgtacagaaagaaaattttagagtaaacttggaactttggatataactagaaaaaactagattatagaattagtcggtaacacttgctaatggacattggcattcatctcctttttcctcctaagtgtatgtatgtgttttaagatttctgtttttacgrttaaaactggaaacatgaggttttttgtttttgtttttttacataattacatatattccttctgaatcatttatcytttgagaaagaaatgttacctaaacttcaaatgtgctttttgtttgtgaggtaattaaattgcttctacagtggaggcttacaaaattattgtgacaactattttgaagctgaaaggatagtttttctattgctaagtcatttgaaaaagtgaccattttgccagtgaaatgaagtggaagttagtaggagaatcataaattaaatatattattttgttaataaaaaggcaaagtagtaggtactttttaaaccctcccaaccagccctttctcaatattcatcaaatctaaaacatttagggggcaaaattctaacatgttcatggtatcttgcaaatagtgaaagctttattctgaaggattataaactagttttcttcattttaactagcactattttgtggaaattagaaacctcttttatttctcttcccaaaagtaatacttattataaggctgtagtatcaggttaaggatacagataaataaagttcacttatatcttctnaaaaaaaaaaaaaaaaaaaaaaaaaa

SEQ ID NO: 1222 - DNA, 1690 bp, Homo sapiens
  misc_feature (85)..(85): n equals a,t,g, or c
  misc_feature (144)..(144): n equals a,t,g, or c
  misc_feature (1643)..(1643): n equals a,t,g, or c
cccccccggtttcgtatgttgtgtggaattgtgagcggataacaatttcacacaggaaacagctatgaccatgattacgccaagntcgaaattaaccctcactaaagggaacaaaagctggagctccaccgcggtggcggccgntctagaactagtggatcccccgggctgcaggaattcggcrcgaaggctaagggagtgtggcgggcggctccgggagccaacatgcctcggtatgcgcagctggtcatgggccccgcgggcagcgggaagagcacctactgtgccaccatggtccagcactgtgaagccctcaaccggtctgtccaagttgtaaacctggatccagcagcagaacacttcaactactccgtgatggctgacatccgggaactgatcgaggtggatgatgtaatggaggatgattctctgcgattcggtcccaacggaggattggtattttgcatggagtactttgccaataattttgactggctggagaactgtcttggccatgtagaggacgactatatcctttttgattgtccaggtcagattgagttgtacactcacctgcctgtgatgaaacagctggtccagcagctcgagcagtgggagttccgagtctgtggagtttttcttgttgattctcagttcatggtggagtcattcaagtttatttctggcatcttggcagccctgagtgccatgatctctctagaaattccgcaagtcaacatcatgacaaaaatggatctgctgagtaaaaaagcaaaaaaggaaattgagaaatttttagatccagacatgtattctttattagaagattctacaagtgacttaagaagcaaaaaattcaagaaactgactaaagctatatgtggactgattgatgactacagcatggttcgatttttaccttacgatcagtcagatgaagaaagcatgaacattgtattgcagcatattgattttgccattcaatatggagaagacctagaatttaaagaaccaaaggaacgtgaagatgagtcttcctctatgtttgacgaatattttcaagaatgccaggatgaatgaagagtttactaaaagtaaccatctaaagagcttgtggccaaaccagcagaacattcttctcttcaaaggatgcaatagtagaaagctacttattttaatgaaaaaaagtaaaacttcgttctttatcagcctcatgcctgaatcaaatttttaattattctgaaactgctgctgtttaaagtggaatcttttagtattataacagcatcactttagattttgtaagtcaaaattgaaatgaatgcacatagatttatatataaattagcacctgagctaaggttaaggctggtctaaacttattttcactttttgtattatttttgagatgcaggaattactgtaacaaaatatgtatgtccgaagggaaaaagctgcaaggatatatataagaccactgcttatctgtatcttcccattttcctatattgaaaatgtatattatttatataacttaaaaagtaaaaataactatgttttgaaaaaaaaaaaaaaaaaaactcgagggggggcccgtacccaattcgccctatagtgatcstattmcaattcactggccgtcnttttacaacgtccgtgactgggaaaacctggcgttccccacttaatc

SEQ ID NO: 1223 - DNA, 1630 bp, Homo sapiens
  misc_feature (1557)..(1557): n equals a,t,g, or c
  misc_feature (1601)..(1601): n equals a,t,g, or c
  misc_feature (1610)..(1610): n equals a,t,g, or c
  misc_feature (1624)..(1624): n equals a,t,g, or c
ttttgcaaaaagctatttaggtgacactatagaaggtacgcctgcaggtaccggtccggaattcccgggtcgacccacgcgtccgcggacgcgtgggtggccgctcgccgcccgcccgcccgacggagacgcatcccagctatctgacttcatgtgaaagatggctaatgcagaagtgagtgtcccagtgggggatgtggttgtggtacctactgaaggaaatgaaggggagaatcctgaagacactaaaacccaagtgattttgcagttacagcctgtgcaacaagggatttatgaagctgggtcggagaacaacacggcagttgtagcagtagaaactcacacgatacacaaaattgaagaagggattgatacaggcactatagaagcaaatgaggatatggaaattgcttaccccataacttgtggggagagcaaagccatcctcctctggaagaagtttgtatgtccaggaataaacgtgaagtgtgtcaagttcaatgatcagttgatcagccccaagcactttgttcatctggctggcaagtccactctgaaggactggaagagagctattcgtctgggtgggatcatgctcaggaaaatgatggactccggacagattgatttttaccaacatgacaaagtttgctccaatacctgcagaagcaccaaatttgatcttctgatcagcagtgcaagagctccagtgccaggacagcagacaagtgtkgtgcagacacccacttcggctgatggtagcatcacgcagattgccatctcagaagagagcatggaagaggcagggctggaatggaactcagctctcaccgctgctgtcaccatggccacggaggagggtgtaaagaaagactcagaggaaatttcagaggacactttgatgttctggaaaggaatagctgatgtagggctgatggaagaggttgtctgcaatatacagaaggaaatagaggagctactcaggggagttcagcagcggctcatccaggctcccttccaagtcacagatgctgctgttctcaacaatgtagcacacacatttggcctaatggacacagtcaagaaggttttagacaacagaaggaaccaagtagagcagggagaagaacagtttctctatactctgacagacttggaacgccagttggaggagcagaagaagcaaggccaggatcacaggctgaaatctcagacagttcaaaatgtggtactgatgcctgtgagcactcctaagcctccaaaaaggccccggctccagcggccagcctccaccactgtcttgagcccttctcctcctgtccagcagcctcagttcacagtcatctyacccattcaccatcaccccagtgggktcagtcatttttccatkgggcaatatttccartgggccaccctyagccaggggctccagttcctgtggactgtyccacacattgcctttttgggccttcaggttttttccgttatggccacagtggggttttccttttggccaaggaggcaggttttaaccaggacacagttgaaccattccancctttcattttaggtttggggggttgtttgaggtttttatttgncatgagggntgggggggttaaantggggt

SEQ ID NO: 1224 - DNA, 1335 bp, Homo sapiens
agaaaaagaagataaagagaaaaagagggaagaattgaaaaaaattgttgaagaagagagactaaagaaaaaagaagaaaaagagaggcttaaagtagaaagagaaaaggaaagagagaagttacgtgaagaaaagcgaaagtatgtggaatacttaaaacagtggagtaaacctagagaagatatggaatgtgatgaccttaaggaacttccagaaccaacaccagtgaaaactagactacctcctgaaatctttggtgatgctctgatggttttggagttccttaatgcatttggggaactttttgatcttcaagatgagtttcctgatggagtaaccctagaagtattagaggaagctcttgtaggaaatgacagtgaaggcccactgtgtgaattgctttttttcttcctgactgcaatcttccaggcaatagctgaagaagaagaggaagtagccaaagagcaactaactgatgctgacaccaaagatttaacagaggctttggatgaagatgcagaccccacaaaatctgcactgtctgcagttgcatctttggcagctgcatggccacagttacaccagggctgcagtttgaaaagtttggatcttgatagctgcactctttcagaaatcctcagactgcacatcttagcttcaggtgctgatgtaacatcagcaaatgcaaagtatagatatcaaaaacgaggaggatttgatgctacagatgatgcttgtatggagcttcgtttgagcaatcccagtctagtgaagaaactgtcaagcacctcagtgtatgatttgacaccaggagaaaaaatgaagatactccatgctctctgtggaaagctactgaccctagtttcaactagggattttattgaagattatgttgatatattacgacaggcaaagcaggagttccgggaattaaaagcagaacaacatcgaaaagagagggaagaagcagctgccagaattcgtaaaaggaaggaagaaaaacttaaggagcaaagctactaaagaaagagataaacttttgaaacaagaagaaatgaagtcactggcttttgaaaaggctaaattaaaaagagaaaaagcagatgccctagaagcgaagaaaaaagaaaaagaagataaagagaaaaagagggaagaattgaaaaaaattgttgaagaagagagactaaagaaaaaagaagaaaaagagaggcttaaagtagaaagagaaaaggaaagagagaagttacgtgaagaaaagtcaaaatatatgtgtaatatttaattattttataagttttataataaagtattccatttctttaaaaaaaaaa

SEQ ID NO: 1225 - DNA, 1474 bp, Homo sapiens
  misc_feature (5)..(5): n equals a,t,g, or c
  misc_feature (949)..(949): n equals a,t,g, or c
tctgntcgccgtcgccccgcccctggcctttgcccggtcgggcgggacttcctgtgtcgtatttccaaggactccaaagcgaggccggggactgaaggtgtgggtgtcgagccctctggcagagggttaacctgggtcaaatgcacggattctcacctcgtacagttacgctctcccgcggcacgtccgcgaggacttgaagtcctgagcgctcaagtttgtccgtagtcgagagaaggccatggaggtgccgccaccggcaccgcggagctttctctgtagagcattgtgcctatttccccgagtctttgctgccgaagctgtgactgccgattcggaagtccttgaggagcgtcagaagcggcttccctacgtcccagagccctattacccggaatctggatgggaccgcctccgggagctgtttggcaaagatgaacagcagagaatttcaaaggaccttgctaatatctgtaagacggcagctacagcaggcatcattggctgggtgtatgggggaataccagcttttattcatgctaaacaacaatacattgagcagagccaggcagaaatttatcataaccggtttgatgctgtgcaatctgcacatcgtgctgccacacgaggcttcattcgttatggctggcgctggggttggagaactgcagtgtttgtgactatattcaacacagtgaacactagtctgaatgtataccgaaataaagatgccttaagccattttgtaattgcaggarctgtcacgggaagtctttttaggataaacgtargcctgcgtggcctggtggctggtggcataattggagccttgctgggcactyctgtaggaggcctgctgatggcatttcagaagtactctggtgagactgktcaggaaagaaaacagaaggatcgaaaggcactccatgagctaaaactggaagagkgnaaggcagactacaagttaytgagcacctycctkagaaaattgaaagtagtttmcaggaagatgaacytgagaatgatgytaagaaaattgaagcactgctaaaccttcctagaaacccttcagtaatagataaacaagacaaggactgaaagtgctctgaacttgaaactcactggagagctgaagggagctgccatgtccgatgaatgccaacagacaggccactctttggtcagcctgctgacaaatttaagtgctggtacctgtggtggcagtggcttgctcttgtctttttcttttctttttaactaagaatggggctgttgtactctcactttacttatccttaaatttaaatacatacttatgtttgtattaatctatcaatatatgcatacatgaatatatccacccacctagattttaagcagtaaataaaacatttcgcaaaagattaaaaaaaaaaaaaaaaaagggcggccgctctagaggatccctcgaggggcccaagcttacgcgtgcatg

SEQ ID NO: 1226 - DNA, 2729 bp, Homo sapiens
  misc_feature (695)..(695): n equals a,t,g, or c
tttttttttttttttttttttttttttttttttttttaagcttcagacgggtaatacatatttattgaaaattttcttcaccgacaatggtgaaatcaagacctcaaattacaaaacatggtggcaggtgatacttacaaaaataaagcgaaggtctatgttttacagatttgtgcatgtttccttcaaatctcagtctgtactgtcattaaaaagatcatggaatctatgttgttcctcatgatggaatagtaaaaaaactgcattccactgacaaaaaaaatagctttgcttccaaatagcacaagtctttaaagtgacttttcccaacaataaatatagaaaatagcctttaacaagcgtcttttagcttggtcagggttgtatcatttgtttggaaagtacatccttcccctgcagtcagaagaccccagacagcctttccagttctcccgagtctttggtgcgcacagctgccggcgggaagtctcactggcggcagagccactaagtccctctgacgggatccacaggaatcttctcgatgtaccaggagcctctgcccatcacaggagggcaggcccatgtagaacagactctaacaaacctgcagctggaaactggatcccttttaaaccagccgccaccacagctcggctcacccaccagcgccgtccgtgaaggctctctctggncctcacggtcagccaggctgccggtcacaccgaaggggtctttggcgggtgaacctgctgcatgagctgcgggcgcttcaccctgggcttcctccgcttcggcctgctcttggccttgttgatttgtaccacaaagaaggccaggaccaccatggctcccaggaaggcaaagacaggaatggtctggcccacctcctggttgtagcggccaggcatgatccctccaggaatgtcccaggcgccgctctctccaggggacaagggcctcacttgagggcgattcgatcgaaagttgggtaacaccaccttgtccaggtcaatggagagtagcttctgatgtttccaaaggttactgggcgccgtctcgtttaaaggctgtggcttggcccaagacaagcgtggacaggctggtagaggccgaggttttgggtctcccaaatgggcctccagaaccttggagtaccgatgaagatggtttccttccatcctctctggagtgactgagcctgctccactgggagggcgctggcggttcccagagtgactgaggctaggcggtgtcaccccatacgatgtgtactggaggagggcatccagaagccaaaagcagtccttctgtcggtgactgtcatccaagcaattggagtccccatacagtacaatccggcctccaccctcagctggaatctgataaagtcccaaaatggggacgttttcaacaactgctgtttcctgctttaaaacctccaatccttggtccttgaaagtctgtgttatcacgacgccatcttctggaaacttcgcgatgctgcaccctgacgcataatacatgtcatggttggccagggtgaactccccttcatacaggccatcgctgaaccccatgttccacacagacagcagctcattcagagctgggatgttagctcctccggtatccggcatccaccactgccttgtgttttcatcataaaacttcacttttytcataacagaagtgttgtaccagtcactgaagatgacgagcgagaggccgttgtccacgtccctccggagcttggcgatctcttcagggaagtactcctcctcactgtccaccatcagcaaagtgccatactgactggcatcaaaacacgtgaagggggccccgaggacctctacaaagtagcccatgcttctcagatgctggtacatatccctgaaattggtgtggatgtgatcaccattccagtctaaagggtcattcttcatccttaaattatcmctggggaaatagccaggtggatagcggaggttgtggtactgatcccagagaactctcttgcttcgcgggggagtaggaattatcttcaccttaatggggagctttactgttgaagtctgttctgcaccattttttgactctgtctctgctggggaagccacagtgatcatgacatggccctgagcaatgccttcccaggaagccgctttcttggtcacagaaatggagatggccaggtagcccgaccaaggccataagaccgaggagtaggagaaggcaacttcaatgttgtctccgttctgtggcaaatagggctgccagtcaggcttatctacaattcttcctgtgactcccatgccgttgaggatggtgacattaacaactgtcggcattcctccatagtagatgggctgggagcagtagggccacatgtagggacactcagtcagatctatgtagctggggctcaaacttgcctgtggcttgtagctgttgaggatctgataggctctragcagatcgagcttgccgtggccttgctcaaacatgttgaccccggggagcctccgggctgacgcgatcagggcmtgcttcatactggcgggattcaccagctcacgcttctggactgtgctcactaacaaggtgacagcacctgcaaccactggagaagcaacactggtccctgagagggcccggcacccccctttcacgccagaaccccgcacgccagcaccataggtgacaatgtcaggtttcatgcgaccgtc

SEQ ID NO: 1227 - DNA, 876 bp, Homo sapiens
ttttttttttttttttttttttttttttagaagaaaagagaagttactttattacaatttgttatctcatcccgaggtcagggccccttgcttagtgggaaaaaaaaccctttaggactgagtctcggaacagcacctgtcctaaacccaacttctctgtgatgcccggatttcttgattttgatccagtagctgctcattttcctgccttttacatttaggagattcaagctctgtcatttcctctagctgcccctgaagtccgtccttcctgcagggcccaactccacgtagagtgagtgcagccacacagcagtaaccagatagagcagcctcccctgcagacatgagcaaagaagggatccagagagccaaggctgtatcatagattcttgtggggtcaaaggggcagtcagtatgtcccggcccctcatccagtggtaccagaggatccagcagtcctgggtggcagtcagcaataaggcggcggccaccgttggccacagtgagtgacacagcaagaaggaggcccagggagcaggcaacggacaagagcaggttcaccagagctagtgccagcaggacccagtgcagtggagggcgaagaaggttcctggacgccaggagggccacaagtcccacggaaacgctcagcagccccgagccgacagagatgacattggctacggtgtactccggcgtgacagcgccgcggggattggccacgtgccgcaggacggtgccatgcagcacggcccccagcagcaggttcacgtggcccaccaagatcagcgcgaggcccacacgcatcagccgcctgggcccccgggcggcgtcgaaagcgcagagactgcagcgcctcatcccgtctgtgcc

SEQ ID NO: 1228 - DNA, 979 bp, Homo sapiens
  misc_feature (967)..(967): n equals a,t,g, or c
  misc_feature (978)..(978): n equals a,t,g, or c
tggaaaatttcttagttttgccggatatgaagtgaaaaggtgagatgcatcacgcttcgcgcggtgtctgggcgttcaaaaagggcagtaacagcagtgcggaaatcccggcggcgatagagataaccacaaaaaatccgctccagtgccaggtatcgagtactttcgccagcggccaaccagcaagcgacgcccccagataagcaaacaagccgacaaaccccgtcgccgcccctgccgcctctttgtgggaacactctgccgccgccataccgattaacatctgtgggccaaagacaaaaaaaccaatggtgaagaagcaggttgcctgcatcacgtagctggcaaatggcatcagccacagggagccgactgaaagcaaaattccggcggcgaaaatcaaattcatcggccctcggttgccgttaaacaatttgtccgagccccaaccggctaccagcgcaccgataaatccgcccagttcaaacatcgtcactgccgtattcgccgtgaccagatcgacgcccagtgtctcggacatatacaaattgccccagtcgttgatcgccgcccggaccacatagaccagcacatagcaaaacgaaagcagccagatatacggattcagcaacacatatttggtgaggatctctttacgcgtcaaccctgccccttcttgttgttgagcaatttccagcgcgtcgtgtcgccattcaccgaccgccggtaaacctaacgcctgcgggcgatcgcgtagccgccagcagagaaaaatccccacgactatcgccatacaaccagcaatcatcatcccggcacgccagccgtaatgcagcgcagccgctgccatcacaatgggaatgagtgcgccgccgacgttatgcgccgtgttccataatgcccaggggatccactagttctagagcggccgccaccgcggtggagckccagcttttgttaaatttantgaggagtatnt

SEQ ID NO: 1229 - DNA, 857 bp, Homo sapiens
tcgagaactacaagttagaaaaggggaagaactgtgttggttcaaggcccccagagaactgttctgtatgagaccctccatccctagcctactgacagctgacagagaagaaaagtgggtaccgccgccccaccactctttaggaggctgaacatcctgggagctaggggacctgctactaggaggaaactctaggaggaaagcaagcaaatgtctggggagagacgccaggatctgcatgtgagtgtgtcagatggacatgtggctagaatccttttgcttaagtttgcaattcaaagaaatacaggggccggacgcagtggctcacgcctgtaatcccagcactttgggaggccaaggcgggcggatcacctgaggtcaggagttcaagaccaacatggtgaaaccccgcctctactaaaaacacacaaaaaattagccgggcgtagtggcgggcacctgtagtcccagctattcgggaggctgaggcaggagaacggcgtgaacccgggaggcggagcctgcagtgagctgagatcgcaccactgccctccagcctgggcgactgagcgagactccgtttcaaaaaaaaaggaaaaaagaaatacagaagatagagcctgtttgtgcctgcacacctgagagcaggccacgggaacatgagattgatgtctttaatcttgtcagaacggatagacattggggcaaagaaatgagtacggtagagaaatgtggccacgtattctgcagaccccaccccaccccccatgccgactatgttgcctcgtgccgaattcctgcagcccgggggatccactagttctagagcggccgccaccgcggtggagcgccagctt

SEQ ID NO: 1230 - DNA, 1877 bp, Homo sapiens
  misc_feature (36)..(36): n equals a,t,g, or c
  misc_feature (1814)..(1814): n equals a,t,g, or c
  misc_feature (1840)..(1840): n equals a,t,g, or c
  misc_feature (1849)..(1849): n equals a,t,g, or c
  misc_feature (1865)..(1865): n equals a,t,g, or c
  misc_feature (1875)..(1875): n equals a,t,g, or c
tgcggcaataatgccgttcagattatcgcgcagtcntggttaaaatgacgatcgtggatgatgacatttgcttcgagattcagtgacaaactgagcggatcgagattactggaccctactgtcgcccagtgatcgtccatcaatgccactttgccgtggagcgggcggcggcggtactcaaaaacctgaacgccgcctttaaccagatagttatacagcaagcgcgcaccgactctgacaatcggcatatccggttcgccctgaatgatcagtttgatccgcaccccgcgccgtgccgctttacgcaaggcgtgtaaaaatcgatagccggggaagaagtaggcgttggcgataatcacttcccgccgcgcctgagtgagcattttcaaataatggcgttcaatatcatcgcgatgttcttcgttatcgcgccagaccagcaatacctgcgcttctcccggctggcggttctcttccgctttgtgatgacgtcgccaccagcgtcgtgccgcgctctgtccaggcaggttttccagctcaaactggagaatatcttcgacaatcggcccttcaaggcgtaccgcgtaatcctgtttagcctctggaccgtagctggacatatgctcggcggagtaattcagcccgccaataaaggctatacgcgcgtcgatcaccacaattttgcgatgcatccggcgaaacacattggtgcgcataccaaaaaggcgagggcggggatcgtagtagcggaacactacgccagctgccgtcagttcattgacaaactcatcgctgagatccggcgaaccgtagccatccagcaagacttccgctttaaccccgcgttgcgctgctgccagtagtgccgcatgcagttgtttgccgacgtcatcctcaaaccagataaacgtttcaagaatgatgcgttcttgtgcctcgccaatcgccttaaacaccgcgggataatattgctcgccgttttccagcaactggatcttattgccttcgcgccagctacatttcataaatgaatctccgcacttaaaggggcatgatcagaaaggtgtcgccatgtccgcagcggcaacgcggttggcgcgctggcgctggcatttttgacgtagatcctgtccagtcgtagtagaggaaattgcaccggaaacgtgcgcgccgggcgtccgtgggcgcgggtaaaaatctcatccagtccggcctgcacttttaacggatgattagctttttgccgccagtcattgaaatcacccgccaccaataccggttcgccgtccggtagctcattcacccattcggcgagcatcgcaagctgcgcctgacggtgcgcctcacgcaggcccagatgtacgcacatcacatgaatcgcttttccggtcatcggcggcacaatgcggcagtagagcacgccgcgcttttccgcaccatcgaccgaaacatcgcgattctcataatgttcaatgggataacgcgacagtacggcgttgccgtgatgcccttccgggtatacggcattgcgaccgtaggcaaaatcgctccacatagtgtcggcgagaaactcgtagtgcgaggtatcgggccagttttccacatgcagcggatgaacttcgtgcgcgcccatcacttcctgcaggcaaacaatatcggcgctgacggtacgcacggcgtcgcgaagttccggcaaaatgaagcgtcggttaaacgcggtaaagcctttgtgaatattgatggtgagcaccttgaacgaaaattgttgtgtttgatckggcataattttcctgctttgcctcttatctcattgnaatagtgtagtcggcgtcacaaaaanggtgcggcnttacggaatttttccnaaaagtcggnac

SEQ ID NO: 1231 - DNA, 1183 bp, Homo sapiens
  misc_feature (968)..(968): n equals a,t,g, or c
  misc_feature (1074)..(1074): n equals a,t,g, or c
gtgcgtgggtccggctttcggtgactagacggtccgcagggacatcccgtccctggggcctccccagtctccctccccctcgcgcctgggcagctctctcccagggcttcggctcgagcctgcgacctgcacggacacccccccctcaggatctaaaatgtccactgaggcacaaagagttgatgacagtccaagcactagtggaggaagttccgatggagatcaacgtgaaagtgttcagcaagaaccagaaagagaacaagttcagcccaagaaaaaggagggaaaaatatccagcaaaaccgctgctaaattgtcaactagtgctaaaagaattcagaaggaacttgcagaaatcacattggaccctcctcccaactgtagtgctggacccaaaggagacaacatttatgaatggaggtcaactatattgggacccccaggatctgtctatgaaggaggggtgttctttcttgacattaccttttcaccagactatccgtttaaaccccctaaggttaccttccgaacaagaatctatcactgtaatattaacagccaaggtgtgatctgtctggacatcttaaaggacaactggagtccggctttaactatttctaaagttctcctctccatctgctcacttcttacagattgcaaccctgctgaccctctggtgggcagcatcgccacacagtacatgaccaacagagcagagcatgaccggatggccagacagtggaccaagcggtacgccacataggggcctgctgcctgccgccccgcgggacctgtgcaagcacattcaccaagtgcatcggtagccctgcccacccctccagacctcggttcttattttcctatttttattaaatttggaaccattttgtgatggtatgttgtccatcttcccatcccagttcttcctgccccccttcctctctcccacgctctcttttatctctcanttttatycccktggttgatttctgttawcttgaaagatkkgggattttyycccacctcatcatagatgggaacttktgtttwcagwrcaaacaatgttgggctgtnaatagtaagagctttcttacaaagctktgtattrctgtgtggttkggtctcggtgtcgctgtcatgtggattggattcctctctctttgtgtactctgggaaaaaatca

SEQ ID NO: 1232 - DNA, 1937 bp, Homo sapiens
  misc_feature (1884)..(1884): n equals a,t,g, or c
  misc_feature (1893)..(1893): n equals a,t,g, or c
aagaggagctgggcaggaggcagggcaaggagaaagctgttcgggggtcttgtctggattttggttgcctcctccaatgttcctctacctctactacaaggatgggtcatgtttgtgtccgtgacagcgtttttcttttcgctcctctttctgggcatgttcctctctggcatggtggctcaaattgatgctaactggaacttcctggattttgcctaccattttacagtatttgtcttctattttggagcctttttattggaagcagcagccacatccctgcatgatttgcattgcaatacaaccataaccgggcagccactcctgagtgataaccagtataacataaacgtagcagcctcaatttttgcctttatgacgacagcttgttatggttgcagtttgggtctggctttacgaagatggcgaccgtaacactccttagaaactggcagtcgtatgttagtttcacttgtctactttatatgtctgatcaatttggataccattttgtccagatgcaaaaacattccaaaagtaatgtgtttagtagagagagactctaagctcaagttctggtttatttcatggatggaatgttaattttattatgatattaaagaaatggccttttattttacatctctcccctttttccctttccccctttattttcctccttttctttctgaaagtttccttttatgtccataaaatacaaatatattgttcataaaaaattagtatcccttttgtttggttgctgagtcacctgaaccttaattttaattggtaattacagcccctaaaaaaaacacatttcaaataggcttcccactaaactctatattttagtgtaaaccaggaattggcacactttttttagaatgggccagatggtaaatatttatgcttcacggtccatacagtctctgtcacaactattcagttctgctagtatagcgtgaaagcagctatacacaatacagaaatgaatgagtgtggttatgttctaataaaacttatttataaaaacaaggggaggctgggtttagcctgtgggccatagtttgtcaaccactggtgtaaaaccttagttatatatgatctgcattttcttgaactgatcattgaaaacttataaacctaacagaaaagccacataatatttagtgtcattatgcaataatcacattgcctttgtgttaatagtcaaatacttacctttggagaatacttacctttggaggaatgtataaaatttctcaggcagagtcctggatataggaaaaagtaatttatgaagtaaacttcagttgcttaatcaaactaatgatagtctaacaactgagcaagatcctcatctgagagtgcttaaaatgggatccccagagaccattaaccaatactggaactggtatctagctactgatgtcttactttgagtttatttatgcttcagaatacagttgtttgccctgtgcatgaatatacccatatttgtgtgtggatatgtgaagcttttccaaatagagctctcagaagaattaagtttttacttctaattattttgcattactttgagttaaatttgaatagagtattaaatataaagttgtagattcttatgtgtttttgtattagcccagacatctgtaatgtttttgcactggtgacagacaaaatctgttttaaaatcatatccagcacaaaaactatttctggctgaatagcacagaaaagtattttaacctacctgtagagatcctcgtcatggaaaggtgccaaactgttttgaatggaaggacaagtaagagtgaggccacagttcccaccacacgaggggcttttgtatkgttctactttttcagcccttttactttnctgggctgnaggcttcccctgggagtggcctgtattaagttggggctatttag

SEQ ID NO: 1233 - DNA, 857 bp, Homo sapiens
atccggccccggtccccgtccccttccctcccccctgccctaagccacctccacctctgtcctggccgcctcagggcgccctgaaaggaccaggacatgcggctgcgcttttggctcctcatttggctcctgctgggatttatcagccatcagcccacccctgttatcaatactctggctgaccatcgtcatcgtgagactgactttggtggaagtccttggataattatcattattgtgtttctgggacgttacaaatttaccattctcttctgcacaatttacctttgtgtgcctttcctgaagactatcttctggtctcgaaatggacatgatagatccagggatgtacagcagagagctaggaggtccaaccgctgtagacaggaaggaattaaaattggcctggaagacatctgtactttatggaaacaggcggaaacaaaagttcaagctaaaatccgtaagatgaaggtcacaaagaaagtcaaccatcattacaaaatcaatggaaagaggaagaccgccaaagaacagaaaatgtttcaacgtgcgcaagagttgcggyggcgggcagaggactacyacaratgcaaaatcaccccttctgcaagaaagcctctttgcaacygggtcagaatggcggcagyggagcatcgtcattcttcaggattgccctactggccctacctcacagctgaaactttaaaaaacaggatgggccaccagccacctcctccaactcaacaacattctataattgataactccctgagcctcaagacaccttccgagtgtgtgctctatccccttgccaccctcagcggrtgataatcttcaagacacctcccgagtgt

SEQ ID NO: 1234 - DNA, 1788 bp, Homo sapiens
  misc_feature (5)..(5): n equals a,t,g, or c
ttttnttttttttttttttttttttttttttttttttttttttttttttttttttttttttttttaaaggtgctacacaagagatatttattaatgttctgttgtatttacagttttaacatagcaaaccaagatgaattaccacttgggcagaaagcacatcattctacattataacccactggtttctgctaacacattgtaaaagcaagtagtacagtatgttagggatcatctcaaaagttccaagctacttctttctttgctcctaagtacctaatcctctccttactcccagactttggcctaatcaccaggagacaaaaggaaaataaggggggtgggggtgggggtgggggtgaagaacgctaattatagaaagagtgtcaagaattacattttagtaattaagcttcatttgtatcctagtgctttctgttttatacagtgacaacacctttagaatcccttaggtacaataaggtaccgcagaattgtgaatacaggctataaaaaattaatgcttattatttaccaattaaagacttatttttgaccacaccttaaatgtatttttgcactatgattttgcttccaggtgttcatacagaattgaataaatttctagattaacttgaacagcaaatatggattatgtgcaaaaacacagtcataacaaaagtttaacttttgagaaaacccctttaaaatggccagcattatacatatcttacaatatttaattccaagttcattttgagatggaggatgaataaagcaagactgccccctaccgactacagggacatggctcatgctacttaaaatgactacaaacaatatataaggcattattaatacatcacagacttgattgcaagagctttttcaaacattaaccactaatgattcaatgattacagaattctgcattaactattaaaattttacacctaggaacaaatagagagaaatgatcttttcaacagtactttatttttttaaagcaggtgattattcctctgtgttctgcatcttgattcacttcctgcaggtgttctcttgcttcttgagagagaattcataaatgcagggaaataggtggaaaacctgacaatcaggatccatttaattagagagagaccaaatcctgaaatggccccataccttcctgcagctgaagtggtcaggcaaaaagacaggaaaaacccaatccagttaaagaggaatgccatgaaaaaagttaacatgaaaatcccatcatttcctatcctcagctggtcagcatcatcaaaatcatcccgacccacaaaatcctcatctctcccaggaaccaaagggatagtagcttcagccttggtcctctccgcttcatcataactgggcagtgttgtagctacattgtaagatgggggctttggaaacccagactcatccttgtagtcaaaatatgctgcgctctctgcagaaatgctgctgtaaggtggaggagcatcacctgcagcctgttcaggttctccagactcttcttcattctgcaactgctggtaccggctgccgcaggccggctcgaccgccgccagcgccgccaacgccaacgccatggcgcagccggcagcagggaagcagagcgagcgagcgagctagctgaaggggcgcggccgctgcggcttgggagcgctgggaggccgagggggacgcgccttgggtgggtctcgatggccgccgccgctcccgggcgagacgctcttctcaggctgtaagcaccgccgccgccgccgaggatcc

SEQ ID NO: 1235 - DNA, 2387 bp, Homo sapiens
agttgtattcatgtgttctgagttctgcattaatccagatcttatgctttttaaagacatggctggtgtcttctttgttcgtcaaggcaatgtatggaatgatggaaggaacacaggatttattgtcaggcattgctgagttttaaacacagctctacctcttactagctttgtgaatttgggcaccttattgaacttcaatgagctcatctagagtcatgcattctatggctgtcacaaagatgggtcctttctgtttcttctgtgtctgctacagaacccaatatggcatgatacaggtaacagttgctcaagttagacatttaaagggaatgatatttgtgatgatagcaatcttgctacttgttccatccatcattttgtactctatactgttaggcaatagggaagggctgaggctctacctctgggagtcagcaaacttcccgaaaagggcaagagaataaaacacttggactctggaggccagacagcctctggtgcacctacttaattctagcattgtagtatgaaaacagccacagaaatacgtagaggactgggaatgattgtgtcctaataaaacttttttcaaaataggcaggagactaggtttggcctatgggccaaagtttgccaacccgtaatgatataatggttcttgcagaaattattttggctttctgacagcatgactctaagtgtggtctgtggacagtacacagactttttattagcagtctgcaatgagacaaggagcttcmccagaagaaaccaactacattattcagcagattgtttacttcagctgacattttgttgtgtttgttttcgaagcaagacttcgccaatgaaagaartaattgatttatattctggtacaagcaccttatctatcacagaccagtagcaaacagcacaaaagcactttgagtggcactgttctaatcattcaccaggaaacacagactgtattctttatgatcaccaaaaacaagaatgaaagctcaaaacccaattttsccttctcaccattctccttcttctcccaggatgtgcccctgattagcctggccaacatcttgcacaatgccaagctctggaatgacgccgtcatagtagccaccatggcagtagagatcgcaccacactttgctgtgaaccacttcactctgggcaatgtctacgtggcaatggaagaatttgaaaaagcactggtgtggtatgaatccacattgaagcttcagcccgagtttgtcccagccaagaaccgaatccagaccatccagtgtcacttaatgctgaagaagggacggcgctctccttagtgcacttcttccttctctctttctctttactcatgctctaaaaaaaaagaataagaaaagaaaccaatcattgtcagtatctactattaatgatgtgtgtgaaaataactaagacttataacaggacttttacatatgtgggaattggtttgtttttgtttttacgtttctcctttcccccaaccaacctcagaagaggcaccttcagaaacacacatttcttaaaaggaaagtgcagcttcaagatattgtgtaaatactgagccaagacatttctggagctgtgctctgtctccaaaaacctcaatgcctttagggcttttctcagtggtccagctagccttctctttggaggaggatgaagccgcattgcacattctctgcttcctgtcgtagcctctgttgtcaatggaaatgcggaagcccatctggtgcccgtcagtgagaagcaacgttctgcgctctctccgttagacctccatgctgtccccagtcttgtccattccatgctgctgtgttacaaactctcagaggtagtttgcaggggaggaaggggaatatgattttaaaaacaaaatatttacaacaacaaaaattcttaggatcacctgacctttgtaatgttatttatgttggggagggaggggggctgagaaggggaaatcagcagtgtgcaacatctttataatttgtactttaattacaaatcacaaggaaaccaataagttgaaatcctatataacaggtttatatatatagaatatgtatatttgaagccctctacagactgagtctatgttttactaattctttgttcactgtgttacccatcttggaataagttgtgaatgtcagctccctctctctgaggcctccagacttagctcctcaggagggtaatgagccaaggttgagtgtttccatacaatgcttttacctttgatcccaggagaatcagaaactccaacattttggaatcttcaagggcacatactgagaaaaaaaataaaattgtttatgagcaaaaaaaaaaaaaaaaaaagatctttaattaagcgg

SEQ ID NO: 1236 - DNA, 2166 bp, Homo sapiens
cctcgagttttttttttttttttttttttttttttttttttttttttttctggctacaaattttattccgttacaaatagcaccgagcccttggggctgcccctgtggagagggatccccctcctggacccccacctcctcccctgagctacccakgtagtgtctgggagctggcacacggcccagggtccctctggaagctgggccaggccaaggggttaggcccaggcccttcgtggggtgggcccagggccagctgtggcagatgtgcaggtaggtgagcggcagcctctcagatgagcacactggccacgggcacgcgggtggagcggccccgctggggcaccacaatccggtcgtctgtggaccctgcttcgtgcagcaggccctgcacgtgcagctgtgcccgccggcggtcggcctcaatgaagatggcggtgcccaggaargctgcgccgcccagtgccccaacaaacgcgcagagcatgagcgagaactgcagagcccggaactcggacaagaaggaggggggccagttccggcgcaggcggtcagagatcaggccaatgaggtaggggctcccagcatcacccagcaggtgggacagcacgatctggaaggcctcggcggtggagcgtcgggtagggatcaccacgtacagcagaatgtcggccacgatggcccagttcatggacaggagggtctctccaatgaagatgaaaatataagtggccacgatgctaccacgggcgcaggcaagggacaggaagaggaagggtgcagagcccaggaggccagtggcacagaccaggggatcagcccgggggttggagtggcggagccggcggctgatctccacacccaggcccacacccaggactccggtcaggcaggtgatgagtccaaagatgagactgtcagaggaagagcaggagtctccgggaaggcagggtggggtctccccaaggaccacgcgggaacgcagcaggaatgccggagcccacagagccagggagcccgtgacaaaggccacagcagtgaagcccagggaagacaggacgaaactaggatttcttgccagagccctcagatctgcccaccacgaggtggggttcaggggtggcaaatctgagtggcgctccacggctccccttggcggctcccgcactaccaggaacagcagcagaacggccaccactcctagacccggtgtcaccctcagagcccagtgccagtctccagccatatccttcactttggagcctgcaatgtagcccagaccactgcccaccggaatggcaaagtagaagatgctgagcatccggctccgctggtcggccacaaagaggtcggcaatgagagtgggcgcgatggtggaataactggcctccccgacccccaccaggccccgggtcaggaggagcagccagaaatgctctccggggatgaaggatgaccccagtgtcaccagggaccagaaggcaatgcccccgcacatgagatacttccgattgtacctgtcacccaggtagccaaacacaggtgccaacaccatgtaactggagatgaacacggtctggatgagcccagagctactgtccccgatgttgaagaactgctcgatgtcgggaaggacgccagccacggtgaagcggtccatgtagttcaggagattgatgtagcacagcaccgccactatgagagccgaacggccgggagacaggccgktgatgcgctgcagcccctcctggtycgggacctcgggctcctcggacttcgggttccccgtggaccytggcaaccccggggtgccaggcactggcccgtcgtccgggtcatccgcctgcgaggggaggaggctggagaaaggaggatggaccgaacacaggcgagggaagtgcgcccggagacggggagcttgccctgaagcacagagcaccactgagaagggacccgggccctgtcacgcctccccgtctcagtagacacacagcgcggaggggacgtgcggaatacacgtgatgtcggggacaggagcgggctgaagagggcacgatcccacgcggaggccacccctcacccggggtaggagcccgctgcacttgctgtcgctcagcccgggcgctgcaccacggcagccgccatgttgccggacgcgtgggtcga

SEQ ID NO: 1237 - DNA, 2189 bp, Homo sapiens
cccccgggctgcaggaatgtttctgggcaaaaccatgacccggaacagattgatttgattgatttactagtgcagttgtggcgtggcaagatgacaatcatcatttccgtcattgtggctattgccctggctattggatatttggcagtagcgaaggagaaatggacgtcaacagcaattatcactcagcccgacgtggggcaaattgctggctataacaatgccatgaatgttatctatggtcaggctgcaccgaaagtatcggatttgcaggagacgttaattggtcgcttcagttctgccttctctgcattagcagaaacgctggataatcaggaagaacgagaaaaacttaccatcgaaccttctgttaagaaccagcaattaccattgactgtttcttatgttgggcaaactgcagagggcgcacaaatgaagttggcccaatacattcagcaagttgacgataaagtgaatcaagagctagaaaaggatctcaaagacaacattgctctgggacggaaaaacttgcaggactctttaagaacgcaggaagtagtcgcgcaggagcagaaagatctgcgtatccgtcagattcaggaagcgttgcagtatgcgaatcaggcgcaggtgacaaaaccgcagattcaacagactggcgaagatatcacacaagatacgttgttccttttggggagcgaagcgctggagtcgatgattaagcatgaggcgacccgtccgttggtgttctcgccaaactactatcagactcgtcaaaacctgctggatatcgaaagcttaaaagttgatgatcttgatattcatgcttaccgttatgtgatgaaaccgatgttacctattcgtcgtgatagcccgaaaaaggcaattaccttgattctggcggtgctgctgggtggcatggttggcgcggggattgtgctggggcgtaatgctctacgcaattacaacgcgaagtaatcttttcggttttaaagaaaaagggcagggtggtgacaccttgcccgtttttttgccggatgcggcaacaatatcgcatccgcttaccccgcaactcactgatgccgtttacgcaggttctcaattaccgtcgttaaatccagcccctgatcctgcaacaacaccagcaggtgatacatcaaatcagacgcctcgttggtcagctcaaagcggtcatgtaccgttgctgccagcgcggtttccacgccttcttcacccactttctgcgcaatgcgtttggtgccgctggcagcggccgcaactagccggttacgcatgggcagcatgatgagcaacgtgattgcggtctgtgaccgcgaagccgatattcatgcttatctgcaggacaaactggcgcataacgagcgcttcgtggtgcgctccaagcacccacgcaaggacgtagagtctgggttgtatctgtacgaccatctgaagaaccaaccggagttgggtggctatcagatcagcattccgcaaaaggcgtggtggataaacgcggtaaacgtaaaaatcgaccagcccgcaaggcgagcttgagcctgccagtgggcgcatcacgctaaaacaggggaatatcacgctcaacgcggtgctggccgaggagattaacccgcccaagggtgagaccccgttgaaatggttgttgctgaccagcgaaccggtcgagtcgctagcccaagccttgcgcgtcatcgacatttatacccatcgctggcggatcgaggagttccataaggcatggaaaaccggagcaggagccgagaggcaacgcatggaggagccggataatctggagcggatggtctcgatcctctcgtttgttgcggtcaggctgttacagctcagagaaagcttcacgctgccgcaagcactcagggcgcaagggctgctaaaggaagcggaacacgtagaaagccagtccgcagaaacggtgctgaccccggatgaatgtcagctactgggctatctggacaagggaaaacgcaagcgcaaagagaaagcaggtagcttgcagtgggcttacatggcgatagctagactgggcggttttatggacagcaagcgaaccggaattgccagctggggcgccctctgggaaggttgggaagccctgcaaagtaaactggatggctttcttgccgccaaggatctgatggcgcagggggccc

SEQ ID NO: 1238 - DNA, 1164 bp, Homo sapiens
  misc_feature (1151)..(1151): n equals a,t,g, or c
  misc_feature (1163)..(1163): n equals a,t,g, or c
gggatgcaggacgctcccctgagctgcctgtcaccgactargtggagcagtgtttcttccgcagactcaactgagaagtcagcctctgsggcaggcaccaggaatctgccttttcagttctgtctccggcaggctttgaggatgaaggctgcgggcattctgaccctcattggctgcctggtcacaggcgccgagtccaaaatctacactcgttgcaaactggcaaaaatattctcgagggctggcctggacaattactggggcttcagccttggaaactggatctgcatggcgtattatgagagcggctacaacaccacagcccagacggtcctggatgacggcagcatcgactacggcatcttccagatcaacagcttcgcgtggtgcagacgcggaaagctgaaggagaacaaccactgccacgtcgcctgctcagccttggtcactgatgacctcacagatgcgattatctgtgccargaaaattgttaaagagacacaaggaatgaactattggcaaggctggaagaaacaytgtgagggsagagacctgtccgastggaaaaaagrctgtgaggtttcctaaactggaactggacccaggatgctttgcagcaacgccctaggrtttgcagtgaatgtccaaatgcctgtgtcatcttgtcccgtttcctcccaatattccttctcaaacttggagagggaaaattaagctatacttttaagaaaataaatatttccatttaaaaaaaaaaatttaaaaaaacttttggggggggccggtacccaattcgccctatagtgagtcgtattacaattcactggccgtcgttttacaacgtcgtgactgggaaaaccctggcgttacccaacttaatcgccttgcagcacatccccctttcgccagctggcgtaatagcgaagaggcccgcaccgatcgcccttcccaacagttgcgcagcctgaatggcgaatggcaaattgtaagcgttaatattttgttaaaattcgcgttaaatttttgttaaatcagctcattttttaaccaataggccgaaatcggcaaaatcccttataaatcaaaagaatagaccgagatagggttgagtgttgttccagtttggaacaagagtccactattaaagaacntggactccaacnt

SEQ ID NO: 1239 - DNA, 1724 bp, Homo sapiens
  misc_feature (314)..(314): n equals a,t,g, or c
  misc_feature (1076)..(1076): n equals a,t,g, or c
gcggccgcccttttttttttttttttttttttttttttttttttttttttttttttgagatggaatcttgctctgtcacctaggctggagggcagtggcacaatctcggcttactgcaacttccgcctcctgttttcaagccattctcctrcctcagcctcctaagtagctgggattacaggcgcgcaccaccatgcccagccaatttttgtatttttagtagagacagggtttctctatgttggtcaggctggtctcgaattcctgacctgctgattcgcccacctcagcctcccaaagtgttaggattacangcgtgagccaccgtgccgggccaagggcaatycttaaaagcacagctttttagactccacaccaaccagaatgtgatccaacagatttgagattagggtctcagctccccgggtgactgtacacagccacatttagggactgatgacctagagaactgggctgtgaaatgattgagatatctgtggctaaagacacctcaagacctctctagggctcatgagatcttggtaggcctgttaccctcactgccagtcctctctgatccaggaatgaaaagctttctaaagccaacatttaggaaagacactgccaatttcacaatattttaatatttttctgagagctgacttggggagggattgctgaatwcaagtccagatgaaaagtaaaggctgcaaaatwaccacccatttccataccccacttccagytccatataccctgccacctgtctcaaggagggcccagtcttcctacttgtagcttggcagtcacagaccacaaacaggagccactctatccccacagattacttttatgacccaatcatgacccaagcttcaggagctcctaggcccttggctggcttcctgcaatgctcccagcctccaccaaaggaaaccagccctgagggacaggctgactcatgtccacttggccaagccagcctggcccaaaaagcccagaaagaaatctactsccatctcttgcactcactgacacatgctagcatgtacatagaaacagccgagcagtgaagntaacagagtcgccatgttctcctcagggaatccagaggaactgttggtggtaccccccttcccaccacttaccctggcacagtttaacaaggcccatgacaatgatggcaatgagcgctacgaccttggcgtaagtgaacgtgtcctgcacacgtgtgccccacttgacataggcacagttcacaaatgtcagcagacatatgcaagcagcagccaggagacggcaggccaggtatgggggatcacagctggggaaggacggctggatgatgtagttggcaaaggtgatggcgatgatggcctgaccggtgggctcaacaactagcagtgagacccacaggcggatgaaggcaatgaagcccccaaaggcctctagaatataagcgtagctggctcccgacttggtgatggtggtccccagctctgcataacaaagggcacccacaacagagaagagcccaccaatggcccacacaatcagtgacatcccataggaggcagtgtgtaccagcacacccttgggtgagacaaagatccctgagccgatcatgttgcccaccaccaggctgaccccattcagcagggagatctccttcttcagctgcatagtttcggaggacctttgaggtggcgagctgacatcttctc

SEQ ID NO: 1240 - DNA, 1189 bp, Homo sapiens
gcggccgccctttttttttttttttttacagtgagagaaaaatggaattccgttttattttgtcctctctgaaacttccatttacaccatggcctcatctatcaagaagaggaagaaaaggctctgccttataccataaaaatcaagtactcatgtacttgttagaggtggcaggatatttgtttctccagttttttggctctaagaaattacactttcagtaccagtgtagtgaggaaccactggcaaactgttggaaatgtcttctggattagtcagtgtaccatttcataaagtgcttctggagttaaaatctgccaagctgtcaaaagtgtccacacttttgcaacaaaggataaaagatcccagtgggtatcaccgagtccttcccagctgggtctcattattggcactgctgctttaacctccaagccgctggccctcaccccaggcgaagcctcctggccgttcctcaggtagtggattgtaatttggatcctcatctggtgtatcaaaaatagctttcaaaatagatggtgttttcagaattcttattccaccaggttgattgggaaatacatcttccaagaaaaaatatatgtgtccaactgcaatacccaaaaggtccacaatgattgagttccccaacaacaaggaaaatcccatgagcacccagggcagaaagggggcctggaagttgagaaggccgaagaagttcatgcggacataggggttccttcggctccacacatagacgagcattattgtaaaggcctggcccaagaaaactaagctcacaaacagaccaaaaagggtcattaagaatccaccaaaaaggaacataaatacaaagtctgctgtccgacctcggaaagagccttcttctagcattcgacagtaacgatatagaaaaatcatgttaaataaaaaattgaatccaactggcccaaaaaataagaagttggtgattaatctccatatttgaaagtgtttaaagattaattcaggattgaagtacaactgaaaaggtgtgatcaattccaactgcacggcggcggtggtgaggacgcaggcagtggtgtaggcgcggctgaccggtgggatctgcaggtactccagccgcaagctctggtacgccatctytgtgccgaattctgcagcccggggatccactagttctagagcggcg

SEQ ID NO: 1241 - DNA, 1129 bp, Homo sapiens
  misc_feature (213)..(213): n equals a,t,g, or c
gcggccgccctttttttttttttttttttttttttttttttttttttttttttttactgttaggcagctgccctagggatgactgctcctttatttgttgttaatgaatcttgacctccttgtgtgaccctggttgttactccattctaagattggcgtttttttttgtttttttttttgtaaatagagacaaggtctcgctatgttgcccancctgggctcgagcagtgctcctgcctcaccctcccaaagtgytgggattwcaacaggtgtgaaccmacacacctggytccccaaggttcagtttttatcctcctcttggagaggtgagtgacttgaggtcatttcttcacaagctccggtaggcacccacagtattgtcaaagagttttgtgttagggaagtgtccagttttgtccaagaggaaatagaagcgtcggcctttgactttcagaggtagcatggcagggacttcaccccggtgggccatgcaagatacctgcttcaaaggaactgtgaaatgggcccccaagccaaagggggcatgagtggtgagggtcacctgctgccctccagctcgaagcaccactgagcgcacagaccggagagagaagagaagaccagcaccgagtacgagggctccgatggcgccgcagccgacggccagaccgtagcgccagarcgcggagcgcaggtcgaaggggccacgatttgggacctccgcatccagaggctgcaccggaaccgggggccgggacacggctgccacagccatggaagcccagaagacgccctggcccgcgcagaacagcccgaggatggtgaagaagcggccccgatcatgctcaaagagcagcacatcccgttgcagcgtcgtgccttgcaggggccggcaggtgagcaggggccgcagcacggctagcagccccgtgggccatcgcctccaaggcgccgccatggccagccgacttccggggtgggcttcctgccgcagagccgccttctccctccctgggcgcccccgctagaggcccgccccccttgctcagggctgggaggagacaaccaatccagcacgcagaacacgaaatacaacatcactctttatattaaaaagtgcagaacacga

SEQ ID NO: 1242 - DNA, 1339 bp, Homo sapiens
gcggccgcccttttttttttttttttttttttttttttttttcaatgaaggaaaagactttacttccctagaggaaaaggacaggccatggttttataggacccaaattcttctttcccctaagctgctggtgctggcggtcactgatgggagagggagggctggcgcctccctgtgctaggctgggagccctttgggagagtgtggagctcctggagacatcaactgacagggctctggccaggagtccttgggaggccccgtcacccaagaacccctcaccctagagcaggcctccccagccttggcccccactcacttcatgggggacttccacgcccaagtcagcttccatcaggaagatcctggcgatcttctcacatggcccatgcaggattctggaaatcagcgggtactcgcagtcttttaattttgtccgctccccagactcgtgaacgatgtagagtgcgaactcactggggccatcttccaccctaaatttgttcagcagcagggtgagcacctgcagggttgtcatggtgctgttgaccctcacattggtcacggatccataggctggagtaaacacggaggtcttatgattgtagaagtggccgttgatagagaaccggtgtcgccggatgcgctgggcctcaccgggggcgcggcacttgggcctcctctggctcatgcaactggcgtcgctcttggtccgcatcagctggggggcctcctctgcctcctccaggggccccgagctgtctgtggaactctcagccttgtgcactggctgaatgcttggcccctgggctgtgatgttcccgttctggggcgatggctcctttctgaaaacagacaactgcagggctgagatggctgccggcagagaaagggagctcaggccaaggagaagagaccagcagcccagagggcagctaggccgtctgggcatccatgaggtggaggggaggtgcacctgctcccggtcatcctgcatctgcagccggatgggccgcctcagcccccaggcaatgttgaggagcccctcgatgatcagagtcccttcttcctcacggtgtctcagctggaagctcttgccctcatggtagcagttgtaggttttcagcaggcctaagagctccgacttctgaatggacttgctgtcactgatgggcacgtgagaactcggcagacagtcttccttcatcttctcttcctcttgtctgcagacctagaagttacttgcgtccagtcatcgcgcagtccagaagccactgcatgtgtcgtgtcctcgcttgcaccggagtgcgcccgcagcgcctgctgaccccaggcttca

SEQ ID NO: 1243 - DNA, 2021 bp, Homo sapiens
tacgagttttttttttttttttttttttttttttttttttttttttttttttttttttagaatacctggtttattgggaaaacttcataatgaaaactacaattagctttttccacaacttacaaaataataatctgatatttaaaatgaattggttttcattatgtaagtcgaaatggtaaaaaatcataatgacctatccgatgcatcatatatatgctattcagagaaactcaaatccccgaattctcctgtggcatgttttatatcagacatttaaaatctgtttaccaagaaagaccaggattttaactatatgtaggtttctgcttacagttgcaaactatcagaagcctgtctatatgatagagcccagataaacctgagatttagaaaagcaagtcatttattctcctgaggctgttttagtggcacttttgtgacaagaatgaccctcctaatgctttactacacaacttaaccagatctatcagtcatgataaattagacccagtccatctttcaatccagtctactctggttctgaacatataaacacaaaacactacagatttattaatatagcattttcccacaccctaaccctataaagaactttaaaagagaaaatttcatctaaatatttcacacttaaaggaaagccttaccaactatggcaacaggtttggaccatgaaatagtactttcctagatgacatatcgagtcaacatgaagccttagctgaaatgaatgattcaggatattaatgagaaattctcacaaatgatatgcatttaggaaatgattttgctttccttaaatagttcgaaggcttgaaaataaactttttttttgcatttcttttagaatgtttggtcattaacaacttttaaccttatcttcctcttctccttagcccttaacagaccgagtccattctatttggaaataacaagaacttgatcagattattaaatcttggaaacctcatttttaccttataaagtgttaagtttcacgtgcatattctcttacaaatgtagtataaatgttatggatagatataaggaaatattggcatagtataggtaattagtgaaaagacacaacttcacaaaacataataaaagataaacatgaaactataacactacttaaaaaatattttctcccaaattattttagcatttttgactagtttaataatatgaacactgccaaaaaatgggttcaaagtcgcctggagaaacagtttcttcttctggagtccatctcagcagcagcgattttctcccacattcattcccaagttaggcagatgtgtagaagtacctgggcttggcattgcccagaaggtcatcttcgtagttggggaggcagcagaagaagaaggcacagccratcaggataatcgtggctgcccacccaaagccgtaggcccagttatagatgtaagtgacagcasggttggcatgaagggtgaaggtctgggtgtacttcacggggtaaattaccagggagatgatctggaacacagcagccaaggcaaggagacctccaatcactctcaggaagacaagcatctggggtccacagagggcgaagaaggagaggatgaaacagatcaccaggatgatgaagccacagaagagcatggcagccgctgctctaccccacgcgtactccatgaggctctgacagccctcctcgtaggacccgctgccgccgccctcttgggagcatttccaccacagcgaggacgtctggccgtggtcgctagactgcaaccagccgcggccggccagcgcgatgatgtcgaaggcgatggcgctgagtaggagcaggggcaggatccagcggcagcgctcgcaggccaggccgcagcggatcatgttgacgggcggcgcggggccgagcggagcggagcggagcgggtcggaggagcgcgcgggacgggcgacagcagagagtggcctgcgagcgcgggcgccgccacaaaagcgaagmggmcgcggggagc

SEQ ID NO: 1244 - DNA, 2601 bp, Homo sapiens
  misc_feature (2534)..(2534): n equals a,t,g, or c
  misc_feature (2539)..(2539): n equals a,t,g, or c
  misc_feature (2581)..(2581): n equals a,t,g, or c
ggggactcagtggagcagcggggagttgtgtccaccttgccgacgtcgctagccgtggggctgtcctgggaaggcggacggcgagcgcccggtgtccgcactcggccgcctgccgtgcccgtctgcgcccgtgtcatcctcactcgggacgcagggaccgtttttaaatcacaggggcgtgtgtcagcctgccctaggacttcatgtctatatatttccccattcactgccccgactatctgagatcggccaagatgactgaggtgatgatgaacacccagcccatggaggagatcggcctcagcccccgcaaggatggcctttcctaccagatcttcccagacccgtcagattttgaccgctgctgcaaactgaaggaccgtctgccctccatagtggtggaacccacagaaggggaggtggagagcggggagctccggtggccccctgaggagttcctggtccaggaggatgagcargataactgcgaagagacagcgaaagaaaataaagagcagtagagtccctgtggactcccatgggtcataccagccagcatctgttcctgaactgtgtttttcccatcatgacggaagaagagagtgagccgcaattgttctgaaaatgtcaaacgaggcttctgttttgcacctgcagatcaccgagttggttttcttttcttttcttgcctttttttttttttgaaatttgccgagcagtggagccctctgacaatttgcaaggccctctgagaaaggaagctgcttagagccagggggttagtgggtgaggggagcgagtgctgtttttgagatcattatctgaactcaggcagcctagtagaggcagtggtgggattccaatgggtcttggtgggtgggaggtggggcatgtgcaaagcaagcaaggaacatttggggtaagaaaacaaacatgaggcaaaagaaaaaatacatgtttttaagaaaacattgagcagagaactgcagccaggatgcgctcagcagacattcactctggctgctgggacatcagaaaacaaagtcttcatctctctctccagtttcacccaccccaccctttgctttcatttcaggtgtgttggtctatatgacagggaggagagtaaaggagagcaggagcaattggctgcctgcaaagccagctggaggtgaagtgcaggaaaggaaaggtcaccccattctactccatggcctctctgctcccagctgtggtaggctcacatagccagtgtgatcggtttttaagaggcagtgcttttcagcttttctccctgatatatccattttgcttcccagcactttttaggagtagtgagagcacttcctgcccttgttggaagccccagggtggacactcagcacgaaggtctctcccttaactgctgcccttccaagacttgctcccgagatggagtgggcgtggtcttccaggctggcccttccttctcctcaccgccaccttccctgccccagccccagcagccatgggtacatgggtccccagctcacctatggattcccgccagtctgcccagctgcagtactcacgccccatgggggatcttggtctgtttttcttgtgggagcctagtggagagcagacgtggctttttatgtgtcttgttggggaggtgacttgcatggtggggacaaggctgtcgtggcaaccttgggatcgagtttgagactaaaggatgtcatgagatccctggcttctccccatgttgttcccggacaagggcagaagggaggcatggcaagggacctctgctgtccttactcaacagtggtcctcatccctccccacctcccactgcttcctgcaagggcaccagttgtatgagaaagttggcctttggacttaggatttcttattgtagctaagagccatctgaagcagcaggttgcaggacaaatgcttcagtccgccgagagcagtaccgtgtggccaagaggtggactcagagccttccttgagctaaactcggccaaccaaggcacgcagcatgtcccctcaggtctccagtcagtccaggttgaccctcagttctggacgtgtgtatatagctgtatttaatacctcaaggtcattgtggctctggggatgccggggcaggaggacgagggtgcgctgtggacacagcagtccgcggaattccgttctgggaagccaatggtcgccggcaccccttgcttcctccctctgttgtctgcctgtgtgacacacatcaatggcaataacttcttccaactcctcgcagaagtgggagaggccggcagcctgcaccgagaggggctttctctctyttgctycccgcttygttctgttttggctgsararagkggktcatccatactctcattccctygsctccccttgtggacgggggtcttgccttttcaattcctgtgttttggtgtcttcccttatctgctaacctgaatcactgtcctggtcttgctgtgtgatgggaacatgcttgtaaactgcgtaacaaatctactttgtgnagtgntgttatggggtggttataatttgctgggcctagacactttgnagaccgttgcagctgagaag

SEQ ID NO: 1245 - DNA, 2878 bp, Homo sapiens
  misc_feature (2039)..(2039): n equals a,t,g, or c
  misc_feature (2666)..(2666): n equals a,t,g, or c
  misc_feature (2674)..(2674): n equals a,t,g, or c
tttttttttttttttttttttttttttccatttcccctcattttattaaatgttccacttatgtacattttaaagacgaaccatttacaagcttgtgcagtttgcctccttggctcacaggaggggaacattgtggaaagcctcaggataaacagaagacttggttttttgctccttttctctgtacggtacagtacgttttggtttacaaccatgagtacatacaattaaaaaaatccctcatgcaaattgtagaaaaaattttctttccttgaagctggcagtgaaaaataaagattcatgtcattttctttgtgcacacccctgtgcgcttcttcctgtcagattcttccctaagtattaagagaaataggggaaagccacagagcacgctggatttcaacaagtggtcttgtctttttaaagttcaacacttcttgaacaattagctcctggctgtaggaccagtaatcccttaaacaggcatgctctccatctaacaggatgaagttcagtaaagcagggactgcccctgggggcttacaggatgaagactcaaactgggaatggcttccaccctaaaactgtttgatcgcttcagtatctcttgcttgctaataacacctgtatgatcctttgtccagagggatggatggtgttgagaatggggaaaggggccaaggatcacaagtgcaaaaaatattgtttatgtcatgttttggagggaaggtggtgaggaaaagacaaatctattcattctggataattaaaggtggtttcatgcatttttaaagccacaattttatatctagggttgctgtagaaaccaacatctctggagagggaaggaaagaaaaggagaaggaagagagagttcagtgggactttttttccattttcatttttatataaaagtgttaagaccacaatgaaaaaagttttttatccatatatataataaaccagtttgtgagctacataatttgtctttcccatcttcagaaatgttctcacattaacaatgattagatagcatcatgcccaaagacattggccacacaataaaacaaacaaaaaaacccagtactatgatacaattgaggtaaaaggggaaacaaaaaaatttaacatttgcccacaaataattttttttctttttcttaattttgtcagaaaaataccaaacacagtgatttaaatttaaaaaaaaaaaaagtcacaaaaacctgtttttagcagaagtgaatgaccaatgggccagctccttggctcagacgtgattactattggttttcctaattaatccacaaatccacagggaagtgtaagtcaacttcaggggggagtggtggtataaaattaaaaaatagaaaccaaataccccacctggtatgcccccttttccctaagcccctttaccctccctcacatgttcccacccccactccacaccccctcatgaccccaacactcaaatctccatcagatctaggtcagcttcttcaaagccatagaaagactcggtctcactttcaccctcaaagagctggtgaagactttcaggctcaattgtctcttcaggagatgatctgggtcgtggagtggaagactcagaatgttccccactcagcttcagttgctcctctagggaggcaattagctcctcctgcatgtcagcatttcttgtaggtgagttaatgttgccatcggggccaggcagaacactagccaccaggaaggagcgctgaactagctctggacagtccccaatgacacctagcacttcacccagccagacaagcaccagctgaagcaggacatcagaatcacatgcagtatctgccatttcccgagcctgttccttccattttttatgcaggaagttcttgacagttcttttgatgcatacatctaatggctgaattttggagctacagcctgctgggaccactgcaggcaaagtgctagaggcactaagcatagccagtacctcttctgacaagtgagtgcgatgacagtccatcacaagcatgcctttntgcgctggcaagctgtgtgcttctgccacactcgagttgaccacagctccatgatctcgtcatcactgtagccactctcctttgcctctagcaatatggagtctggcatgttagcaggctgatccatctgccctctgtagaaaaccagggtgggaaggacagtgccatctgccagaatggctaggactacatcacaccaaggttcccctgtgcccactgtctgcagggcattctcctttcgatcatcactgctcagcacctctgtatccaggaacaaagagatctcatcaatagccacaatcatagacaagggtaagtcctggttgtgaatctgccgttgtacaaaatcaatgaagagtcctgcattctctgctacatccttaggtagggtgtgggccacagctcgccgggcatggggagtcaggtggtgccgcagcatgaaacgcacagcccactcataggagatcttaaaccccccttccaaagaacgtcctattttggtggccttctggaacaaggtctcctcatttacaggtagctgttgttcgcgctgggttagcaccyactcagccagtttctcttctgcctcaaagctcagatatttgccctctagattctccccctggnaggcctgnaaacgtcgaagccaacggcgaatacgtcgctggggatttcggaagtgttcarctgcctgttctgtaktgcagcatagagcaaacagtactactcgaarcttcttcacagacagctgcycctttttgccaactccaccactaccaccaccacctgatgctagctcaggttcttgggtgactgggctcccttcatcctgatcatca

SEQ ID NO: 1246 - DNA, 1776 bp, Homo sapiens
  misc_feature (2)..(2): n equals a,t,g, or c
  misc_feature (4)..(4): n equals a,t,g, or c
  misc_feature (929)..(929): n equals a,t,g, or c
  misc_feature (1476)..(1476): n equals a,t,g, or c
  misc_feature (1700)..(1700): n equals a,t,g, or c
gngntcttctccgtactggagtttgcaccctcaaatcattcttttaagaaaattgagttccagcctccagaagccaagaagttcttcagcacagtgcggaaggagatggcgctgctggctacctcactgcctgagggatcatggtcaagacttttgaagatagaatggacctcttctcagctctcatcaagggccccactcgaaccccctacgaggatggcctctacttgtttgacatccagctccccaacatctacccagccgtgcccccccacttctgctacctctcccaatgcagtggccgcctgaaccccaacctgtatgacaatgggaaggtgtgtgtcagcctcctgggcacctggattggaaaggggacagagaggtggacaagcaagtccagccttctccaggtgctcatctccatccaaggtctgatcctggtaaatgaaccatactacaacgaagccggcttcgacagtgaccgaggcctgcaggaaggctatgaaaacagtcgctgttacaatgagatggcgctgatccgcgtggtgcagtccatgacccagctggtgcggcggccccccgaggtctttgagcaggagatcaggcaacactttagcactggtggctggcggctggtgaaccgtatcgagtcctggctggaaacccatgccctgctggagaaggcccaggcactgcccaacggggtgcccaaggccagcagctcgccagagcccccagctgtagccgagctgtcagactccggccaacaagaacctgaggatggagggccagccccaggagaggcctcccagggctcagactcagagggcggtgcccagrgcctggcctcagctagcagggaccacacagaccagacttcggagaccgcaccaracgcatcggtgccacccagtgtgaaaccaaagaancggagaaaagaagctaccggagcttcttacctgagaagartggctaccctgacatcggcttccccctcttcccactttccaagggtttcatcaagagcatccggggtgtcctgacgcagttccgggctgccctgctagaggcaggcatgccggagtgcacagaggacaagtagctgccaggcacagaggaaagagcatcaccgtgggagaggccagccgccgcctgctcactcccccccggaatcacccctcttcccatgcccctctgtccccactgcaaacccactgccctcttctccccaaggtgagtttgatgctgaagtgcaagaagtgtgttgagatgctgccgtttctattttgaagcgagctttcaacaggcgggtcccctgtggcaaagaaaatcggaaccctgttgccgattttccatttgtcaccccagcagaatgtccggcacttgctcccttgctgccccttctcaggtcagaggcgggtgttccagggcctgccgcggggctctctgggccggttccctgcagacccgcagagnagcacatgtgccttgcatgaagtgtgggttgcgccaacaattcccctggtccctttcaacctgtttagttcaactcaagcctccctgtgtcccagaccctcctgctgccaccaccacccaggtcctccctagtcctccagcgtcaacaytatcccttgggagttgtagctgctgtcatkgamtyccggttataacatgggcctgttggaccaggttataggccntcaggcctgttggaattggttttttaagagaggttggggaccaggttaggtttccggttgacggccaggagaggtg

SEQ ID NO: 1247 - DNA, 631 bp, Homo sapiens
  misc_feature (5)..(5): n equals a,t,g, or c
  misc_feature (87)..(87): n equals a,t,g, or c
  misc_feature (96)..(96): n equals a,t,g, or c
catcngcgttaacgcgcaggcacttttttaattaaatacggactccactatagggagagaagctatggacgtcgatgcasggtaagnttggccctnggaggatcctttagagcgccgcccagttccagcgacataaaatggacgccgacaaccattacgccgcgattttgcatttgtgcgcgtttaaggttatccaacccttcaacatcaaaccatttacgtacgcgactgtcgggccagaaccatgccatgccggtttctaccagcgccatgccgagtgaacgaaagttttcggcaatcatcttctcgcgttcttccgcagaatgctgcgggaaacaaagttccaggtttttacgggcgatagattcacgacgtttcaggaatggtcgcgccattgcgccaatacgcgtgccgagaaagcagagaacaggataaggaagctgtacccaaagccagagtacaccaagcccaaaccatgtgagccagtagcgaggatgtagaaactcgcgggaaaatttgcattgtggaaacatagttaccttctgtagatacgaattgttgtatcgcagaagattccatgtcgacccgggaattccggaccggtactgsrggcgtacattaaatagtggag

SEQ ID NO: 1248 - DNA, 1307 bp, Homo sapiens
  misc_feature (2)..(2): n equals a,t,g, or c
  misc_feature (4)..(4): n equals a,t,g, or c
cntncaagcccgcaatttttttttttttttccacatcatataattttattggtaaataattctttagcaaccagataaaaattaagagagactcatgttctctccmtgtgtgcacaatgggggcctccagtacaggctctggcacatgaaaaaatgctcaataaatgctcactttatgaaaaagtgaatcagtcaatgtacagaccaattctctcataagtagaatagttgacagaccacctaaattctatggacctcccttacacatgaataagaagagcttattatctatccctacaatgacagataccaatccaaccacctgttcatggagaatgttcagttcataagtggatcttcatcatctcacaaactgacctttgaggaccaagacaattaacatcattccagccccatcttttgggtgatttacgaaaatttagcacaacgcagcgctcattgggatcactgggctcacgtggatgccagaatgtggaactttcattgtatggtgtctgatcaacccattgccaatgtcgctgaccttctggatctgagagccccacaaaataagcagattcttcttgcagattctggaagatgaaatcctgctcttcttgagtgtttatcaccagcaggtgagcctccattctagcacagtccttctcactgtcttgccaagatgctgattcagtagaaataaagtagcagttggaactaaatgacttccaattctttgggcaacagctccaggctgtctcttccacgggcatattttttttcacacactccaatgttgtatgaaccagctcttttgtagtctttttttcaagaagctgagaatatttttgaaagaaaatgacaaaagcaataaagaatgagattgccaatagcaggaaaaatatcaacagtgaggcacaaagcagcttggggaatccggtattacttttgwgaggggcagtcctctccttggaagctgcagaagaggctgtgttgatgcctgaggacttgaattcatttttgaacctcacttcagcataagtgatttccgaagtcataatgggaagagagcttctgctttcttcagaaaatctgtttcaaatctttcttaaaacatcttataaacaggaaccaaacatggtggtaaattacctccttcctttcactcaactagtggagagcagaggcaccagataggcacatatcctcaagaggggtctcatgagaactaagaaccacaataaaaactaaaaaccgcagttcacagaagccctttcctcaggaccagtatagtgagcactctgccg

SEQ ID NO: 1249 - DNA, 1945 bp, Homo sapiens
tttttttttttttttttttttttttttttttttttttttttttttttttgggtgatcaggtctctctttactgaaacacagaacatgtgccaaggtgagtccaaggacacctctgggaacaggtgaagcccctccccayacatacactccggtggatgtgagcgagggtcctgttgccacatctggggtyaggggcttggacatgctgcccttcatgggaaccttctgggtacctctcagcacagtaacgcagctgcagtctgtcggtgggggcccaggctaggggcagcaccctcttttggcatacgggacatgcctggctgcagctgatgtccgttagcctctcctgacacgcagtaaggagacctggaagtgaggcgcgtgggcgtggagttcccggtggagctgctgcatcagcctttctgccactctggggtcagtgaggtcttccggggaagccacactcagccgcaggaggaggaaacctccattttcacctgcactcacgtctgtggtcggcctcgtccgggcagtcgtgggcgtggctgttgggggcttcatcgtggtcttcgctgaggttgtgatcttggctaaggtgctgttcgtccctcggctgctgttggttgtagtcggagggacagaaggaagagggtccctgctggtggggaagggccccttggttgcgatgtccatggtcggtgtctctgaaggggtgaagttcttgagggcggcttccgaggggctgtaggaggaagcagagctcccagcaaaggaagttgttttgcccactgctgacccagcctctatggagaccggagctgctcctgagactttgacgtaacttggtgtctcaacagagagggctgaggtttcttccaggggattcctgctaactgtgaccagagctccactgagggtcgtggcccygggtgctgtcacttctctttctrtggygctgttagtggggagtggggtcccaaccgtggcatgaggtgcagctgactctgtggtgccggctgtggacagggtctcggcagaggctgtgacctcagtgatgtgtggttttgcttcagtggagtcaggcagagctggtggatcggaggtggacgaggccttcaccccttccgtggggatgagatctatgtctgaggccccagggatgctggaagtygttgtttctatttctgtgatgctgcaattaataacctcgatgtttgtgacagtcaccagggcttcagcgaggagagtgacrtcagatcccggggaccatgasggggtgatgactggatgggggccgtcggaagaggcgctgctctctgaggcccgtgacggggtgatgactggatgggggccgtcggaagaggcrctgctctctgaggacaggcccttagcttctgtgsaggtgtgagccaatgtcaatatgtccattgtgagtgtctttgcctyttaagagctgtcatcggtgyaaagggtgtcaaagatggcttccctsggatcactgcctgtgatggtctgaactgtggtcattcyagctccctcggggctgccactggcggytgatgtctccacrgaggtggcgatcagcaccatgaagttgggagatgtttttgtgaaactcctggtctctcttgcaggggaaattctcttggctcccctggtctctgcttctggaatggggccggctggggttgaggccctagaagaggtctcagcgctcagcgtttgagtttccagagcggcgtggcccggtgctagagtcatagcgggcacttctgtgtcgtccgttgtcatcgcagtgtctgctctgcgggtgctggggcctgcagagctcccagagaccccaacctcccagcagaagaagaaaaggggcagagccagaccccagagacagcccatcctagccggccaccgctgctccacagaactgctggccggacgcgtgggc

SEQ ID NO: 1250 - DNA, 1308 bp, Homo sapiens
ggcgagagaatcatcatgggatcatgtaaaaactagtgctacaaatcgtttctcaagaatgcactgtcctactgtgcctgatgaaaaaaatcattatgagaaaagttctggttcttcagaaggtcaaagcaaaacagaatctgatttttccaacctagactctgaaaaacacaaaaaaggacctatggagactggattgtttcctggtagcaatgccactttcaggatactagaggttggttgtggagctggaaatagtgtgtttccaattttgaacactttggagaactctccggagtcctttctgtattgttgtgattttgcttctggagctgtggagctcgtaaagtcacactcgtcctacagagcaacccagtgttttgcctttgttcatgatgtatgtgatgatggcttaccttacccttttccagatgggatcctggatgtcattctccttgtctttgtgctctcttctattcatcctgacaggacattgtttatctgaaaatttttatgttcgaggagatggtaccagagcatatttctttacaaaaggggaagtccacagtatgttctgcaaagccagtttagatgaaaagcaaaatctggttgatcgccgcttacaagttaataggaaaaaacaagtgaaaatgcaccgagtgtggattcaaggcaaattccagaaaccattgcaccagactcagaatagctccaatatggtatctacactcctttcacaagactgaactttgtaacatgttaaggtacaaagccagaggactgtgctattcaaggactactgtaagtctattgtttctcaaaagacaatgagaaaaaaagaagagaatttgtatttcctgccgttttgtcataggtgagctcctttgtgcattttaagcacatgtaagtggttcagcacagtatgcctttttctgtgctttgaaaacttgatatgctcaagcttgtttgaatttattacatctaaccattttgcttgttccttgatttttataagcattcaattaagttagtattatgtcaagtaattttgagaaaatgtaacttgacattttttgcaagtaaaaaaaattgtttatttgtttaggcttagtaaaccagttcccaaacacagtcagactcttcccattgtcatctgattgcagagagaaagcacaccttatttccagggaaagctacaacaagcccaaggtcaawgtgtattattttttgtcttgttgtwggtctattttctcccaatttttttttgaaattcagaggctcatatctgaaatagaatttttagttcct

SEQ ID NO: 1251 - DNA, 1075 bp, Homo sapiens
  misc_feature (6)..(6): n equals a,t,g, or c
  misc_feature (16)..(16): n equals a,t,g, or c
ccgggncccccctcgngttttttttttttttttttttttaaatatgacagtcttggatttatttgtaagtgtttaaaatgtccaatattcagaagttgtcaggtgttcttaccacctccccactccctcaaccagtccctgcttccagggtccaggagaagcagtgttcaggcagagtagtctcttgccagagcagaacaaggagtcctggtggccaagtggcaagtatgcaggctgggctggtccctggtgggacttctcctgggcttttcctcccatcatcttccttcacgtgtctctcagccctggcagagtttggagctgataccctgggtcatggccacagtccagttcactgggtggatgtgtccctggcttctgtccatgccaggctgcagcccagagggcgctggctgctagaatcttgatgagaaagatgcaggccaggaggagaaggatggaagtgggtgggaaggggatttctccttccaagaggctcctggagatgctgtgctccacatgggcatcctcgaagctctcagactccccggggaaccagagatctccagcatcccggtgatccagggggtctgccagcacctccaccaggaccttcctgagggtgtcagcctcactgccatggaggctctggcactggtagagacccgcatcatggggttgtagattccgcagcgtaatggtgagagtgccacccagggtatcgtctgtgatggctgtgctcccattccacctcctcaggaaggacagcagccacaagttgtgcgtgctgaccacacgctggcatgggcccttctctcccagctggcggcaccaggccttgcgcctcccccagtgcttcatggagtcataggggcaagacacctgcagggactggcccgccacgccctggaacactgtggtgttgtgggctccggacagctctgtgacaaagagtaagatgagcagccggagaggctccatgccacccttccccagccaagggcagaagcagagtgccttgtgcaagatctcgtctttcccttgaactgcagaaaagagaggatcaggctcgtgc

SEQ ID NO: 1252 - DNA, 1913 bp, Homo sapiens
gagggacgattgggttaccgggaccccccctcgagtttttttttttttttttttttttttttttgggcaaaaaagctttttattttcccccacattccagctcttcactttttctaaaaccttttccaactcagagccaaggcccaagaagttgattcacacctgagaaacaagtcgggaactaggccagtgccctcagagccgggttctagaccagtgggactcccggcgcgggtggaagcacatagcagtgacacagcagagaaggccacagaagagaagcaggaaggagcccaagaccagcagcctggagccacacagagccagctcctccgaggtgagcagcttggtcagcacaaggccttcatggctccagacactaacacattcctcacccattctagggctcagggtggcatttccagccccctcctctgagcaggatatgggtggctggctggagggtaggattcctggaacagcactaaaatataggcaggttcctgcagtcctttctgtggtcaccctggctgtgataaggaccagttgtcctgcagaagatcctttcaatcccatctgacttcccaggactgtggcctggaatgtccgggtcttgttcctgtctggaccgtctccgaagttcaaggtggtcagcaagcccacgacgtgagaccctcgccacttccctgtgactgtcccattcctgggacacagggtcagctggccaaaagatctcaaaaaagagacccagtcctgggggatgtcagggctgcgcaggccagtcctgtgggtgaggaggaagctgccaaggcccaggccagagaggccaaggagcagcaggatcaaagtggcacagaccagaggtgggtggtgggccagacacaggtgcaggttgtgccctgcctggcagttgcccatggggagcagagggggctgagcctccggggagagcctgctggaagacagggagggagaatgggacaagagcaccgcttttacgcaaagagaaaagaaagctcagagaagacaaaggacttcccaaggccacacagtaagtggcagagccagaacaagaatccaaggttcccgactccaaaagttcaactccctgcactgctggataaatatttgctgcatttcatttctgaagtaatctaagtggaggcagagcagtgtactccgtgctggaagaaggaaactgaaagggagacttctyagctggagaaacaggaagcactgttctggggcgaggatttggctgaggaatagttccagccagagcccagacaagggaagactctggagaagaactccactgtgcagctaaacggctagatctgaatccctttctgttattcactgactctgtgagcttaagaatccatgaaatgggagttctgagaacaccaagtaataaggattaaacgtggcggatgaagcagtctgcgtggtatttggccatgcaggaattcaacaaatgtccacttcctttctctttctcgtacagatcctcaaaaccgggtaaggcgaggcaaaaaatactgtgagggaaactgaggctcgcggactttaacacaggaggggtagggccaagatctgaaccccgcctcctgcttccaagtggggtgctccttcccacgcaaggtgcgacggcctgatggaaaagaacttctggaaggcgaagagataaacaggggtcgggggaaaagaagggagccacggaaatgtaggtgtcacaaatgctcagccctgcyccgcctcccgtccggctggaagggggttaaagggaggggagggcagagtcwgagggtccgccgccgctggtgcacctgagcaccccctccccggaaagcccccgccccgaacgattgcaacgccctcgtcccctcccggtctcgcgcgtcggatccgcc

SEQ ID NO: 1253 - DNA, 1795 bp, Homo sapiens
acccacgcgtccgccggggascacgcgtctcatccatggcttccgcggactcgcgccggstggcagatggcggcggtgccgggggcaccttccagccctacctagacaccttgcggcaggagctgcagcagacggacccaacgctgttgtcagtagtggtggcggttcttgcggtgctgctgacgctagtcttctggaagttaatccggagcagaaggagcagtcagagagctgttcttcttgttggcctttgtgattccgggaaaacgttgctctttgtcaggttgttaacaggcctttatagagacactcagacgtccattactgacagctgtgctgtatacagagtcaacaataacaggggcaatagtctgaccttgattgaccttcccggccatgagagtttgaggcttcagttcttagagcggtttaagtcttcagccagggctattgtgtttgttgtggatagtgcagcattccagcgagaggtgaaagatgtggctgagtttctgtatcaagtcctcattgacagtatgggtctgaagaatacaccatcattcttaatagcctgcaataagcaagatattgcaatggcaaaatcagcaaagttaattcaacagcagctggagaaagaactcaacaccttacgagttacccgttctgctgcccccagcacactggacagttccagcactgcccctgctcagctggggaagaaaggcaaagagtttgaattctcacagttgcccctcaaagtggagttcctggagtgcagtgccaagggtggaagaggggacgtgggctctgctgacatccaggacttggagaaatggctggctaaaattgcctgagaggcagctctaaagcacaagacctggatgtgtgacacacagttttggaaaaaggtctgtggtagtctggagttgatgaggaaggggtacaagatgtggttagaaacatttctttgttctggaaacaaagtactgttgaaaccagcttggaattttttttttttttttttttaagttcagttctcccttatggctgcctttcaaacaagtaccttttatctgatgcctgtatcttccctttgttaaggtgtaacttgatgtagggtcaaggtttttgtgacaacaggcagactccacacagagaggatatgatgagaatatggccatcacctgaaaagttttcttatcttctgtgcttttggtccctggaaacaaatccgcctatgtatgaagctagttgatttccagttgcactatttccagttgcctctgaagttcacaggcaatacattgtctagtcctttgcgaatttctctgatttgtgggcacagttatgaagtttccccacatgtgaagacaggtacaaaatagcagagccaagcagacagtgggtctattcttcattagctcagtgacttgtccacactcgtcttagcacttacgtttcaaaagcttgtcacaaacccttggagtcattcccagataatagaactggaaatgataaatcccctaatgccaagggtctagtgtgttcttagtggttatactgggaagtgtgtggagatttaggtgctgctctgctgctctggatggctgaaggctcctgggccatcttcatgtgctgcttgaagagctcctattttgtactcctggctagaatgctgtggaacaaatacaaagtgaaaaaagttctctgtagatttctgaagtgcatattcattgatgccaagaaaaaaaaaaagttgcctttttgaaaaaaaaaaaaaaaaaaaaaaaaaaaaaaa

SEQ ID NO: 1254 - DNA, 825 bp, Homo sapiens
  misc_feature (760)..(760): n equals a,t,g, or c
  misc_feature (766)..(766): n equals a,t,g, or c
  misc_feature (789)..(789): n equals a,t,g, or c
  misc_feature (806)..(806): n equals a,t,g, or c
  misc_feature (809)..(809): n equals a,t,g, or c
atagcttcgcttaagctatttaggtgacactatagaaggtacgcctgcaggtaccggtccggaattcccgggtcgacccacgcgtccggacagccagccaccacaatgaaagaaatcaaaccaggaataacctatgctgaacccacgcctcaatcgtccccaagtgtttcctgacacgcatctttgcttacagtgcatcacaactgaagaatggggttcaacttgacgcttgcaaaattaccaaataacgagctgcacggccaagagagtcacaattcaggcaacaggagcgacgggccaggaaagaacaccacccttcacaatgaatttgacacaattgtcttgccggtgctttatctcattatatttgtggcaagcatcttgctgaatggtttagcagtgtggatcttcttccacattaggaataaaaccagcttcatattctatctcaaaaacatagtggttgcagacctcataatgacgctgacatttccatttcgaatagtccatgatgcaggatttggaccttggtacttcaagtttattctctgcagatacacttcagttttgttttatgcaaacatgtatacttccatcgtgttccttgggctgataagcattgatcgctatctgaaggtggtcaagccatttggggactctcggatgtacagcataaccttcacgaaggktttatctgtttgtgtttgggtgatcatggctggtttgctttgscaaacatyatyctgrcaaatggtcaagncaaccngaggacaaatattcctgaactgnttcaaaacttaaaaggnccntttgggggggcaaaaa

SEQ ID NO: 1255 - DNA, 866 bp, Homo sapiens
  misc_feature (627)..(627): n equals a,t,g, or c
tcaagtacagcaattacgtgcggcccatctgcctgcctggcacggactatgtgttgaaggaccattcccgctgcactgtgacgggctggggactttccaaggctgacggcatgtggcctcagttccggaccattcaggagaaggaagtcatcatcctgaacaacaaagagtgtgacaatttctaccacaacttcaccaaaatccccactctggttcagatcatcaagtcccagatgatgtgtgcggaggacacccacagggagaagttctgctatgagctaactggagagcccttggtctgctccatggagggcacgtggtacctggtgggattggtgagctggggtgcaggctgccagaagagcgaggccccacccatctacctacaggtctcctcctaccaacactggatctgggactgcctcaacgggcaggccctggccctgccagccccatccaggaccctgctcctggcactcccactgcccctcagcctccttgctgccctctgactctgtgtgccctccctcacttgtgggccccccttgcctccgtgcccaggttgctgtgggtgcagctgtcacagccctgagagtcagggtggagatgaggtgctcaattaaacantactgtttgaaaaagaaaaaaaagtcttattagcgcgcacttatctttatgaggtattagctgcatgcgtcgttaagcgtatggacatggtaccatatgctagatcgttgatgtatagaagcccgtcttcaatgctatgatgaccttaggggtagggtgttggcaataccgcgtttctttcaggctcatatgctggtttccaattgtggcgagctgggtaattcagtggctgaacaacc

SEQ ID NO: 1256 - DNA, 1112 bp, Homo sapiens
  misc_feature (921)..(921): n equals a,t,g, or c
  misc_feature (932)..(932): n equals a,t,g, or c
  misc_feature (1082)..(1082): n equals a,t,g, or c
aattcggcagagccatcttgctctaagtgaaagtgaaagaaaagtcggcagcagagggaacagggaagaaacctaaaggctgcaggctgccaggtgtgcttggagagcccccttcttccgccgggcctcgcaagcagcgtaggactgtggagaagggcggtgggcaaggagggaactcgagagcagcctccatgggcacacaggagggctggtgcctgctgctctgcctggctctatctggagcagcagaaaccaagccccacccagcagaggggcagtggcgggcagtggacgtggtcctagactgcttcctggygaaggacggtgcgcaccgtggagctctcgccagcagtgaggacagggcaagggcctcccttgtgctgaagcaggtgccagtgctggacgatggctccctggaggacttcaccgatttccaagggggcacactggcccaagatgacccacctattatctttgaggcctcagtggacctggtccagattccccaggccgaggccttgctccatgctgactgcagtgggaaggaggtgacctgtgagatctcccgctactttctccagatgacagagaccactgttaagacagcagcttggttcatggccaacatgcaggtctctggagggggacctagcatctccttggtgatgaagactcccagggtcrccaagaatgaggcgctctggcacccgacgctgaacttgccactgagcccccaggggactgtgcgaactgcagtggagttccaggtgatgacacagacccaatccctgagcttcctgctggggtcctcagcctccttggactgtggcttctccatggcaccgggcttggacctcatcagtgtggagtggcgactgcagcacaagggcaggggtcagttggtgtacagctggaccgcanggcaggggcangctgtgcggaaaggcgctacctggacctgcacaactgggcatggcaggatgctcctcacctgccggctcatatacagacagggactacttgcaatacactctttacgactcacaatatcactcactccactcctaataatactggaacanttctccccctctcaatgtgtatacctgatg

SEQ ID NO: 1257 - DNA, 1895 bp, Homo sapiens
  misc_feature (45)..(45): n equals a,t,g, or c
  misc_feature (61)..(61): n equals a,t,g, or c
  misc_feature (1702)..(1702): n equals a,t,g, or c
  misc_feature (1836)..(1836): n equals a,t,g, or c
  misc_feature (1841)..(1841): n equals a,t,g, or c
  misc_feature (1846)..(1846): n equals a,t,g, or c
  misc_feature (1856)..(1856): n equals a,t,g, or c
  misc_feature (1876)..(1876): n equals a,t,g, or c
  misc_feature (1882)..(1882): n equals a,t,g, or c
cacaggaagcagctatgaccatgattacgccaagctcgaaattanccctcactaaagggancaaaagctggagctccaccgcggtggcggccgctctagaactagtggatcccccgggctgcaggaattcggcacgggatcaggattttttttttattacccagccgatgacaatgtatatcgaagttagtttaagaacaaaggatgtgcacacttgttttaaagtagttttggttatgataataagaattataagagggaccaaatatcaaatgcaagaaaatggtcctgaatgccaatacaatcagaataagaaatgcataaatagcgacttgcttgaagctgaaatcaactcctttttggatgcctttcttgtcttttgaagaacacatgttgtagtatgtgtttctctccatatcctgtgtgtttcattgtaatagtcttgctgattgattttgttggctgcaagmaaagtgataaaatgccagtgggtgcctgtgccagggaggtcaggactggactttcccacttggctctgttttgatgcatttagcagattgattccaaccctctttggagactctgacctacaaaagtgtctgttatctttgagagctccagggaaagctatggacctttctagatcttttcccaccttttggcccatcagatattgccttgtccacagcagaacttgacgattcatcatagaagcctatggttttatttattgacactgctgtacaattttccctgtagcgagtcatagttggctgaagagagagtcgaagattaagtacaaaactttctaaacatcctgttttccctcaagacagggcactgttcttaataaactgaacattcttttgcactggccctggggcaagggtgtcccaaaagctttgacaggggtgccatttggtcataaacagtgtggtaatagggtggagtcagaaagaaattctctcatcccttttacaactccaggcaattctagaaccaacccttgggaacccagggaaagaactctgaaatgatacgctggctgaggtttgccgtggccacacctcagggttaagcattgaaggagctaggcaaagagtgtgtgtgtttagctacaaactaagtcacagatcaagaggcttttggtattcttccatttttgcttagaattctatgatggtttttgaaatatattgtccttactttatgttcttacctgtaatctcataagtttctggtaaatttagcttttgccaggttccggtgggtcttacccagagatggtcagagtaaatgaacaaaagaaggaattgattaggatgtgaaacttcagatacgctcacaggccttcaagccctagaaagtagtatgccagtgaattttctagtcctctctacactttgtacagatgaagaaaccgagacccagggaactcaaccaaggtttcttgccattcctccagtcccccagttaaaaaaaaaaaaaaaaaaaaactcgagggggggcccggtacccaattcgccctatagtgagtcgtattacaattcactggccgtcgttttacaacgtcgtgactgggaaaaccctggcgttacccaacttaatcgccttgcagcacatccccctttcgccagctggcgtaatagcgaagaggcccgcaccgatcgcccttcccaacagttgcgcagcctgaatggcngaatggcaaattgtaagcgttaatattttgttaaaattcgcgttaaatttttgttaaatcagctcattttttaaccaataggcccgaaatcggcaaaatcccttataaatcaaaagaatagaccgagatagggntgagngttgntccagtttgnaacaagagtccactattaangaacgnggactccaacgcc

SEQ ID NO: 1258 - DNA, 1803 bp, Homo sapiens
gcacgggccggaggtcccggggctgctgggtgcgggcggtgggctgcgcgttgtccgctggactgggtcccggtcacgccccgccaagccccgcccctcaggccggggcgcgaccgcggatccgcagttcccgggccagcctggggcggccggccaggaaccacccgttaaggtgtcttctctttagggatggtgaggttggaaaaaggctcctgtaaccctcctccaggatgaaccacctgccagaagacatggagaacgctctcaccgggagccagagctccatgcttctctgcgcaatatccattccatcaaccccacacaactcatggccaggattgagtcctatgaaggaagggaaaagaaaggcatatctgatgtcaggaggactttctgtttgtttgtcacctttgacctcttattcgtaacattactgtggataatagagttaaatgtgaatggaggcattgagaacacattagagaaggaggtgatgcagtatgactactattcttcatattttgatatatttcttctggcagtttttcgatttaaagtgttaatacttgcatatgctgtgtgcagactgcgccattggtgggcaatagcgttgacaacggcagtgaccagtgcctttttactagcaaaagtgatcctttcgaagcttttctctcaaggggcttttggctatgtgctgcccatcatttcattcatccttgcctggattgagacgtggttcctggatttcaaagtgttacctcaagaagcagaagaagaaaacagactcctgatagttcaggatgcttcagagagggcagcacttatacctggtggtctttctgatggtcagttttattcccctcctgaatccgaagcaggatctgaagaagctgaagaaaaacaggacagtgagaaaccacttttagaactatgagtactacttttgttaaatgtgaaaaaccctcacagaaagtcatcgaggcaaaaagaggcaggcagtggagtctccctgtcgacagtaaagttgaaatggtgacgtccactgctggctttattgaacagctaataaagatttatttattgtaatacctcacagacgttgtaccatatccatgcacatttagttgcctgcctgtggctggtaaggtaatgtcatgattcatcctctcttcagtgagactgagcctgatgtgttaacaaataggtgaagaaagtcttgtgctgtattcctaatcaaaagacttaatatattgaagtaacacttttttagtaagcaagatacctttttatttcaattcacagaatggaatttttttgtttcatgtctcagatttattttgtatttcttttttaacactctacatttcccttgttttttaactcatgcacatgtgctctttgtacagttttaaaaagtgtaataaaatctgacatgtcaatgtggctagttttatttttcttgttttgcattatgtgtatggcctgaagtgttggacttgcaaaaggggaagaaaggaattgcgaatacatgtaaaatgtcaccagacatttgtattatttttatcatgaaatcatgtttttctctgattgttctgaaatgttctaaatactcttattttgaatgcacaaaatgacttaaaccattcatatcatgtttcctttgcgttcagccaatttcaattaaaatgaactaaattawaaaaaaaaaaaaaaaaaaaaaaaaaaaaaaaaaaaaaaaaaaaaaaaaaaaaaaaaaaaaaaaaaaaaaaaaaaaaaaaaaaaaaaaagggggggccsttttag

SEQ ID NO: 1259 - DNA, 3140 bp, Homo sapiens
  misc_feature (3)..(3): n equals a,t,g, or c
  misc_feature (5)..(5): n equals a,t,g, or c
  misc_feature (21)..(21): n equals a,t,g, or c
  misc_feature (1628)..(1628): n equals a,t,g, or c
  misc_feature (1642)..(1642): n equals a,t,g, or c
  misc_feature (1656)..(1656): n equals a,t,g, or c
  misc_feature (2094)..(2094): n equals a,t,g, or c
tgntncgagtcacccaggtgnagaatgaggagaaactgaaggagctagagcagatttgatcccaaactctttctkgttttccttcttggacttatgctatttttttgtggagacttgctgagcagaagtcaaattttctactactctactgggatgactgtgggaattgtggcctctctgctaatcatcatttttatactatctaagtttatgcctaagaaaagtcccatttacgtcatcctggtgggaggctggtctttttctctgtacctcattcaactagtttttaaaaatttacaagagatctggaggtgttactggcagtatcttttaagttatgtcctcacagttggattcatgagttttgcagtatgttacaagtatgggcccttggagaatgaacgaagtatcaacctgctgacctggaccttgcagctgatgggcctgtgtttcatgtattctggcatccagataccacatattgcccttgccattatcatcattgctctttgtactaagaacctggaacaccctattcagtggctgtacatcacctgcagaaaggtgtgtaagggagcagaaaagcctgttccccctcgtctcctgacagaagaagaatatcggatacaaggagaggtagaaacccgaaaggctttagaggagctccgagaattttgtaacagtccagactgctctgcttggaagactgtttctcgaatccagtctccaaaaagatttgctgactttgtggaaggctcttcccacctcacgccaaatgaagtttctgtccatgagcaggagtatggattagggagcattattgcccaggatgaaatctatgaggaagcatcctctgaggaggaggactcatattctcggtgtcctgctatcacacagaacaactttctaacctaggtagtggtcagttatctttacgtggactggcttggtgccttggtccatgttgcatgtgttgtgcaattgctttcaaccctttgaaacagagtgagatagatagggtagaaattctcctactgaaataagaggcctaaaaaggcctccctttggaaatgggaggtctctatgggatccctgaggaaggagagtggataaagtagtgaatgctgggtagttcacttcccattggttaagctaacagcccacttttatgtttccagagaaattggatggccacagctagcatggcattctagctccttcttgaaagttgattcaatcatggcatttctgtcactggctggctctccaaagtaagaactgttgttaagtgcaggaatgcttttagactataggctgcaacttccagagagaaatccacaaatctgagcctccttcactccagcttttatttcrgtgactttagaataattattgatttaactgttttgggaggaaaatagatttttattgttttgttttttaaatgaatgtcttttaaaaamcwtamcaaactcatgttccagaaccagcaagtgctccagagtgacacaccccctaggcccctacatatttattaatatggattatccattaaagccccaggagctgttgttttaagctttgatttagttctcatacatatgatagaaagtcctatttgcctttangaacatgcctgtangctcttctgcaggntgagatgttctgggctttttattatattcaactttcaattccatcttaaaaaacatttgtwttcttctcttcccattcttccttaccctgcctttgccctttcaggaagggtcagttcccttacctgtgaactatgtatgttcagagtagcattattcctgctagctaggagaagtcatcttgtttaggggatttggatgctttttatacgttctccattttcctgtcattgggtcatgttatctttgagttgctatgaaatcaggaaactgtctccttttcctttcccttcctttgtctacatgctctgtccattcctttcagccttttctcaccacccatactcccccaaatctgggtaatttttaagccttgaaactatgtagtttcttgatacacaatttgtagttatgcagcagccacaatttgcattgccanggaaatargctccaggttatcttcatgcctctgggtgctcattcagctgtcaagtttccatgaacttacacttatttatgattgcgtttctgacctgagatgtatgctgcctgttattgcagtagcattagtttcagattcttttgccattgcaaagtaccccttataaaccagcaatgtcatctgtgaggaagcaaattctcaagtgtctgtcatttacttggttctttttctttgtggtcttcacccttataccctggaaaagtctgtaattaccttagccaggaagatagatggtcatggcaagcgcacagcaccagacttactggctcaccaagatgatggaaaaaggcagatgattttttaaaaagccgtaatgactcctttagaccagccatttagcgtggtaattttgaaaggcctagctccattgcagacttccaaagggtcagctctgagactgccctccaggtgggcagttgattatttccaccagtgttttccagagccttaaactgtcctaagtgacaactacctcagttggcaggaaagagacatatagtagaaagtgaaaaatgagcagtatttgggcagatgctatgggttacagttgaagggtaaaaggaactttacattgggaaacctttatacccttgtgaattatgtacatggtaaaatgttctctctctacaaagaactattaaaacttctgaaatatactattttttaccttatttatagaaattgagacctagcatatttaagcataagtttattttaaaaaataattcaactcgtgcaagtggtctcaggattctctggagattttggtgcctcccctacttagggaggtgatagcttgcctawaagggtgacttttccygatcatgtctttatttcaatgagaaagcactgtgaaattgtgaaagawtctcctctttctctgtttaataaacccccatgaaatataaaaaaaaaaaaaaagggcggccgctctagaggatccctcgaggggcccaagcttacgcgtgcatgcgacgtcatag

SEQ ID NO: 1260 - DNA, 2369 bp, Homo sapiens
gatgaagtggagcwgtgagtgtgagcctcaacatagttccagaactctccatccggactagttattgagcatctgcctctcatatcaccagtggccatctgaggtgtttccctggctctgaaggggtaggcacgatggccaggtgcttcagcctggtgttgcttctcacttccatctggaccacgaggctcctggtccaaggctctttgcgtgcagaagagctttccatccaggtgtcatgcagaattatggggatcacccttgtgagcaaaaaggcgaaccagcagctgaatttcacagaagctaaggaggcctgtaggctgctgggactaagtttggccggcaaggaccaagttgaaacagccttgaaagctagctttgmaacttgcagctatggctgggttggagatggattcgtggtcatctctaggattagcccaaaccccaagtgtgggaaaaatggggtgggtgtcctgatttggaaggttccagtgagccgacagtttgcagcctattgttacaactcatctgatacttggactaactcgtgcattccagaaattatcaccaccaaagatcccatattcaacactcaaactgcaacacaaacaacagaatttattgtcagtgacagtacctactcggtggcatccccttactctacaatacctgcccctactactactcctcctgctccagcttccacttctattccacggagaaaaaaattgatttgtgtcacagaagtttttatggaaactagcaccatgtctacagaaactgaaccatttgttgaaaataaagcagcattcaagaatgaagctgctgggtttggaggtgtccccacggctctgctagtgcttgctctcctcttctttggtgctgcagctggtcttggattttgctatgtcaaaaggtatgtgaaggccttcccttttacaaacaagaatcagcagaaggaaatgatcgaaaccaaagtagtaaaggaggagaaggccaatgatagcaaccctaatgaggaatcaaagaaaactgataaaaacccagaagagtccaagagtccaagcaaaactaccgtgcgatgcctggaagctgaagtttagatgagacagaaatgaggagacacacctgaggctggtttctttcatgctccttaccctgccccagctggggaaatcaaaagggccaaagaaccaaagaagaaagtccacccttggttcctaactggaatcagctcaggactgccattggactatggagtgcaccaaagagaatgcccttctccttattgtaaccctgtctggatcctatcctcctacctccaaagcttcccacggcctttctagcctggctatgtcctaataatatcccactgggagaaaggagttttgcaaagtgcaaggacctaaaacatctcatcagtatccagtggtaaaaaggcctcctggctgtctgaggctaggtgggttgaaagccaaggagtcactgagaccaaggctttctctactgattccgcagctcagaccctttcttcagctctgaaagagaaacacgtatcccacctgacatgtccttctgagcccggtaagagcaaaagaatggcagaaaagtttagcccctgaaagccatggagattctcataacttgagacctaatctctgtaaagctaaaataaagaaatagaacaaggctgaggatacgacagtacactgtcagcagggactgtaaacacagacagggtcaaagtgttttctctgaacacattgagttggaatcactgtttagaacacacacacttactttttctggtctctaccactgctgatattttctctaggaaatatacttttacaagtaacaaaaataaaaactcttataaatttctatttttatctgagttacagaaatgattactaaggaagattactcagtaatttgtttaaaaagtaataaaattcaacaaacatttgctgaatagctactatatgtcaagtgctgtgcaaggtattacactctgtaattgaatattattcctcaaaaaattgcacatagtagaacgctatctgggaagctatttttttcagttttgatatttctagcttatctacttccaaactaatttttatttttgctgagactaatcttattcattttctctaatatggcaaccattataaccttaatttattattaacatacctaagaagtacattgttacctctatataccaaagcacattttaaaagtgccattaacaaatgtatcactagccctcctttttccaacaagaagggactgagagatgcagaaatatttgtgacaaaaaattaaagcatttagaaaaaaaaaaaaaaaaaaaaaaaactcga

SEQ ID NO: 1261 - DNA, 1772 bp, Homo sapiens
cacgaggagagggcgggccagggmcgcactccggagactcgcggttgctacgcgcaccatggctggagaggtacttctcagccctctagctccaactgagaacccagccagtcaggaagtcgctacttcgggaacaccaaccaatcagggggccgtcacctgctgaaggagtccttcggcggctgttgtgtcagtggcctgatcgcgatggggacaaaggcgcaagtcgagaggaaactgttgtgcctcttcatattggcgatcctgttgtgctccctggcattgggcagtgttacagtgcactcttctgaacctgaagtcagaattcctgagaataatcctgtgaagttgtcctgtgcctactcgggcttttcttctccccgtgtggagtggaagtttgaccaaggagacaccaccagactcgtttgctataataacaagatcacagcttcctatgaggaccgggtgaccttcttgccaactggtatcaccttcaagtccgtgacacgggaagacactgggacatacacttgtatggtctctgaggaaggcggcaacagctatggggaggtcaaggtcaagctcatcgtgcttgtgcctccatccaagcctacagttaacatcccctcctctgccaccattgggaaccgggcagtgctgacatgctcagaacaagatggttccccaccttctgaatacacctggttcaaagatgggatagtgatgcctacgaatcccaaaagcacccgtgccttcagcaactcttcctatgtcctgaatcccacaacaggagagctggtctttgatcccctgtcagcctctgatactggagaatacagctgtgaggcacggaatgggtatgggacacccatgacttcaaatgctgtgcgcatggaagctgtggagcggaatgtgggggtcatcgtggcagccgtccttgtaaccctgattctcctgggaatcttggtttttggcatctggtttgcctatagccgaggccactttgacagaacaaagaaagggacttcgagtaagaaggtgatttacagccagcctagtgcccgaagtgaaggagaattcaaacagacctcgtcattcctggtgtgagcctggtcggctcaccgcctatcatctgcatttgccttactcaggtgctaccggactctggcccctgatgtctgtagtttcacaggatgccttatttgtcttctacaccccacagggccccctacttcttcggatgtgtttttaataatgtcagctatgtgccccatcctccttcatgccctccctccctttcctaccactgctgagtggcctggaacttgtttaaagtgtttattccccatttctttgagggatcaggaaggaatcctgggtatgccattgacttcccttctaagtagacagcaaaaatggcgggggtcgcaggaatctgcactcaactgcccacctggctggcagggatctttgaataggtatcttgagcttggttctgggctctttccttgtgtactgacgaccagggccagctgttctagagcgggaattagaggctagagcggctgaaatggttgtttggtgatgacactggggtccttccatctctggggcccactctcttctgtcttcccatgggaagtgccactgggatccctctgccctgtcctcctgaatacaagctgactgacattgactgtgtctgtggaaaatgggagctcttgttgtggagagcatagtaaattttcagagaacttgaagccaaaaggatt

SEQ ID NO: 1262 - DNA, 1726 bp, Homo sapiens
gtacagtttgtggcgctcagaggataccatatctggctaactgtaggcattcctgaatactgaccagtactgtgcaatatcgtatgaagcagaaaacacaacattggcagacaaagctttctcagtaagaccatttgatgtgttctttcatggtcttctttggcatcctctctaacatccaccatccaccctccatcaacaaacaacaagacgttatacattttctccttcacatcagcagttagggcatccaaatgccctttccaaataccaaaatccatttcatatttcttttctttgtgttcatgagccactttctcagtaaaagttggttgaggtatcaaagcaggtttttgtggaactgaattcatatgcttaaaccactcattaaaggtttcatgggcttccaaataagctytgatgcacaaatgttcycggatagcattatcatcttcagcaggaagtggactttccattccttgttcctcgcactgattawagatttctgctatagaatcctgaggaattttcacaaatacttcttttgcagcttcgtgcttttttgatgccaagaattttctcataattgcattgccttgtttcagtgcttctgccctctgcgctgggtcaaataccaaccagtcaattacatcaatttttaaacgatcctcctcagtagtgccagtatctagggctggggccaggtcatgatgactaaattcaccattatctttctttcgaatattctcaactacagtttttgttattgttgcaacatccaaatctgcttctttagccaactccaggcaatggtggcgctgttcaaattctgtaacactttccaaaaataatgcatactgggcaacagctaggtcttgaggcaaatgacaggtataaaatgctataagatttgtatgtttctctcttattaaaagctgtatgtatgtctttaaaacttcaatagaaacttcctccttggtctgtagtcccagagtacggaaaaacaaaataaggtgagtcataaagcgaagcaggtgtccaggtagattgtttctgcttttggaaagccatttgctaaactcatccatcaaaccatcaatgtctcccaggataagaaacttttgaactatatgataatgttcttgattctcttccagaactctctttttgtcagtagcttgaagttcctcaaaaaccttttctaacgtccagtttgctcccagatattctctagggagttcttcagtttcatccagagttgctactgatgtctggatctcctgttctaccagactgtccaccatcacccggaagtaggcccaaactgtgtcttcccaggtgtcacagacaggaagcagctgcttaagattcccacttaaagctgcataaattgctctctcgtatctattaaaaagctcatcttctgccattctccagcaacttattttccaaatgcgtctatatggattcccttcaacaggttctaattctgttcctccattaacattagggtcatggtacagtttccagccttcaagtgttgcagctctccatgcttgaccacagcgtttacagagtcgttgtgcctcttctgtcattccagcacggattagagtaaagagatatttgagtaatctaacttcatcttctctatccagatcatcaaggggcattttctgtcttatgggagcatcagggtccaattcagtgacaagcggacgaacac

SEQ ID NO: 1263 - DNA, 1074 bp, Homo sapiens
gcggccgcctggcacacactggtccccttggcctccaggtagatgctagtggagggcgcccgcctggcgacgaggcagaggcaggcagcaagagacagcgcgcagatgacgaacagggagtcgctcaccaggacgcggacaagcagcagggcccagggctgtgcccggcgccgatgggagagcacagcacacagcacgttcaccagcagaaagagcagcgaggcccccacaaaggcccctcggacagcgagcaagcctcggctcatctccggccgacgcttcaccttggccttgaacaccacctgggcaaagtagaggttcataagcgtcaaggtgaagaactgcaggcagacggggcagcagtagagaagccagaagggcaagggccccaggcggttggcgcggggagtatctcggaagtagaaggagaagagggtggtacgcaaggcggcccagagcagacagagggccaggaacaccgtctgatagctgagacgcttgtgcccatacagaagcaccagccagagctgggcatagacggaraagaagagcagggcatacagggtggtgtaggcagctgtcagccccagggtcacagcaggtggcagcgcaggcaccagcccggcagcaggcaccaggccagacaggttactctccatgtcagggagggaggcctgaatcccggagacagacaaggagggactgtcggcgggaccagggaaataaatacggaggggtgggaattgcagggtgcagagagggagatggggcgctcaggaggaaagaagttgtggctgacaggcccctcctcctcaacagagagacccttgcccttggggaacacaggcagcctgggccccaggcccctcactcaggggcatggaagggcagtctcttttctccaggacagaccggataggggttgggggtgtctcctccctgggcctaccccagagccaaggatggggggatgcagaggcccaaggagaggactccctggcctcggtcgttcatgtcgtcctgggtggagggggagagccggctgatacccgtcgggtcagggcagcggccgct

SEQ ID NO: 1264 - DNA, 1958 bp, Homo sapiens
  misc_feature (1724)..(1724): n equals a,t,g, or c
  misc_feature (1843)..(1843): n equals a,t,g, or c
  misc_feature (1850)..(1850): n equals a,t,g, or c
  misc_feature (1864)..(1864): n equals a,t,g, or c
  misc_feature (1875)..(1875): n equals a,t,g, or c
  misc_feature (1907)..(1907): n equals a,t,g, or c
  misc_feature (1911)..(1911): n equals a,t,g, or c
  misc_feature (1936)..(1936): n equals a,t,g, or c
tcaccaaccatgcaaatgtgaatgagggcatsgttcccaytkcgatgctggttgccaacgatcagatggcgctgggcgcaatgcgcgccattaccgagtccgggctgcgcgttggtgcggatatctcggtagtgggatacgacgataccgaagacagctcatgttatatcccgccgttaaccaccatcaaacaggattttcgcctgctggggcaaaccagcgtggaccgcttgctgcaactctctcagggccaggcggtgaagggcaatcagctgttgcccgtctcactggtgaaaagaaaaaccaccctggcgcccaatacgcaaaccgcctctccccgcgcgttggccgattcattaatgcagctggcacgacaggtttcccgactggaaagcgggcagtgagcgcaacgcaattaatgtgagttagctcactcattaggcaccccaggctttacactttatgcttccggctcgtatgttgtgtggaattgtgagcggataacaatttcacacaggaaacagctatgaccatgattacgccaagctctaatacgactcactatagggaaagctggtacgcctgcaggtaccggtccggaattcccgggtcgacccacgcgtccgaccgaaacggacacggactgaatgttacttttcctcctctcctaagtggaaacgacttccaaacagttgaggaaggcagtaatgtgaagttggtttgcaatgtgaaagccaacccccaggctcaaatgatgtggtacaaaaacagtagtctcctcgatttagagaaaagccgtcaccaaatccaacagacaagtgagtcttttcagctgtcaatcaccaaagtcgagaagcctgacaacggaacctacagttgtattgcaaagtcatctctgaaaacggagagcttggactttcacctgattgttaaagataaaactgtgggtgtaccaatagagcccattattgctgcatgtgttgtgatctttctgacattgtgctttggactgattgctagaagaaagaaaataatgaagctctgcatgaaggataaagaccctcacagtgaaacagctctatgagaaagctgagatgccatcgaatacagagagagttttgcatcaggacctccacaatttatgtagtcccatctgtatttattgctattattaaattcactcctgtcactcctgtttcattaatcacttaacagtagttgktaggactaatttgatacacttgtggaacatttttatggaaagagctattaagaatgaaaagtaagattttgttaagtcttctccttgaagtatatgttaattaattgagatttgttccaaataggttggtaatcatttactgtttagtgtgttttttttctaggtaggagatacttgggtctcacaaattggtgcaaagccaaaaaaaaaaaaaaaagggcggccgctctagaggatccaagcttacgtacgcgtgcatgcgacgtcatagctcttctatagtgtcacctaaattcaattcactggccgtcgttttacaacgtcgtgactgggaaaaccctggcgttacccaacttaatcgccttgcagcacatccccctttcgccagctggcgtaatagcgaagaggcccgcaccgatcgcccttcccaacagttgcgcagcctgaatggcgaatgggacgcgccctgtagcggcgcattaagcgcggcgggtgtggtggntacgcgcagcgtgacccgctacacttgccagcgccctagcgcccgtcctttcgctttcttcccttcctttcttgccacgttcgcccggctttccccgtcaagctctaaatcgggggctncctttanggttcccatttagngctttaccggnaccttgaccccaaaaaaacttggattaagggngaanggttcacgtaaatggggcccattgnccctgatagaacgggttttttc

SEQ ID NO: 1265 - DNA, 1018 bp, Homo sapiens
  misc_feature (1016)..(1018): n equals a,t,g, or c
gatgctccgggccgcgctgcccgcgctcctgctgccgttgctgggcctcgccgctgctgccgtcgcggactgtccttcrtctacttggattcagttccaagacagttgttacatttttctccaagaagccatcaaagtagaaagcatagaggatgtcagaaatcagtgtactgaccatggagcggacatgataagcatacataatgaagaagaaaatgcttttatactggatactttgaaaaagcaatggaaaggcccagatgatatcctactaggcatgttttatgacacagatgatgcgagtttcaagtggtttgataattcaaatatgacatttgataagtggacagaccaagatgatgatgaggatttagttgacacctgtgcttttctgcacatcaagacaggtgaatggaaaaaaggaaattgtgaagtttcttctgtggaaggaacactatgcaaaacagctatcccatacaaaaggaaatatttatcagataaccacattttaatatcagcattggtgattgctagcacggtaattttgacagttttgggagcaatcatttggttcctgtacaaaaaacattctgattctcgtttcaccacagttttttcaaccgcaccccaatcaccttataatgaagactgtgttttggtagttggagaagaaaatgaatatcctgttcaatttgactaagtttttggtaatcttgcactaagacatcaacaaaatgccctggcagagataacttgggaaagattttaatataaaacttgacattggatattagagctttaatggtattccttattccagtaacatttttatgtactcatctgctgtgaaaagtctttaggttcattaaaaaaacaggttttagaaatgatcttagatctaatatactgattttaagcatcccgtcaaaggcagaatctgtcacttgaatgaaggaaagcttaaagcccaagcagataaaaataaaagcccagcctatttgtcttgaaaaaaaaannn

SEQ ID NO: 1266 - DNA, 564 bp, Homo sapiens
gtcacccagcggtggagtgacacggagttcagcggtgcaatcacggctcactgcagcctcaacctcacaggctcaagcaatcctcccatctcagcctcccgagtagcttggactacaggcgtgcccttccatgcccaggtgtcctgatggcaaatttcaagggccacgcgcttccagggagtttcttcctgatyattgggctgtgttgrtcagtgaagtacccgctgaagtactttagccacacgcggaagaacagcccactacattactatcagcgtctcgagatcgtcgaagccgcaattaggactttgttttccgtcaytgggatcctggcagagcagtttgttccggatgggccccamctgcacctctaccatgagaaccactggataaagttaatgaatkggcagcacagcaccatgtactawtctttgcagtctcaggaattgttgacatgctcactatctggtcagccacgttcccttgggggtggacaractggttawgggctgtggcatattcatgggaaggttttttgtgggaacggatgggagaggaagggag

SEQ ID NO: 1267 - DNA, 535 bp, Homo sapiens
  misc_feature (407)..(407): n equals a,t,g, or c
  misc_feature (522)..(522): n equals a,t,g, or c
  misc_feature (535)..(535): n equals a,t,g, or c
gctaccgcagtagccgcctctgccgccgcggagcttcccgaacctcttcagccgcccggagccgctcccggagcccggccgtagaggctgcaatcgcagccgggagcccgcagcccgcgccccgagcccgccgccgcccttcgagggcgccccaggccgcgccatggtgaaggtgacgttcaactccgctctggcccagaaggaggccaagaaggacgagcccaagagcggcgaggaggcgctcatcatcccccccgacgccgtcgcggtggactgcaaggacccagatgatgtggtaccagttggccaaagaagagcctggtgttggtgcatgtgctttggactagcatttatgcttgcaggtgttattctaggaggagcatacttgtacaaatattttgcacttnaaccagatgacgtgtactactgtggaataaagtacatcaaagatgatgtcatcttaaatgagccctctgcagatgccccagctgctctctaccagacaattgaagaaaatattanaatctttgaagan

SEQ ID NO: 1268 - DNA, 994 bp, Homo sapiens
  misc_feature (221)..(221): n equals a,t,g, or c
  misc_feature (948)..(948): n equals a,t,g, or c
  misc_feature (955)..(955): n equals a,t,g, or c
  misc_feature (966)..(966): n equals a,t,g, or c
  misc_feature (977)..(977): n equals a,t,g, or c
gggacggtttgtgacccccttagccgaccctactcctcactggccgggacaactggtcttatcacggaggctggggccaggcagcccttcggttcgggtgggcccatggaccccagtccaacgccgagggaataggaccatccaaaagcggaaccttcgcctcagaaaaagggtgcgggacccctcctcaccgtgcggtcacgcgtggaccctgccagcanccaggccatggagctctctgatgtcaccctcattgagggtgtgggtaatgaggtgatggtggtggcaggtgtggtggtgctgattctagccttggtcctagcttggctctctacctacgtagcagacagcggtagcaaccagctcctgggcgctattgtgtcagcaggcgacacatccgtcctccacctggggcatgtggaccacctggtggcaggccaaggcaaccccgagccaactgaactcccccatccatcagaggacaagcaggtgcaggcagcagcagtccagaggcccccctgagatctgaggatagcacctgcctccctcccagccctggcctcatcactgtgcggctcaaattcctcaatgataccgaggagctggctgtggctaggccagaggataccgtgggtgccctgaagagcaaatacttccctggacaagaaagccagatgaaactgatctaccagggccgcctgctacaagacccagcccgcacactgcgttctctgaacattaccgacaactgtgtgattcactgccaccgctcacccccagggtcagctgttccaggcccctcagcctccttggscccctcggccactgagccaccmagcttggtgtcaatgtggggcarcctcatggtgctgtmtttgtggtgctgttgggtgtrgtctggtacttycgaaatcaattaccgccaattcttcaaagcaactgccaatntctcccnggtgggaaatnaccgtcttctnaagcttcctaagtaatt

SEQ ID NO: 1269 - DNA, 2024 bp, Homo sapiens
  misc_feature (1921)..(1921): n equals a,t,g, or c
accttgtcaggttgtttgtccagaacttaaaaagccccaatgttacccattctccaagtcytcttcagtgcagggcatscagtagggcagccagcacttggggctctggtttcctggtggactggccatsaacaggcgggcaagtgccccacagatgttgtcacggwcacgatcatgtcgctcccgcgccagragggraaaaaggagccccagcagcttggggaagtgttcctgggcagggtggcccccatgctctgccagcacgcccatcccgaagatggcattgcttcgcacctcggggtctgcctcttgggcggtgctcaacagcacagggagcagccgagacacaaactgggctgaggcagcacccaggccctgaatagtctctgccaaggtccccactgcaaaggacttctctgccactgtgcagccctgttttgtcttgcacaccaataatggcaggaaaccggcaaagaatggggcaaaggagtctcccccagccgcggctgccagggcagggatggcctctccagcgtgctccagcaacatggcgtcgtattcagcctgatcatcatcttcctcttcctcctcctcgtcagtatcctgacaggctgtcttcctctgcagcacagccttgagcacgccacagagctcagcgaggcgcccagggggcttcagtgtgagggtcccacagctgcggagcacccctgtcagggcctccagcacggccatcaccacctggcgttcccgctccctgttcactgcctgcatgtaggatggcacgactcgggccagggcagcctgcaaagcagcagtgttgggttccgaggggcagctttgacaggccttgtgcagtgcacagcaaaactgacccagagcctcatgggctgccttccgcacattcaggtgagggcactccagcagtttaaatacttcttcaaagacactttccatgtatggaaggaaggccacactggtgttcacagagatctcccccacggcagcacaggtgtcttccttctcatcgaagaaggcattctccacgctgtaccctgagatctytgagtcatcctcttcttccacatcctcatccatgagctcctcctcttcttccccatcactctcatcgtcaaacagaaggaaggagctgctcccgtcatactgaggcacaatgccctcggtggaacgcagtgacagcagcatgagcgtggtgatctgttccaagtggggcgccaggccctcacccatcagacccgataaggctgcaaataggctgtacgtgcagcgccgcaagtcagcgtcgtctacctggtcgcagaggcccagacccagctggcagcattcctcagccagcggcctcatgggctcccccactgctcgtgccagcacccccagtgtctccaggctctggatctgcacaggctgaaggtcctcacggcctgttaacaggaattcccgcaggtgctccatgatggcagggaagtagggcagcagcgagacctgggcagccgtagcaatggctcccagggcgctcacagccagctccttggcccggggactgctggggttcctcagaagctgcagcatgcattccataagctccggaaggtagggctgcaccttgggccctaggttctccacaaaattctccagggcatagcaggccttggctaggtggtgtgtgtgtccaagaggcaccgacttcaagtaggcgaggagcagtggcattacctcccttgaatagctgctgatatggggctgtaggttttctgagaactggcccagggcaaacagcgcagcattgcgtacaacttgcgaggggtcctccaggcccttgcacacaatctgcagcagtgggggcagcagtctctgcctgatgtggtcgccagctccgtcagacagcacggccagcaccaggagntcagctttgcgctggtatgggctcctctccgcaaagcctcttccaacatgggcatcagctggggacagagcttctcggggggggttaaaaaacaaaaaaaaaa

SEQ ID NO: 1270 - DNA, 3155 bp, Homo sapiens
  misc_feature (3151)..(3151): n equals a,t,g, or c
ggcacagggaaagaagctgtctccatcttgtctgtatccgctgctcttgtgacgttgtggagatggggagcgtcctggggctgtgctccatggcgagctggataccatgtttgtgtggaagtgccccgtgtttgctatgccgatgctgtcctagtggaaacaactccactgtaactagattgatctatgcacttttcttgcttgttggagtatgtgtagcttgtgtaatgttgataccaggaatggaagaacaactgaataagattcctggattttgtgagaatgagaaaggtgttgtcccttgtaacattttggttggctataaagctgtatatcgtttgtgctttggtttggctatgttctatcttcttctctctttactaatgatcaaagtgaagagtagcagtgatcctagagctgcagtgcacaatggattttggttctttaaatttgctgcagcaattgcaattattattggggcattcttcattccagaaggaacttttacaactgtgtggttttatgtaggcatggcaggtgccttttgtttcatcctcatacaactagtcttacttattgattttgcacattcatggaatgaatcgtgggttgaaaaaatggaagaagggaactcgagatgttggtatgcagccttgttatcagctacagctctgaattatctgctgtctttagttgctatcgtcctgttctttgtctactacactcatccagccagttgttcagaaaacaaggcgttcatcagtgtcaacatgctcctctgcgttggtgcttctgtaatgtctatactgccaaaaatccaagaatcacaaccaagatctggtttgttacagtcttcagtaattacagtctacacaatgtatttgacatggtcagctatgaccaatgaaccagaaacaaattgcaacccaagtctactaagcataattggctacaatacaacaagcactgtcccaaaggaagggcagtcagtccagtggtggcatgctcaaggaattataggactaattctctttttgttgtgtgtattttattccagcatccgtacttcaaacaatagtcaggttaataaactgactctaacaagtgatgaatctacattaatagaagatggtggagctagaagtgatggatcactggaggatggggacgatgttcaccgagctgtagataatgaaagggatggtgtcacttacagttattccttctttcacttcatgcttttcctggcttcactttatatcatgatgacccttaccaactggtacaggtatgaaccctctcgtgagatgaaaagtcagtggacagctgtctgggtgaaaatctcttccagttggattggcatcgtgctgtatgtttggacactcgtggcaccacttgttcttacaaatcgtgattttgactgagtgagacttctagcatgaaagtcccactttgattattgcttatttgaaaacagtattcccaacttttgtaaagttgtgtatgtttttgcttcccatgtaacttctccagtgttctggcatgaattagattttactgcttgtcattttgttattttcttaccaagtgcattgatatgtgaagtagaatgaattgcagaggaaagttttatgaatatggtgatgagttagtaaaagtggccaytattgggcttattctctgctctatagttgtgaaatgaagagtraaaacaaatttgtttgactattttaaaattatattagaccttaagctgttttagcaagcattaaagcaaatgtatggctgccttttgaaatatttgatgtgttgcctggcaggatactgcaaagaacatggtttattttaaaatttataaacaagtcacttaaatgccagttgtctgaaaaatcttataaggttttacccttgatacggaatttacacaggtagggagtgtttagtggacaatagtgtaggttatggatggaggtgtcggtactaaattgaataacgagtaaataatcttacttgggtagagatggcctttgccaacaaagtgaactgttttggttgttttaaactcatgaagtatgggttcagtggaaatgtttggaactctgaaggatttagacaaggttttgaaaaggataatcatgggttagaaggaagtgtttgaaagtcactttgaaagttagttttgggccagcacggtagctcacccttgtaatcccagcactttgggaggctgaggtgggtagattacttgagcccaggaattcaagaccagcctgggcaacatggtgaaaccctgtttctataaaaaataatctgggctttgtagcatatgcctgtggtcccagctactgaggaggctgaggtgggaggattgcttgagcccaggaggcagaggttgcagtgagccaaggtcacgtcactgcactctagcctgggcaacagagtaagacaaaaaaatatatatatattgaaaatcaaaggaggcaaaattttgacagggaaggaagtaactgcaaaacactaggctttagtaggtacttatataaaatctagtccagttctctcatttaaaaaaatgaagacactgaagtacagacttaaatagctcagatagctaattaggaaatttcaagttggccaataatagcattctctctgacatttaaaaataatttctattcaaaatacatgcataattgattttacacctcattactggtggataatttatgtgatgtggattgctggtgtccagcatgacccataaacaggtcagaagaatgatggaatgttttagaataaactcctgcttatagtatactacacagttcaaaagatgtttaaaatgcttttgtatttactgccatgtaattgaaatatatagattattgtaacctttcaacctgaaaatcaagcagtatgagagtttagttatttgtatgtgtcactagtgtctaatgaagcttttaaaatctacaatttcttctttaaaaatatttattaatgtgaatggaatataacaattcagcttaattccccaaccttattctgtgtgtagacattgtattccacaattttgaatggctgtgttttacctctaaataaatgaattcagagaaaaaaaaaaaaaaaaaaaaaaaaaaaaaaggggggncccc

SEQ ID NO: 1271 - DNA, 589 bp, Homo sapiens
  misc_feature (429)..(429): n equals a,t,g, or c
  misc_feature (565)..(565): n equals a,t,g, or c
accaactcaaaaggtcacctatcagtgtgccatgtgccacctcctggagcacacacatgtgcacacacatacactcacacgtgtgtkcaggtgcacacctcccccagaggctgcagccaagacgggcatcccacatcagagggatgaatggcaggtctgtcccgccagctgtgtgctctctcccacccgaagaaagcagcagagactcagacggcggagctggaggagcccacgcagtctgttcccggcacccggtgcgtgtraagggacttgarggcakcgagatggaatcagcaagagaaaacatcgaccttcaacctggaagctccgaccccaggagccagcccatcaacctgaaccattacgccaccaagaagagcgtggcgkagagcatgctggacgtggccctgttcatgtccaacgccatgnggctgaaggcggtgctggagcagggaccatcctctcactactacaccaccctggtcaccctcatcagcctctctctgctcctgcagttggttcatcggtgtctgctcgtggtcattgcacggctgaactgratgangtagaaaagcatggcgamtcaacc

SEQ ID NO: 1272 - DNA, 2171 bp, Homo sapiens
  misc_feature (6)..(6): n equals a,t,g, or c
  misc_feature (17)..(17): n equals a,t,g, or c
  misc_feature (21)..(21): n equals a,t,g, or c
  misc_feature (24)..(24): n equals a,t,g, or c
  misc_feature (33)..(33): n equals a,t,g, or c
  misc_feature (2093)..(2093): n equals a,t,g, or c
ggatancaattttcacncagnaancagctatgnccatgattacgccaagctttaatacgactcactatagggaaagctggtacgcctgcaggtaccggtccggaattcccgggtcgacccacgcgtccgccagcaccacagtgccaggccttagtgaggaatctaccaccttctacagcagcccaggctcaactgaaaccacagcgttttctcacagcaacacaatgtccattcatagtcaacaatctacacccttccctgacagcccaggcttcactcacacagtgttacctgccaccctcacaaccacagacattggtcaggaatcaacagccttccacagcagctcagacgcaactggaacaacacccttacctgcccgctccacagcctcagaccttgttggagaacctacaactttctacatcagcccatcccctacttacacaacactctttcctgcgagttccagcacatcaggcctcactgaggaatctaccaccttccacaccagtccaagcttcacttctacaattgtgtctactgaaagcctggaaaccttagcaccagggttgtgccaggaaggacaaatttggaatggaaaacaatgcgtctgtccccaaggctacgttggttaccagtgcttgtcccctctggaatccttccctgtagaaaccccggaaaaactcaacgccactttaggtatgacagtgaaagtgacttacagaaatttcacagaaaagatgaatgacgcatcctcccaggaataccagaacttcagtaccctcttcaagaatcggatggatgtcgttttgaagggcgacaatcttcctcagtatagaggggtgaacattcggagattgctcaacggtagcatcgtggtcaagaacgatgtcatcctggaggcagactacactttagagtatgaggaactgtttgaaaacctggcagagattgtaaaggccaagattatgaatgaaactagaacaactcttcttgatcctgattcctgcagaaaggccatactgtgctatagtgaagaggacactttcgtggattcatcggtgactccgggctttgacttccaggagcaatgcacccagaaggctgccgaaggatatacccagttctactatgtggatgtcttggatgggaagctggcctgtgtgaacaagtgcaccaaaggaacgaagtcgcaaatgaactgtaacctgggcacatgtcagctgcaacgcagtggcccccgctgcctgtgcccaaatacgaacacacactggtactggggagagacctgtgaattcaacatcgccaagagcctcgtgtatgggatcgtgggggctgtgatggcggtgctgctgctcgcattgatcatcctaatcatcttattcagcctatcccagagaaaacggcacagggaacagtatgatgtgcctcaagagtggcgaaaggaaggcacccctggcatcttccagaagacggccatctgggaagaccagaatctgagggagagcagattcggccttgagaacgcctacaacaacttccggcccaccctggagactgttgactctggcacagagctccacatccagaggccggagatggtagcatccactgtgtgagccaacgggggcctcccaccctcatctagctctgttcaggagagctgcaaacacagagcccaccacaagcctccggggcgggtcaagaggagaccgaagtcaggccctgaagccggtcctgctctgagctgacagacttggccagtcccctgcctgtgctcctgctggggaaggctgggggctgtaagcctctccatccgggagcttccagactcccagaagcctcggcacccctgtctcctcctgggtggctccccactctggaatttccctaccaataaaagcaaatctgaaagctcaaaaaaaaaaaaaaagggcggccgctctagaggatccaagcttacgtacgcgtgcatgcgacgtcatagctcttctatagtgtcacctaaattcaattcactggccgtcgttttacaacgtctgactgggaaaaccctggcgttacccaacttaatcgccttgcagcacatncccctttygccagctgcgtaatagcraagaggsccgsaccgatcgcccttccaacagttgcgcagcctgaatggcgaa

SEQ ID NO: 1273 - DNA, 1892 bp, Homo sapiens
  misc_feature (1834)..(1834): n equals a,t,g, or c
  misc_feature (1836)..(1836): n equals a,t,g, or c
ggagccgccgcgcgcgcgccgcgcactgcagccccaggccccggccccccacccacgtctgcgttgctgccccgcctgggccrggccccaaaggcaaggacaaagcagctgtcagggaacctccgccggagtcgaatttacgtgcagctgccggcaaccacaggttccaagatggtttgcgggggcttcgcgtgttccaagaactgcctgtgcgccctcaacctgctttacaccttggttagtctgctgctaattggaattgctgcgtggggcattggcttcgggctgatttccagtctccgagtggtcggcgtggtcattgcagtgggcatcttcttgttcctgattgctttagtgggtctgattggagctgtaaaacatcatcaggtgttgctattyttttatatgattattctgttacttgtatttattgttcagttttctgtatcttgcgcttgtttagccctgaaccaggagcaacagggtcagcttctggaggttggttggaacaatacggcaagtgctcgaaatgacatccagagaaatctaaactgctgtgggttccgaagtgttaacccaaatgacacctgtctggctagctgtgttaaaagtgaccactcgtgctcgccatgtgctccaatcataggagaatatgctggagaggttttgagatttgttggtggcattggcctgttcttcagttttacagagatcctgggtgtttggctgacctacagatacaggaaccagaaagacccccgcgcraatcctagtgcattcctttgatgagaaaacaaggaagatttcctttcgtattatgatcttgttcactttctgtaattttctgttaagctccatttgccagtttaaggaaggaaacactatctggaaaagtaccttattgatagtggaattatatatttttactctatgtttctctacatgtttttttctttccgttgctgaaaaatatttgaaacttgtggtctctgaagctcggtggcacctggaatttactgtattcattgtcgggcactgtccactgtggcctttcttagcatttttacctgcagaaaaactttgtatggtaccactgtgttggttatatggtgaatctgaacgtacatctcactggtataattatatgtagcactgtgctgtgtagatagttcctactggaaaaagagtggaaatttattaaaatcagaaagtatgagatcctgttatgttaagggaaatccaaattcccaattttttttggtctttttaggaaagatgtgttgtggtaaaaagtgttagtataaaaatgataatttacttgtagtcttttatgattacaccaatgtattctagaaatagttatgtcttaggaaattgtggtttaatttttgacttttacaggtaagtgcaaaggagaagtggtttcatgaaatgttctaatgtataataacatttaccttcagcctccatcagaatggaacgagttttgagtaatcaggaagtatatctatatgatcttgatattgttttataataatttgaagtctaaaagactgcatttttaaacaagttagtattaatgcgttggcccacgtagcaaaaagatatttgattatcttaaaaattgttaaataccgttttcatgaaagttctcagtattgtaacagcaacttgtcaaacctaagcatatttgaatatgatctcccataatttgaaattgaaatcgtattgtgtggctctgtatattctgttaaaaaattaaaggacagaaacctttctttgtgtatgcatgtttgaattaaaagaaagtaatggaagaattgaaaaaaaaaananaaaaatgaccctcgagggggggcccgtacccaattcgccctatagtgagtcgtatg

SEQ ID NO: 1274 - DNA, 1996 bp, Homo sapiens
  misc_feature (1975)..(1975): n equals a,t,g, or c
  misc_feature (1980)..(1980): n equals a,t,g, or c
ggtcgacccacgcgtccgggtggctccagagatggcagtgagcgagaggagggggctcggccgcgggagccccgcggagtgggggcagcggctacttctggtgctgctgttgggtggctgctccgggcgcatccaccggctggcgctgacgggggagaagcgagcggacatccagctgaacagcttcggtttctacaccaatggctctctggaggtggagttgagcgtcctgcggctgggcctccgggaggcagaagagaagtccctgctggtggggttcagtctcagccgggttcggtctggcagagttcgctcctattcaacccgggatttccaggactgccctctccagaaaaacagtagcagtttcctggtcctgttcctcatcaacaccaaggatctgcaggtccaggtgcggaagtatggagagcagaagacgttgtttatctttcccgggctcctcccggaagcaccctccaaaccagggctcccgaagccacaggccacagtcccccgcaaggtggatggcggagggacctctgcagccagcaagcccaagtcaacacccgcagtgattcagggtcctagtgggaaggacaaggacctggtgttgggcctgagccacctcaacaactcctacaacttcagtttccacgtggtgatcggctctcaggcggaagaaggccagtacagcctgaacttccacaactgcaacaattcagtgccaggaaaggagcatccattcgacatcacggtgatgatccgggagaagaaccccgatggcttcctgtcggcagcggagatgccccttttcaagctctacatggtcatgtccgcctgcttcctggccgctggcatcttctgggtgtccatcctctgcaggaacacgtacagcgtcttcaagatccactggctcatggcggccttggccttcaccaagagcatctctctcctcttccacagcatcaactactacttcatcaacagccagggccaccccatcgaaggccttgccgtcatgtactacatcgcacacctgctgaagggcgccctcctcttcatcaccatcgccctgattggctcaggctgggccttcatcaagtacgtcctgtcggataaggagaagaaggtctttgggatcgtgatccccatgcaggtcctggccaacgtggcctacatcatcatcgagtcccgcgaggaaggcgccagcgactacgtgctgtggaaggagattttgttcctggtggacctcatctgctgtggtgccatcctgttccccgtagtctggtccatccggcatctccaggatgcgtctggcacagacgggaaggtggcagtgaacctggccaagctgaagctgttccggcattactatgtcatggtcatctgctacgtctacttcacccgcatcatcgccatcctgctgcaggtggctgtgccctttcagtggcagtggctgtaccagctcttggtggagggctccaccctggccttcttcgtgctcacgggctacaagttccagcccacagggaacaacccgtacctgcagctgccccaggaggacgaggaggatgttcagatggagcaagtaatgacggactctgggttccgggaaggcctctccaaagtcaacaaaacagccagcgggcgggaactgttatgatcacctccacatctcagaccaaagggtcgtcctcccccagcatttctcactcctgcccttcttccacagcgtatgtggggaggtggagggggtccatgtggaccaggcgcccagctccccgggaccccggttcccggacaagcccatttggaagaagagtcccttcctccccccaaatattgggcagccctgtccttaccccgggaccacccctcccttccagctatgtgtacaataatgaccaatctgtttggctaaaaaaaaaaaaaaaaaaaaaaaaaaaaaaaaaaaaaaaaaaaaaaggggggccgntctanaggatccctcgagggg

SEQ ID NO: 1275 - DNA, 1780 bp, Homo sapiens
  misc_feature (1779)..(1779): n equals a,t,g, or c
cccaaaggcatccaagagaccgaggagatgctgaaggtgggggccaccctcacaggggttggcgaactggtcctggacaacaactctgtccgcctgcagccgcccaaacaaggcatgcagtactatctaagcagccaggacttcgacagcctgctgcagaggcaggagtcgagcgtcaggctctggaargtgctggcgctggtttttggctttgccacatgtgccaccctcttcttcattctccggaagcagtatctgcagcggcaggagcgcctgcgcctcaagcagatgcaggaggagttccaggagcatgargcccagctgctgagccgagccaagcctgaggacarggagagtctgaagagcgcctgtgtagtgtgtctgagcagcttcaagtcctgcgtctttctggagtgtgggcacgtttgttcctgcaccgagtgctaccgcgccttgccagagcccaagaagtgccctatctgcagacaggcgatcacccgggtgatacccctgtacaacagctaatagtttggaagccgcacagcttgacctggaagcacccctgcccccttttcagggatttttatctcgaggcctttggaggagcagtggtgggggtagctgtcacctccaggtatgattgagggaggaattgggtagaaactctccagacccatgcctccaatggcaggatgctgcctttcccacctgagaggggaccctgtccatgtgcagcctcatcagagcctcaccctgggaggatgccgtggcgtctcctcccaggagccagatcagtgcgagtgtgactgaaaatgcctcatcacttaagcaccaaagccagtgatcagcagctcttctgttcctgtgtcttctgtttttttctggtgaatcgttgcttgctgtggacttggtggaggactcaggggaggaaaggctgggccccgagtacaacggatgccttgggtgctgcctccgaagagactctgccgcagcttttcttctttttcctcatgccccggkwaacagtctttcttcagaattgtcaggctgggcaggtcaacttgtgttcctttcccctcacctgcttgcctccttaacgcctgcacgtgtgtgtagaggacaaaagaaagtgaagtcagcacatccgcttctgcccagatggtcggggccccgggcaacagattgaagagagatcatgtgaagggcagttggtcaggcaggcctcctggtttcgccactggccctgatttgaactcctgccacttgggagagctcggggtggtccctggttttccctcctggagaatgaggcgcagaggcctcgcctcctgaaggacgcagtgtggatgccactggcctagtgtcctggcctcacagcttccttgcaaggctgtcacaaggaaaagcagccggctggcaccctgagcatatgccctcttggggctccctcatccagcccgtcgcagctttgacatcttggtgtactcatgtcgcttctccttgtgttaccccctcccagtattaccatttgcccctcacctgcccttggtgagccttttagtgcaagacagatggggctgttttcccccacctctgagtagttggaggtcacatacacagctctttttttattgcccttttctgcctctgaatgttcatctctcgtcctcctttgtgcaggcgaggaaggggtgcctcaggggccgacactagtatgatgcagtgtccagtgtgaacagcagaaattaaacatgttgcaaccaaaaaaaaaaaaaagana

SEQ ID NO: 1276 - DNA, 1377 bp, Homo sapiens
ggcacgagaaaaccttgaggtgattcatcttccaggctctccttccatcaagtctctcctccctagcgctctgggtccttaatggcagcagccgccgctaccaagatccttctgtgcctcccgcttctgctcctgctgtccggctggtcccgggctgggcgagccgaccctcactctctttgctatgacatcaccgtcatccctaagttcagacctggaccacggtggtgtgcggttcaaggccaggtggatgaaaagacttttcttcactatgactgtggcaacaagacagtcacacctgtcagtcccctggggaagaaactaaatgtcacaacggcctggaaagcacagaacccagtactgagagaggtggtggacatacttacagagcaactgcgtgacattcagctggagaattacacacccaaggaacccctcaccctgcaggccaggatgtcttgtgagcagaaagctgaaggacacagcagtggatcttggcagttcagtttcgatgggcagatcttcctcctctttgactcagagaagagaatgtggacaacggttcatcctggagccagaaagatgaaagaaaagtgggagaatgacaaggttgtggccatgtccttccattacttctcaatgggagactgtataggatggcttgaggacttcttgatgggcatggacagcaccctggagccaagtgcaggagcaccactcgccatgtcctcaggcacaacccaactcagggccacagccaccaccctcatcctttgctgcctcctcatcatcctcccctgcttcatcctccctggcatctgaggagagtcctttagagtgacaggttaaagctgataccaaaaggctcctgtgagcacggtcttgatcaaactcgcccttctgtctggccagctgcccacgacctacggtgtatgtccagtggcctccagcagatcatgatgacatcatggacccaatagctcattcactgccttgattccttttgccaacaattttaccagcagttatacctaacatattatgcaattttctcttggtgctacctgatggaattcctgcacttaaagttctggctgactaaacaagatatatcattttctttcttctctttttgtttggaaaatcaagtacttctttgaatgatgatctctttcttgcaaatgatattgtcagtaaaataatcacgttagacttcagacctctggggattctttccgtgtcctgaaagagaatttttaaattatttaataagaaaaaatttatattaatgattgtttcctttagtaatttattgttctgtactgatatttaaataaagagttctatttcccaaaaaaaaaaaaaaaaaaaaaaaaa

SEQ ID NO: 1277 - DNA, 2158 bp, Homo sapiens
gcaaaaaggaccgcccattgaagatgccattgcttcttccgatgttcttgagactgcttctaaatctgctaatccaccccacacgattcaagcatcagaagagcagagttcaaccccagcaccggtgaaaaagtctggcaagctgaggcagcaaatagatgtgaaggcggaactggagaagcggcaaggagggaagcagctactcaacttagtggtcattggtcatgttgatgctgggaaaagtactctgatgggccatatgctttatcttctgggtaatataaacaaaagaactatgcataagtatgaacaggagtctaaaaaggctggcaaagcttcgtttgcatatgcatgggtcttggatgaaactggcgaagaaagggaaaggggagtaaccatggatgttggtatgacaaagtttgaaaccacaaccaaagttattacattaatggatgctccaggccataaggacttcattccaaatatgattacaggagcagcccaggcggatgtagctgttttagttgtagatgccagcaggggagagtttgaagctggatttgagactggaggacaaacacgagagcatggactcttggtccgttctctgggagtgacgcagcttgcagttgcagttaataaaatggatcaggttaattggcaacaagaaaggtttcaagagattactggaaaacttgggcactttcttaagcaagcaggttttaaggagagtgatgtaggttttattcctacaagtggtctcagtggtgaaaatctaatcacaagatctcagtcaagtgaactcacaaaatggtataaaggactatgtttattagaacaaattgattcctttaagcctccccagcgatctattgacaaaccttttagattatgtgtgtccgatgttttcaaagatcaaggatctggattttgcataactggtaaaatagaagctggttatatccaaactggtgaccgactactggcaatgcctcctaatgaaacttgtaccgtgaaaggaatcactctgcatgatgaacctgtcgactgggcggcagcaggcgatcatgttagtcttactttggttgggatggatatcatcaaaatcaatgttggctgcatattttgtggccccaaagtacccattaaagcttgcactcgtttcagagcccgaatcctcatctttaatattgaaattcctatcactaaaggatttcctgtgctgttacactaccaaactgtcagtgaacccgccgttattaaacgattgattagtgtcttaaacaaaagcacgggtgaagtcacaaagaaaaagcctaagtttttgactaaaggccagaatgcattggtagagctacagacacaaagaccaatagctcttgagctatataaagactttaaagagctggggaggttcatgctacgttacggtggttctacaatagctgctggtgttgtcactgagataaaagaatgatgggtcagaatttctaccacgtttctggatacagtgaaatagctaacctctgtttcaagaatgcagttattaagtcaaaggaacaatgtgcaattgatatgtttttagatgagagagaaaaattaaagctaaaattagctgcaaagaagtattaataatcacctctgcaaaaattctaagttgccaactggcaaagaaagtctaatgttaaaaacaactttgcctttgaaacgttaataaatggatttactttgctaagatttatggcaagtgtcaaaaatagtatctgaagatactgaatcatcatgaaatgaactctacttctggccaaagcacaatgtatttgcagttttctcttttgattcaattatactgcacatgttttaaggaaaagtaacttaattgggtttttcaggcagttgatatttgacctaagctttttttttttttttttttccagttaatgctaagaaaagatttggggaaggttataataaaagtattttgtggtgaccataagaatgtccctccccaaacaagtaaacttgtgaaagtttaatttggaattagtggaagctgttcctttgaaagccaagatattatttaagttgtaaagccagctaataaaatgccttagtttgagcataaaaaaaaaaaaaaaaaaaaaaaaaaaaactcgag

SEQ ID NO: 1278 - DNA, 847 bp, Homo sapiens
cgctgggccggtgggcgggggccggcaggtgctccgcagccgtctgtgccacccagagccggcgggccgctaggtccccggagaccctgctatggtgcgtgcgggcgccgtgggggctcatctccccgcgtccggcttggatatcttcggggacctgaagaagatgaacaagcgccagctctattaccaggttttaaacttcgccatgatcgtgtcttctgcactcatgatatggaaaggcttgatcgtgctcacaggcagtgagagccccatcgtggtggtgctgagtggcagtatggagccggcctttcacagaggagacctcctgttcctcacaaatttccgggaagacccaatcagagctggtgaaatagttgtttttaaagttgaaggacgagacattccaatagttcacagagtaatcaaagttcatgaaaaagataatggagacatcaaatttctgactaaaggagataataatgaagttgatgatagaggcttgtacaaagaaggccagaactggctggaaaagaaggacgtggtgggaagagcaagagggtttttaccatatgttggtatggtcaccataataatgaatgactatccaaaattcaagtatgctcttttggctgtaatgggtgcatatgtgttactaaaacgtgaatcctaaaatgagaagcagttcctgggaccagattgaaatgaattctgttgaaaaagagaaaaactaatatatttgagatgttccattttctgtataaaagggaacagtgtggagatgtttttgtcttgtccaaataaaagattcaccagtaaaaaaaaaaaaaaaaaaaaaaaaaaaaaaaaa

SEQ ID NO: 1279 - DNA, 2246 bp, Homo sapiens
gcggccgcagctccttcaccagcttggtggtgggcgtgttcgtggtctacgtggtgcacacctgctgggtcatgtacggcatcgtctacacccgcccgtgctccggcgacgccaactgcatccagccctacctggcgcggcggcccaagctgcagctgagcgtgtacaccacgacgaggtcccacctgggtgctgagaacaacatcgacctggtcttgaatgtggaagactttgatgtggagtccaaatttgaaaggacagttaatgtttctgtaccaaagaaaacgagaaacaatgggacgctgtatgcctacatcttcctccatcacgctggggtcctgccgtggcacgacgggaagcaggtgcacctggtcagtcctctgaccacctacatggtccccaagccagaagaaatcaacctgctcaccggggagtctgatacacagcagatcgaggcggagaagaagccgacgagtgccctggatgagccagtgtcccactggcgaccgcggctggcgctgaacgtgatggcggacaactttgtctttgacgggtcctccctgcctgccgatgtgcatcggtacatgaagatgatccagctggggaaaaccgtgcattacctgcccatcctgttcatcgaccagctcagcaaccgcgtgaaggacctgatggtcataaaccgctccaccaccgagctgcccctcaccgtgtcctacgacaaggtctcactggggcggctgcgcttctggatccacatgcaggacgccgtgtactccctgcagcagttcgggttttcagagaaagatgctgatgaggtgaaaggaatttttgtagataccaacttatacttcctggcgctgaccttctttgtcgcagcgttccatcttctctttgatttcctggcctttaaaaatgacatcagtttctggaagaagaagaagagcatgatcggcatgtccaccaaggcagtgctctggcgctgcttcagcaccgtggtcatctttctgttcctgctggacgagcagacgagcctgctggtgctggtcccggcgggtgttggagccgccattgagctgtggaaagtgaagaaggcattgaagatgactattttttggagaggcctgatgcccgaatttcagtttggcacttacagcgaatctgagaggaaaaccgaggagtacgatactcaggccatgaagtacttgtcatacctgctgtaccctctctgtgtcgggggtgctgtctattcactcctgaatatcaaatataagagctggtactcctggttaatcaacagcttcgtcaacggggtctatgcctttggtttcctcttcatgctgccccagctctttgtgaactacaaggtaagwcrgtgtgtgctgcccgcggccggcccccgtctcctgtgctgcccacagctgacctgggcctgtctctcctgtttcagttgaagtcagtggcacatctgccctggaaggccttcacctacaaggctttcaacaccttcattgatgacgtctttgccttcatcatcaccatgcccacgtctcaccggctggcctgcttccgggacgacgtggtgtttctggtctacctgtaccagcggtggctttatcctgtggataaacgcagagtgaacgagtttggggagtcctacgaggagaaggccacgcgggcgccccacacggactgaaggccgcccgggctgccgccagccaagtgcaacttgaattgtcaatgagtatttttggaagcatttggaggaattcctagacattgcgttttctgtgttgccaaaatcccttcggacatttctcagacatctcccaagttcccatcacgtcagatttggagctggtagcgcttacgatgcccccacgtgtgaacatctgtcttggtcacagagctgggtgctgccggtcaccttgagctgtggtggctcccggcacacgagtgtccggggttcggccatgtcctcacgcgggcaggggtgggagccctcacaggcaagggggctgttggatttccatttcaggtggttttctaagtgctccttatgtgaatttcaaacacgtatggaattcattccgcatggactctgggatcaaaggctctttcctcttttgtttgagagttggttgttttaaagcttaatgtatgtttctattttaaaataaatttttctggctgtggcaaaaaaaaaaaaaaaaaaaaaaaaaaaaaaaaaaaaaaaaaaaaaaaaaaaa

SEQ ID NO: 1280 - DNA, 947 bp, Homo sapiens
ctcgagtttttttttttttattkttcaagcagaaaacaagctgcttttattacagtatgatgtcatgactcatttgtaacagatccagcctcagggacagccctgtaaggcagcaagtggggctggctccaaatgggtatgagtctcagaatctttggtaaggcagaactgaactgggctgagaggtggtcttaaggcctgggcaggctctattctctctggactggctgcagcctgcagtctaggagaggcccagtacagcctggagctcctgagccttgtcaacaggcagtgagcccagagctgcttgaaagctgtcggtgtgctgtttggccaggaacgtcaggagcagcaacagtgcggccttggtgtctggtgggatcttgttgtcagccagaatgaggctgcagatacgcagaagctcgggagccacatctataacctggtcagggctgctctggtacaggaagctgaagaggcgcccaatggtgacccactcctccaagtcctccttcagtggcagggcatgcagtagggcagccagcacctggggctctggtttcctggtgggactggccatcaacaggcgggcaagtgccccacagatgttgtcacggacacgatcatgtcgctcccgcgccaggaggggaaaaaggagccccagcagcttggggaagtgttcctgggcagggtggcccccatgctctgccagcacgcccatcccgaagatggcattgcttcgcacctcggggtctgcctcttgggcggtgctcaacagcacagggagcagccgagacacaaactgggctgaggcagcacccaggccctgaatagtctctgccagaatgaggctgcagatacgcagaagctcgggagccacatctataacctggtcagggctgctctggtacaggaagcttgaagagcgccctcgtgccgaattctgc

SEQ ID NO: 1281 - DNA, 1171 bp, Homo sapiens
  misc_feature (1086)..(1086): n equals a,t,g, or c
  misc_feature (1095)..(1095): n equals a,t,g, or c
  misc_feature (1103)..(1103): n equals a,t,g, or c
  misc_feature (1114)..(1114): n equals a,t,g, or c
  misc_feature (1157)..(1157): n equals a,t,g, or c
gccagggctcttcattgcctgcctcttcagcggctctctcagcactatatcctctgcttttaattcattggcaactgttacgatggaagacctgattcgaccttggttccctgagttctctgaagcccgggccatcatgctttccagaggccttgcctttggctatgggctgctttgtctaggaatggcctatatttcctcccagatgggacctgtgctgcaggcagcaatcagcatctttggcatggttgggggaccgctgctgggactcttctgccttggaatgttctttccatgtgctaaccctcctggtgctgttgtgggcctgttggctgggctcgtcatggccttctggattggcatcgggagcatcgtgaccagcatgggctycagcatgccaccctctccctctaatgggtccagcttctccctgcccaccaatctaaccgttgccactgtgaccacactgatgcccttgactaccttctccaagcccacagggctgcagcggttctattccttgtcttacttatggtacagtgctcacaactccaccacagtgattgtggtgggcctgattgtcagtctactcactgggagaatgcgaggccggtccctgaaccctgcaaccatttacccagtgttgccaaagctcctgtccctccttccgttgtcctgtcagaagcggctccactgcaggagctacggccaggaccacctcgacactggcctgtttcctgagaagccgaggaatggtgtgctgggggacagcagagacaaggaggccatggccctggatggcacagcctatcaggggagcagctccacctgcatcctccaggagacctccctgtgatgttgactcaggaccccgcctctgtcctcactgtgccaggccatagccagaggccaccctgtagtacagggatgagtcttggtgtgttctgcagggacaggcctggatgatctagctcataccaaaggaccttgttctgagaggttcttgcctgcaggagaarctgtcacatctcaagcatgtgaggaccgkttttctcgtgcttgscaatctgktttttaaaggatcangctcgtaanggaagcangatcatgccanaaatagggatggaaatgcattcttttgggaaaaaagattaatngctttctgattcac

SEQ ID NO: 1282 - DNA, 1307 bp, Homo sapiens
  misc_feature (1293)..(1293): n equals a,t,g, or c
  misc_feature (1297)..(1297): n equals a,t,g, or c
aacttccggtgcctgcagagctcggagcggcggaggcagagaccgaggctgcaccggcagaggctgcggggcggacgcgcgggccggcgcagccatggtgaagattagcttccagcccgccgtggctggcatcaagggcgacaaggctgacaaggcgtcggcgtcggcccctgcgccggcctcggccaccgagatcctgctgacgccggctagggaggagcagcccccacaacatcgatccaagagggggrgctcagtgggcggcgtgtgctacctgtcgatgggcatggtcgtgctgctcatgggcctcgtgttcgcctctgtctacatctacagatacttcttccttgcgcagctggcccgagataacttcttccgctgtggtgtgctgtatgaggactccctgtcctcccaggtccggactcagatggagctggaagaggatgtgaaaatctacctcgacgagaactacgagcgcatcaacgtgcctgtgccccagtttggcggcggtgaccctgcagacatcatccatgacttccagcggggtctgactgcgtaccatgatatctccctggacaagtgctatgtcatcgaactcaacaccaccattgtgctgccccctcgcaacttctgggagctcctcatgaacgtgaagagggggacctacctgccgcagacgtacatcatccaggaggagatggtggtcacggagcatgtcagtgacaaggaggccctggggtccttcatctaccacctgtgcaacgggaaagacacctaccggctccggcgccgggcaacgcggaggcggatcaacaagcgtggggccaagaactgcaatgccatccgccacttcgagaacaccttcgtggtggagacgctcatctgcggggtggtgtgaggccctcctcccccagaaccccctgccgtgttcctcttttcttctttccggctgctctctggccctcctccttccccctgcttagcttgtactttggacgcgtttctatagaggtgacatgtctctccattcctctccaaccctgcccacctccctgtaccagagctgtgatctctcggtggggggcccatctctgctgacctgggtgtggcggagggagaggcgatgctgcaaagtgttttctgtgtcccactgtcttgaagctgggcctgccaaagcctgggcccacagctgcaccggcagcccaaggggaaggaccggttgggggaaccgggcatgttgaggccctgggcaaggggatkgggctktgggggcgggscggcatggkctttaanaatnttctgcacca

SEQ ID NO: 1283 - DNA, 1247 bp, Homo sapiens
  misc_feature (3)..(3): n equals a,t,g, or c
  misc_feature (27)..(27): n equals a,t,g, or c
  misc_feature (31)..(31): n equals a,t,g, or c
  misc_feature (1215)..(1215): n equals a,t,g, or c
  misc_feature (1230)..(1230): n equals a,t,g, or c
  misc_feature (1232)..(1232): n equals a,t,g, or c
tanttgccgccggtggttctgggtccncttnggccagttttcgcggaatcaaatggctttgcctttatggatcaccgcgccggttggtaatgccagatgtcatcacgggcttggtcctggtggtaataattcgtcgcgcttgctcatgccattggctggcctgcggaccgcggtatgctcaccatctggctggcgcatgtcactttttgtacggcttatgtggcggtcgttatttcttcaagattgcgggaactggatcgctcgatagaagaagcagcgatggatctcggtgcgacgccgctgaaagtgtttttcgtcattacgctaccgatgatcatgcccgcgatcatttctggctggttactggcttttactttgtcgcttgatgatctggtgatcgccagctttgtttccgggccgggagccaccacgttaccgatgctggtcttttccagcgtgcggatgggggtgaatccggaaatcaacgccctggcaatccgctggcctgcgcggcagcaaacgccagcctggcgattctcgaatctggcgactggcagcaacaggtggcggatattgaagtacagctgcgcgagcaacttgcccccgcccgtgaatgccgaaatggttgccgatgtgcgcgtactgggggccattggcgtggtcgaaaccactcatccggtgaatatggcggcgctgcaaaaattctttgtcgaacagggtgtctggatccggccttttggcaaactgatttacctgatgccgccctatattattctcccgcaacagttgcagcgtctgaccgcagcggttaaccgcgcgktacaggatgaaacatttttttgccaataacgagaagtccgcgtgagggtttctggctacactttctgcaaacaagaaaggagggttcatgaaactcatcagtaacgatctgcscgatggcgataaattgccgcatcgtcatgtctttaacggcatgggttacgatggcgataatatttcaccgcatctggcgtgggatgatgttcctgcgggaacgaaaagttttgttgtcacctgctacgacccggatgcgccaaccggctccggctggtggcactgggtagttgttaacttacccgctgatacccgcgtattaccgcaagggtttggctctggtctggtagcaatgccagacggcgttttgcagacgcgtaccgactttggtaaaaccgggtncccaattcgtccctnanagtgtagtggtatta

SEQ ID NO: 1284 - DNA, 1484 bp, Homo sapiens
  misc_feature (20)..(20): n equals a,t,g, or c
  misc_feature (1079)..(1079): n equals a,t,g, or c
  misc_feature (1225)..(1225): n equals a,t,g, or c
  misc_feature (1424)..(1424): n equals a,t,g, or c
  misc_feature (1470)..(1470): n equals a,t,g, or c
  misc_feature (1478)..(1478): n equals a,t,g, or c
  misc_feature (1482)..(1482): n equals a,t,g, or c
tccgctttgggttttagaanccaaccctctaggcttatcttgttttgcagttttcatgttttgacaattgcccaccatttacaatactcaatttttgattatgaaatgaatagtaaaattcaaacatatctaataataatttgccttagtttgattaataaattatatcaaaaaacttggggatagaaagaggcttttttttccccctgtagtatttttaaaactttttagatgagctggatgaaaccttagtacattggagctggagttgtattgagtacagccccaactctgaagccttatattcatgtcttaagtaccattgattgttctgtgaattgttgttagtttcatatttgacattgtagtaatccaccttgcattttagtctttgcaaaaaggatattgctaggtatattcttatttctgattgagtattgaatttacatttttcagaatttcattctttgtcattataatccaaaaacaatgtccacatcagacttggaacttctcacttcaaaaatgaaatacagatttagcagtgttgtacataatgatgtccaagcatttttccacctgtttactgagttttccaaccatttactatgtgttgagattggtgggttttctggctgtttttctgaggtgaatgacttgttacagagcctcagtaagaaatttcaactaaaatcacaaaaacataaagtccaggaaaccaccagaagatggatttttagtgtttttgaaatcttgtatttccttttgatatcatttactcattttaattttacgactgccaacttgttacggtattaattatatgtatgtgtttatatgtatgcatataatatatgtatatgtatatgaagaataaagttaagatttggtcaaactatattttcccattcaagtacaaaaatgttttcaaggctgcaaaaagtgtacagttgttaaacaagttgtaaataaagacttgtataaaaaaaaaaaaaaaaaactcgagggggggcccggtacccaattcgccctatagtgagtcgtattacaattcactggccgtcgttttacaacgtcgngactgggaaaaccctggcgttacccaacttaatcgccttgcagcacatccccctttcgccagctggcgtaatagcgaagaggcccgcaccgatcgcccttcccaacagttgcgcagcctgaatggcgaatggcaaattgtaagcgntaatattttgttaaaattcgcgttaaatttttgttaaatcagctcattttttaaccaataggccgaaatcggcaaaatcccttataaatcaaaagaatagaccgagatagggttgagtgttgttccagtttggaacaagagtccactattaaagaaccgtggactccaacgtcaaagggcgaaaaaccgtctatcaggnccgatggcccactacgtgaaccatcaccctaatcaagttttttggngtcgaggngccnta

SEQ ID NO: 1285 - DNA, 2928 bp, Homo sapiens
gtccggacgtaatcgtggtttttgttctgcaataggcggcttagagggaggggctttttcgcctatacctactgtagcttctccacgtatggaccctaaaggctactgctgctactacggggctagacagttactgtctcagctctaggatgtgcgttcttccactagaagctcttctgagggaggtaattaaaaaacagtggaatggaaaaacagtgctgtagtcatcctgtaatatgctccttgtcaacaatgtatacattcctgctaggtgccatattcattgctttaagctcaagtcgcatcttactagtgaagtattctgccaatgaagaaaacaagtatgattatcttccaactactgtgaatgtgtgctcagaactggtgaagctagttttctgtgtgcttgtgtcattctgtgttataaagaaagatcatcaaagtagaaatttgaaatatgcttcctggaaggaattctctgatttcatgaagtggtccattcctgcctttctttatttcctggataacttgattgtcttctatgtcctgtcctatcttcaaccagccatggctgttatcttctcaaattttagcattataacaacagctcttctattcaggatagtgctgaagaggcgtctaaactggatccagtgggcttccctcctgactttatttttgtctattgtggccttgactgccgggactaaaactttacagcacaacttggcaggacgtggatttcatcacgatgcctttttcagcccttccaattcctgccttcttttcagaagtgagtgtcccagaaaagacaattgtacagcaaaggaatggacttttcctgaagctaaatggaacaccacagccagagttttcagtcacatccgtcttggcatgggccatgttcttattatagtccagtgttttatttcttcaatggctaatatctataatgaaaagatactgaaggaagggaaccagctcactgaaagcatcttcatacagaacagcaaactctatttctttggcattctgtttaatgggctgactctgggccttcagaggagtaaccgtgatcagattaagaactgtggatttttttatggccacagtgcattttcagtagcccttatttttgtaactgcattccagggcctttcagtggctttcattctgaagttcctggataacatgttccatgtcttgatggcccaggttaccactgtcattatcacaacagtgtctgtcctggtctttgacttcaggccctccctggaatttttcttggaagccccatcagtccttctctctatatttatttataatgccagcaagcctcaagttccggaatacgcacctaggcaagaaaggatccgagatctaagtggcaatctttgggagcgttccagtggggatggagaagaactagaaagacttaccaaacccaagagtgatgagtcagatgaagatactttctaactggtacccacatagtttgcagctctcttgaaccttattttcacattttcagtgtttgtaatatttatcttttcactttgataaaccagaaatgtttctaaatcctaatattctttgcatatatctagctactccctaaatggttccatccaaggcttagagtacccaaaggctaagaaattctaaagaactgatacaggagtaacaatatgaagaattcattaatatctcagtacttgataaatcagaaagttatatgtgcagattattttccttggccttcaagcttccaaaaaacttgtaataatcatgttagctatagcttgtatatacacatagagatcaatttgccaaatattcacaatcatgtagttctagtttacatgccaaagtcttccctttttaacattataaaagctaggttgtctcttgaattttgaggccctagagatagtcattttgcaagtaaagagcaacgggaccctttctaaaaacgttggttgaaggacctaaatacctggccataccatagatttgggatgatgtagtctgtgctaaatattttgctgaagaagcagtttctcagacacaacatctcagaattttaatttttagaaattcatgggaaattggatttttgtaataatcttttgatgttttaaacattggttccctagtcaccatagttaccacttgtattttaagtcatttaaacaagccacggtggggcttttttctcctcagtttgaggagaaaaatcttgatgtcattactcctgaattattacattttggagaataagagggcattttattttattagttactaattcaagctgtgactattgtatatctttccaagagttgaaatgctggcttcagaatcataccagattgtcagtgaagctgatgcctaggaacttttaaagggatcctttcaaaaggatcacttagcaaacacatgttgacttttaactgatgtatgaatattaatactctaaaaatagaaagaccagtaatatataagtcactttacagtgctacttcacacttaaaagtgcatggtatttttcatggtattttgcatgcagccagttaactctcgtagatagagaagtcaggtgatagatgatattaaaaattagcaaacaaaagtgacttgctcagggtcatgcagctgggtgatgatagaagagtgggctttaactggcaggcctgtatgtttacagactaccatactgtaaatatgagctttatggtgtcattctcagaaacttatacatttctgctctcctttctcctaagtttcatgcagatgaatataaggtaatatactattatataattcatttgtgatatccacaataatatgactggcaagaattggtggaaatttgtaattaaaataattattaaacctaaaaaaaaaaaaaaaaaaaaaaaaaaaaaa

SEQ ID NO: 1286 - DNA, 1424 bp, Homo sapiens
  misc_feature (11)..(11): n equals a,t,g, or c
  misc_feature (16)..(16): n equals a,t,g, or c
cggggggattncgggngcgatacttcgtgacactatagaaggtacgcctgcaggtaccggtccggaattcccgggtcgacccacgcgtccggcgtgcgagagatcctgtccgactgcgccctgcccatcgcggtgctcgccttctccctcatcagctcccatggcttccgggaaatcgagatgagcaagttccgctacaaccccagcgagagcccctttgcgatggcgcagatccagtcgctgtccctgagggccgtcagcggtgccatgggcctcggcttcctgctgtccatgctcttcttcatcgagcagaacttggtggccgccttggtgaatgcaccggagaacaggctggtgaagggcactgcctaccactgggacctcctgctcctcgccatcatcaacacagggctgtctctgtttgggctgccttggatccatgccgcctacccccactccccgctgcacgtgcgagccctggccttagtggaggagcgtgtggagaacggacacatctatgacacgattgtgaacgtgaaggagacgcggctgacctcgctgggcgccagcgtcctggtgggcctgtccctgttgctgctgccggtcccgcttcagtggatccccaagcccgtgctctatggcctcttcctctacatcgcgctcacctccctcgatggcaaccagctcgtccagcgcgtggccctgctgctcaaggagcagactgcgtaccccccgacacactacatccggagggtgccccagaggaagatccactacttcacgggcctgcaggtgcttcagctgctgctgctgtgtgccttcggcatgagctccctgccctacatgaagatgatctttcccctcatcatgatcgccatgatccccatccgctatatcctgctgccccgaatcattgaagccaagtacttggatgtcatggacgctgagcacaggccttgactggcagaccctgcccacgccccattcgccagccctccacgtcctcccaggctggctctggagctgtgaggggaggtgtaggtgtgtgggtgactgctctgtgctgcgccttctcatggctgactcaggcctggggcatctgggcattgtaggggtgcagtggtatgtgcccacccctctcccattatcctttagctttaggccaagagcgttgctcagggcagcttctgcccagggtgggtgggactgagcaggatggattttcttttgataaaagagtcgatgcctgaaagagaaaccatttccttgattgtgtaaggaacttgctggacgcacattagagaataaagctcctgtttctaggcaaaaaaaaaaaaaaaaaaaaaaaaaaaaaaaaaaaaaaaaaaaaaaaaaaaaaaaaaaaaaaaaaaaaaaaaaaaaaaaaaaaaaaaaaaaaaaagggg

SEQ ID NO: 1287 - DNA, 1545 bp, Homo sapiens
  misc_feature (4)..(4): n equals a,t,g, or c
  misc_feature (22)..(22): n equals a,t,g, or c
  misc_feature (60)..(60): n equals a,t,g, or c
  misc_feature (227)..(227): n equals a,t,g, or c
  misc_feature (1332)..(1332): n equals a,t,g, or c
  misc_feature (1541)..(1541): n equals a,t,g, or c
  misc_feature (1544)..(1544): n equals a,t,g, or c
tcantgggttaaaaaagaaaanccccccctggggcccaattacgcaaaaccggcttttcnccggcgcgttggccgattcattaatcargttgcacgacaggtttcccgactgraaagcggcagtgagcgcaacgcaattaatgtgagttagcttcactcattaggcaccccaggctttacactttatgcttccggctcgtatgttgtgtgraattgtgagcggatancaatttcacacaggaaacagctatgaccatgattacgccaagctctaatacgactcactatagggaaagctggtacgcctgcaggtaccggtccggaattcccgggtcgacccacgcgtccgcatggctgaagcgctgccgctgccgctactgccgctgcagggaaaatgctgagccctcccgggccgggtgggcggcggcggcgagggcggcgacggggacccgcttcccgagcgcggcggcggcggccatggcccggctggctgactacttcatcgtggtaggctatgaccacgagaagccaggatcaggagaaggtctggggaaaataatccagagatttccacagaaggactgggatgatacaccttttccacagggaattgagttgttttgtcagcctggcgggtggcagctgtccagagagaggaagcagccaacgttctttgtggttgtcctgacagacattgactcagatcgacattactgctcatgcctaaccttctatgaggcagagatcaatcttcagggaacaaagaaggaagagattgaaggtgaagcaaaagtgtctggtttaattcagcctgcagaagtgtttgctcccaaaagcctggtgttggtatccagattatattatccagaaatttttagggcttgcctgggtttgatctataccgtgtatgtggacagcctgaatgtctccttggaaagtctaattgcaaacctttgtgcctgccttgtcccagcggctggagggtctcagaagctgttttctttgggtgcaggagatagacagttgatccagactcctttacatgatagtcttcctatcacgggcactagtgtggctctcctgttccagcaattgggcacggtggctcacgcctgtaatctcagcactttgggaggccgaggcggscagctcacgaggtcaggagatcgagaccatcctggctaacacggtgaaatcccatctctactaaaaatacaaaaaattagccgggcatggtggcccgtgtctgcagtcccagctactcgggaggctgaggcaggagaatggcgtgaacccaagaggcggagcttgcagtgagctgagatcgcaccnctacactccagactgggcgacagagcgagactccatctcaaaaacaataataataataataataatgtaaaacttaagaaagcatgtgacatttaagaataaagaatttaagtagtatttcaaaaaaaaaaaaaaagggcggccgctctagaggatccaagcttacgtacgcgtgcatgcgacgtcatagctcttctatagtgtcaccnaant

SEQ ID NO: 1288 - DNA, 1769 bp, Homo sapiens
  misc_feature (6)..(7): n equals a,t,g, or c
  misc_feature (12)..(12): n equals a,t,g, or c
  misc_feature (19)..(19): n equals a,t,g, or c
  misc_feature (31)..(31): n equals a,t,g, or c
aagggnnaactntctaacnggtaattactcngacactatagttaggtacgcctgcaggtaccggtccggaattcccgggtcgacccacgcgtccgatcagacctacagcagacattgcaggcctgaagaaaggtggtcacaagaggggtggaacattcctgcaaatggtttcaatatatgcagatgtctcgatataggaatgaaattacgtctttggaacaacttaaataagtcaaatatacttggagctttaaaaattaaaaggagagagattcgagcaccttttctgctgccatgacaaccatgcaaggaatggaacaggccatgccaggggctggccctggtgtgccccagctgggaaacatggctgtcatacattcacatctgtggaaaggattgcaagagaagttcttgaagggagaacccaaagtccttggggttgtgcagattctgactgccctgatgagccttagcatgggaataacaatgatgtgtatggcatctaatacttatggaagtaaccctatttccgtgtatatcgggtacacaatttgggggtcagtaatgtttattatttcaggatccttgtcaattgcagcaggaattagaactacaaaaggcctggtccgaggtagtctaggaatgaatatcaccagctctgtactggctgcatcagggatcttaatcaacacatttagcttggcgttttattcattccatcacccttactgtaactactatggcaactcaaataattgtcatgggactatgtccatcttaatgggtctggatggcatggtgctcctcttaagtgtgctggaattctgcattgctgtgtccctctctgcctttggatgtaaagtgctctgttgtacccctggtggggttgtgttaattctgccatcacattctcacatggcagaaacagcatctcccacaccacttaatgaggtttgaggccaccaaaagatcaacagacaaatgctccagaaatctatgctgactgtgacacaagagcctcacatgagaaattaccagtatccaacttcgatactgatagacttgttgatattattattatatgtaatccaattatgaactgtgtgtgtatagagagataataaattcaaaattatgttctcatttttttccctggaactcaataactcatttcactggctctttatcgagagtactagaagttaaattaataaataatgcatttaatgaggcaacagcacttgaaagtttttcattcatcataagaactttatataaaggcattacattggcaaataaggtttggaagcagaagagcaaaaaaaagatattgttaaaatgaggcctccatgcaaaacacatacttccctcccatttatttaactttttttttctcctacctatggggaccaaagtgctttttccttcaggaagtggagatgcatggccatctccccctccctttttccttctcctgcttttctttccccatagaaagtaccttgaagtagcacagtccgtccttgcatgtgcacgagctatcatttgagtaaaagtatacatggagtaaaaatcatattaagcatcagattcaacttatattttctatttcatcttcttcctttcccttctcccaccttctactgggcataattatatcttaatcatatatggaaatgtgcaacatatggtatttgttaaatacgtttgtttttattgcagagcaaaaataaatcaaattagaagcaataaaaaaaaaaaaaaaaaaa

SEQ ID NO: 1289 - DNA, 1649 bp, Homo sapiens
gaagttctcttcacggagccgcgcggctgcgggggcgcaaatagggtcagtgggccgcttggcggtgtcgttgcggtaccaggtccgcgtgaggggttcgggggttctgggcaggcacaatggcgtctcgagcaggcccgcgagcggccggcaccgacggcagcgactttcagcaccgggagcgcgtcgccatgcactaccagatgagtgtgaccctcaagtatgaaatcaagaagctgatctacgtacatctggtcatatggctgctgctggttgctaagatgagcgtgggacacctgaggctcttgtcacatgatcaggtggccatgccctatcagtgggaatacccgtatttgctgagcattttgccctctctcttgggccttctctcctttccccgcaacaacattagctacctggtgctctccatgatcagcatgggactcttttccatcgctccactcatttatggcagcatggagatgttccctgctgcacagcagctctaccgccatggcaaggcctaccgtttcctctttggtttttctgccgtttccatcatgtacctggtgttggtgttggcagtgcaagtgcatgcctggcagttgtactacagcaagaagctcctagactcttggttcaccagcacacaggagaagaagcataaatgaagcctctttggggtgaagcctggacatcccatcgaatgaaaggacactagtacagcggttccaaaatcccttctggtgattttagcagctgtgatgttggtacctggtgcagaccaggccaaagttctggaaagctccttttgccatctgctgaggtggcaaaactataatttattcctggttggctagaactgggtgaccracagctatgaaacaaatttcagctgtttgaagttgaactttgaggtttttctttaagaatgagcttcgtccttgcctctactcggtcattctccccatttccatccattaccccttagccattgagactaaaggaaatagggaataaatcaaattacttcatctctaggtcacgggtcaggaaacatttgggcagctgctcccttggcaggctgtggtctcctctgcaaagcattttaattaaaaacctcaataaagatggccctgcccacactgtgccttgtgtttggggcttgatagagtgtgaaaggtgtgttgcttgaaaggtgtggccttagacactaggagatgatgggtagaagctccttgagaaacctagcagtggccatagagaagtagactgggtatggggaacctaagtcatagttgtaacctacagctgattggtaagaactatgggccagacatttaatctctccatctatgaaatagtccattctcatttatctaccttaggttatgggctcttcttttagttggatattcacatttatctttcagtgttaactgggtatcagttatgagtctactactgtataatggcatccaaaagaattttaaagtacctcggtttatagggatttacaattcagtagaaacttgttattcatgtgaaacagtgaacataatatctaatgatgtggagcaagtacattaaaaacaggaaggaagagatctgtgattaaactaaaggccctttcacacctaaaaaaaaaa

SEQ ID NO: 1290 - DNA, 906 bp, Homo sapiens
  misc_feature (826)..(826): n equals a,t,g, or c
  misc_feature (885)..(885): n equals a,t,g, or c
gctcgctcttccaatactcacgccctagctacagaggtcaaggaaggtttccccaggagcagttttggtttcagacggcgccgtctcccgcgaaagtcctgagaggagcccagccttttccgcctgccgcccccggatgggatggttgaggccggggccacgccccctctgcccccctgcgagggcatcctgggctttctcccaccgctttccgagcccgcttgcacctcggcgatccccgactcccttctttatggcgtcgctcctgtgctgtgggccgaagctggccgcctgcggcatcgtcctcagcgcctggggagtgatcatgttgataatgctcggaatatttttcaatgtccattccgctgtgttgattgaggacgttcccttcacggagaaagattttgagaatggcccccagaacatatacaacctttacgagcaagtcagctacaactgtttcatcgctgcaggcctttacctcctcctcggaggcttctctttctgccaagttcggctcaataagcgcaaggaatacatggtgcgctagggccccggcgcgtttccccgctccagcccctcctctatttaaagactccctgcaccgtgtcacccaggtcgcgtcccacccttgccggcgccctctgtgggactgggtttcccgggcgagagactgaatcccttctcccatctctggcatccggcccccgtggagagggctgaggctggggggctgttccgtctctccacccttcgctgtgtcccgtatctcaataaagagaatctgctctcttcaaaaaaaaaaaaaaaaaaaattggggggaanttttaggggggccggggcccatggtttttccacccggggggggtaacccgtaaagtttncccatttggcccttaaggggg

SEQ ID NO: 1291 - DNA, 766 bp, Homo sapiens
  misc_feature (690)..(690): n equals a,t,g, or c
  misc_feature (698)..(698): n equals a,t,g, or c
  misc_feature (703)..(703): n equals a,t,g, or c
  misc_feature (706)..(706): n equals a,t,g, or c
  misc_feature (733)..(733): n equals a,t,g, or c
  misc_feature (735)..(735): n equals a,t,g, or c
  misc_feature (739)..(739): n equals a,t,g, or c
tttcgaaattaaccctcactaaagggaacaaaagctggagctccaccgcggtggcggccgctctagaactagtggatcccccgggctkyaggaattcggcacgagggtaactgggggtgttatactgagcagcagcgttgtgatgggtattggcattgcccaaatggaagggatgaaaccaattgtaccatgtgccagaaggaagaatttccatgttcccgaaatggtgtctgttatcctcgttctgatcgctgcaactaccagaatcattgcccaaatggctcagatgaaaaaaactgctttttttgccaaccaggaaatttccattgtaaaaacaatcgttgtgtgtttgaaagttgggtgtgtgattctcaagatgactgtggtgatggcagcgatgaagaaaattgcccagtaatcgtgcctacaagagtcatcactgctgccgtcatagggagcctcatctgtggcctgttactcgtcatagcattgggatgtacttgtaagctttattctctgagaatgtttgaaagaagatcatttgaaacacagttgtcaagartggaagcagaattggtaagaagagaasttctycctygtatggmcaattgattgctcaaggkttaattcaccagttgaagaattttctggttggtcacctaatcaagcttctggtttggaaaatctgangctaccgnwccanctnaasttggaattactttatagctcttgnangcanacaagcacaatttggaaaccgattttt

SEQ ID NO: 1292 - DNA, 1627 bp, Homo sapiens
  misc_feature (22)..(22): n equals a,t,g, or c
cggagcggtttgtaatgtattnctggattttattttgctgtattagctcctcaagagttactgatctatgaaatggcagagaatggaaaaaattgtgaccagagacgtgtagcaatgaacaaggaacatcataatggaaatttcacagacccctcttcagtgaatgaaaagaagaggagggagcgggaagaaaggcagaatattgtcctgtggagacagccgctcattaccttgcagtatttttctctggaaatccttgtaatcttgaaggaatggacctcaaaattatggcatcgtcaaagcattgtggtgtcttttttactgctgcttgctgtgcttatagctacgtattatgttgaaggagtgcatcaacagtatgtgcaacgtatagagaaacagtttcttttgtatgcctactggataggcttaggaattttgtcttctgttgggcttggaacagggctgcacacctttctgctttatctgggtccacatatagcctcagttacattagctgcttatgaatgcaattcagttaattttcccgaaccaccctatcctgatcagattatttgtccagatgaagagggcactgaaggaaccatttctttgtggagtatcatctcaaaagttaggattgaagcctgcatgtggggtatcggtacagcaatcggagagctgcctccatatttcatggycagagcagctcgcctctcaggtgctgaaccagatgatgaagagtatcaggaatttgaagagatgctggaacatgcagagtctgcacaagactttgcctcccgggccaaactggcagttcaaaaactagtacagaaagttggattttttggaattttggcctgtgcttcaattccaaatcctttatttgatctggctggaataacgtgtggacactttctggtacctttttggaccttctttggtgcaaccctaattggaaaagcaataataaaaatgcatatccagaaaatttttgttataataacattcagcaagcacatagtggagcaaatggtggctttcattggtgctgtccccggcataggtccatctctgcagaagccatttcaggagtacctggaggctcaacggcagaagcttcaccacaaaagcgaaatgggcacaccacagggagaaaactggttgtcctggatgtttgaaaagttggtcgttgtcatggtgtgttacttcatcctatctatcattaactccatggcacaaagttatgccaaacgaatccagcagcggttgaactcagaggagaaaactaaataagtagagaaagttttaaactgcagaaattggagtggatgggttctgccttaaattgggaggactccaagccgggaaggaaaattcccttttccaacctgtatcaatttttacaacttttttcctgaaagcagtttwstccctgtggtgtgcccatttcgcttttgtggtgaagcttctgccgttgagcctccaggtactcctgaaatggcttctgcagagatggacctatgccggggacagcaccaatgaaagccaccatttgctccactatgtgcttgctgaatgttattataacaaaaattttctcggacgcgtgggcggacgcgtgggtcga

SEQ ID NO: 1293 - DNA, 1518 bp, Homo sapiens
  misc_feature (61)..(61): n equals a,t,g, or c
  misc_feature (1365)..(1365): n equals a,t,g, or c
  misc_feature (1450)..(1450): n equals a,t,g, or c
  misc_feature (1507)..(1507): n equals a,t,g, or c
  misc_feature (1515)..(1515): n equals a,t,g, or c
agtacgccataggcttccattgcgcaatggtgagtattccggtaacttgccatttgcagtncatcaagtgatcatatgccaagtacgccccctattgacgtcaatgcggtaaatggcccgcctggcattatgcccagtacatgccttatgggactttcctacttgccagtacatctacgtattagtcatcgctattaccatggtgatgcggttttgccagtacatcaatgggcgtggatagcggtttgactcacggggatttccaagtctccaccccattgacgtcaatgggagtttgttttggcaccaaaatcaacgggactttccaaaatgtcgtaacaactccgccccattgacgcaaatgggcggtaggcgtgtacggtgggaggtctatataagcagagctcgtttagtgaaccgtcagatcgcctggagacgccatccacgctgttttgacctccatagaagacaccgggaccgatccagcctccggactctagcctaggccgcgggacggataacaatttcacacaggaaacagctatgaccactaggcttttgcaaaaagctatttaggtgacactatagaaggtacgcctgcaggtaccggtccggaattcccgggtcgacccacgcgtccgcacacgccggaggagccgggtggtgcagagccggagccggagccggagccgcgccgcgccgcaccatggcgcccaccctggccactgcccatcggcgccgctggtggatggcctgcacggccgtgctggagaacctcctcttctcggcagtcctcctgggctggggctcgctgctcatcatgctcaagtcagagggcttttactcctacctgtgtaccgagccagagaatgtcaccaatggcacagtgggcggcacagcagagccggggcacgaggaggtgagctggatgaacggctggctcagctgccaggcccaggacgagatgctaaatttggccttcactgtgggctcctttctgctcagtgccatcaccctgcccctgggtatcgtcatggacaagtatggcccgaggaagctcaggctgctgggcagcgcctgcttcgcggtttcctgcttgctgattgcgtacggagcaagtaaaccaaacgctctctccgtgctcatcttcatcgccctggctctgaatggctttggtgggatgtgtatgaccttcacctcattaacactgcccaacatgttcggcgaccttcggtccacgtttattgcttgatgattgggtctacgcctyctcggcagtaactttycaggaatcaagctcatctatgatgctggtgtctccttcatcgtcgtcctcgtggtcttgggccggcttgctccgggctnggttttccttcaaytgctctttaattggscccttgaagccctttccgggggccggaagaacatkgaawtaayccggtgaaaatynaarttcaacttggcttgggcttttaaccaccaagattacaagggaaacaatttttanaaagcaangtg

SEQ ID NO: 1294 - DNA, 1605 bp, Homo sapiens
  misc_feature (806)..(806): n equals a,t,g, or c
  misc_feature (1502)..(1502): n equals a,t,g, or c
  misc_feature (1550)..(1550): n equals a,t,g, or c
  misc_feature (1560)..(1560): n equals a,t,g, or c
  misc_feature (1578)..(1578): n equals a,t,g, or c
  misc_feature (1596)..(1597): n equals a,t,g, or c
atagatatccagttcaccggaagtaatcgccccgcgcaccacaggagtcgttccgagttgcactttattcaccgtcggtacgccgtggctttccagcacctgcaaaatgatattgccgagtagcgcaccttcggtatcgatttttgaaccgactttaacgggggaagccgcctgtagcggcaggctcacggctgccaacataaccagtgaacctgcccagagctttaagagtggcatgatgctttcctcattcttttactgttgttttcagcgaattaagagaaaagcatagttgataatggcggggttagcttgagcggaaggattcagttgcagaatcagataaatacttaagaggcatattcggtccggcgtttcctgccggatgcggcgcgagcgccttatccggcctacaaarggcgcaaacgtcgcgcccttactaaagcattacagcaacttcaaactcgcctttcttaacgcgtgcggaatcagtgccgataaagacattgaacttgccaggctcggcgtcatatttcatctgttgattccagaacttcagcgcctcaatatcgatcgggaagctgacagtctgagtttcgcccggtttcagggtgattttctcaaagcctttcagctgtttcacagggcgactcatggaagccgtcacatcctgcaagtacatctgcactaccgtggcaccctcgcgcttaccggtgttcgtcacctgcacgctggcagtcactttgccgtcacgcttcatggtcggcgcagaaagtttcacatcagagacggtgaaagtggtgtanctcagcccatagccgaacggatacaacgccccgttagcttcatcaaaataacgcgaagtgtatttgttcggcttgtcggcattatacgggcgaccggtattcagatggctgtagtwyaccgggatctgcccgacagaacgcgggaaggacattggcagcttgccggacgggttgtaatcgccaaacaatacatcggcaattgcattaccgccttcagtccccgcaaaccaggtttccagaatcgcatcagcctgctgatcttctttcaccagcgccagcggacgcccgttcatcagcaccagcaccagcggtttaccggtggctttcagcgccgcaatcaagtcacgttggctttgcggaatagtgatatcggtccggctggaggcttcgtgcgccatcccctgtgcttcaccgactacagccaccaccacatcagattgtttcgccgtctgcaccgcttcatcaatcatctcttgcggcgaacgcggatcgactttgaccgcttcttcatactgattcaggaaatcgataatgcctttgtcactggtaacgttcgcccctttggcatacagcactttaccgttttcaccgacggcatttttaatcccggtcagtacggtcacggattgatcggcaacaccggctgcggaccagctgcccatcacgtcacgtttactgtccgccagtggccmaacnaccgcaatggtggccgattttttcagcggtaacgtttcgagacggggntcttaccccnagaagggattgaaatttncccatcccgtcccccccnngtcagacg

SEQ ID NO: 1295 - DNA, 1081 bp, Homo sapiens
  misc_feature (1076)..(1076): n equals a,t,g, or c
  misc_feature (1078)..(1078): n equals a,t,g, or c
gctgagcacgccctctgagccgctcggtggacaccaggcactctagtaggcctggcctacccagaaacagcaggagagagaagaaacaggccagctgtgagaagccaaggacaccgagtcagtcatggcacctaaggcggcaaagggggccaagccagagccagcaccagctccacctccacccggggccaaacccgaggaagacaagaaggacggtaaggagccatcggacaaacctcaaaaggcggtgcaggaccataaggagccatcggacaaacctcaaaaggcggtgcagcccaagcacgaagtgggcacgaggagggggtgtcgccgctaccggtgggaattaaaagacagcaataaagagttctggctcttggggcacgctgagatcaagattcggagtttgggctgcctaatagctgcaatgatactgttgtcctcactcaccgtgcaccccatcttgaggcttatcatcaccatggagatatccttcttcagcttcttcatcttactgtacagctttgccattcatagatacatacccttcatcctgtggcccatttctgacctcttcaacgacctgattgcttgtgcgttccttgtgggagccgtggtctttgctgtgagaagtcggcgatccatgaatctccactacttacttgctgtgatccttattggtgcggctggagtttttgcttttatcgatgtgtgtcttcaaagaaaccacttcagaggcaagaaggccaaaaagcatatgctggttcctcctccaggaaaggaaaaaggaccccagcagggcaagggaccagaacccgccaagccaccagaacctggcaagccaccagggccagcaaagggaaagaaatgacttggaggaggctcctggtgtctgaaacggcagtgtattttacagcaatatgtttccactctcttccttgtcttctttctggaatggttttcttttccattttcattaccacctttgcttggaaaagaatggattaatggattctaaaagcctaaaaaaaaaaaaaaaaaaaaaaaaaaaaaaaaaaaaaaaaaaaaaaaacagnanccc

SEQ ID NO: 1296 - DNA, 1118 bp, Homo sapiens
gcagaaaggcagaaaggagaaaattcaggataactctcctgaggggtgagccaagccctgccatgtagtgcacgcaggacatcaacaaacacagataacaggaaatgatccattccctgtggtcacttattctaaaggccccaaccttcaaagttcaagtagtgatatggatgactccacagaaagggagcagtcacgccttacttcttgccttaagaaaagagaagaaatgaaactgaaggagtgtgtttccatcctcccacggaaggaaagcccctctgtccgatcctccaaagacggaaagctgctggctgcaaccttgctgctggcactgctgtcttgctgcctcacggtggtgtctttctaccaggtggccgccctgcaaggggacctggccagcctccgggcagagctgcagggccaccacgcggagaagctgccagcaggagcaggagcccccaaggccggcctggaggaagctccagctgtcaccgcgggactgaaaatctttgaaccaccagctccaggagaaggcaactccagtcagaacagcagaaataagcgtgccgttcagggtccagaagaaacagtcactcaagactgcttgcaactgattgcagacagtgaaacaccaactatacaaaaaggatcttacacatttgttccatggcttctcagctttaaaaggggaagtgccctagaagaaaaagagaataaaatattggtcaaagaaactggttacttttttatatatggtcaggttttatatactgataagacctacgccatgggacatctaattcagaggaagaaggtccatgtctttggggatgaattgagtctggtgactttgtttcgatgtattcaaaatatgcctgaaacactacccaataattcctgctattcagctggcattgcaaaactggaagaaggagatgaactccaacttgcaataccaagagaaaatgcacaaatatcactggatggagatgtcacattttttggtgcattgaaactgctgtgacctacttacaccatgtctgtagctattttcctcctttctctgtacctytaagaagaaagaatctactgaaaataccamaaaaaaaaaaaaaaaa

SEQ ID NO: 1297 - DNA, 748 bp, Homo sapiens
  misc_feature (622)..(622): n equals a,t,g, or c
  misc_feature (725)..(725): n equals a,t,g, or c
  misc_feature (734)..(734): n equals a,t,g, or c
gcgagcacgttagaaagcctgacatggcctgactcgggacagctcagagcagggcagaactggggacactctgggccggccttctgcctgcatggacgctctgaagccaccctgtctctggaggaaccacgagcgagggaagaaggacagggactcgtgtggcaggaagaactcagagccgggaagcccccattcactagaagcactgagagatgcggccccctcgcagggtctgaatttcctgctgctgttcacaaagatgctttttatctttaactttttgttttccccacttccgaccccggcgttgatctgcatcctgacatttggagctgccatcttcttgtggctgatcaccagacctcaacccgtcttacctcttcttgacctgaacaatcagtctgtgggaattgagggaggagcacggaagggggtttcccagaagaacaatgacctaacaagttgctgcttctcagatgccaagactatgtatgaggttttccaaagaggactcgctgtgtctgacaatgggccctgcttgggatatagaaaaccaaaccagccctacagatggctatcttacaaacaggtgtctgataragcarartacctgggttcctgnctcttgcataaaggttataatcatcaccagaccagtttgtcggcatctttgctcaraataggccaragtggatcatctccgaattggcttgtaacgactttgnactgacttntaacttgaccaaac

SEQ ID NO: 1298 - DNA, 2444 bp, Homo sapiens
ggcggaggcggaggcggccccgggctcgggcggctgggatggagcagaagagcgcggacaccggagggcacgcagctgacggagctgcgctgcgttcgcctcgtttgcctcgcgccctccactggagctgttcgcgcctcccggctcccaccgcagcccacccggcagaggagtcgctaccagcgcccagtgcgctctgtcagtccgcaaactccttgccgcccgccccgggctgggcaccaaataccaggctaccatggtctacaagactctcttcgctctttgcatcttaactgcaggatggagggtacagagtctgcctacatcagctcctttgtctgtttctcttccgacaaacattgtaccaccgaccaccatctggactagctctccacaaaacactgatgcagacactgcctccccatccaacggcactcacaacaactcggtgctcccagttacagcatcagccccaacatctctgcttcctaagaacatttccatagagtccagagaagaggagatcaccagcccaggttcgaattgggaaggcacaaacacagacccctcaccttctgggttctcgtcaacaagcggtggagtccacttaacaaccacgttggaggaacacagctcgggcactcctgaagcaggcgtggcagctacactgtcgcagtccgctgctgagcctcccacactcatctcccctcaagctccagcctcatcaccctcatccctatcaacctcaccacctgaggtcttttctgcctccgttactaccaaccatagctccactgtgaccagcacccaacccactggagctccaactgcaccagagtccccgacagaggagtccagctctgaccacacacccacttcacatgccacagctgagccagtaccccaggagaaaacacccccaacaactgtgtcaggcaaagtgatgtgtgagctcatagacatggagaccaccaccacctttcccagggtgatcatgcaggaagtagaacatgcattaagttcaggcagcatcgccgccattaccgtgacagtcattgccgtggtgctgctggtgtttggagttgcagcctacctaaaaatcaggcattcctcctatggaagacttttggacgaccatgactacgggtcctggggaaactacaacaaccctctgtacgatgactcctaacaatggaatatggcctgggatgaggattaactgttctttatttataagtgcttatccagtagaattaataagtacctgatgcgcattgaacgacaatcttaagccctgttttgttggtatggttgtttttgttttcctccctctcctctggctgctacaacttcccctttctggtacaagaagaaccattctttaaaggtgagtggaggctgatttgcagctgaagtgggccagccttgcaccagccaggccagaccaccatggtgaaggcttctttccccactgcaggacccactttgagaaggaccgaggargaggatttgggttgttttgttaggggttactttcaggggaacatttcatttgtgttatttcttaaacttctatttaggaaattacattaagtattaatgaggggaaaggaaatgagctctacgaggatttcaccctgcatgggagagagcagggttttctcagattcctttttaatctctatttatctggttgtttctgacaggatgctgcctgcttggctctacaagctggaaagcagcttcttagctgcctaattaatgaaagatgaaaataggaagtgccctggagggggccagcaggtcacggggcagaatctctcaggttgctgtgggatctcagtgtgcccctacctgttctcccctccaggccacctgtctctgtaaaggatgtctgctctgttcaaaaggcagctgggatcccagcccacaagtgatcagcagagttgcatttccaaagaaaaaggctatgagatgagctgagttatagagagaaagggagaggcatgtacggtgtggggaagtggaagagaagctggcgggggagaaggaggctaacctgcactgagtacttcattaggacaagtgagaatcagctattgataatggccagagatatccacagcttggaggagcccagagaccgtttgctttatacccacacagcaactggtccactgctttactgtctgttggataatggctgtaaaatgtttaaaaacaaaacaaaacaaaaaagaggcactagtctatctgcaattactcaacgaggcattttcataggaaacagactatgattaatccatttattcttcccacacacttaccttactaagtctttgctttaataaatgagcaaccctgggtatagtcttaaaattctgcacaataaattttgagaaagaaaaaaaaaaaaaaaaaaaaaaaaaaaaaaaagggggggg

SEQ ID NO: 1299 - DNA, 569 bp, Homo sapiens
  misc_feature (445)..(445): n equals a,t,g, or c
  misc_feature (538)..(538): n equals a,t,g, or c
  misc_feature (544)..(544): n equals a,t,g, or c
  misc_feature (553)..(553): n equals a,t,g, or c
ggcggagggcggtgggacgtgatgcgcgggtcagagccgggccttgagaaggaactggaggcccctggcagcggtgtcccctcgaggacccctctgccgggctcaccaggtgtccggctttgctggcccagcaagcctgataagcatgaagctcttatctttggtggctgtggtcgggtgtttgctggtgcccccagctgaagccaacaagagttctgaagatatccggtgcaaatgcatctgtccaccttatagaaacatcagtgggcacatttacaaccagaatgtatcccagaaggactgcaactgcctgcacgtggtggagcccatgccagtgcctggccatgacgtggargcctactgcctgctgtgcgagtgcaggtacgaggagcgcagcaccaccaccatcaaggtcatcattgtcatctacctgtccgtggtgggngccctgttgctctacatggccttcctgatgctggtggaccctctgatccgaaagccggatgcatacactgagcaactgcacaatgaggagganaatgangatgctcgntctatggcaagcagct

SEQ ID NO: 1300 - DNA, 2117 bp, Homo sapiens
  misc_feature (2112)..(2112): n equals a,t,g, or c
cggctcggcstgcacgccgctgcccgtaccgccttcagtcaggtggtcgctagcacgggtgcgcacgcgcaggtctcaggagaggatacccagcccacgacctacgccgccgagctcaggggccaccctgacaccccttgcttctccgcagacctcccagatgttagtcaccagtaagatggctgcccccgaggctccggcaacctccgcacagtcccagacaggctccccggcccaggaggctgctactgagggccctagtagcgcctgtgcwttctctcaggctccgtgtgccagggaggtggacgccaaccggcccagcacagccttcctgggccagaatgatgtcttcgatttcactcagccggcaggtgtcagtggcatggccttcccgcgccccaagagacctgccccagcccaagaggctgccacagagggccccagtgctgcctctggtgtgccccagacgggacctggcagggaggtggcagccacccggcccaagaccaccaagtcggggaaggcgctggccaagactcggtgggtggagcctcagaatgttgtggcagcagctgctgccaaggccaagatggccacgagcatccctgagccggagggtgcagctgctgccactgctcagcacagtgctgagccctgggccaggatgggaggcaagaggaccaagaagtccaagcacctggatgatgagtatgagagcagcgaggaggagagagagactcccgcggtcccacccacctggagagcatcacagccctcattgacggtgcgggctcagttggcccctcggcccccgatggccccgaggtcccagataccctcaaggcacgtactgtgcctgcccccccgcaacgtgacccttctgcaggagagggcaaataagttggtgaaatacctgatgattaaggactacaagaagatccccatcaagcgcgcagacatgctgaaggatgtcatcagagaatatgatgaacatttccctgagatcattgaacgagcaacgtacaccctggaaaagaagtttgggatccacctgaaggagatcgacaaggaagaacacctgtatattcttgtctgcacacgggactcctcagctcgcctccttggaaaaaccaaggacactcccaggctgagtctcctcttggtgattctgggcgtcatcttcatgaatggcaaccgtgccagcgaggctgtcctctgggaggcactacgcaagatgggactgcgccctggggtgaggcacccattcctcggcgatctgaggaagctcatcacagatgactttgtgaagcagaagtacctggaatacaagaagatccccaacagcaacccacctgagtatgaattcctctggggcctgcgagcccgccatgagaccagcaagatgagggtcctgagattcatcgcccagaatcagaaccgagacccccgggaatggaaggctcatttcttggaggctgtggatgatgctttcaagacaatggatgtggatatggccgaggaacatgccagggcccagatgagggcccagatgaatatcggggatgaagcgctgattggacggtggagctgggatgacatacaagtcgagctcctgacctgggatgaggacggagattttggcgatgcctgggccaggatcccctttgctttctgggccagataccatcagtacattctgaatagcaaccgtgccaacaggagggccacgtggagagctggcgtcagcagtggcaccaatggaggggccagcaccagcgtcctagatggccccagcaccagctccaccatccggaccagaaatgctgccagagctggcgccagcttcttctcctggatccagtaagagtttcrgcaccgttgacgaactgcagcgatcttactggccaagccagagcgcctcctctcagattccttctcgacacagcaccctaggcggcttcttcctgtcagtcggaggtggcatgcaagatgaagctctctttgctcttcctgctttcattttgtgcttttccttgtgttttcatgttttgggtatcagtgttacattaaagttgcaaaattaaaaaaaaaaaaaaaacttggggggggggnccccg

SEQ ID NO: 1301 - DNA, 1780 bp, Homo sapiens
gcggcagagtcgagagcggctgcmggrctgcggggcgccttgactctccctccaccctgcctcctcgggctccactcgtctgcccctggactcccgtctcctcctgtcctccggcttcccagagctccctccttatggcagcagcttcccgcgtctccggcgcagttctcagcggacgaccctctcgctccggggctgagcccagtccctggatgttgctgaaactctcgagatcatgcgcgggtttggctgctgcttccccgccgggtgccactgccaccgccgccgcctctgctgccgccgtccgcgggatgctcagtagcccgctgcccggcccccgcgatcctgtgttcctcggaagccgtttgctgctgcagagttgcacgaactagtcatggtgctgtgggagtccccgcggcagtgcagcagctggacactttgcgagggcttttgctggctgctgctgctgcccgtcatgctactcatcgtagcccgcccggtgaagctcgctgctttccctacctccttaagtgactgccaaacgcccaccggctggaattgctctggttatgatgacagagaaaatgatctcttcctctgtgacaccaacacctgtaaatttgatggggaatgtttaagaattggagacactgtgacttgcgtctgtcagttcaagtgcaacaatgactatgtgcctgtgtgtggctccaatggggagagctaccagaatgagtgttacctgcgacaggctgcatgcaaacagcagagtgagatacttgtggtgtcagaaggatcatgtgccacagatgcaggatcaggatctggagatggagtccatgaaggctctggagaaactagtcaaaaggagacatccacctgtgatatttgccagtttggtgcagaatgtgacgaagatgccgaggatgtctggtgtgtgtgtaatattgactgttctcaaaccaacttcaatcccctctgcgcttctgatgggaaatcttatgataatgcatgccaaatcaaagaagcatcgtgtcagaaacaggagaaaattgaagtcatgtctttgggtcgatgtcaagataacacaactacaactactaagtctgaagatgggcattatgcaagaacagattatgcagagaatgctaacaaattagaagaaagtgccagagaacaccacataccttgtccggaacattacaatggcttctgcatgcatgggaagtgtgagcattctatcaatatgcaggagccatcttgcaggtgtgatgctggttatactggacaacactgtgaaaaaaaggactacagtgttctatacgttgttcccggtcctgtacgatttcagtatgtcttaatcgcagctgtgattggaacaattcagattgctgtcatctgtgtggtggtcctctgcatcacaaggaaatgccccagaagcaacagaattcacagacagaagcaaaatacagggcactacagttcagacaatacaacaagagcgtccacgaggttaatctaaagggagcatgtttcacagtggctggactaccgagagcttggactacacaatacagtattatagacaaaagaataagacaagagatctacacatgttgccttgcatttgtggtaatctacaccaatgaaaacatgtactacagctatatttgattatgtatggatatatttgaaatagtatacattgtcttgatgttttttctgtaatgtaaataaactatttatatcacaaaaaaaaaaaaaaaaaaaaaaaaaaactcga

SEQ ID NO: 1302 - DNA, 2694 bp, Homo sapiens
gaaagctggtacgcctgcaggtaccggtccggaattcccgggtcgacccacgcgtccgatctacatccgcagatatgtgttcaagcttggtgtgctaggctggggggccccagccctcctggtgctgctttccctctctgtcaagagctcggtatacggaccctgcacaatccccgtcttcgacagctgggagaatggcacaggcttccagaacatgtccatatgctgggtgcggagccccgtggtgcacagtgtcctggtcatgggctacggcggcctcacgtccctcttcaacctggtggtgctggcctgggcgctgtggaccctgcgcaggctgcgggagcgggcggatgcaccaagtgtcagggcctgccatgacactgtcactgtgctgggcctcaccgtgctgctgggaaccacctgggccttggccttcttttcttttggcgtcttcctgctgccccagctgttcctcttcaccatcttaaactcgctctacggtttcttccttttcctgtggttctgctcccagcggtgccgctcagaagcagargccaaggcacagatagaggccttcagytcctyccaaacaacacagtagtccgggcctcctggcctggaatcctcagcctctctggccgccagtagcctgaggctacggctcctgctagagagggtggcaggcctgctgctggaccccagaggccactgtgaccgccaaggggccttttccacttccacggcctctccaggcactgaggggaaggcattgctctacctctccctgacattttgctccggggcagatccaaccttacctggggcagcaaactttgtcctggtacctgggcccagctcgccagggatgtgggcagagcaccagcctgggcatcaggaagccaagtttcaaggactgtctttgagtctgtctgtatgaccttgggcctgccacttctcacagaccctaggtatccacagctgtgacatgggggcaagcggctttgtttcagcctaacccaggagcttagtaaaaattgcataagaccagggggaagagtgtcagcgtggggtgggaattcccgcggcctccacctgcttgctaggggcaggatctcattcaggctgccctggaagcacctgcttggccctgccaccttcctccaggggagggccagatggcatcctggcttggggcgggtgggacctacccaggctctgagactttactggcctatgcctgaggcctcttttcctttaactccctaaattatgatgactccaagtccaagcccacccttyccaaagawtgggaggttccgccgttcccagaggctcctcctgcggtgctcccaagacttccatagaccatctggaccagtagcccatcccgcagttttcttgggggcagaggaaaacgcttctttctcctccagctgaatcagctggatcccagtgtcctggctgtttggtgattgggcaagattgaatttgcccaggtaggcgtgagagtgtgggttttaaattcgaagctcaggccatagtttcagagaatcacccttaccccagaccttcatgagacagtgctcatgaagccagtgcgtttcccagaacgaacactaggcggcaccgttggtccacactcagaggcccttggcgccaagactgcatctagaatcgctcaaacacctgtttgcagaccccatgcaccagctggaggggccgtaactgcaggactgcgcctactgagtgacccatttcctccaggaggaaaggcaagacacgcttacacggccatttgtctcttttcccaatgcggcggtgcactttcgctcttgggggctgcaccccagacatagctggcaccagagcagggtgctcaggtggtgggtgctcagggccctgccccaggccactgggccgttttgatgacctcgaaggtcacaggcrgaaaataggagcaggatttcccctggggaaaagttctcctgggacatcttctgctcttctgtacatttctagatgcaaataactccttcaccaggcagtgagtggcgtaggctctggagccaggctgcctgggctccaatgccagctctgccacttgctagctgtgagactgtggacaaaccactcagcctctgtgtgcctcagttttcctatttgtaaaatagaggccatagtggtacctattttgaagactaagtaaaagaattcaaataaagagacttggcacagagtaagtgctcagtaaatggttactggtattatcattagtatttttgctattattgttaacagtgttaactgagtttcagaggccagcctgtctaagccccaggcccagctctgctcaaccttgtaggcacaaccccttcttaggcacatctcaccatgcctcagtttctttccccagacgggtctctactcccacctcgctgactttctgctgttctaggaatagtccccacacagtgcagcctccaggccatgccacatgtcccccgacctcccagttccccaatcttccggtctatagaaattcctggtggtcatttatcacatctacaaaattgccccagcggtgcctagagaaggcctctttcccacgctaactccaggcagattctccccacccctgccaccatctgggtgatgtgagcacccatcaagcttccatgggtaagcccaggcttt

SEQ ID NO: 1303 - DNA, 2232 bp, Homo sapiens
gctgcttcctgcctgggtttggagttgtcaccactttcccctctccgtctcctgcgggcgcaatggaggaggaggatgaggaagcgcgggcgctcctggcaggcggccctgacgaggccgacagaggtgccccggccgcccctggagccctgccggccctctgcgaccccagtcgcctggcgcaccggcttttggtgctgttactgatgtgcttccttggctttggcagctatttttgctatgataatcctgctgcccttcagactcaagttaaacgagatatgcaagtgaataccacgaaattcatgctgctgtatgcctggtattcttggcccaatgtagttttgtgtttctttggtggctttttgataraccgartatttggaatacsatggggcacaatcatttttagctgctttgtttgcattggacaggttgtttttgccctgggtggaatatttaatgctttttggctgatggaatttggaagatttgtatttgggattggtggcgagtccttagcagttgcccagaatacatatgctgtgagctggtttaaaggcaaagaattaaacctggtgtttggacttcaacttagcatggctagaattggaagtacagtaaacatgaacctcatgggatggctgtattctaagattgaagctttgttaggttctgctggtcacacaaccctcgggatcacacttatgattgggggtrtaacgtgtattctttcactaatctgtgccttggctcttgcctacttggatcagagagcagagagaatccttcataaagaacaaggaaaaacaggtgaagttattaaattaactgatgtaaaggacttctccttacccctgtggcttatatttatcatctgtgtctgctattatgttgctgtgttcccttttattggacttgggaaagttttctttacagagaaatttggattttcttcccaggcagcaagtgcaattaacagtgttgtatatgtcatatcagctcccatgtccccggtgtttgggctcctggtggataaaacagggaagaacatcatctgggttctttgcgcagtagcagccactcttgtgtcccacatgatgctggcctttacgatgtggaacccttggattgctatgtgtcttctgggactctcctactcattgcttgcctgtgcattgtggccaatggtggcatttgtagttcctgaacatcagctgggaactgcatatggcttcatgcagtccattcagaatcttgggttggccatcatttccatcattgctggtatgatactggattctcgggggtatttgtttttggaagtgttcttcattgcctgtgtttctttgtcacttttatctgtggtcttactctatttggtgaatcgtgcccagggtgggaacctaaattattctgcaagacaaagggaagaaataaaattttcccatactgaatgagaagttaaaatgaatgtgtcatgagaatgggcttaacacatcgttggtttgaaaacttccatttttaaaaatttagagtttagtcattagaaaaaataatggactggaaagttatatttatatccaaatatacctatttcaaagtgtatttgtgaggcctgttttagcctgtgtcttttgtattgtgtgttgctaaagaattctacttttagtaggctaatcaacaatgaaagggttagaaaattgctgtggaacatccaggtgaacttcaggaaagacagtgaaaaatggaaaacgttggagcttctgttgagataatcttcattaggtatatatcttagggatacagccttttctttatcttatagcaggaaaaaaaaacttttgagggaaatagaagggctgcgttacacaaaataaacaatggcattgtcataggccttccttttactagtagggcataatgctagggaatatgtgaagatgtttttatgaagtctctttctgatcacgaacaatagcttgcgctctactctgtagttatgtggattgccgagcaatgacccttttcaatttcttatttctgtgttactgaggaccctaatcacttagggatgtaattttatagtataaactttctgtacagtttttcttatagtctaataagtaaaaagtgtccttcaaattatgataattgcctatgtacatggataaattaaaacactgcacacggaaaaaaaaaaaaaaaaagggcggccgctctagaggatcc

SEQ ID NO: 1304 - DNA, 2386 bp, Homo sapiens
gacactatagaaggtacgcctgcaggtaccggtccggaattcccgggtcgacccacgcgtccgatcagttatggctaaatcctgtccatctgtgtgtcgctgcgatgcgggtttcatttactgtaatgatcgctttctgacatccattccaacaggaataccagaggatgctacaactctctaccttcagaacaaccaaataaataatgctgggattccttcagatttgaaaaacttgctgaaagtagaaagaatatacctataccacaacagtttagatgaatttcctaccaacctcccaaagtatgtaaaagagttacatttgcaagaaaataacataaggactatcacttatgattcactttcaaaaattccctatctggaagaattacatttagatgacaactctgtctctgcagttagcatagaagagggagcattccgagacagcaactatctccgactgcttttcctgcccgtaatcaccttagcacaattccctggggtttgcccaggactatagaagaactacgcttggatgataatcgcatatccactatttcatcaccatctcttcaaggtctcactagtctaaaacgcctggttctagatggaaacctgttgaacaatcatggtttaggtgacaaagttttcttcaacctagttaatttgacagagctgtccctggtgcggaattccctgactgctgcaccagtaaaccttccaggcacaaacctgaggaagctttatcttcaagataaccacatcaatcgggtgcccccaaatgctttttcttatctaaggcagctctatcgactggatatgtccaataataacctaagtaatttacctcagggtatctttgatgatttggacaatataacacaactgattcttcgcaacaatccctggtattgcgggtgcaagatgaaatgggtacgtgactggttacaatcactacctgtgaaggtcaacgtgcgtgggctcatgtgccaagccccagaaaaggttcgtgggatggctattaaggatctcaatgcagaactgtttgattgtaaggacagtgggattgtaagcaccattcagataaccactgcaatacccaacacagtgtatcctgcccaaggacagtggccagctccagtgaccaaacagccagatattaagaaccccaagctcactaaggatcaacaaaccacagggagtccctcaagaaaaacaattacaattactgtgaagtctgtcacctctgataccattcatatctcttggaaacttgctctacctatgactgctttgagactcagctggcttaaactgggccatagcccggcatttggatctataacagaaacaattgtaacaggggaacgcagtgagtacttggtcacagccctggagcctgattcaccctataaagtatgcatggttcccatggaaaccagcaacctctacctatttgatgaaactcctgtttgtattgagactgaaactgcaccccttcgaatgtacaaccctacaaccaccctcaatcgagagcaagagaaagaaccttacaaaaaccccaatttacctttggctgccatcattggtggggctgtggccctggttaccattgcccttcttgctttagtgtgttggtatgttcataggaatggatcgctcttctcaaggaactgtgcatatagcaaagggaggagaagaaaggatgactatgcagaagctggcactaagaaggacaactctatcctggaaatcagggaaacttcttttcagatgttaccaataagcaatgaacccatctcgaaggaggagtttgtaatacacaccatatttcctcctaatggaatgaatctgtacaaaaacaatcacagtgaaagcagtagtaaccgaagctacagagacagtggtattccagactcagatcactcacactcatgatgctgaaggactcacagcagacttgtgttttgggttttttaaacctaagggaggtgatggtaggaaccctgttctactgcaaaacactggaaaaagagactgaaaaaaagcaatgtactgtacatttgccatataatttatatttaagaactttttattaaaagtttcaaatttcaggttactgctgcgattgatgtagtggagatgcctgaacacaattctatattttagtattttttagtaatttgtactgtattttccttgcaaatattggagttataaaccatttactttgtgttctactgagtaagatgacttgttgactgtgaaagtgaattttcttgctgtgtcgaacaatcaggactgcattcatatgagatccttgtagtataagcacaggccatttttcactttggtattaataaaatgtaaaaaaaaaattggt

SEQ ID NO: 1305 - DNA, 2166 bp, Homo sapiens
  misc_feature (13)..(13): n equals a,t,g, or c
acccacgcggttnggacccgtggggccggcttggctagsgcgcggyggccgtggctaaggctgctacgaagcgagcttgggaggagcagcggcctgcggggcagaggagcatcccgtctaccaggtcccaagcggcgtggcccgcgggtcatggccaaaggagaaggcgccgagagcggctccgcggcggggctgctacccaccagcatcctccaaagcactgaacgcccggcccaggtgaagaaagaaccgaaaaagaagaaacaacagttgtctgtttgcaacaagctttgctatgcacttgggggagccccctaccaggtgacgggctgtgccctgggtttcttccttcagatctacctattggatgtggctcaggtgggccctttctctgcctccatcatcctgtttgtgggccgagcctgggatgccatcacagaccccctggtgggcctctgcatcagcaaatccccctggacctgcctgggtcgccttatgccctggatcatcttctccacgcccctggccgtcattgcctacttcctcatctggttcgtgcccgacttcccacacggccagacctattggtacctgcttttctattgcctctttgaaacaatggtcacgtgtttccatgttccctactcggctctcaccatgttcatcagcaccgagcagactgagcgggattctgccaccgcctatcggatgactgtggaagtgctgggcacagtgctgggcacggcgatccagggacaaatcgtgggccaagcagacacgccttgtttccaggacctcaatagctctacagtagcttcacaaagtgccaaccatacacatggcaccacctcacacagggaaacgcaaaaggcatacctgctggcagcgggggtcattgtctgtatctatataatctgtgctgtcatcctgatcctgggcgtgcgggagcagagagaaccctatgaagcccagcagtctgagccaatcgcctacttccggggcctacggctggtcatgagccacggcccatacatcaaacttattactggcttcctcttcacctccttggctttcatgctggtggaggggaactttgtcttgttttgcacctacaccttgggcttccgcaatgaattccagaatctactcctggccatcatgctctcggccactttaaccattcccatctggcagtggttcttgacccggtttggcaagaagacagctgtatatgttgggatctcatcagcagtgccatttctcatcttggtggccctcatggagagtaacctcatcattacatatgcggtagctgtggcagctggcatcagtgtggcagctgccttcttactaccctggtccatgctgcctgatgtcattgacgacttccatctgaagcagccccacttccatggaaccgagcccatcttcttctccttctatgtcttcttcaccaagtttgcctctggagtgtcactgggcatttctaccctcagtctggactttgcagggtaccagacccgtggctgctcgcagccggaacgtgtcaagtttacactgaacatgctcgtgaccatggctcccatagttctcatcctgctgggcctgctgctcttcaaaatgtaccccattgatgaggagaggcggcggcagaataagaaggccctgcaggcactgagggacgaggccagcagctctggctgctcagaaacagactccacagagctggctagcatcctctagggcccgccacgttgcccgaagccaccatgcagaaggccacagaagggatcaggacctgtctgccggcttgctgagcagctggactgcaggtgctaggaagggaactgaagactcaaggaggtggcccaggacacttgctgtgctcactgtggggccggctgctctgtggcctcctgcctcccctctgcctgcctgtggggccaagccctggggctgccactgtgaatatgccaaggactgatcgggcctagcccggaacactaatgtagaaaccttttttttacagagcctaattaataacttaatgactgtgtacatagcaatgtgtgtgtatgtatatgtctgtgagctattaatgttattaattttcataaaagctggaaagcagctgcctgttaaaaaaaaaaaaaaaaaaaaaaaaaa

SEQ ID NO: 1306 - DNA, 1267 bp, Homo sapiens
  misc_feature (132)..(132): n equals a,t,g, or c
  misc_feature (1067)..(1067): n equals a,t,g, or c
  misc_feature (1102)..(1102): n equals a,t,g, or c
  misc_feature (1128)..(1128): n equals a,t,g, or c
  misc_feature (1206)..(1206): n equals a,t,g, or c
  misc_feature (1242)..(1243): n equals a,t,g, or c
gcggccgcggcaggaggcggcggcggcgggcgggagcagcggcggcggcggcacaggctcggggccagccgggcgcgcatccccgggcgccctgcgcggtggagagcttggcggagctgcgggtgccgcagnacaggagtggacaaagcaagatggcagggatcttagcctggttctggaacgaraggttttggctcccgcacaatgtcacctgggcggacctgaagaacacggaggaggccaccttcccgcargctgaggacctctatctcgcttttcccctggccttctgtatcttcatggtgcggctcatcttcgagagatttgtagccaaaccgtgcgccatagccctcaacattcaggccaatggaccacaaattgctccgcccaatgccattctggaaaaggtcttcactgcaattacaaagcatcctgatgaaaagagattggaaggcctctccaagcaactggactgggatgttcgaagcattcagcgctggtttcgacaaagacgcaatcaggagaagccaagcacgctgacgaggttctgtgagagcatgtggagattttcattttacctttatgtatttacctacggagtcagattcctgaaaaagaccccctggttgtggaatacgaggcattgctggtacaactacccctatcagccactcacaactgaccttcactactattacatcctggagctgtcgttttattggtctttgatgttttctcagttcactgatatcaaaagaaaggactttggcattatgttcctgcaccaccttgtatctawtttcttgattaccttttcatatgtcaacaatatggcccgagtaggaacgctggtcctttgtcttcatgattcagctgatgctcttctggaggctgycaaaatggcaaattatgccaagtttcagaaaatgtgtgatctcctgtttgytatgtttgccgtggttttcatcaccacacgactgggtatatttcctctctggcctttgctctggtgcccagatggaaagtgcagtgtaggcttatagctcactgcagccttgaactcctgngctcaaagtgatccttctgcgctcaaggggatctnctggcttccggcttcttcaagtaacntggggacctaccagggcattgtgcctgggcaacaaccccgggtttaaattttttaacttttttgggaagaagaccaangggtcccccaacttattggtttggcccccaaggggnngggttcctttgggaaaccttccct

SEQ ID NO: 1307 - DNA, 1098 bp, Homo sapiens
  misc_feature (3)..(4): n equals a,t,g, or c
  misc_feature (1076)..(1076): n equals a,t,g, or c
  misc_feature (1079)..(1079): n equals a,t,g, or c
ggnnatgaatacgccagcgcgcaattaaccctcactaaagggaacaaaagctggagctccaccgcggtggcggccgctctagaactagtggatcccccgggctgcaggaattcggcacgagggaacatccacatcttctgtactcgtccattctgtgtccccggggcctggagtaaagacaccttcaaatgcagagactcttcagattcagctttcctggaaactgatcttcaatgcactaagagaaggagactctcaaaccaaaaatgacctggaggcaccatgtcaggcttctgtttacggtcagtttggcattacagatcatcaatttgggaaacagctatcaaagagagaaacataacggcggtagagaggaagtcaccaaggttgccactcagaagcaccgacagtcaccgctcaactggacctccagtcatttcggagaggtgactgggagcgccgagggctgggggccggaggagccgctcccctactcccgggctttcggagagggtgcgtccgcgcggccgcgctgctgcaggaacggcggtacctgcgtgctgggcagcttctgcgtgtgcccggcccacttcaccggccgctactgcgagcatgaccagaggcgcagtgaatgcggcgccctggagcacggagcctggaccctccgcgcctgccacctctgcaggtgcatcttcggggccctgcactgcctccccctccagacgcctgaccgctgtgacccgaaagacttcctggcctcccacgctcacgggccgagcgccgggggcgcgcccagcctgctactcttgctgccctgcgcactcctgcaccgcctcctgcgcccggatgcgcccgcgcaccctcggtccctggtcccttccgtcctccagcgggagcggcgcccctgcggaaggccgggacttgggcatcgcctttaattttctatgttgtaaataatagatgtgtttagtttaccgtaagctgaagcactgggtgaatatttttattgggtaataaatattttcatgaaagcgcctttggctgccagatccttgggagagggacacgtgtgtccnagncaccactgtgaccggtagt

SEQ ID NO: 1308 - DNA, 1278 bp, Homo sapiens
  misc_feature (2)..(3): n equals a,t,g, or c
  misc_feature (7)..(7): n equals a,t,g, or c
  misc_feature (47)..(47): n equals a,t,g, or c
  misc_feature (59)..(59): n equals a,t,g, or c
tnngggntctaacggcgggaaccaatggaatatctcttaagctggtncgcctgcaggtnccggtccggaattcccgggtcgacccacgcgtccgcataaatactgctctaagaaagggacaggaagtctcagaggctggagagcagagcaccaagatcgttctggcaggaacagccagtgggaggttccagctgagcgctccccagaggtgagctgatccccagccacagcacacaggaccaggctgcgagaacagcatcatcagcatcatgctattacaatcccaaaccatgggggtttctcacagctttacaccaaagggcatcactatccctcaaagagagaaacctggacacatgtaccaaaacgaagattacctgcagaacgggctgccaacagaaaccaccgttcttgggacwgtccagatcctgtgttgcctgttgatttcaagtctgggggccatcttggtttttgctccctacccctcccacttcaatccagcaatttccaccactttgatgtctgggtacccatttttaggagctctgtgttttggcattactggatccctctcaattatctctggaaaacaatcaactaagccctttgacctgagcagcttgacctcaaatgcagtgagttctgttactgcaggagcaggcctcttcctccttgctgacagcatggtagccctgaggactgcctctcaacattgtggctcagaaatggattatctatcctcattgccttattcggagtactattatccaatatatgaaatcaaagattgtctcctgaccagtgtcagtttaacaagttcattttcctcgacccagtcacaagatcatatccaacaggtcaaaaagagttcttcacggtcttggatataagtaactcttggcctcagaggaaggaaaagcaactcaacactcatggtcaagtgtgattagactttcctgaaatctctgccattttagatactgtgaaacaaactaaaaaaaaaaaagcttttgttttgtatttgtttactatgagtcgttatttaatttctcttgaaaataatttcctcaaagcccaagtcartaaatgttatcagccagtcttccaaaatggtcataaactttataaactgctttgggtaaactgagcagaaggtgatacacagaagggaaaatgtgcactcatgctagtgtgaatttggtaagtygcgtgactctgcaggctgtttctgtattattttcacactcatattgcttaaatattacatattagggattg

SEQ ID NO: 1309 - DNA, 1437 bp, Homo sapiens
  misc_feature (126)..(126): n equals a,t,g, or c
gcacgagccggggccggccggtctgctcgggagcgcgccccgtggcccagccctgtctccttttagcataggggcttcggcgccagcggccagcgctagtcggtctggtaaggcaaagcggagcgnagatcctcaaacggcctagtgcttcgcgcttccggagaaaatcagcggtctaattaattcctctggtttgttgaagcagttaccaagaatcttcaaccctttcccacaaaagctaattgagtacacgttcctgttgagtacacgttcctgttgatttacaaaaggtgcaggtatgagcaggtctgaagactaacattttgtgaagttgtaaaacagaaaacctgttagaaatgtggtggtttcagcaaggcctcagtttccttccttcagcccttgtaatttggacatctgctgctttcatattttcatacattactgcagtaacactccaccatatagacccggctttaccttatatcagtgacactggtacagtagctccagaaaaatgcttatttggggcaatgctaaatattgcggcagttttatgcattgctaccatttatgttcgttataagcaagttcatgctctgagtcctgaagagaacgttatcatcaaattaaacaaggctggccttgtacttggaatactgagttgtttaggactttctattgtggcaaacttccagaaaacaaccctttttgctgcacatgtaagtggagctgtgcttacctttggtatgggctcattatatatgtttgttcagaccatcctttcctaccaaatgcagcccaaaatccatggcaaacaagtcttctggatcagactgttgttggttatctggtgtggagtaagtgcacttagcatgctgacttgctcatcagttttgcacagtggcaattttgggactgatttagaacagaaactccattggaaccccgaggacaaaggttatgtgcttcacatgatcactactgcagcagaatggtctatgtcattttccttctttggttttttcctgacttacattcgtgattttcagaaaatttctttacgggtggaagccaatttacatggattaaccctctatgacactgcaccttgccctattaacaatgaacgaacacggctactttccagagatatttgatgaaaggataaaatatttctgtaatgattatgattctcagggattggggaaaggttcacagaagttgcttattcttctctgaaattttcaaccacttaatcaaggctgacagtaacactgatgaatgctgataatcaggaaacatgaaagaagccatttgatagattattctaaaggatatcatcaagaagactattaaaaacacctatgcctatacttttttatctcagaaaataaagtcraaagactatgaaaaaaaaaaaaaaaaaaaaactcgtag

SEQ ID NO: 1310 - DNA, 793 bp, Homo sapiens
  misc_feature (29)..(29): n equals a,t,g, or c
  misc_feature (56)..(56): n equals a,t,g, or c
  misc_feature (734)..(734): n equals a,t,g, or c
  misc_feature (771)..(771): n equals a,t,g, or c
gcgggcgggggcgtggcggggcggccgcntcggttggcgaggtcactgcaggtcanaggtcacgagatcaaggatctggaaccctgaggtgtgcacagcgctgggatgccaggttcggcctcgaagcggaggatccctgtgtcccagccgggcatggccgacccccaccagcttttcgatgacacaagttcagcccagagccggggctatggggcccagcgggcacctggtggcctgagttatcctgcagcctctcccacgccccatgcagccttcctggctgacccggtgtccaacatggccatggcctatgggagcagcctggccgcgcagggcaaggagctggtggataagaacatcgaccgcttcatccccatcaccaagctcaagtattactttgctgtggacaccatgtatgtgggcagaaagctgggcctgctgttcttcccctacctacaccaggactgggaagtgcagtaccaacaggacaccccggtggccccccgctttgacgtcaatgccccggacctctacattccagcaatggctttcatcacctacgttttggtggctggtcttgcgctggggacccaggataggttctccccagacctcctggggctgcaagcgagctyagccctggcctggctgaccctggargtgctggccatcctgstyarcctytatyttgggtcaaytggtaaaaaccggaacttcaccaccattcgaacctngggggggccttttttggggcttaccaaataatggtcngggaatgaaattgggcgggggg

SEQ ID NO: 1311 - DNA, 3138 bp, Homo sapiens
  misc_feature (9)..(9): n equals a,t,g, or c
  misc_feature (2081)..(2081): n equals a,t,g, or c
gccggttcnggaaatttccccggggtcgacccacgygtccgccgaagttggtctgaaggcaagggcttgttggttgtggacagcactttgtcatgggacctgtacggttggggatgttgcttttcattttggctgtgtatggcgcttgggttgcgacgccgaaggaggaagacgatgacacagaacgcttgcccagcaaatgtgaagtgtgtaagttgctgagcctggagctgcaggaaaagctgagtcgcactggccgatctcgagaggtgctggagctggggcaggtgctagacactggcaagagaaagaggcacatcccctacagtgtttcagagacaaggctggaagaggccttggagaatttgtgtgaccggatcctggactacagtgttcatgctgagcgcaagggctcactgagatatgccaagggtcagagtcagaccatggcaacgctgaaaggtctggtgcagaagggggtgaaggtggatctggggatccctctggagctgtgggacgagcccagcgtggaagtcacattcctcaagaagcagtgtgagacaatgctggaggagtttgaagatgtcgtgggagactggtacttccatcatcaggaacagccgttacagcattttctctgtgaaggtcatgtgctcccccctgctgaaactgcatgtctacaggaaacttggactggaaaggaaaagatcacggatgggcaagagaagacagaaggggaggaggaacacgatcaggaggaggaagaagaggaagaggaggaagagaggatcaacacaccagggcactccaagcatgaccctgaggatctctgactcttgcctttgagcccccaggaggggcaggagtcatggagaagaaccctctgaaatctgagctctctgtgctccacataagggcatgtgtgtatgtgtgagtgatcccaccccggagcttgtagctgttctcacctgtctggtctcaggtaggatcctagtggtgcagcatagcaaggctatggggacaaaaccaggaacaggaggcagaaggcctgcttcaaccgatgagtcctctgcctgccacagagccccttaactggcaggtgtgtgtgtgtggtgacaatgctgaaggctttcccctttaaatctctctactacttcccaccccacccagaggtcagtgaagccattggacctatgggtctaaggcgaaaggcactttgtccttcgggtccgtttttagatccctacaaggaagaagccagcttggacattctctacgacctatacacaccgcctgcgtcaaggctacaacccaagaaactgaacaaaaaaggggacactatgaagatggggcaatgatgttaagttaggtggggtagatattcggtctacttcatacaaatatcaccgagggcccaccatgtaatttcacaggtgccaaattttctacattgctagtaaattttttaaaacatcacctgggcccctagtttcaaacaacttccctgcacacttcatacctggccgatatagcagcgcccagagaatggggccgttcgtcgcccgctgttggaagctaatggtggtttgtaatttgcagtccagggaggctggcaggggtgccccggctgataaccatttaggcgcggggcagtgccaggctctcggcgcgtgcgggggaaggcaccggaattaagagaccgcgtccggcagcgcgtctcggccaccatcctccgggtttacgggagctcgcagaggacaaaatttctcgcgcttttccggggggcggagctaacctggcagggagggaaggattaggagaagcggtgacactaggtccaaggcgggaagcgcctcggttagattgagggaaataaagaggatgtcctttgtgggatgatgggtgaggacctaccacaagagaagcgtggcgaaggccgaaaaccgagggaatggcggggttcgcgctaagggaagcttggacgagaccatctacggatagggggttagggcgataccatcttgagggagttagggggtggcaaagaacagccgtggaaggtgctacttggaggaggcggngcgcacgtgggaacccaaagagactgggccgtcgcctacatccgcacttcccttccccagccgtcccgatcctgccatgagcgctgcggtgcggaccgagccgctgcgcggggagccgcctctgctggtgcgcggcgacccctactcggtggtggtcctgcttcagggctacgcggagccggagggggtcgacgacgcggtacgcgccgacggctccgtgacgcttgtgctgcctcaggcctggggctcagccaccagcctycaagagtccccgccccacagcggcggggcgaagaccgccctggaagaggcggcccgtggccccatcctcgtggacactgggggcccctgggctcgggaggcgctcctgggggccctggcggggcagggcatggcccctggagacgtgacgctggtggtgggcacccacggacactcggatcacatcgggaacctggggctttttcctggggcggctctgctggtctcgcacgacttctgcctgcccggaggccgctacctcccccacgggctaggtgaggagcggcccctgcagctgggccccgggctcgaggtgtgggccacgccgggccatgggggccagcgggacgtgagcgtggtggtggcgggcacggccctgggcaccgtggtggtggcaggcgacgtgtttgaacgcagcggagacgaagactcatggcaagcgctgagcgaagacccggtggcccaggagcggagccggaagagggtcctagatactgcggacgtagtcgtgcctggtcacggagccccctttagggggtcagagaagcccctcagccacggaaytgatgtccagaagaccagaggtcagtgtgatcgmttccagcccccttgcaagaggccggttttccagcgaggacagtcatctctatcactggttctgcaaccaaactaggaccaaagactggctcagccgtgtgccacctctcagggtcccccgtaaagtaggagaatgttcttgggagggtcgtccaaaataaaaataggcaactgcatagaaaaaaaaaaaaaaaaaaag

SEQ ID NO: 1312 - DNA, 1871 bp, Homo sapiens
taatcaaagctcaggaggagagctgcattccactgtttcacagatgctgtgagggtgacaaagatgcagggcacccactggaaacacagacggcactctgcgaaagaggaaggggcgccaggagcttgggtgagcaaggttggaggtgattctgcccctctccccaggctttctgtattagaaaactgaagcttcaagaacagacttgcctaacaacaggaaacttgtatgtctcgaagtggcaattcacacataaggctccatgactcctgaactctcacaaatattagttggctcttttcatggttttactgaagttgctagaagtttacagaaaaggaagtgcaggaacatttcacaaatctacaatctgtgagtatcacatcctgtatagctgtaaacactggaataaggaagggctgatgactttcagaagatgaaggtaagtagaaaccgttgatgggactgagaaaccagagttaaaacctctttggagcttctgaggactcagctggaaccaacgggcacagttggcaacaccatcatgacatcacaacctgttcccaatgagaccatcatagtgctcccatcaaatgtcatcaacttctcccaagcagagaaacccgaacccaccaaccaggggcaggatagcctgaagaaacatctacacgcagaaatcaaagttattgggactatccagatcttgtgtggcatgatggtattgagcttggggatcattttggcatctgcttccttctctccaaattttacccaagtgacttctacactgttgaactctgcttacccattcataggaccctttttttttatcatctctggctctctatcaatcgccacagagaaaaggttraccaagcttttggtgcatagcagcctggttggaagcattctgagtgctctgtctgccctggtgggtttcattatcctgtctgtcaaacaggccaccttaaatcctgcctcactgcagtgtgagttggacaaaaataatataccaacaagaagttatgtttcttacttttatcatgattcactttataccacggactgctatacagccaaagccagtctggctggawctctctctctgatgctgatttgcactctgctggaattctgcctagctgtgctcactgctgtgctgcggtggaaacaggcttactctgacttccctgggagtgtacttttcctgcctcacagttacattggtaattctggcatgtcctcaaaaatgactcatgactgtggatatgaagaactattgacttcttaagaaaaaagggagaaatattaatcagaaagttgattcttatgataatatggaaaagttaaccattatagaaaagcaaagcttgagtttcctaaatgtaagcttttaaagtaatgaacattaaaaaaaaccattatttcactgtcatttaagatatgtgttcattggggatctcttgatttgcctgacattgacttcagcaaaagcacggggctgtaaattaccatttactagattagccaaatagtctgaatttccagaaaacaaggcagaatgatcattcccagaaacatttcccagaaaatgtttcccagaaaactagacagmatgatcattcaatggatcacagtgaagcaaaggacacaactttttattgtaccccttaattgtcaacaggagttaactgatttgttgtggtgctcagacttttttatacaggtgctagtgttttatcctatgtattttaactcattagtgcataaaggcaagccccatataatgaagtctcagggtatatgaaagtagctggcttcaaaataaaatttttgagtgcaaaaaaaaaaaaaaataaaaaaaaaaaaaa

SEQ ID NO: 1313 - DNA, 1894 bp, Homo sapiens
  misc_feature (1878)..(1878): n equals a,t,g, or c
ctctaatacgactcactatagggaaagctggtacgcctgcaggtaccggtccggaattcccgggtcgacccacgcgtccgggatgacactgggccccccatggacaagtctgatctgggccagaagcggacttcgggggctgtctgccaccaggaccccaggacctgcgaggagccagcctccagcggtgcccacatctggcccgatgacatcactaagtggccgatctgcacagagcaggccaggagcaaccacacaggcttcctgcacgtggactgcgagatcaagggccgcccctgctgcatcggcaccaagggcagctgtgagatcaccacccgggaatactgtgagttcatgcacggctatttccatgaggaagcaacactctgctcccaggtgcactgcttggacaaggtgtgtgggctgctgcccttcctcaaccctgaggtcccagatcagttctacaggctctggctgtctctcttcctacatgctggcgtggtgcactgcctcgtgtctgtggtctttcaaatgaccatcctgagggacctggagaagctggccggctggcaccgtatcgccatcatcttcatcctcagtggcatcacaggcaacctcgccagtgccatctttctcccataccgggcagaggtgggcccggccggctcacagttcggcctcctcgcctgcctcttcgtggagctcttccagagctggccgctgctggagaggccctggaaggccttcctcaacctctcggccatcgtgctcttcctgttcatctgtggcctcctgccctggatcgacaacatcgcccacatcttcggcttcctcagtggcctgctgctggccttcgccttcctgccctacatcaccttcggcaccagcgacaagtaccgcaagcgggcactcatcctggtgtcactgctggcctttgccggcctcttcgccgccctcgtgctgtggctgtacatctaccccattaactggccctggatcgagcacctcacctgcttccccttcaccagccgcttctgcgagaagtatgagctggaccaggtgctgcactgaccgctgggccacacggctgcccctcagccctgctggaacagggtctgcctgcgagggctgccctctgcagagcgctctctgtgtgccagagagccagagacccaagacagggcccgggctctggacctgggtgcccccctgccaggcgaggctgactccgcgtgagatggttggttaaggcggggtttttctggggcgtgaggcctgtgagatcctgacccaagctcaggcacacccaaggcacctgcctctctgagtcttgggtctcagttcctaatatcccgctccttgctgagaccatctcctggggcagggtccttttcttcccaggtcctcagcgctgcctctgctggtgccttctcccccactactactggagcgtgcccttgctggggacgtggctgtgccctcagttgcccccagggctgggtgcccaccatgccccttcctctttctcctcctacctctgccctgtgagcccatccataaggctctcagatgggacattgtgggaaaggctttggccatggtctgggggcagagaacaaggggggagacacaagtagacctcaggtagaacgacactgggcggagccaccccagggcctgctcccagggagtgctcgaggcgcatcaggcccgttttttaccagtttatatcacggtcttcatttttaaaagtaacgctaactttgtasggacgatgtctcatggattaaataatattctttatggcagtaaaaaaaaaaaaaaaaaaaaaaaaaaaaaaaaaaaaactcgagggggggcccggwacccaaatcgacnaatagtgagtcataaa

SEQ ID NO: 1314 - DNA, 736 bp, Homo sapiens
  misc_feature (1)..(1): n equals a,t,g, or c
  misc_feature (4)..(6): n equals a,t,g, or c
nttnnnatgmatcgccggctcgaaataaccctactaaagggaacaaaagctggagctccaccgcggtggcggccgctctagaactagtggatcccccgggctgcaggaattcggcacgagcaactcatggagcccccccgggcccatcgagtaccggactggctgaccccctagggttggcagtagcccctgaccctcagtatggccaacactaccggagagcctgaggaggtgagcggcgctctgtccccaccgtccgcatcagcttatgtgaagctggtactgctgggactgattatgtgcgtgagcctggcgggtaacgccatcttgtccctgctggtgctcaaggagcgtgccctgcacaaggctccttactacttcctgctggacctgtgcctggccgatggcatacgctctgccgtctgcttcccctttgtgctggcttctgtgcgccacggctcttcatggaccttcagtgcactcagctgcaagattgtggcctttatggccgtgctcttttgcttccatgcggccttcatgctgttctgcatcagcgtcacccgctacatggccatcgcccaccaccgcttctacgccaagcgcatgacactctggacatgcgcggctgtcatctgcatggcctgaccctgtctgtggccatggccttcccacctgtctttgacgtgggcacctycaagtttattcgggaggaggacaagtgcatctttgagcatcc

SEQ ID NO: 1315 - DNA, 1553 bp, Homo sapiens
cgcctgcaggtaccggtccggaattcccgggtcgacccackcgtcmkggcgaccgagcagaggcctttccacctggtggtgttcggcgcgtctggcttcaccggccagttcgtgaccgaggaggtggcccgggagcaggtggacccggagcggagctcccgcctgccctgggccgtggcgggccgctcccgggagaagctgcagcgggtgctggagaaggcggccctgaagctgggaagaccaacactgtcatctgaagttggaatcatcatctgtgatattgctaatccagcctcgcttgatgaaatggctaaacaggcaacagttgtcctcaattgcgtaggaccatatcggttttatggagaacctgtaataaaagcatgtattgaaaatggagccagttgtatcgacatcagtggagaacctcagtttctggaactaatgcaactgaagtatcatgagaaagctgcagacaaaggggtttatatcattggaagcagcggctttgactccattccagcagatctgggagtaatatataccagaaataaaatgaatggtactttgactgctgtggaaagtttcctgactatacattcaggacctgaggggttgagcattcatgatggtacctggaagtcagcaatttatggttttggagatcagagtaatttgagaaaactaagaaatgtatcaaatctgaaacctgtcccgctcattggtccaaaattgaagagaaggtggccaatttcttattgtcgggaactcaaaggttattccattccttttatgggatctgatgtgtctgttgtaaggaggactcaacgttacttgtatgaaaatttagaggaatcaccagttcagtatgctgcgtatgtaactgtgggaggcatcacctctgttattaagctgatgtttgcaggacttttctttttgttctttgtgaggtttggaattggaaggcaacttctcataaaattcccatggttcttctcctttggctatttttcaaaacaaggcccaacacaaaaacagattgatgctgcctcattcacgctgacattctttggtcaaggatacagccaaggcactggtacagataagaacaaaccaaatatcaaaatttgtactcaggtgaaaggaccagaggctggctatgtggctacccccatagctatggttcaggcagccatgactcttctaagtgatgcttctcatctgcctaaggcgggcggggtcttcacacctggagcagctttttccaaaacaaagttgattgacagactcaacaaacacggtattgagtttagtgttattagcagctctgaagtctaaacactggaagaattaactgaagtcataacgtgcgtgaattaacagcttctctatttgatatttgaaattcttctgtaagcctgtctgagtgtatgtggaaacgattgtcaaatctaaaatatctatatattaaaaagtaggaaattgtcctagcttaccctaaatttcaaaaaaaaaaaaaaaaacccgcaagggggggcccggtccccaatcccccc

SEQ ID NO: 1316 - DNA, 931 bp, Homo sapiens
ctactactactaaattcgcggccggtcgacgctggtgcacaggaaggatgaggaagaccaggctctgggggctgctgtggatgctctttgtctcagaactccgagctgcaactaaattaactgaggaaaagtatgaactgaaagaggggcagaccctggatgtgaaatgtgactacacgctagagaagtttgccagcagccagaaagcttggcagataataagggacggagagatgcccaagaccctggcatgcacagagaggccttcaaagaattcccatccagtccaagtggggaggatcatactagaagactaccatgatcatggtttactgcgcgtccgaatggtcaaccttcaagtggaagattctggactgtatcagtgtgtgatctaccagcctcccaaggagcctcacatgctgttcgatcgcatccgcttggtggtgaccaagggtttttcagggacccctggctccaatgagaattctacccagaatgtgtataagattcctcctaccaccactaaggccttgtgcccactctataccagccccagaactgtgacccaagctccacccaagtcaactgccgatgtctccactcctgactctgaaatcaaccttacaaatgtgacagatatcatcagggttccggtgttcaacattgtcattctcctggctggtggattcctgagtaagagcctggtcttctctgtcctgtttgctgtcacgctgaggtcatttgtaccctaggcccacgaacccacgagaatgtcctctgacttccagccacatccatctggcagttgtgccaagggaggagggaggaggtaaaaggcagggagttaataacatgaattaaatctgtaatcaccrgctaaaaaaaaaaaaaaaaaaaaaaaaaaaaaaaaaaaaaaaaaaaaaaaaaaaac

SEQ ID NO: 1317 - DNA, 2633 bp, Homo sapiens
gggcatccagagtacgggtcgagcccgggccatggagcccccctggggaggcggcaccagggagcctgggcgcccggggctccgccgcgaccccatcgggtagaccacagaagctccgggacccttccggcacctctggacagcccaggatgctgttggccaccctcctcctcctcctccttggaggcgctctggcccatccagaccggattatttttccaaatcatgcttgtgaggaccccccagcagtgctcttagaagtgcagggcaccttacagaggcccctggtccgggacagccgcacctcccctgccaactgcacctggctcatcctgggcagcaaggaacagactgtcaccatcaggttccagaagctacacctggcctgtggctcagagcgcttaaccctacgctcccctctccagccactgatctccctgtgtgaggcacctcccagccctctgcagctgcccgggggcaacgtcaccatcacttacagctatgctggggccagagcacccatgggccagggcttcctgctctcctacagccaagattggctgatgtgcctgcaggaagagtttcagtgcctgaaccaccgctgtgtatctgctgtccagcgctgtgatggggttgatgcctgtggcgatggctctgatgaagcaggttgcagctcagaccccttccctggcctgaccccaagacccgtcccctccctgccttgcaatgtcaccttggaggacttctatggggtcttctcctctcctggatatacacacctagcctcagtctcccacccccagtcctgccattggctgctggacccccatgatggccggcggctggccgtgcgcttcacagccctggacttgggctttggagatgcagtgcatgtgtatgacggccctgggccccctgagagctcccgactactgcgtagtctcacccacttcagcaatggcaaggctgtcactgtggagacactgtctggccaggctgttgtgtcctaccacacagttgcttggagcaatggtcgtggcttcaatgccacctaccatgtgcggggctattgcttgccttgggacagaccctgtggcttaggctctggcctgggagctggcgaaggcctaggtgagcgctgctacagtgaggcacagcgctgtgacggctcatgggactgtgctgacggcacagatgaggaggactgcccaggctgcccacctggacacttcccctgtggggctgctggcacctctggtgccacagcctgctacctgcctgctgaccgctgcaactaccagactttctgtgctgatggagcagatgagagacgctgtcggcattgccagcctggcaatttccgatgccgggacgagaagtgcgtgtatgagacgtgggtgtgcgatgggcagccagactgtgcggacggcagtgatgagtgggactgctcctatgttctgccccgcaaggtcattacagctgcagtcattggcagcctagtgtgcggcctgctcctggtcatcgccctgggctgcacctgcaagctctatgccattcgcacccaggagtacagcatctttgcccccctctcccggatggaggctgagattgtgcagcagcaggcacccccttcctacgggcagctcattgcccagggtgccatcccacctgtagaagactttcctacagagaatcctaatgataactcagtgctgggcaacctgcgttctctgctacagatcttacgccaggatatgactccaggaggtggcccaggtgcccgccgtcgtcagcggggccgcttgatgcgacgcctggtacgccgtctccgccgctggggcttgctccctcgaaccaacaccccggctcgggcctctgaggccagatcccaggtcacaccttctgctgctccccttgaggccctagatggtggcacaggtccagcccgtgagggcggggcagtgggtgggcaagatggggagcaggcacccccactgcccatcaaggctcccctcccatctgctagcacgtctccagcccccactactgtccctgaagccccagggccactgccctcactgcccctagagccatcactattgtctggagtggtgcaggccctgcgaggccgcctgttgcccagcctggggcccccaggaccaacccggagcccccctggaccccacacagcagtcctggccctggaagatgaggacgatgtgctactggtgccactggctgagccgggggtgtgggtagctgaggcagaggatgagccactgcttacctgaggggacctgggggctctactgaggcctctcccctgggggctctactcatagtggcacaaccttttagaggtgggtcagcctcccctccaccacttccttccctgtccctggatttcagggacttggtgggcctcccgttgaccctatgtagctgctataaagttaagtgtccctcaggcagggagagggctcacagagtctcctctgtacgtggccatggccagacaccccagtcccttcaccaccacctgctccccacgccaccaccatttgggtggctgtttttaaaaagtaaagttcttagaggatmawaaaaaaaaaaaaaaaaaaaaaaaaaaaagg

SEQ ID NO: 1318 - DNA, 5459 bp, Homo sapiens
  misc_feature (3960)..(3961): n equals a,t,g, or c
accaattcccttcctgggagttgcggcttccctcgctcggccccactcccgtttaccctttccccagctcccgccttagccaggggcttccccgcctgccgctagggctcgggccgaagcgccgctcagcgccagcctgccgctccccgggctccactttcactttcggtcctgggggarctargccggmggcagtggtggtggcggcggcgcaagggtgagggcggccccagaaccccaggtaggtagagcaagaagatggtgtttctgcccctcaaatggtcccttgcaaccatgtcatttctactttcctcactgttggctctcttaactgtgtccactccttcatggtgtcagagcactgaagcatctccaaaacgtagtgatgggacaccatttccttggaataaaatacgacttcctgagtacgtcatcccagttcattatgatctcttgatccatgcaaaccttaccacgctgaccttctggggaaccacgaaagtagaaatcacagccagtcagcccaccagcaccatcatcctgcatagtcaccacctgcagatatctagggccaccctcaggaagggagctggagagaggctatcggaagaacccctgcaggtcctggaacacccccctcaggagcaaattgcactgctggctcccgagcccctccttgtcgggctcccgtacacagttgtcattcactatgctggcaatctttcggagactttccacggattttacaaaagcacctacagaaccaaggaaggggaactgaggatactagcatcaacacaatttgaacccactgcagctagaatggcctttccctgctttgatgaacctgccttcaaagcaagtttctcaatcaaaattagaagagagccaaggcacctagccatctccaatatgccattggtgaaatctgtgactgttgctgaaggactcatagaagaccattttgatgtcactgtgaagatgagcacctatctggtggccttcatcatttcagattttgagtctgtcagcaagataaccaagagtggagtcaaggtttctgtttatgctgtgccagacaagatgaatcaagcagattatgcactggatgctgcggtgactcttctagaattttatgaggattatttcagcataccgtatcccctacccaaacaagatcttgctgctattcccgactttcagtctggtgctatggaaaactggggactgacaacatatagagaatctgctctgttgtttgatgcagaaaagtcttctgcatcaagtaagcttggcatcacaatgactgtggcccatgaactggcccaccagtggtttgggaacctggtcactatggaatggtggaatgatctttggctaaatgaaggatttgccaaatttatggagtttgtgtctgtcagtgtgacccatcctgaactgaaagttggagattatttctttggcaaatgttttgacgcaatggaggtagatgctttaaattcctcacaccctgtgtctacacctgtggaaaatcctgctcagatccgggagatgtttgatgatgtttcttatgataagggagcttgtattctgaatatgctaagggagtatcttagcgctgacgcatttaaaagtggtattgtacagtatctccagaagcatagctataaaaatacaaaaaacgaggacctgtgggatagtatggcaagtatttgccctacagatggtgtaaaagggatggatggcttttgctctagaagtcaacattcatcttcatcctcacattggcatcaggaaggggtggatgtgaaaaccatgatgaacacttggacactgcagaggggttttcccctaataaccatcacagtgagggggaggaatgtacacatgaagcaagagcactacatgaagggctctgacggcgccccggacactgggtacctgtggcatgttccattgacattcatcaccagcaaatccgacatggtccatcgatttttgctaaaaacaaaaacagatgtgctcatcctcccagaagaggtggaatggatcaaatttaatgtgggcatgaatggctattacattgtgcattacgaggatgatggatgggactctttgactggccttttaaaaggaacacacacagcagtcagcagtaatgatcgggcaagtctcattaacaatgcatttcagctcgtcagcattgggaagctgtccattgaaaaggccttggatttatccctgtacttgaaacatgaaactgaaattatgcccgtgtttcaaggtttgaatgagctgattcctatgtataagttaatggagaaaagagatatgaatgaagtggaaactcaattcaaggccttcctcatcaggctgctaagggacctcattgataagcagacatggacagacgagggctcagtctcagagcgaatgctgcggagtgaactactactcctcgcctgtgtgcacaactatcagccgtgcgtacagagggcagaaggctatttcagaaagtggaaggaatccaatggaaacttgagcctgcctgtcgacgtgaccttggcagtgtttgctgtgggggcccagagcacagaaggctgggattttctttatagtaaatatcagttttctttgtccagtactgagaaaagccaaattgaatttgccctctgcagaacccaaaataaggaaaagcttcaatggctactagatgaaagctttaagggagataaaataaaaactcaggagtttccacaaattcttacactcattggcaggaacccagtaggatacccactggcctggcaatttctgaggaaaaactggaacaaacttgtacaaaagtttgaacttggctcatcttccatagcccacatggtaatgggtacaacaaatcaattctccacaagaacacggcttgaagaggtaaaaggattcttcagctctttgaaagaaaatggttctcagctccgttgtgtccaacagacaattgaaaccattgaagaaaacatcggttggatggataagaattttgataaaatcagagtgtggctgcaaagtgaaaagcttgaacgtatgtaaaaattcctcccttgccaggttcctgttatctctaatcaccaacattttgttgagtgtattttcaaactagagatggctgttttggctccaactggagatacttttttcccttcaactcattttttgactatccctgtgaaaagaatagctgttagtttttcatgaatgggctttttcatgaatgggctatcgctaccatgtgttttgttcatcacaggtgttgccctgcaacgtaaacccaagtgttgggttccctgccacagaagaataaagtaccttattcttctcattttatagtttatgcttaagcacccgtgtccaaaaccctgtaccccatgtttatmattcataaactgtttcatcagtctcctcgaaagactctgaatagtcgactactgaacaatgaacacctggatctgagactaagccggacgatgactgggttaaagctctcccggctcacccctccagacccgctgcccatccctcttccttgctccatgcccaggggctgacttgtaaaggccaagtcatcaagctttcttgccctttggatgttggtcagtggggagccggagagctggagctggggtcggaggaggtagtaggtggaggtgttcttccctgattcccttgcgggatgcctcgggctggcctcccctgagggtcttagctccgagaggggaccctcttttccacacagccttctccacctctggattttggtaactgctccctcctcatcccttcaggattagtggcctcagtgggagtctggcttttactagtcctggcggacttgtggtttctacataatgtgctcgcacttttgcaaaaaatctttttatagaaccctcctcagataattctgagtgnntcatctatttccctgactggtacagtatctcttctgaaaaagcagagtgcattcaagtctgtaggaaaacccttttcttagggaggtgattttttttctctctctgcttcttatttggcctactttacaatttctaactaactagttattggcatttactgacagtaaattattgcagtcaccaataaatgatagtacattgtgaaacaaaatatttgctcatattagcaaataggacattctttggctttgaagtctttcttttgtgaagacttcacacacggttgcttcagcacacagttgctgctcaggttttatgtatagatgataataatagaaagcacagtttactaacatggtaaaccaacggagttcaagtcaagtcagttaataccctaagaattagattttatttcttattctgaaaacttgctacacagggacttatctaacccatagtgtgctctgttgctgacttgattcaagttgcagcgtgttttgcgctgactctaaggtgcggaaatcctcacacctggcaaaggagaattcaaactgaactttttgaatataaggcaaaaacttcaagataagggaatatgattgatgattggtacgaaaaatgtcaaaatgtgttcccctaatacacgacaaaatagagtgacttctggacataaatctgccatttattaaaccattcactacaacaaataaataggtataaaagtggaattggaatttttatacttatttgttgtagtgaatggtttaataaaaatagaaatcactggtaatttccaccccaaactaaactatttcccttcttttaaaaaaatacacaaccaagattttaatgtaaaatattttgctttaattgtattttatgccttgattaatgaaacatggaaatattgattttcagttttggtcacctgaggaacctatctttgtttgcttttggaaaagcccattttctaaacagatacaatattgccacaacaatgtgcagaaacctttttgataataaaaaattgttctttgcctctaagtggatatttgcaattattttctctctcctaactagactgtaaaaagggctgctttagatcctgtagcttactccagttattagttattaacaaacacccaagtctcgaagatatttctaattaaaaaagaaggcatattcagagttctttttaaataaatgttgtttacttttataggcatctttaaacttctggattttggtatgccatttaaaaatacttccagatacacatggaaattagtaatactgcagccgtatccttgcaaacacatctgtcagtgtmaaaggtttcaaggtttttcttaaaaaaagaaaacaaaaaagcaarcacctatastgcccaawtggggtggttggtcactggttagaagtccctcgggaaagtgttgtgcctgtctcgttgccgcctaagaatagatagtgaccatttccgtggatagggccagcatt

SEQ ID NO: 1319 - DNA, 1822 bp, Homo sapiens
ggctggcggcgggtccgggtccgctgcctggcgctgcgggcggcgggccatggtggtttggattgagccgggcccggccggggcgccgagtcggagggggtggcagtgagcggcggcagaggctacggggctcggtttggctgactggggagtcggcaggcggcaggaaccatgcgaggccagcggagcctgctgctgggcccggcccgcctctgcctccgcctccttctgctgctgggttacaggcgccgctgtccacctctactccggggtctagtacagcgctggcgctacggcaaggtctgcctgcgctccctgctctacaactcctttgggggcagtgacaccgctgttgatgctgcctttragcctgtctactggctggtagacaacgtgatccgctggtttggagtggtgttcgtggtcctggtgatcgtgctgacaggctccattgtagctatcgcctacctgtgtgtcctgcctctcatcctccgaacctactcagtgccacgactctgctggcatttcttctatagccactggaatctgatcctgattgtcttccactactaccaggccatcaccactccgcctgggtacccaccccagggcaggaatgatatcgccaccgtctccatctgtaagaagtgcatttaccccaagccagcccgaacacaccactgcagcatctgcaacaggtgtgtgctgaagatggatcaccactgcccctggctaaacaattgtgtgggccactataaccatcggtacttcttctctttctgctttttcatgactctgggctgtgtctactgcagctatggaagttgggaccttttccgggaggcttatgctgccattgagaaaatgaaacagctcgacaagaacaaactacaggcggttgccaaccagacttatcaccagaccccaccacccaccttctcctttcgagaaaggatgactcacaagagtcttgtctacctctggttcctgtgcagttctgtggcacttgccctgggtgccctaactgtatggcatgctgttctcatcagtcgaggtgagactagcatcgaaaggcacatcaacaagaaggagagacgtcggctacaggccaagggcagagtatttaggaatccttacaactacggctgcttggacaactggaaggtattcctgggtgtggatacaggaaggcactggcttactcgggtgctcttaccttctagtcacttgccccatgggaatggaatgagctgggagccccctccctgggtgactgctcactcagcctctgtgatggcagtgtgagctggactgtgtcagccacgactcgagcactcattctgctccctatgttatttcaagggcctccaagggcagcttttctcagaatccttgatcaaaaagagccagtgggcctgccttagggtaccatgcaggacaattcaaggaccagcctttttaccactgcagaagaaagacacaatgtggagaaatcttaggactgacatccctttactcaggcaaacagaagttccaaccccagactaggggtcaggcagctagctacctaccttgcccagtgctgacccggacctcctccaggatacagcactggagttggccaccacctcttctacttgctgtctgaaaaaacacctgactagtacagctgagatcttggcttctcaacagggcaaagataccaggcctgctgctgaggtcactgccacttctcacatgctgcttaagggagcacaaataaaggtattcgatttttaaagawaaaaaaaaaaaaaaaaatttgggggggggggccccgtta

SEQ ID NO: 1320 - DNA, 3681 bp, Homo sapiens
  misc_feature (5)..(5): n equals a,t,g, or c
  misc_feature (7)..(7): n equals a,t,g, or c
  misc_feature (9)..(9): n equals a,t,g, or c
  misc_feature (31)..(31): n equals a,t,g, or c
gaacngncnctcccctttagtttggacgccngcagccaccggtccggaattcccgggtcgacccacgcgtccgccctcctctcctgtcctgcctccggccccgtgcctgctcctgaggactctctggccatctccccttagaggtggacccctgcgcccacggccatgggggctgctcccctcatgccaactgtaccaaggtggcacctgggcagcggacatgcacctgccaggatggctacatgggcgacggggagctgtgccaggaaattaacagctgtctcatccaccacgggggctgccacattcacgccgagtgcatctccactggcccccagcaggtctcctgcagctgccgtgagggttacagcggggatggcatccggacctgcgagctcctggacccctgctctaagaacaatggaggatgcagcccatatgccacctgcaaaagcacaggggatggccagaggacatgtacctgcgacacagcccacaccgtgggggacggcctcacctgccgtgcccgagtcggcctggagctcctgagggataagcatgcctcattcttcagcctccgcctcctggaatataaggagctcaagggcgatgggcctttcaccatcttcgtgccgcacgcagatctaatgagcaacctgtcgcaggatgagctggcccggattcgtgcgcatcgccagctggtgtttcgctaccacgtggttggctgtcggcggctgcggagcgaggacctgctggagcaggggtacgccacggccctctcagggcacccactgcgcttcagcgagagggagggcagcatatacctcaatgacttcgcgcgcgtggtgagcagcgaccatgaggccgtgaacggcatcctgcacttcattgaccgtgtcctgctgccccccgaggcgctgcactgggagcctgatgatgctcccatcccgaggagaaatgtcaccgccgccgcccagggcttcggttacaagatcttcagcggcctcctgaaggtggccggcctcctgcccctgcttcgagaggcatcccataggcccttcacaatgctgtggcccacagacgccgcctttcgagctctgcctccggatcgccaggcctggctgtaccatgaggaccaccgtgacaagctagcagccattctgcggggccacatgattcgcaatgtcgaggccttggcatctgacctgcccaacctgggcccacttcgaaccatgcatgggacccccatctctttctcctgcagccgaacgcggcccggtgagctcatggtgggtgaggatgatgctcgcattgtgcagcggcacttgccctttgagggtggcctggcctatggcatcgaccagctgctggagccacctggccttggtgctcgctgtgaccactttgagacccggcccctgcgactgaacacctgcagcatctgtgggctggagccaccctgtcctgaggggtcacaggagcagggcagccctgaggcctgctggcgcttctacccgaagttctggacgtcccctccgctgcactctttgggattacgcagcgtctgggtccaccccagcctttggggtaggccccaaggcctgggcaggggctgccaccgcaattgtgtcaccaccacctggaagcccagctgctgccctggtcactatggcagtgagtgccaagcttgccctggcggccccagcagcccttgtagtgaccgtggcgtgtgcatggacggcatgagtggcagtgggcagtgtctgtgccgttcaggttttgctgggacagcctgtgaactctgtgctcctggtgcctttgggccccattgtcaagcctgccgctgcactgtgcatggccgctgtgatgagggccttgggggctctggctcctgcttctgtgatgaaggctggactgggccacgctgtgaggtgcaactggagctgcagcctgtgtgtaccccaccctgtgcacccgaggctgtgtgccgtgcaggcaacagctgtgagtgcagcctgggctatgaaggggatggccgygtgtgtacagtggcagacctgtgccaggacgggcatggtggctgcagtgagcacgccaactgtagccaggtaggaacaatggtcacttgtacctgcctgcccgactacgagggtgatggctggagctgccgggcccgcaacccctgcacagatggccaccgcgggggctgcagcgagcacgccaactgcttgagcaccggcctgaacacacggcgctgtgagtgccacgcaggctacgtaggcgatggactgcagtgtctggaggagtcggaaccacctgtggaccgctgcttgggccagccaccgccctgccactcagatgccatgtgcactgacctgcacttccaggagaaacgggctggcgttttccacctccaggccaccagcggcccttatggtctgaacttttcggaggctgaggcggcatgcgaagcacagggagccgtccttgcttcattccctcagctctctgctgcccagcagctgggcttccacctgtgcctcatgggctggctggccaatggctccactgcccaccctgtggttttccctgtggcggactgtggcaatggtcgggtgggcatagtcagcctgggtgcccgcaagaacctctcagaacgctgggatgcctactgcttccgtgtgcaagatgtggcctgccgatgccgaaatggcttcgtgggtgacgggatcagcacgtgcaatgggaagctgctggatgtgctggctgccactgccaacttctccaccttctatgggatgctattgggctatgccaatgccacccagcggggtctcgacttcctggacttcctggatgatgagctcacgtataagacactcttcgtccctgtcaatgaaggctttgtggacaacatgacgctgagtggcccagacttggagctgcatgcctccaacgccaccctcctaagtgccaacgccagccaggggaagttgcttccggcccactcaggcctcagcctcatcatcagtgacgcaggccctgacaacagttcctgggcccctgtggccccagggacagttgtggttagccgtatcattgtgtgggacatcatggccttcaatggcatcatccatgctctggccagccccctcctggcacccccacagccccaggcagtgctggcgcctgaagccccacctgtggcggcaggcgtgggggctgtgcttgccgctggagcactgcttggcttggtggccggagctctctacctccgtgcccgaggcaagcccatgggctttggcttctctgccttccaggcggaagatgatgctgatgacgacttctcaccgtggcaagaagggaccaaccccaccctggtctctgtccccaaccctgtctttggcagcgacaccttttgtgaacccttcgatgactcactgctggaggaggacttccctgacacccagaggatcctcacagtcaagtgacgaggctggggctgaaagcagaagcatgcacagggaggagaccacttttattgcttgtctgggtggatggggcaggaggggctgagggcctgtcccagacaataaaggtgccctcagcggatgtgggccatgtcaccaaraaaaaaaaaaaaaaactcgagggggggcccgtaccsaatcccctatagta

SEQ ID NO: 1321 - DNA, 457 bp, Homo sapiens
cgggtcgacccacgcgtccggctgggcatcatcctcatcggctacttcaccctagtgcccgccatccaggagttctgtctctttgctgtcgtggggctggtgtctgacttcttccttcagatgctgtttttcaccactgtcctgtccattgacattcgccggatggagctagcagacctgaacaagcgactgccccctgaggcctgcctgccctcagccaagccagtggggcagccaacgcgctacgagcggcagctggctgtgaggccgtccacaccccacaccatcacgttgcagccgtcttccttccgaaacctgcggctccccaagargctgcgtgttgtctacttcctggcccgcacccgcctggcacagcgcctcatcatggctggcaccgttgtctggattggcatcctggtatacacagacccagcagggctgcgcaactacctcgctg

SEQ ID NO: 1322 - DNA, 4005 bp, Homo sapiens
tattatgaaagattggcttggtggttctgaagtcaatccactatggacagcacttctgtttttattgtgtcactctgggtccacttctggaagccataatttaggtgcacaacagaccagtgcaagatcagcttctctttcttcagctgctacaacaggactgactactcaacagcgcacagcaattgagaatgcaactgttgcgttctttctacagtgcatttcatgccatcctaataatcaaaagctgatggcacaggttctttgtgaactatttcagacatctcctcaaagagggaaccttccaacatctgggaacatttcagggtttatacgaagattatttttacagttgatgctggaagatgagaaagtgacaatgtttcttcagtctccatgtccactgtacaaaggtagaattaatgctactagccacgtcatccagcatccaatgtatggagcaggccacaaattccgtactcttcatttgccagtctcaacaacattatcagatgttcttgacagagtgtcagatactccaagtatcacagctaaattaattagtgaacaaaaagatgacaaagaaaagaaaaaccatgaagagaaagaaaaagttaaagcggaaaatggatttcaagacaattacagtgttgttgttgcctctgggctgaagtctcaatctaaacgtgctgtgtcagctacaccacctcgcccaccatccaggagggggaggacaatacctgataaaataggaagtacttcaggagcagaggctgccaacaaaataattactgtcccagtgtttcacctgtttcacaaactcttggcaggccagccattgccagctgaaatgacacttgcccagcttttaactctcctatatgaccgaaaacttcctcagggttaccgctcaatagatctgactgttaaattgggatcaagagttataacagaccccagtctatcaaaaacagattcttataaaagactacaccctgaaaaagatcatggagacttacttgctagctgtccagaagatgaggctctcactccaggtgatgaatgcatggatgggatactggatgaatctttgcttgaaacctgtccaattcagtcaccattacaagtttttgcaggaatgggtggactggctcttattgctgaaagactacccatgctatatccagaagtaattcaacaggtgagtgctccagttgtaacatctaccactcaggaaaagccgaaggatagcgatcagtttgaatgggtgaccattgaacagtcaggggagttagtttatgaagcaccagaaactgttgcggctgaacctccacctatcaagtcagcagtacagaccatgtctcccatacctgcccattctttggctgcttttggattatttcttcgtcttccgggctatgcggaagtgctactgaaagagagaaaacatgcccagtgccttcttcgattggtattgggagtgacagatgatggagaaggaagtcatattcttcaatctccatcagccaatgtgcttccaacccttcctttccacgtccttcgtagcttgtttagcactacacctttgacaactgatgatggtgtacttctaaggcggatggcattggaaattggagccttacacctcattcttgtctgtctctctgctttgagccaccattccccacgagttccaaactctagcgtgaatcaaactgagccacaggtgtcaagctctcataaccctacatcaacagaagaacaacagttatattgggccaaagggactggctttggaacaggctctacagcttctgggtgggatgtggaacaagccttaactaagcaaaggctggaagaggaacatgttacctgccttctgcaggttcttgccagttacataaatcccgtcagtagtgcggtaaatggagaagctcagtcatctcatgagactagagggcagaacagtaatgcccttccttctgtacttctcgagcttctcagtcagtcctgcctcatcccagccatgtcatcttatctacsaamygwttmagatctaaaagggaaaatgttaaaacaggagtaaaaccagatgcgtctgatcaagaaccagaaggacttactcttttggtaccagacatccaaaagactgctgagatagtttatgcagccaccaccagtttgcggcaagcaaatcaggaaaaaaaactgggtgaatactccaagaaggcggctatgaaacccaaacctttgtcagtattaaagtcacttgaagaaaaatatgtggctgttatgaagaaattacagtttgatacgtttgaaatggtttctgaagatgaagatgggaaattgggatttaaagtaaattaccactacatgtctcaggtgaaaaatgctaatgatgcgaacagtgctgccagagctcgccgccttgcccaggaagctgtgacactttcaacctcactgcctctgtcttcatcctctagtgtgtttgtacgctgtgatgaggagcgacttgatatcatgaaggwtctaataactggtccagcggacaccccttatgcaaatsgctgctttgagtttgatgtgtattttcctcaagattatcccagttcaccccctcttgtgaatctagagacaactggtggtcatagcgtgcgattcaatccaaacctttataatgatggcaaggtttgtttaagcatcttaaacacgtggcatggaagaccagaagagaagtggaatcctcagacctcaagctttttgcaagtgttggtgtctgtccagtcccttatattagtagctgagccttattttaatgaaccgggatatgaacggtctagaggcactcccagtggcacacagagttctcgagaatatgatggaaacattcgacaagcaacagttaagtgggcaatgctagaacaaatcagaaacccttcaccatgttttaaagaggtaatacacaaacatttttacttgaaaagagttgagataatggcccaatgtgaggagtggattgcggatatccagcagtacagcagtgataagcgggtaggcaggactatgtctcaccatgcagcagctctcaagcgtcacactgctcagctccgcgaagagttgctgaaacttccctgccctgaaggcttggatcctgacactgacgatgccccagaggtgtgcagagccacaacaggtgctgaggagactctaatgcatgatcaggttaaacccagcagcagcaaagaactccccagtgacttccagttatgagctgcattgatgtggacttcatagacacaaaggcttcgaagcacaagccaaatatgtcaatatttgtatgtaagaaactaattatgtaataggtaatgaaactgaaactatactatgcccttaaggagatccagtttaattcaaggtgatcttttatttacctgtacaggagtgtaaacttttttgtgcttttatttttcaattgtgagaaccactgattggtatgttcaacaaatttgtgtatacaaagaaatggataaatcactgctatataagggaaactaccttaggaaagaatgtttactgaatgtttattttatttttttttttttttactatagagtgaggggttgttaacaaagaatatatattggtcattcttacaactactatttaaagtcagcaacttttcactgaatttgatagattttatgtttggccatatcttcatgctcacatttgatttctgaagacctcctacatacacttcaataaaagttaaatggacatactccctcttttttgatttactggtacatttttaaaataataaatctgccataaaatgcattatatctggagacttgcacttgtatggatgaatttattacattcaacatatttaattttatgccttctaattctaagatgcagaaaaaaataaatgaacatgattttattctawraaaaaaaaaaaaaaaaaaaaaaaaaaaaaaaaaaaaaaaaactcga

SEQ ID NO: 1323 - DNA, 765 bp, Homo sapiens
gggatcaggcctccaggtgggagccccasgagcagaggaagaggtggaagagtcctcaccactgcaagagccaccaagccaggcagcaggcaccacccctggtccagaccctaaggcctatcagcttctatcagcccgcagtgcctgcctgctgggcctgttggccgccaccaacgcgctgaccaatggcgtgctgcctgccgtgcagagcttttcctgcttaccctacgggcgtctggcctaccacctggctgtggtgctgggcagtgctgccaatcccctggcctgcttcctggccatgggtgtgctgtgcaggtccttggcagggctgggcggcctctctctgctgggcgtgttctgtgggggctacctgatggcgctggcagtcctgagcccctgcccgcccctggtgggcacctcggcgggggtggtcctcgtggtgctgtcgtgggtgctgtgtcttggcgtgttctcctacgtgaaggtggcagccagctccctgctgcatggcgggggccggccggcattgctggcagccggcgtggccatccaggtgggctctctgctcggcgctgttgctatgttccccccgaccagcatctatcacgtgttccacagcagaaaggactgtgcagacccctgtgactyctgagcctkggcaggtggggaccccgctycccaacacctgtytttcctcaatgctgccggcatgcctgagtgcctgcagcccaggaggcccgacaccggtacactcgtggacaccta

SEQ ID NO: 1324 - DNA, 1892 bp, Homo sapiens
ccctgcctgccggcggtcccgctggctagawgaagtcttcacttcccaggagagccaaagcgtgtctggccctaggtgggaaaagaactggctgtgacctttgccctgacctggaagggcccagccttgggctgaatggcagcacccacgcccgcccgtccggtgctgacccacctgctggtggctctcttcggcatgggctcctgggctgcggtcaatgggatctgggtggagctacctgtggtggtcaaagagcttccagagggttggagcctcccctcttacgtctctgtgcttgtggctctggggaacctgggtctgctggtggtgaccctctggaggaggctggccccaggaaaggacgagcaggtccccatccgggtggtgcaggtgctgggcatggtgggcacagccctgctggcctctctgtggcaccatgtggccccagtggcaggacagttgcattctgtggccttcttagcactggcctttgtgctggcactggcatgctgtgcctcgaatgtcactttcctgcccttcttgagccacctgccacctcgcttcttacggtcattcttcctgggtcaaggcctgagtgccctgctgccctgcgtgctggccctagtgcagggtgtgggccgcctcgagtgcccgccagcccccatcaacggcacccctggccccccgctcgacttccttgagcgttttcccgccagcaccttcttctgggcactgactgcccttctggtcgcttcagctgctgccttccarggtcttctgctgctgttgccgccaccaccatctgtacccacaggggagttaggatcaggcctccaggtgggagccccaggagcagaggaagaggtggaagagtcctcaccactgcaagagccaccaagccaggcagcaggcaccacccctggtccagaccctaaggcctatcagcttctatcagcccgcagtgcctgcctgctgggcctgttggccgccaccaacgcgctgaccaatggcgtgctgcctgccgtgcagagcttttcctgcttaccctacgggcgtctggcctaccacctggctgtggtgctgggcagtgctgccaatcccctggcctgcttcctggccatgggtgtgctgtgcaggtacacaaggacccccagcccctgtgcgggtggaactcagggctgggagccaggtcctggcgcagtcagccctgacattctgctcgctcactgcaggtccttggcagggctgggcggcctctctctgctgggcgtgttctgtgggggctacctgatggcgctggcagtcctgagcccctgcccgcccctggtgggcacctcggcgggggtggtcctcgtggtgctgtcgtgggtgctgtgtcttggcgtgttctcctacgtgaaggtggcagccagctccctgctgcatggcgggggccggccggcattgctggcagccggcgtggccatccaggtgggctctctgctcggcgctgttgctatgttccccccgaccagcatctatcacgtgttccacagcagaaaggactgtgcagacccctgtgactcctgagcctgggcaggtggggaccccgctccccaacacctgtctttccctcaatgctgccaccatgcctgagtgcctgcagcccaggaggcccgcacaccggtacactcgtggacacctacacactccataggagatcctggctttccagggtgggcaagggcaaggagcaggcttggagccagggaccagtgggggctgtagggtaagcccctgagcctgggacctacatgtggtttgcgtaataaaacatttgtatttaaaaaaaaaaaaaaaaaaaaaaaaaaaaaaaaaaaaaaaaaaaaaaaaaaaaaaaaaaaagggcggcc

SEQ ID NO: 1325 - DNA, 1186 bp, Homo sapiens
gcggacgcgtgggcagcccgggcggctgcccttgggtgctcccttccctgcccgacacccagaccgaccttgaccgcccacctggcaggagcaggacaggacggccggacgcggccatggccgagctcccggggccctttctctgcggggccctgctaggcttcctgtgcctgagtgggctggccgtggaggtgaaggtacccacagagccgctgagcacgcccctggggaagacagccgagctgacctgcacctacagcacgtcggtgggagacagcttcgccctggagtggagctttgtgcagcctgggaaacccatctctgagtcccatccaatcctgtacttcaccaatggccatctgtatccaactggttctaagtcaaagcgggtcagcctgcttcagaacccccccacagtgggggtggccacactgaaactgactgacgtccacccctcagatactggaacctacctctgccaagtcaacaacccaccagatttctacaccaatgggttggggctaatcaaccttactgtgctggttccccccagtaatcccttatgcagtcagagtggacaaacctctgtgggaggctctactgcactgagatgcagctcttccgagggggctcctaagccagtgtacaactgggtgcgtcttggaacttttcctacaccttctcctggcagcatggttcaagatgaggtgtctggccagctcattctcaccaacctctccctgacctcctcgggcacctaccgctgtgtggccaccaaccagatgggcagtgcatcctgtgagctgaccctctctgtgaccgaaccctcccaaggccgagtggccggagctctgattggggtgctcctgggcgtgctgttgctgtcagttgctgcgttctgcctggtcaggttccagaaagagagggggaagaagcccaaggagacatatgggggtagtgaccttcgggaggatgccatcgctcctgggatctctgagcacacttgtatgagggctgattctagcaaggggttcctggaaagaccctcgtctgccagcaccgtgacgaccaccaagtccaagctccctatggtcgtgtgacttctcccgatccctgagggcggtgagggggaatatcaataattaaagtctgtgggtaccaaaaaaaaaaaaaaaaaagtcgacgc

SEQ ID NO: 1326 - DNA, 1467 bp, Homo sapiens
  misc_feature (1434)..(1434): n equals a,t,g, or c
  misc_feature (1440)..(1440): n equals a,t,g, or c
  misc_feature (1460)..(1460): n equals a,t,g, or c
  misc_feature (1464)..(1464): n equals a,t,g, or c
  misc_feature (1467)..(1467): n equals a,t,g, or c
gctgagctataagacaacaggactgaacagggagccaactgtttctttgaacagtaaatcaggaacaccaatggaccaaaatgaacacagtcactggggaccacatgcaaagggccaatgtgccagcagatctgagctgagaatcatcctggtgggcaaaacaggaactggcaaaagtgctgcagggaacagcatcctcaggaagcaagcatttgaatcgaagctgggttcccagaccttgactaagacttgcagcaaaagtcagggaagctggggaaatagagagattgtcattattgacacaccagatatgttttcttggaaggaccactgtgaagctctgtacaaagaggtgcagaggtgctacttgctgtctgcaccaggaccccatgtgctgctcctggtgactcagctgggccgctatacctcacaggaccagcaggctgcacagarggtgaaggagatctttggaaaggatgccatgggacacacaattgtcctctttacccacaaggaagacctcaatggtggctccctgatggattacatgcacgactcagataacaaagccctaagcaagctggtggcagmatgtggtgggcgaatctgtgcctttaataaccgtgctkaagggagcaatcaggatgaccaagtgaaggaactaatggactgtattgaggatctgttgatggagaaaaatggtgatcactataccaatgggttgtacagcctaatacagaggtctaaatgtggacctgtgggatcagatgaaagagtaaaggaattcaaacagagccttataaagtacatggaaactcaaagaagttacacagccttggctraagcaaactgcctaaaaggagccttaatcaaaacacaactgtgtgttttattttgtattcagttgtttctcagattgataattctgtggctttgcatactgcacagcatgtgcaatttgttttgttgcttactctttagtatgtgcaatttattctgcagtttgctgtttattatacccaaaaagttaatgatatttttgagaacagttattagactagaacgcaagactcctaggttatagttacagatcccagttattatttactcactatcatttagtgggtgaatcacagtaatttccctgtaaaatgtggtacctgaagtcatatttgagattctatgaaatgtttaaatctkaacatcactccaattattaatgaaccaaatcatacgataagttactgtttgcattgaaatataatatcaaagccttttgaaatctgtaaacataaaattcctctcattttcaaatatctaaagccagttttatgttcctaaaatctcattttcttctttctagtactactatttctactgaatataatgaaaatggcaataaaataatattacataaactgtaaaaaaaaamanaaaaanaaaaaaaaaaggggggcccntttnaan

SEQ ID NO: 1327 - DNA, 638 bp, Homo sapiens
  misc_feature (386)..(386): n equals a,t,g, or c
  misc_feature (566)..(566): n equals a,t,g, or c
  misc_feature (610)..(610): n equals a,t,g, or c
tacgaccgacgagccggtgtcgtggtcgcggtacctgttccaacacggctcgcgggcccgtgccggctccggtccccggcgcggctgtccgagcccctgcggcgggcggacgatggtgtggcggaacacgcaggacgcggcggcmgcggcggcgggcatgaaggaggatggaagggcaggacgaggtgtcggcgcgggagcagcacttccacagccaagtgcgggagtccacgatatgtttccttctttttgccattctctacgttgtttcctacttcatcatcacaagatacaagagaaaatcagatgaacaagaagatgaagatgccatcgtcaacaggatttcgttgtttttgagcacgttcactctcgcagtgtcagctggngctgttttgcttttacccttctcaatcatcagcaatgaaatcctgctttcttttcctcagaactactatattcagtggctaaatggctccctgattcatggtttgtggaatcttgcttccttttttccaacctttggttatttgtattgatgccctttgcctttttctttctggaatcanaaggctttgctggcctgaaaaagggaatccgacccgcattttanagactttggcatgcttcttcttcttgcg

SEQ ID NO: 1328 - DNA, 1052 bp, Homo sapiens
  misc_feature (5)..(5): n equals a,t,g, or c
  misc_feature (7)..(7): n equals a,t,g, or c
  misc_feature (19)..(19): n equals a,t,g, or c
aaacncntcactaaagggntcaaaagctggagctccaccgcggtggcaggccgctctagaactagtggatcccccgggctgcaggaattcggcacgagggcttaggacccccagctccgacgtaagtccctctcgcgcgccacctccatccgctgcccctctgccggcttaggacccccagctccgacatgtcgccctctggtcgcctgtgtcttctcaccatcgttggcctgattctccccaccagaggacagacgttgaaagataccacgtccagttcttcagcagactcaactatcatggacattcaggtcccgacacgagccccagatgcagtctacacagaactccagcccacctctccaaccccaacctggcctgctgatgaaacaccacaaccccagacccagacccagcaactggaaggaacggatgggcctctagtgacagatccagagacacacaagagcaccaaagcagctcatcccactgatgacaccacgacgctctctgagagaccatccccaagcacagacgtccagacagacccccagaccctcaagccatctggttttcatgaggatgaccccttcttctatgatgaacacaccctccggaaacgggggctgttggtcgcagctgtgctgttcatcacaggcatcatcatcctcaccagtggcaagtgcaggcagctgtcccggttatgccggaatcattgcaggtgagtccatcagaaacaggagctgacaaccygctgggcacccgaagaccaagccccctgccagctcaccgtgcccagcctcctgcatcccctcgaagagcctggccagagagggaagacacagatgatgaagctggagccagggctgccggtccgagtctcctacctcccccaaccctgcccgcccctgaaggctacctggcgccttgggggctgtccctcaagttatctcctctgytaagacaaaaagtaaagcactgtggtctttgmaaaaaaaaaaaaaaaaaaaaaaaaaaaaaaaaaaaaaaaaaaaaaaaaaaaaaaactcgag

SEQ ID NO: 1329 - DNA, 2197 bp, Homo sapiens
agcccgggtccacagccgcactcackcgyccgctctccgccaccgccaccactgcggccaccgccaatgaaacgcctcccgctcctagtggttttttccactttgttgaattgttcctatactcaaaattgcaccaagacaccttgtctcccaaatgcaaaatgtgaaatacgcaatggaattgaagcctgctattgcaacatgggattttcaggaaatggtgtcacaatttgtgaagatgataatgaatgtggaaatttaactcagtcctgtggcgaaaatgctaattgcactaacacagaaggaagttattattgtatgtgtgtacctggcttcagatccagcagtaaccaagacaggtttatcactaatgatggaaccgtctgtatagaaaatgtgaatgcaaactgccatttagataatgtctgtatagctgcaaatattaataaaactttaacaaaaatcagatccataaaagaacctgtggctttgctacaagaagtctatagaaattctgtgacagatctttcaccaacagatataattacatatatagaaatattagctgaatcatcttcattactaggttacaagaacaacactatctcagccaaggacaccctttctaactcaactcttactgaatttgtaaaaaccgtgaataattttgttcaaagggatacatttgtagtttgggacaagttatctgtgaatcataggagaacacatcttacaaaactcatgcacactgttgaacaagctactttaaggatatcccagagcttccaaaagaccacagagtttgatacaaattcaacggatatagctctcaaagttttcttttttgattcatataacatgaaacatattcatcctcatatgaatatggatggagactacataaatatatttccaaagagaaaagctgcatatgattcaaatggcaatgttgcagttgcatttttatattataagagtattggtcctttgctttcatcatctgacaacttcttattgaaacctcaaaattatgataattctgaagaggaggaaagagtcatatcttcagtaatttcagtctcaatgagctcaaacccacccacattatatgaacttgaaaaaataacatttacattaagtcatcgaaaggtcacagataggtataggagtctatgtgcattttggaattactcacctgataccatgaatggcagctggtcttcagagggctgtgagctgacatactcaaatgagacccacacctcatgccgctgtaatcacctgacacattttgcaattttgatgtcctctggtccttccattggtattaaagattataatattcttacaaggatcactcaactaggaataattatttcactgatttgtcttgccatatgcatttttaccttctggttcttcagtgaaattcaaagcaccaggacaacaattcacaaaaatctttgctgtagcctatttcttgctgaacttgtttttcttgttgggatcaatacaaatactaataagctcttctgttcaatcattgccggactgctacactacttctttttagctgcttttgcatggatgtgcattgaaggcatacatctctatctcattgttgtgggtgtcatctacaacaagggatttttgcacaagaatttttatatctttggctatctaagcccagccgtggtagttggattttcggcagcactaggatacagatattatggcacaaccaaagtatgttggcttagcaccgaaaacaactttatttggagttttataggaccagcatgcctaatcattcttgttaatctcttggcttttggagtcatcatatacaaagtttttcgtcacactgcagggttgaaaccagaagttagttgctttgagaacataaggtcttgtgcaagaggagccctcgctcttctgttccttctcggcaccacctggatctttggggttctccatgttgtgcacgcatcagtggttacagcttacctcttcacagtcagcaatgctttccaggggatgttcatttttttattcctgtgtgttttatctagaaagattcaagaagaatattacagattgttcaaaaatgtcccctgttgttttggatgtttaagctgttgaaatgaagtctgccaaatcttgctctaacaaataaaatgttatctaaatgaaaaaa

SEQ ID NO: 1330 - DNA, 2333 bp, Homo sapiens
  misc_feature (2018)..(2018): n equals a,t,g, or c
  misc_feature (2044)..(2044): n equals a,t,g, or c
  misc_feature (2292)..(2292): n equals a,t,g, or c
  misc_feature (2306)..(2306): n equals a,t,g, or c
  misc_feature (2331)..(2332): n equals a,t,g, or c
cacgcgtccgcattttcgtatccctgctgatttcaaaccttcccatggtttagaagcataacctgtaatgtaatgcaagtcccctaactccctggttgctaacattaacttccttaagtaataatcaatgaaagaaattctatgcatggttttgaaataatgtccttgaaagaggaatcaccattaggaaaggtgagtcagggtcctttgtttaatgtgactagtggctcatcatcaccagtgacctggttgggcctactctccttccagaacctgcattgcttcccagacctccccactgagatgcctctaagagccaaaggagtcaacacttgagcctagggtgggctacaacaaaagattctaatttaccttgcttcatctaggtccaggccccaagtagcttgctgaaggaacttaaaaagtagctgttatttattgtattrtataagctaaaaacatttatttttgttgaatcgaaacaattccatgtagcaatcttttttctgttcacggtgtttgtgatagaaccttaaattccgcaagcatcagttttttgaaaaaatgggaattgaccggatagttacaggcaaagattataaatwgctacaacatcatttaacttttataaacatgccttctctctattgaagacatctgatatttttgctggaaagttggatctatcctcagtaactctgccatggaattcctgkttcctggttccagaaaaagaaaagattacatttctgatcataaagaatgtcttgcatatggggaaatttttcaaaatgaaggggggtattatttatgtgggcatgggaaaacttttgccatggctgtttgtcttagtgggcatcttttgatgamattggatcagatatatgtagatgctgatatatgggacacatgtttaggttttggtgcagttgcacaaaactgtgttagtttatatgttactgtgttgcctttatttattctctccaaagtgtctctttatatttgttttacaatctgtgaaagagtataccataatacagaagtattttcatagtctttacctctggattgtcctgtcagtatagccacgttgatgagattacaccagtgcctttgatcatctttaagtatttgagccctgataaatattttggtaacataatccaaattagagacttagagctctggttagcaatcatgtttaaagagaagcttcttaaagctctgtatgctgggagattcatgattattaccaacgttttgatttcatgaaggtgttctcaaatttaaagcacattttcagtaagaacaaaaatatttaatgtttttatcttagacttaacttgatacatttgcatattactatggaagttattcaccttgtccctgtttttctttaagatattttaaaatcatagttatactacagtccttttttaaatgtatcctgatacattgtaaaatattttaatttcattgtggaaaataatgttggataaggagatatttttcactgttaacttttagcccatgcattttcataatttatttttttcacttgctgctttatatgacatatgtgacatttgattatttaacacttgatgtgatctgcataaacccaagttgcacaaccctcctgctgaagataaaattgaggttaaagataaagatttattttcatatttgtacagtgatcggcttcagtgatggtttttgtgggcatttattgtgtgtgtgtaagaaatttcatatgtatatattaagtaggcctctgagtattgaataattgttttatgattttgatttatatggtttacattttcattgtgtgggccatatttcgtttatactgtttatttctcttcaaaccttaataattataccataaagtgtaatttttatagcaatgcaaatgtctaaggaactacaaatattttctacgttgtaaattcaataaagcttgcttcctttggcaaaaaaaaaaaaaaaaaaaaaaactcgagggggggcccggnacccaattcgccctatagtgagtcgnattacaattcactggccgtcgttttacaacgtcgtgactgggaaaaccctggcgttacccaacttaatcgccttgcagcacatccccctttcgccagctggcgtaatagcgaagaggcccgcaccgatcgcccttcccaacagttgcgcagcctgaatggcgaatggcaaattgtaagcgttaatattttgttaaaattcgcgttaaatttttgctaaatcagctcattttttaaaaccccccccccnaaaaaaaatttttnaaaggggggggggcccccccccccnng

SEQ ID NO: 1331 - DNA, 2317 bp, Homo sapiens
  misc_feature (2315)..(2316): n equals a,t,g, or c
ttcctcgtagcgagcctagtggcgggtgtttgcattgaaacgtgagcgcgacccgaccttaaagagtggggagcaaagggaggacagagccctttaaaacgaggcgggtggtgcctgcccctttaagggcggggcgtccggacgactgtatctgagccccagactgccccgagtttctgtcgcaggctgcgaggaaaggcccctaggctgggtctgggtgcttggcggcggcggcttcctccccgctcgtcctccccgggcccagaggcacctcggcttcagtcatgctgagcagagtatggaagcacctgactacgaagtgctatccgtgcgagaacagctattccacgagaggatccgcgagtgtattatatcaacacttctgtttgcaacactgtacatcctctgccacatcttcctgacccgcttcaagaagcctgctgagttcaccacaggctcgagctgtgcacctttaccctggcaattgccctgggtgctgtcctgctcctgcccttctccatcatcagcaatgaggtgctgctctccctgcctcggaactactacatccagtggctcaacggctccctcatccatggcctctggaaccttgtttttctcttctccaacctgtccctcatcttcctcatgccctttgcatatttcttcactgagtctgagggctttgctggctccagaaagggtgtcctgggccgggtctatgagacagtggtgatgttgatgctcctcactctgctggtgctaggtatggtgtgggtggcatcagccattgtggacaagaacaaggccaacagagagtcactctatgacttttgggagtactatctcccctacctctactcatgcatctccttccttggggttctgctgctcctggtgtgtactccactgggtctcgcccgcatgttctccgtcactgggaagctgctagtcaagccccggctgctggaagacctggaggagcagctgtactgctcagcctttgaggaggcagccctgacccgcaggatctgtaatcctacttcctgctggctgcctttagacatggagctgctacacagacaggtcctggctctgcagacacagagggtcctgctggagaagaggcggaaggcttcagcctggcaacggaacctgggctaccccctggctatgctgtgcttgctggtgctgacgggcctgtctgtgctcattgtggccatccacatcctggagctgctcatcgatgaggctgccatgccccgaggcatgcagggtacctccttaggccaggtctccttctccaagctgggctcctttggtgccgtcattcaggttgtactcatcttttacctaatggtgtcctcagttgtgggcttctatagctctccactcttccggagcctgcggcccagatggcacgacactgccatgacgcagataattgggaactgtgtctgtctcctggtcctaagctcagcacttcctgtcttctctcgaaccctggggctcactcgctttgacctgctgggtgactttggacgcttcaactggctgggcaatttctacattgtgttcctctacaacgcagcctttgcaggcctcaccacactctgtctggtgaagaccttcactgcagctgtgcgggcagagctgatccgggcctttgggctggacagactgccgctgcccgtctccggtttcccccaggcatctaggaagacccagcaccagtgacctccagctgggggtgggaaggaaaaaactggacactgccatctgctgcctaggcctggagggaagcccaaggctacttggacctcaggacctggaatctgagagggtgggtggcagaggggagcagagccatctgcactattgcataatctgagccagagtttgggaccaggacctcctgcttttccatacttaactgtggcctcagcatggggtagggctgggtgactgggtctagcccctgatcccaaatctgtttacacatcaatctgcctcactgctgttctgggccatccccatagccatgtttacatgatttgatgtgcaatagggtggggtaggggcagggaaaggactgggccagggcaggctcgggagatagattgtctcccttgcctctggcccagcagagcctaagcactgtgctatcctggaggggctttggaccacctgaaagaccaaggggatagggaggaggaggcttcagccatcagcaataaagttgatcccagggtttgctttgtttttttaaaaaaaaaaaaaaaaaaaaaaaaaaaaaaaaaaaaaaaaaaaaaaaaaanna

SEQ ID NO: 1332 - DNA, 2167 bp, Homo sapiens
  misc_feature (2)..(2): n equals a,t,g, or c
  misc_feature (13)..(14): n equals a,t,g, or c
  misc_feature (52)..(52): n equals a,t,g, or c
ancgagtcagtanngagaagcgaaagcgcccaatacgcaaaccgcctctccncgcgcgttggccgattcattaatcagctggccgacaggtttcccgaytgraaaggggcagtgagcgcaacgcaattaatgtgagttagctcacttcattaggcaccccaggctttacactttatgcttccggctcgtatgttgtgtggaattgtgagcggataacaatttcacacaggaaacagctatgaccatgattacgccaagctcgaaattaaccctcactaaagggaacaaaagctggagctccaccgcggtggcggccgctctagaactagtggatcccccgggctgcaggaattcggcacgagaagatgcgaccggcagacggcattcgctgggaacgacggatagactgggggctgcggcctagaggtccgggcttggagttcgcctcagacgcggtggagccgccggagtctgagaaggtcttcaggcaccatggaggacaaacgcaacatccagatcatcgagtgggaacacctggacaagaagaagttctacgtgtttggtgtggcaatgacaatgatgatccgtgtcagtgtctacccattcaccctcatccgcacccggttgcaagttcagaaggggaagagcctctaccatgggaccttcgatgccttcatcaagatcctgcgagcagatggtatcactggcctctaccgagggttcctggtcaataccttcaccctcatctctggccagtgttatgtcaccacttatgagctcacccggaagtttgtagctgactacagccagagtaacacagtcaaatcactggtggctggtggctcagcctcccttgtggcccagagcatcacagtgcccattgatgtagtctcccagcacctgatgatgcaacgcamgggtgagaaaatgggccgctttcaggtgcgggggaacccagagggacaaggggtagttgcctttggccaaaccaaggacatcatcaggcagatcctgcaggctgatggacttcgcggcttctatcgaggctatgtggcttcactgcttacctatatcccaaacagtgctgtctggtggcccttctatcacttctatgcagagcagctctcctacctgtgtcctaaggagtgccctcacattgtctttcaagctgtctcggggcccctggctgcagccactgcctccatcctcaccaatcccatggatgtcatacgaacccgtgtgcaggttgagggcaagaactccatcatcctgaccttcagacagctgatggcagaagaagggccttggggcctcatgaagggcctctcggccagaatcatctcagccacaccttccaccattgtcattgtggtgggctatgagagcctcaagarastcgctccagtttctatccaggaatgttcacatccaaagggttggacccacggatcattctgaatcttcctgcccctcctcactgcttaaccctgagaaccacaaatataatggaagcagttccccccaccctcaccccatctctttaagctcatcctagcaagacctctagagaccctagagactcgactttagtccttccccgccatggcacagtggggaaggtgtcaatggggagtgtcacggacaggaggtaggatcctgccgctcgcgtcttagtgtttctccctcaagactttccttctgttttgttgtcttgtgcagtattttacagcccctcttgtgtttttctttatttctcgtacacacacgcagttttaagggtgatgtgtgtataattaaaaggacccttggcccatactttcctaattctttagggactgggattgggtttgactgaaatatgttttggtggggatgggacggtggacttccattctccctaaactggagttttggtcggtaatcaaaactaaaagaaacctctgggagactggaaacctgattggagcactgaggaacaagggaatgaaaaggcagactctctgaacgtttgatgaaatggactcttgtgaaaattaacagtgaatattcactgttgcactgtacgaagtctctgaaatgtaattaaaagtttttattgagcccccgaaaaaaaaaaaaaaaaaaaaaaaaaaaaactcgagggggggcccgtacccaatcgccctat

SEQ ID NO: 1333 - DNA, 589 bp, Homo sapiens
  misc_feature (535)..(536): n equals a,t,g, or c
  misc_feature (581)..(581): n equals a,t,g, or c
  misc_feature (588)..(588): n equals a,t,g, or c
tgggctggaacgcgccggaatctgaggtgtgagtagagcctgggggagagtggatccaggtgaagggggcagaggactgggagttttcrtcctcttgaataagaactcgacaacagagtgggaactttctgtcttgtgatccattgcctggtgagtcacagctcacaccatggatttaacctgagagcttcaacttctgctttggccctggagttcccatgccctggtgtcttctaccagttcttagtgtgttgcactggagcacagaggacactcgatcgtgcggcgcgcagggcggggggccgccgctgcctccccgcgggatggctggcactgtgctcggagtcggtgcgggcgtgttcatcttagccctgctctgggtggcartgctgctgctgtgtgtgctgytgtccaragscttccggggcggcgargttctctgttcattttttattcttcggtgctgtgatcatcacatcattctgttgcttttcccgggagtggtgatttccagccccagaagtggaagttaagnngtggatgatttttcaatggccgtaagtcctgtggtttcttagtgncaattcnt

SEQ ID NO: 1334 - DNA, 2541 bp, Homo sapiens
gggagtgaaggcctggttacctctccagtgaagattagccccatagagcttactctatggggaagaacttttctgactccttcctgtctagggagtgcgtgatcagaatggtgtctggacggttctacttgtcctgcctgctgctggggtccctgggctctatgtgcatcctcttcactatctactggatgcagtactggcgtggtggctttgcctggaatggcagcatctacatgttcaactggcacccagtgcttatggttgctggcatggtggtattctatggaggtgcgtcactggtgtaccgcctgccccagtcgtgggtggggcccaaactgccctggaaactcctccatgcagcgctgcacctgatggccttcgtcctcactgttgtggggctggttgctgtctttacgtttcacaaccatggaaggactgccaacctctactcccttcacagctggctgggcatcaccactgtcttcctcttcgcctgccagtggttcctgggctttgctgtcttcctcctgccctgggcgtccatgtggctgcgcagctcctaaaacctatccacgtcttttttggagccgccatcctctctctgtccatcgcatccgtcatttcgggcattaatgagaagcttttcttcagtttgaaaaacaccaccaggccataccacagcctgcccagtgaggcggtctttgccaacagcaccgggatgctggtggtggcctttgggctgctggtgctctacatccttctggcttcatcttggaagcgcccagagccggggatcctgaccgacagacagcccctgctgcatgatggggagtgaagcagcaggaaggggctcccaagagctcctggtggtgcagcctgtgctcccctcagaagctctgctcttcccagggctcccggctggtttcagcaggcgactttcttccaatgctgggcccagacttcttgcctgggtgctggcctgccctctccggccgcttgctgcctgtctgctttccttggtggctttgcctgggtgctgggcctgccctctccggccgcttgctgcctgtctgctttccttggtggctttgcctgggtgctgggcctgccttctctggctgcttgctgcctgtctgctttccttggtggctttggcttctgcactccttggcgtcagcctctcaggtcctccattcacacgaggtcctcctcgctctggccgctcttgctgctcctgtctgaagaaatcagactgatttcctcttaagactcctagggatgtggtgaagagctgggactcaagtgcagtccacggtgtgaaacatgagggaggtgaggtgtccgtccacttcccccataaaggtgtgcatttcagttaggctgccccgccacagagcaggcttcatctgctctgccatccagccccatctggatgtgaggtggggtggagacatcatggggtgattgcagaaagggggagtggcggcccacgcagcttctgctgaggagctgaccgctctgagctgttctgtttcgtattgctgctctgtgtctgcatgtattgtgaccgtgcggctccacctcttccagctgctgctacagctgaggcctggatcccggcctttccctgtgacttacgtgtctgtcaccggcaggcagccctacaaatcctggtgacctgctctcccaagaacagagcctgtccccagatgtcccagtagcgatgagtaacagaggtggctgtggacttcctctacttctccttgctggatcagggccttcctgcctcccgctgggcaggtctggccttgctctcttggcagggccccagcccctctgaccactctgcagctcaccatgcagctgatgccaaagttgtggtgtccagtgtgcagcagccctgggagccactgccaccttcagaggggttccttgctgagacccacattgcttcacctggccccaccatggctgcttgcctggcccaacctagcgttctgtgccatgctagagcttgagctgttgctcttcttcaggggaggaaatagggtggagagcgggaagggtcttgctcctaagtgttgctgctgtggcttttttgccttctccaaagacgcactgccaggtcccaagcttcagactgctgtgcttagtaagcaagtgagaagcctggggtttggagcccacctactctctggcagcatcagcatcctactcctggcaacatcaggccaacgtccaccccagcctcacattgccagatgttggcagaagggctaatattgaccgtcttgactggctggagccttcaaagccactgggatgtcctccaggcacctgggtcccatgaccagctccccgtctccataggggtaggcatttcactggtttatgaagctcgagtttcattaaatatgttaagaatcaaagctgtctttgttcaggctgctataacaaaaatataatagcctgggtggcttaacaaaaaaaaaaaaaaaaaaaaaaaaaaaaaaaaaaaaaaaaaaaaaaaagaggggggag

SEQ ID NO: 1335 - DNA, 1360 bp, Homo sapiens
  misc_feature (1353)..(1353): n equals a,t,g, or c
  misc_feature (1360)..(1360): n equals a,t,g, or c
tgctggtacgcctgcaggtaccggtccggaattcccgggtcgacccacgcgtccggataagagagcggtctggacagcgcgtggccggcgccgctgtggggacagcatgagcggcggttggatggcgcaggttggagcgtggcgaacaggggctctgggcctggcgctgctgctgctgctcggcctcggactaggcctggaggccgccgcgagcccgctttccaccccgacctctgcccaggccgcaggccccagctcaggctcgtgcccacccaccaagttccagtgccgcaccagtggcttatgcgtgcccctcacctggcgctgcgacagggacttggactgcagcgatggcagcgatgaggaggagtgcaggattgagccatgtacccagaaagggcaatgcccaccgccccctggcctcccctgcccctgcaccggcgtcagtgactgctctgggggaactgacaagaaactgcgcaactgcagccgcctggcctgcctagcaggcgagctccgttgcacgctgagcgatgactgcattccactcacgtggcgctgcgacggccacccagactgtcccgactccagcgacgagctcggctgtggaaccaatgagatcctcccggaaggggatgccacaaccatggggccccctgtgaccctggagagtgtcacctctctcaggaatgccacaaccatggggccccctgtgaccctggagagtgtcccctctgtcgggaatgccacatcctcctctgccggagaccagtctggaagcccaactgcctatggggttattgcagctgctgcggtgctcagtgcaagcctggtcaccgccaccctcctccttttgtcctggctccgagcccaggagcgcctccgcccactggggttactggtggccatgaaggagtccctgctgctgtcagaacagaagacctcgctgccctgaggacaagcacttgccaccaccgtcactcagccctgggcgtagccggacaggaggagagcagtgatgcggatgggtacccgggcacaccagccctcagagacctgagctcttctggccacgtggaacctcgaacccgagytcctgcagaagtggccctggagattgagggtccctggacactccctatggagatccggggagctaggatggggaacctgccacagccagaactgaggggctggccccaggcagctcccagggggtagaacggccctgtgcttaagacactcctgctgccccgtctgagggtggcgattaaagttgcttcacatcctcaaaaaaaaaaaaaaaaaaaaaaaaaaaaaaaaaaaaaaaaaaaaaaaaaaaaaaaaaaaaanggggggn

SEQ ID NO: 1336 - DNA, 2458 bp, Homo sapiens
cggccacgaaccgcgtagttgcgcccaccccgggacccgggacccctgcsgagcgccacgccgacggcttggcgctcgccctggagcctgccctggcgtcccccgcgggcgccgccaacttcttggccatggtagacaacctgcagggggactctggccgcggctactacctggagatgctgatcgggacccccccgcagaagctacagattctcgttgacactggaagcagtaactttgccgtggcaggaaccccgcactcctacatagacacgtactttgacacagagaggtctagcacataccgctccaagggctttgacgtcacagtgaagtacacacaaggaagctggacgggcttcgttggggaagacctcgtcaccatccccaaaggcttcaatacttcttttcttgtcaacattgccactatttttgaatcagagaatttctttttgcctgggattaaatggaatggaatacttggcctagcttatgccacacttgccaagccatcaagttctctggagaccttcttcgactccctggtgacacaagcaaacatccccaacgttttctccatgcagatgtgtggagccggcttgcccgttgctggatctgggaccaacggaggtagtcttgtcttgggtggaattgaaccaagtttgtataaaggagacatctggtatacccctattaaggaagagtggtactaccagatagaaattctgaaattggaaattggaggccaaagccttaatctggactgcagagagtataacgcagacaaggccatcgtggacagtggcaccacgctgctgcgcctgccccagaaggtgtttgatgcggtggtggaagctgtggcccgcgcatctctgattccagaattctctgatggtttctggactgggtcccagctggcgtgctggacgaattcggaaacaccttggtcttacttccctaaaatctccatctacctgagagacgagaactccagcaggtcattccgtatcacaatcctgcctcagctttacattcagcccatgatgggggccggcctgaattatgaatgttaccgattcggcatttccccatccacaaatgcgctggtgatcggtgccacggtgatggagggcttctacgtcatcttcgacagagcccagaagagggtgggcttcgcagcgagcccctgtgcagaaattgcaggtgctgcagtgtctgaaatttccgggcctttctcaacagaggatgtagccagcaactgtgtccccgctcagtctttgagcgagcccattttgtggattgtgtcctatgcgctcatgagcgtctgtggagccatcctccttgtcttaatcgtcctgctgctgctgccgttccggtgtcagcgtcgcccccgtgaccctgaggtcgtcaatgatgagtcctctctggtcagacatcgctggaaatgaatagccaggcctgacctcaagcaaccatgaactcagctattaagaaaatcacatttccagggcagcagccgggatcgatggtggcgctttctcctgtgcccacccgtcttcaatctctgttctgctcccagatgccttctagattcactgtcttttgattcttgattttcaagctttcaaatcctccctacttccaagaaaaataattaaaaaaaaaacttcattctaaaccaaaacagagtggattgggctgcaggctctatggggttygttatgccaaagtgtctacatgtgccaccaacataaaacaaaaccaagccttggctcgttctcttctctcttcaatctctggaaaaataagtacatatagttgataacccctcttagcttacaggaagctttttgtattaattgcctttgaggttattttccgccagacctcaacctgggtcaaagtggtacaggaaggcttgcagtatgatggcaggagaatcagcctggggcctggggatgtaaccaagctgtacccttgagacctggaaccagagccacaggccccttttgtgggtttctctgtgctctgaatgggagccagaattcactaggaggtcatcaaccgatggtcctcacaagcctcttctgaagatggaaggccttttgcccgttgaggtagaggggaaggaaatctcctcttttgtacccaatacttatgttgtattgttggtgcgaaagtaaaaacactacctcttttgagactttgcccagggtcctgtgcctggatgggggtgcaggcagccttgaccacggctgttcccctcacccaaaagaattatcatcccaacagccaagacccaacaggtgctgaactgtgcatcaaccaggaagagttctatccccaagctggccactatcacatatgcttactcttgcttaaaattaataaatcatgttttgatgagaaaaaactaaaaaaaaaaaaaaaaaaaaaaaaaaaaaaaaaaaaaaaaaaa

SEQ ID NO: 1337 - DNA, 1839 bp, Homo sapiens
  misc_feature (1014)..(1014): n equals a,t,g, or c
  misc_feature (1017)..(1017): n equals a,t,g, or c
  misc_feature (1205)..(1205): n equals a,t,g, or c
  misc_feature (1689)..(1689): n equals a,t,g, or c
aaccagcatttgatcccgagaaaggaacttcaacactttgttttgcagctgcggcactggcgggaatactggaatgagcagagtgcaaagcggagagtcccagccacacccagactaccagccaggctcatcaagagggaatctggttaccatgaaaatggagtggtgaaggcagagaayggaacctccccacggactaagaaactcaagtctccctarggccaaagtgctaagaacaggaatcctcttggtgggggccggcaggggcaagagcccaggccccctccctgcctcctccttcctgcctgtratgctccgtctcaaacagccgaaacctgtcttgcaatggggggagggggcgtttcrctttccttcttcttggcttcctcttattcttccacaaaccattctcaataaagccaaaaatctttctctttctccccctcaggccacctcctgtcctactcctgcctgtgctggcttttctggaacgccakgcgcccatggctggcacctttctgcttgctctgkctcttgccttatggctgctgcttttcctttttacttcctattttcaccttatcttgcaattttyctgtctgatttttacaatgggaggggagctaagattgcagtcctgtccttcggtcccccagggcctgccggtcagaagcctggggctggtaggccttggtggtcctcatgtggatgggcaagaagagagcggccatctcggatcataatctccttggtgctgattaactgacgagatatatgattccagttctgcatgtaccatcttgaggcacagcagccactgctcgttgtaaatgccaaggcatttggctttgggacgtgacaactcaatccagaaggatggtgtgaactcggttgggtcccgtgactcgagctcctaccagtggctggccgcggattggaagccagcctgctgtcgctctgtgggggggacatgtcttcccactgcttagagcgagagcagagcaaactgcgcanagncacctccagaaaggtaatggtggcagaacccacagtggagtcgacctaggcctttctccagcagtcccagtygccattgctttttcagccattcacaagcattcaaaaccaaaccaaacagcagttcatatacctgcctgagataggctggtcctcacctccagagccagccagccccgtcaggggcnaaacttactaccttgacttcatctctagctgcagaaacactaagtctcaagggcttcagccccatgctggtcccttggtgttcagggagggtcacttggaccgctgttcatctggccgcccttgttgagtgttctttggaattgtcgttttttgagcacaactacagcattttagactgcatgaaaccatgactgactgagagtcactctctgggtagatgataggcgcctttctggccccttccctcacagattctttcccctcccctccacctgaagagaaggcctccaagtccttttggtgccttgtgaggacttttagaaggggcgttcagctttaaaaagccggtcctaattacggccggacgcagtagcttacgcctgttatcccagcactttgggaggtcgaggtgggcagatcacctgaggttaggagttcaagaccagcctggccaacatggtgaaaccccatctttaytaaaantacaaaaaattaggtgtagtggcaggcacctgtaatcccagctactcgggaggctgaggcaggagaatcgcttgaacctagaaggtggaggttgcagtgagcggagattgtaccatggcactccagcctgggacaacaagagcgaaattt

SEQ ID NO: 1338 - DNA, 1380 bp, Homo sapiens
  misc_feature (1051)..(1051): n equals a,t,g, or c
  misc_feature (1208)..(1208): n equals a,t,g, or c
  misc_feature (1370)..(1370): n equals a,t,g, or c
ggcggcgggccggcgggcggaccgggccggtgctggagaagtttgcgctgcggttcgtgagcgcagggtgcgggccccgccggccgctgcgcgcccgctgccatggctttccgcaggaggacgaaaagttacccgctcttcagccaggagttcgtcatccacaaccatgcggacatcggcttctgcctggtgctctgcgtcctcatcgggcttatgttcgaggtcacagccaagactgcctttctatttattttacctcagtataacattagcgtgcctacagcagacagtgagaccgtgcactaccactatggccctaaggacctggtcacaatcttgttctacatcttcatcaccatcatcttgcatgctgtggttcaggagtacattttagataaaatcagcaaacggcttcatctctccaaagtcaaacacagcaagttcaatgaatctggacagctggtcgtctttcatttcacctcggtgatttggtgcttctacgtggtggtgacggaaggatacttaacaaacccaagaagcctctgggaagactacccgcatgtgcacctccccttccaggtgaagtttttctacctatgccagctggcctactggctgcacgcacttcctgagctatacttccagaaggtacggaaggaggaaattccccgccagctccagtatatttgcctgtacctggtgcatatagctggagcatacctcttaaacctgagccgcctgggcctgatcttgctgctgctgmagtactcaactgagttcctcttccacacggstagactcttctactttgcagatgaaaacaacgagaaactgttcagtgcctgggctgctgkttttggggttacccgsctcttcatcctcacccttgccgtgctggccattggctttggactggctcgcatggaaaaccaggcatttgatcccgagaaagggaacttcaacactttgttttgcaggctctgcgtgctgctgctggtgtgtgccgcccaggcctggctcatgtggcgcttcatccactcccagctgcggnactggcgggaatactggaatgagcagagtgcaaagcggagagtcccagccacacccagactaccagccaggctcatcaagagggaatctggttaccatgaaaatggagtggtgaaggcagagaacggaacctccccacggactaagaaactcaagtntccctaaggccaaagtgctaagaaacaggaatcctcttggtgggggccgagcagggggcaaggwgcccaggccccctccctggcctcctccttcctgcctgtgaatgcttccgttttcaaacagccgaaacctgttttgcaatggggggagggggcgttttnggttttcctt

SEQ ID NO: 1339 - DNA, 881 bp, Homo sapiens
ccacatacaaagaggaaagatgaaacttttwttgttacatttattgacactggatatttattatctgttatataccaggcaaaatggacacaccatcaggagataagacctgtatcttacgtgtaagatgaaacttatatttattgattgaattattgaatactttttgagtatttgctatataccaggcaaaaggcacagaacaaattatttgttcacagttacttttaactctttcagcaatgcctgagtcctctttatagaaacttcattttgctaagttagcaaccattcatttttttggttactcttcatgtatagttttctcaagtgtctcttcaaatactgcataatggtatagaccatttaatattccaaacataatctgaaagactagaggaatcgccattaatttcatttgtgtttgacaaagcgtcatccaatggattaaaacccttccttttggtggcagtggaacggtatgatacttggttgccaggcgtccatttttagtaaaagccaaagaactgggatagaaaacaccacaaactatgccaatcagtgagcttctgaaaacacagttttccttgcttatattatctgaatacaaagcatcaattacaaaaagcttgtcagtaacaacagtagacaaaaatggaagtgtagccaatgatgcatatgtcttcaaagcatcatgtttaaccttgaagcagcgtctgaacaggaagtttgagaatattccagagaaaccagctgttgttccaaatgtcgccatttgatatatattttgtgtccttgggcgcttcctcagttcccaccggcaccacacctgaatcccttggcttagtcccagcctcatacccgaacaccaccattttggc

SEQ ID NO: 1340 - DNA, 1022 bp, Homo sapiens
  misc_feature (931)..(931): n equals a,t,g, or c
  misc_feature (956)..(956): n equals a,t,g, or c
  misc_feature (968)..(968): n equals a,t,g, or c
  misc_feature (990)..(990): n equals a,t,g, or c
  misc_feature (1015)..(1015): n equals a,t,g, or c
gcaccaaaatggtggtgttcgggtatgaggctgggactaagccaagggattcaggtgtggtgccggtgggaactgaggaagcgcccaaggaaatgaaacacgatttccaaaatgaacttaatctttcatgagaaactgaggatagagatgtcaataagcagccactgtttccacctccccacctgaagagctaggaggacaactacaaagagcctgactgccttctcggaatgaggagagaggaaaacagcaacagtatcagttttcaagatggcagcatctatgcatggtcagcccagtccttctctagaagatgcaaaactcagaagaccaatggtcatagaaatcatagaaaaaaattttgactatcttagaaaagaaatgacacaaaatatatatcaaatggcgacatttggaacaacagctggtttctctggaatattctcaaacttcctgttcagacgctgcttcaaggttaaacatgatgctttgaagacatatgcatcattggctacacttccatttttgtctactgttgttactgacaagctttttgtaattgatgctttgtattcagataatataagcaaggaaaactgtgttttcagaagctcactgattggcatagtttgtggtgttttctatcccagttctttggcttttactaaaaatggacgcctggcaaccaagtaagttcttccttttccttcttttttctttwcttttcttttcttttttttttttttttaggttaataaactctctttcttctttagctgtctatgatatatttgaatcaaaatgtggtagtttggtatttcagatagctaacttttaacttttttgctctctacattatagatctagaaaggcaattatcaatttaggagaagtcaacaaacttctaatagcattcatatccaggagaggngattaactcttttttctttttaggnatcataccggtncactggcaccaaaaggaagggntttaatccattggatgacgctttgncaaacac

SEQ ID NO: 1341 - DNA, 1038 bp, Homo sapiens
  misc_feature (30)..(30): n equals a,t,g, or c
aggtaccctctggaaacccgggtcgacccncgcgtccgcgacaactgcgcgccactccgcggcctaccgcgcagatcctctacgtgtgtcctcgcgagacaagctcaccgaaatggccgcgtccagtcaaggaaactttgagggaaattttgagtcactggaccttgcggaatttgctaagaagcagccatggtggcgtaagctgttcgggcaggaatctggaccttcagcagaaaagtatagcgtggcaacccagctgttcattggaggtgtcactggatggtgcacaggtttcatattccagaaggttggaaagttggctgcaacagctgtgggaggtggattttttctccttcagcttgcaaaccatactgggtacatcaaagttgactggcaacgagtggagaaggacatgaagaaagccaaagagcagctgaagatccgtaagagcaatcagatacctactgaggtcaggagcaaagctgaggaggtggtgtcatttgtgaagaagaatgttctagtaactgggggatttttcggaggctttctgcttggcatggcatcctaaggaagatgacctcatgttcattgttcctggttttttccagccagcagcctctacactccatcataggacatcgagtccctcctcctcttctcccatgccttcttccctgccatggcaaatctgagtggcttctctaagcatctgctggtacaagtcaatgtggcaccatgagcttcatggtggcagaagagacaatagtccttagctctcctcccagtacaccccctacttggccagtctgtaggccaacaagaaggttcctttacccccatgcaagacacttatgagaacacattacaagatggctgaccgtggaggatgagtggatcctgaaaggttgtcccaaactgttgatttggaaaagaaataagcacatagataaccttattgtgtgctgcatggaaaggaactgaatacatttgcctttaagcatgaaaaaaaaaaaaaaaaaaaaaaaaaaaaaaaaaaaa

SEQ ID NO: 1342 - DNA, 1121 bp, Homo sapiens
  misc_feature (231)..(231): n equals a,t,g, or c
gatacctccccttctggctggtgcgatggctgctgttccgcctcatgttcgcctcaggcgtggtcaagctgaccagccgctgccctgcgtggtgggggctcactgccctcacctaccactacgagacccagtgcctgcccacgcccgccgcctggttcgcacaccacctgccggtctggctgcacaagctcagcgtggtggccaccttcctaattgagatcgctgtgccgnccctgttcttcgyccccattcgacgcctgcgcttggctgctttctactcgcaggtgctgctgcaggtcctgattatcatcaccggcaactacaacttcttcaacctgatgacgctggtgcttaccactgcgctgttggacgaccagcacctggctgctgagcctggccacggcagccgcaagaagacggccacctcctggcccaaggscctgctggccaccctgtcgctgctgctggaactagccgtctacgggcttctggcctatggcactgtgcactactttggcctggaggttgactggcagcagcgcaccatccactccagaaccactttcaccttccaccagttttctcagtggctgaagacactgacgctgcccactgtgtggctgggtgtggcctccctggtctgggagctgctgagtgccctgtggaggtggacccaggtgcggggctggctacggaagctcagtgctgtagtccaactgtcccttgtgggcactgcgaccgtggccttgttcctgattagcctggtgccgtactcctacgtggagcccgggacccacgggcgcctctggaccggggcccaccgcctgtttggtgccgtggagcamctacagctggccaactcctacggcctcttccgccgcatgactgggcttggtggacggcctgaggtggtgctggagggcagttacgacggccaccactggayggagatcgagttcatgtacaagcctgggaacctgagccggccgcccccggttgtggtgccccaccagccacgcctggtactggcagatgtggtttgcagccctgggcccacacacgcacagcccgtggttcacaagcctggtcttgcgcctgctgcagggcaaggtagccagtga

SEQ ID NO: 1343 - DNA, 1013 bp, Homo sapiens
atctggttgaactacttaagcttaatttgttaaactccggtaagtacctagcccacatgatttgactcagagattctcttttgtccacagacagtcatctcaggagcagaaagaaaagagctcccaaatgctatatctattcaggggctctcaagaacaatggaatatcatcctgatttagaaaatttggatgaagatggatatactcaattacacttcgactctcaaagcaataccaggatagctgttgtttcagagaaaggatcgtgtgctgcatctcctccttggcgcctcattgctgtaattttgggaatcctatgcttggtaatactggtgatagctgtggtcctgggtaccatgggggttctttccagcccttgtcctcctaattggattatatatgagaagagctgttatctattcagcatgtcactaaattcctgggatggaagtaaaagacaatgctggcaactgggctctaatctcctaaagatagacagctcaaatgaattgggatttatagtaaaacaagtgtcttcccaacctgataattcattttggataggcctttctcggccccagactgaggtaccatggctctgggaggatggatcaacattctcttctaacttatttcagatcagaaccacagctacccaagaaaacccatctccaaattgtgtatggattcacgtgtcagtcatttatgaccaactgtgtagtgtgccctcatatagtatttgtgagaagaagttttcaatgtaaggggaagggtggagaaggagagagaaatatgtgaggtagtaaggaggacagaaaacagaacagaaaagagtaacagctgaggtcaagataaatgcagaaaatgtttagagagcttggccaactgtaatcttaaccaagaaattgaagggagaggctgtgatttctgtatttgtcgacctacaggtaggctagtattatttttctagttagtagatccctagacatggatcaggggcagccaagcttga

SEQ ID NO: 1344 - DNA, 2132 bp, Homo sapiens
  misc_feature (1424)..(1424): n equals a,t,g, or c
ggcacctaaactctcaggtaaagaaaaccactacaaggtggtgtcatattgtgcgggattcagatagtctggctgaatcagaatttgaatcagcagccttcagccagggctctagatcgggtgtgagtggtggctctcgaagcctcaacatgtcaagaagagactcagaaagcacccgccatgactcggagactgaggacatgttatgggacgacctgctacatggcccagagtgccggtcatctgtcaccagtgacagtgagggggcccatgtgaatacccttcactcagggaccaaacgtgaccccaaagaggatgtttttcagcagaatcatttattctggcttcagaattcaagtccttcctctgatcgagttagtgcaataatctgggaggggaatgagtgcaaaaagatggatatgtctgtgttggaaataagtggcatcatcatgagcagggtcaatgcctatcagcaaggagtaggttatcagatgctgggaaatgttgtcactattggattagcattttttccattcttacatcgacttttccgtgagaagagccttgaccaactaaagtccatttcagctgaggagatcttgactctcttttgtggggcaccacctgttacacctattattgttttgtcgataattaatttttttgaaagattgtgtcttacttggatgttttttttcatgatgtgtgtggcagagagaacatataaacagagatttttatttgcaaaactcttcagccatattacttctgccaggaaagctaggaaatatgaaatacctcatttcagacttaagaaggtggagaatattaaaatatggttatcactgcgttcctatctaaagagacgggggccacagcgttcagttgatgtggttgtatcctcggttttcctactgacactttcgattgctttcatttgttgtgctcaggttctccaaggacataaaactttcctgaatgatgcttataactgggagtttttgatctgggaaacagctttactactttttttattgcgtctggcctcactggggtctgaaaccaataagaaatacagcaatgkttcaatattacttacagaacagattaatttatatcttaagatggaaaaaaagccaaataagaaagaacagcttactctagtaaacaatgtattaaagctgtccaccaagttgttgaaagagctggacacaccatttagactctatggactgacaatgaatcccttaatctacaatatcacaagagtagttatcctttctgctgtctcaggtgktataagtgatcttctaggatttaatataagamtgtggaaaattaaatcataagctgagttaaatgcctggactctcccctggctggtatcaaaacttacctatcaaggaaagtgatgactgcagaanccagtgagatacccacctgcttgttcacatgcacaggtgctctcagctctgccaaagcgaatgaatggtgtttccggaggagcaagtccttttccaactgggtgtgcatgctaaaaacctgtattttcatgcttttcaaacaacatgaatagtcagctgactaaagactgtgtgtgttgtggtaacacaaagacaattttgtaagtttgcgcttcagtactgtgacagttatgtttactggacatagtcttttgggcaactatgatagatgcccaaagcatgaagcaaatatcttttattggaaatatgcaaattcaatacttttccattatagtctatagaactggagatttcatttctctatcaaagagagatcaagcgaactattttaggttaaatccgaataaaagaactttactggagactttcagtttctaggttttctttgttgttgaaggaagaaaattaacttttaaactgtgagtttctgttaaactgtggagaaatgttttgttcgtttacgattttgggttaataactgtatagttgttggcaaacgatgcatgcatacaatatgccatgtaattcagcatgaaaaatttaagtatatgcctactcatccatttccatcatacaacatggtttccacgttctatgtggaagccatggaagcattgtttccatatagatcatctgagttgtggttcc

SEQ ID NO: 1345 - DNA, 1602 bp, Homo sapiens
  misc_feature (7)..(7): n equals a,t,g, or c
  misc_feature (1579)..(1579): n equals a,t,g, or c
cttgggngaaagagaattcatttttaaaaaaaaaaaaaaagtgaaggaaggagacagcagattggaaataacactggagtggatgggatgtcctcttccctragggggccggggtaccagacgggaggctgggagaggatgagaggctgccccatggctggaggcagcgtccgtgtgtgcagtcaccatcatcaacccccattcggccccttccccagatgcgctggtgacaggggcttcttggatgtcaaatcatgttgtaggagggtgcagactgcgggcttctgtggggagcagtactactgtgtctgtcggcagtggccatgggaccctcagcccgtcctgtacatggagcagggtgcacagtcaccctccatcctgtggcgagaggctggcccggcccggccaggcgaggcagaaggtgtcggccaagtggccccgaccccatcccgcaatctctcagctgctttttattacctttgtgccccatttgggagtttgcttcctccacctggacactttgcccgggaggtcatcagagcccaaccccaggctctgctcggttggagaggggatgacttcaccaccacctgaccttcctagggtcctggtctcactgtcagctgggggtccgttgtgtgtatttgtacagttttgctgtatggggtttgtcacccaaaagctgatgctgagaaaggcctccctggggcccctcccgcgggcatctgagagacctggtgttccagtgtttctggaaatgggtcccagtgccgccggctgtgaagctctcagatcaatcacgggaagggcctggcggtggtggccacctggaaccaccctgtcctgtctgtttacatttcactatcaggttttctctgggcattacgatttgttcccctacaacagtgacctgtgcattctgctgtggcctgctgtgtctgcaggtggctctcagcgaggtacggggagggcgtcaccctgcagaacggcagagtgacgcgtcctctcgctgctgagcaccagctgtttacctgccctgcatcacttcctcggatactttactcaataagcatttcccctggagtgtccgtgccctggtgttttttatcgatacgttgattaaaacgcgtggttccccgtgtgcctgaagcagacattgctgtgaaatcttttatttttgttttatgacacagcatcaatttcatgaatactttgaaagggccattagaaaaaataagagccaatttgggtcatttgagaaacattttcagcacaattacagtgggggcacgggccgttcggctccagctgggttttcccagatgcaacaatcgcggttctggcttctccactggtggggatggggatcgcgccttcggagctctcagggcgcctgtctgtcgggggctgggtgcgtccacagccccgggggatggcgcgtggcgtagcccaggaacggcatgtgggtgggtctctgacctgcttgtgcagggacttgagggacctcatcccgatggccgaggcaggggctycccacgggataaaaggatccggcctggccttggggtccaagaggagngccaagggagtggacctggcccc

SEQ ID NO: 1346 - DNA, 1483 bp, Homo sapiens
  misc_feature (1141)..(1141): n equals a,t,g, or c
  misc_feature (1414)..(1414): n equals a,t,g, or c
  misc_feature (1429)..(1429): n equals a,t,g, or c
ggcacgaggtcgccgccgcggccgcctggaattgtgggagttgtgtctgccactcggctgccggaggcgaaggtccctgactatggctccccagagcctgccttcatctaggatggctcctctgggcatgctgcttgggctgctgatggccgcctgcttcaccttctgcctcagtcatcagaacctgaaggagtttgccctgaccaacccagagaagagcagcaccaaagaaacrgagagaaaagaaaccaaagccgaggaggagctggatgccgaagtcctggaggtgttccacccgacgcatgagtggcaggcccttcagccagggcaggctgtccctgcaggatcccacgtacggctgaatcttcagactggggaaagagaggcaaaactccaatatgaggacaagttccgaaataatttgaaaggcaaaaggctggatatcaacaccaacacctacacatctcaggatctcaagagtgcactggcaaaattcaaggagggggcagagatggagagttcaaaggaagacaaggcaaggcaggctgaggtaaagcggctcttccgccccattgaggaactgaagaaagactttgatgagctgaatgttgtcattgagactgacatgcagatcatggtacggctgatcaacaagttcaatagttccagctccagtttggaagagaagattgctgcgctctttgatcttgaatattatgtccatcagcaaccccaaggtccaggtggaggccatcgaagggggagccctgcagaagctgctggtcatcctggccacggagcagccgctcactgcaaagaagaaggtcctgtttgcactgtgctccctgctgcgccacttcccctatgcccagcggcagttcctgaagctcggggggctgcaggtcctgaggaccctggtgcaggagaagggcacggaggtgctcgccgtgcgcgtggtcacactgctctacgacctggtcacggagaagatgttcgccgaggaggaggctgagctgacccaggagatgtccccagagaagctgcagcagtatcgccaggtacacctcctgccaggcctgtgggaacagggctggtgcgagatcacggcccacctcctggcgctgcccgagcatgatgcccntgagaaggtgytgcagacactgggcgtyctcctgaccacctgccgggaccgctaccgtcaggacccccagctcggmaggacactggccagcctgcargctgagtaccaggtgctggccagcctggagctgcaggatggtgaggacgagggctacttccaggagctgctgggctctgtcaacagcttgctgaaggagctgagatgaggccccacaccaggactggactgggatgccgctagtgaggctgaggggtgccagcgtgggtgggcttntcaggcaggaggacntcttggcagtgctggcttggccattaaatggaaacctgaaggccaaaaaaaaaa

SEQ ID NO: 1347 - DNA, 1474 bp, Homo sapiens
  misc_feature (942)..(942): n equals a,t,g, or c
gcacgcagttcttgggtctgtgctgctggcctggggttgtggttgaggccgggtctccgctcctgtgcccgggaagatggtgctaggtggttgcccgaatcacgccattttttaacatctctttttgatcaaacaagaaaargcatttgggaaatgcaaagaggactgagaatactttggcttaaattttgcccccagaatcttgttgtttgcctactgaagagatgaaaccatggcagaagtagaatccttatagaaacaggaccagaaacacctcccttctccaacaaaaggttcattttggtggctgtccgtttgacctgctgtgcttcagtttaattggcttggaaaggggtcagcagggtgaaaccgaaccccagaaaacttgatgaagaaatgtcttttgcccgttttgattacgtgcatgcaaacagcgatttgcaaagaccgtatgatgatgatcatgatcttactggtgaattacagacctgatgaatttatagaatgtgaagacccagtggatcatgttggaaatgcaactgcatcccaggaacttggttatggttgtctcaagttcggcggtcaggcctacagcgacgtggaacacacttcagtccagtgccatgccttagatggaattgagtgtgccagtcctaggacctttctacgagaaaataaaccttgtataaagtataccggacactacttcataaccactttactctactccttcttcctgggatgttttggtgtggatcgattctgtttgggacacactggcactgcagtagggaagctgttgacgcttggaggacttgggatttggtggtttgttgaccttattttgctaattactggagggctgatgccaagtgatggcagcaactggtgcactgtttactaaaaagagctgccatcatggcccarggaggcgggtgaaanctccgtcttctgaattcatctctacaggctcaaaactcctctttgatatcagacctgatgttattttccttcttttggagggcatttgtttggktaagaaggctyctttggactttggaatttcaacccagattttaccttgcagacggaatgacaagcaaaaagtgttgtggggaatcaaatttgttcctttcctcatgcacaaaacataaaggatagtggcgagtttacaagctgtggatgggtttccatagtcttcctttctgtacattgctatatcttcagtcctttggagcaagtggacctaacaagttgagcaaaatgaatatttggatccatgttcctcttgtgaccctgagtcttcatgcaaggagatctgaagctgaacaatgaaaatcttcagcagaaatagaaatggccgtggattgtaatacacactgaaattctgactttctgaatttaaatgtagaataaattttaccaacttggaaaaaaaaaaaaaaaaaaaaaaaaaaaaaaaaaaaaactcgag

SEQ ID NO: 1348 - DNA, 839 bp, Homo sapiens
  misc_feature (1)..(1): n equals a,t,g, or c
  misc_feature (9)..(9): n equals a,t,g, or c
  misc_feature (20)..(20): n equals a,t,g, or c
  misc_feature (26)..(26): n equals a,t,g, or c
  misc_feature (730)..(730): n equals a,t,g, or c
  misc_feature (734)..(734): n equals a,t,g, or c
  misc_feature (777)..(777): n equals a,t,g, or c
ngaggtggncaggggcccancagccnttcaccaaggagaaggccagaccttgggctgaggcagcccagcaaattggggcagggagggacgggcctgcccctgccctgtgcacctcctgaagggccacgtctgggtgatgtccagtgtctgggctgattctagggtaaggacaaatgaagagtcccctggcagcagggaaagggcaccccaaaatgcgagatgggaytggctggcacccacaggacacagggctgaggagaggccctgccttcaccacccaggcctcagttcacactctccttgggacctggggtcatgcgtgctgggcaaacccaccacragcaccctggcatggagaaggggtggcaggaggacgccaatcaccatgtgaccctaggcctgctggccaggccagcaacagttcacctgccctacctgcatctatcagacagccagggatggcaccagtcattcacctatacatccttatcctatgctttcagccacgtgtcctctggaaggaaatccccacgggcccagggcactctgctgtgtcagcgcccacttcctccaaacagtggagctggacaccccgccacatgctggccctgcctggaccacaaggaccacgtggccccacaccagcacgggtgcacccccgggggctggmacttggttctagctctcactggaagggtgagtggmgctgcagtttccgtggaggctctgncctncgagcatggcgacacttaagcaagcgtggcgtgagggaagcangcggaacctgggctggcttcactcatacactgggcctgggcccttaaccaaccccggggctg

SEQ ID NO: 1349 - DNA, 4303 bp, Homo sapiens
  misc_feature (20)..(20): n equals a,t,g, or c
  misc_feature (24)..(24): n equals a,t,g, or c
ggcacgagcagcagcggcanggcnggcgcggagtcccctgcgcccagcggcccggccgggctgcggcagaggcggcggcggcgccccgctccgggtgaggttgccggggccgtgcgcgctgatctgcgagtgaagagggacragggaaaagaaacaaagccacagacgcaacttgagactcccgcatcccaaaagaagcaccagatcagcaaaaaaagaagatgggccccccgagcctcgtgctgtgcttgctgtccgcaactgtgttctccctgctgggtggaagctcggccttcctgtcgcaccaccgcctgaaaggcaggtttcagagggaccgcaggaacatccgccccaacatcatcctggtgctgacggacgaccaggatgtggagctgggttccatgcaggtgatgaacaagacccggcgcatcatggagcagggcggggcgcacttcatcaacgccttcgtgaccacacccatgtgctgcccctcacgctcctccatcctcaccggcaagtacgtccacaaccacaacacctacaccaacaatgagaactgctcctcgccctcctggcaggcacagcacgagagccgcacctttgccgtgtacctcaatagcactggctaccggacagctttcttcgggaagtatcttaatgaatacaacggctcctacgtgccacccggctggaaggagtgggtcggactccttaaaaactcccgcttttataactacacgctgtgtcggaacggggtgaaagagaagcacggctccgactactccaaggattacctcacagacctcatcaccaatgacagcgtgagcttcttccgcacgtccaagaagatgtacccgcacaggccagtcctcatggtcatcagccatgcagccccccacggccctgaggattcagccccacaatattcacgcctcttcccaaacgcatctcagcacatcacgccgagctacaactacgcgcccaacccggacaaacactggatcatgcgctacacggggcccatgaagcccatccacatggaattcaccaacatgctccagcggaagcgcttgcagaccctcatgtcggtggacgactccatggagacgatttacaacatgctggttgagacgggcgagctggacaacacgtacatcgtatacaccgccgaccacggttaccacatcggccagtttggcctggtgaaagggaaatccatgccatatgagtttgacatcagggtcccgttctacgtgaggggccccaacgtggaagccggctgtctgaatccccacatcgtcctcaacattgacctggcccccaccatcctggacattgcaggcctggacatacctgcggatatggacgggaaatccatcctcaagctgctggacacggagcggccggtgaatcggtttcacttgaaaaagaagatgagggtctggcgggactccttcttggtggagagaggcaagctgctacacaagagagacaatgacaaggtggacgcccaggaggagaactttctgcccaagtaccagcgtgtgaaggacctgtgtcagcgtgctgagtaccagacggcgtgtgagcagctgggacagaagtggcagtgtgtggaggacgccacggggaagctgaagctgcataagtgcaagggccccatgcggctgggcggcagcagagccctctccaacctcgtgcccaagtactacgggcagggcagcgaggcctgcacctgtgacagcggggactacaagctcagcctggccggacgccggaaaaaactcttcaagaagaagtacaaggccagctatgtccgcartcgctccatccgctcagtggccatcgaggtggacggcagggtgtaccacgtaggcctgggtgatgccgcccagccccgaaacctcaccaagcggcactggccaggggcccctgaggaccaagatgacaaggatggtggggacttcagtggcactggaggccttcccgactactcagccgccaaccccattaaagtgacacatcggtgctacatcctagagaacgacacagtccagtgtgacctggacctgtacaagtccctgcaggcctggaaagaccacaagctgcacatcgaccacgagattgaaaccctgcagaacaaaattaagaacctgagggaagtccgaggtcacctgaagaaaaagcggccagaagaatgtgactgtcacaaaatcagctaccacacccagcacaaaggccgcctcaagcacagaggctccagtctgcatcctttcaggaagggcctgcaagagaaggacaaggtgtggctgttgcgggagcagaagcgcaagaagaaactccgcaagctgctcaagcgcctgcagaacaacgacacgtgcagcatgccaggcctcacgtgcttcacccacgacaaccagcactggcagacggcgcctttctggacactggggcctttctgtgcctgcaccagcgccaacaataacacgtactggtgcatgaggaccatcaatgagactcacaatttcctcttctgtgaatttgcaactggcttcctagagtactttgatctcaacacagacccctaccagctgatgaatgcagtgaacacactggacagggatgtcctcaaccagctacacgtacagctcatggagctgaggagctgcaagggttacaagcagtgtaacccccggactcgaaacatggacctgggacttaaagatggaggaagctatgagcaatacaggcagtttcagcgtcgaaagtggccagaaatgaagagaccttcttccaaatcactgggacaactgtgggaaggctgggaaggttaagaaacaacagaggtggacctccaaaaacatagaggcatcacctgactgcacaggcaatgaaaaaccatgtgggtgatttccagcagacctgtgctattggccaggaggcctgagaaagcaagcacgcactctcagtcaacatgacagattctggaggataaccagcaggagcagagataacttcaggaagtccatttttgcccctgcttttgctttggattatacctcaccagctgcacaaaatgcattttttcgtatcaaaaagtcaccactaaccctcccccagaagctcacaaaggaaaacggagagagcgagcgagagagatttccttggaaatttctcccaagggcgaaagtcattggaatttttaaatcataggggaaaagcagtcctgttctaaatcctcttattcttttggtttgtcacaaagaaggaactaagaagcaggacagaggcaacgtggagaggctgaaaacagtgcagagacgtttgacaatgagtcagtagcacaaaagagatgacatttacctagcactataaaccctggttgcctctgaagaaactgccttcattgtatatatgtgactatttacatgtaatcaacatgggaacttttaggggaacctaataagaaatcccaattttcaggagtggtggtgtcaataaacgctctgtggccagtgtaaaagaaaatccctcgcagttgtggacatttctgttcctgtccagataccatttctcctagtatttctttgttatgtcccagaactgatgttttttttttaaggtactgaaaagaaatgaagttgatgtatgtcccaagttttgatgaaactgtatttgtaaaaaaaattttgtagtttaagtattgtcatacagtgttcaaaaccccagccaatgaccagcagttggtatgaagaacctttgacattttgtaaaaggccatttcttgggagttttttggtgtgtctgtttttttaaagtattcaagatactaccagtcaacatctttttggaagaaaatgccttgggtttagaagattttcttaaaaggggagtagatggttgtagattgactaaaaagtctaccatacttcaagggactacaggtaagtctcatagtataccagctttggtacttcattttttaaaaaagtattaatcaattgcaaagaaattcgccttggccaacccttctttgtgtatcaggtagtctaacctgatacaagtagttgacagatttcaactatcaatcaccagtccaacccatttctcatttaacagatgacggagataatccctaaaagcacccacatttgtttcaatgccccaaacaggccaaggctccctagcaactccctagtggcgttttttaacttctcagaaactgttaccattatttgaaataggcttccttaacctcctttacccttaacccaacagggatttaaaaaaaaaaaaaaaaaaa

SEQ ID NO: 1350 - DNA, 724 bp, Homo sapiens
  misc_feature (547)..(547): n equals a,t,g, or c
  misc_feature (565)..(565): n equals a,t,g, or c
gggccgggcccctagtgcggtgttgcgggacggggccgaggcccggtcggttggggcgtgggggcggagaggatggagcctccgaggcgttaggcgactctgtcatctctgggcgtgcagccgtcgtttcctggcgcggcccgtgtgatggtgccgggaggaaggaagcgcagtgacagcgcctctctcattcagtctttgattatacatcagcatcaccagctccctcaccaccaatgcgaccatgggagatgacatcaaataggcagcccccttcagttcgaccaagccaacatcacttctcaggggaacgatgcaacacacctgcacgcaacagaagaagtcctcctgtcaggcgccagagaggaagaagggatcgtctgtctcgacataattccattagtcaagatgaaaactatcaccatctcccttacgcacagcagcaagcaatagggagcctcgagccttccaccctccgaatgtatctccccgtctgctacatcctgctgctcatccaccccagcagaatgcagtcatggttgacatnacatgatcaggtacaatnaacagaatgtcttggaaatacagaagctgaaattttgtggcagtttgagattttttttttgggctttttgttgcaaattcttttartttttacctaaaatgaagttatttaagttcctcattccttttaagaattgagatttaaattctacacagcttc

SEQ ID NO: 1351 - DNA, 3963 bp, Homo sapiens
cttgtttctgttttctttagattgtggtatctgaacgggaactatttggttctgttggtgtcattggtggtcattcttcctttgtcgctgtttagaaatttaggatatttgggatataccagtggcctttccttgttgtgtatggtgttctttctgattgtggtcatttgcaagaaatttcaggttccgtgtcctgtggaagctgctttgataattaacgaaacaataaacaccaccttaacacagccaacagctcttgtacctgctttgtcacataacgtgactgaaaatgactcttgcagacctcactattttattttcaactcacagactgtctatgctgtgccaattctgatcttttcatttgtctgtcatcctgctgttcttcccatctatgaagaactgaaagaccgcagccgtagaagaatgatgaatgtgtccaagatttcattttttgctatgtttctcatgtatctgcttgccgccctctttggatacctaacattttacgaacatgttgagtcagaattgcttcatacctactcttctatcttgggaactgatattcttcttctcattgtccgtctggctgtgttaatggctgtgaccctgacagtaccagtagttattttcccaatccggagttctgtaactcacttgttgtgtgcatcaaaagatttcagttggtggcgtcatagtctcattacagtgtctatcttggcatttaccaatttacttgtcatctttgtcccaactattagggatatctttggttttattggtgcatctgcagcttctatgttgatttttattcttccttctgccttctatatcaagttggtgaagaaagaacctatgaaatctgtacaaaagattggggctttgttcttcctgttaagtggtgtactggtgatgaccggaagcatggccttgattgttttggattgggtacacaatgcacctggaggtggccattaattggcaccactcaaactcaaactcagtccatctgatgccagtgttgagtaaactcaactactatgaaatttcacctaatgttttcagtttcacttccttttgaagtgcagattcctcgctggttcttctgagtgcagaataagtgaacttttttgttttgttttgtttttttaagaaacttatctgtatgttagaaatggatatgaacaacaaaaccacgagtctcgggttaagggaagtgacaattttattccattccagagaatggacaaactcttaacttttatcaagccacatgcttggctgtgtcattgtttaacttggatattttatgattttacttgaatgtgcctaatggaaccatttgatgtgagaaacaattctttttaatttacagcaaaatattgaataaccattgacaaaaacactattattttttgtaccaaaaatacttaaagacctcagaagcactcttttacttttaagaaattgcttttttgaactttattcagaagcagttatcaataaattccataaaataatgtcattggtatttaaaaatgaatattaatataatgaaatggtttgcctttttgtaggcataataagccaaatacttttttacccaaaataatttttagagaaaatgatgtaatgaaaaattgtaccatgaattaggagcatagttttttccatttaaacgtcaccattacttaaaagatgattgattattgctataccaaatcagatgaactctgttcatcacttttcttctctgtccccaaacaatttggttcattcagactgaaatgtttgtgtcttcaacttattagaatggaagataatgcagatatttctgtgggaaataaaataactaattttgaggtaccaaatagtgcaattgggtaaaacagggtttattcagttgcatctgtctccagtgttgtattgacagctctgggtctttttttgggccagcccttttttgacattgcttccagcagtggaaaatgggcatttgatggcaataggccaaaattattgtgtccagagagtacactttttcaaaatgctcacctactggaagtgtgaattacttgacaatgtatggcttagttgtgttcatgttttgtctacagtagaggtctaatccacaggttacacctatgtttgatatgatataagttctctttgcgtaggccactgggtttctcatgcagtaagctttataaaaactcatttgcactggactgtcatctcattcttgtacaacgtagaattacttgtttacatccaacaaatggttagctagggaaaacagtgcaaactgagtgttagtagtcattttggtccaactgcatgtcaacccttccatttcaatcccagttagaaatgaaaataattactttgaaacttggctttaagagcacatttatcgtacgtcacagtgtatggtgaatatattattaaataatgtggtacttcgctcatcaggcataatgtctaaaatctaatatacataattccattaagtggttgaaggaagcaaataatggaattgtcaattggtcatctggctgtaaggtttgcccttgaactaaaaatgttgtttggggcaagggccagaaatgtggagacatggtttttgttacgcattcttgtattatatgtgactaaatttacaaacaagatacatgtgtaattaaagacccttatggaactggaagacgtcttgtagtgctacattgggtgaaaccgttggtccatttttgtctgtttctatgaagataaaataattgggggccatctagaaatagaaaggcagtgggaagacagattctacggcactgctttcatttaattgggctttaggcactccattcgaatgcagaacctcacctctagttgagaccaagaattggcaaatttgcatgagctcctggaaagagttgctgactttgtatctaagacctgccagggaataccaagagttgtttctacagactttttttttttttttgtatgggagaagatactgtggcaaccaggaaggaatggaaaaaaaattcttttctctacagcaaattaatgtgaggaagctcctccaatcctctggctatttaaggttcaaaatcaagtgcctagggaaaattccaatggatgattttctgggagctatcttgtctaccttgaggttcctgaacaatgaattcccattaatgagcagtcttcagtattaaaaccactgtcttgtcacctcattttgcattactgtcttccgtggatgtttcagttacaactgtaatgttatttatagaacaacattaatccattaaagctaacctatttttcaatatttatgataatctatgtacatatattgtctgtccatatgtatttgtaaataggttgtatataatgtcaggtttgggtcttgggttcaagtgtatatattcctgtaagtttcttaactgcattttgatgaattcacattatgtaactataagaattgtcccaaaagtacctgtacagaaaattgaatattgaaaaattgacaaattgtgtacaaacactaaaaaaaacttgtttaaattgtatttgcaataaacaacatcaaattttttcatgaaatcttggtacaaattcagatctcttatttaaaatttaaataaggaatacattttcaaaatgcagtaatcaaaatgtgatctagtgtaatgaaataaaatgtgatctagtgtaatggaagacctttgagaacctgggtgtattaactttgtgtatatagtgtaaatatccccactgtactgttagaggccaacaattctagtatggcttgttggcaaagagtgctacaccgtttcaatgaaacaatgtatgtttgttttaactgaactaaaataaatacatgcttaatcctgaaaaaaaaaaaaaaaaaaaaaaaaaaaaaaaaaaaaaacaaaaaaaaaaaaaaaaaaaaaaaag

SEQ ID NO: 1352 - DNA, 1436 bp, Homo sapiens
gccagctgctggcagagttcctgtcaagggatcaagtcttccaacagaatggttatggtttaactcagcagaatttgttgaacaactacgacatgctggggatcatggcatggaatgcaacttgcaaaaactggctggcagcagaggctgccctggaaaagtactacctttccattttttatgggattgagttcgttgtgggagtccttggaaataccattgttgtttacggctacatcttctctctgaagaactggaacagcagtaatatttatctctttaacctctctgtctctgacttagcttttctgtgcaccctccccatgctgataaggagttatgccaatggaaactggatatatggagacgtgctctgcataagcaaccgatatgtgcttcatgccaacctctataccagcattctctttctcacttttatcagcatagatcgatacttgataattaagtatcctttccgagaacaccttctgcaaaagaaagagtttgctattttaatctccttggccatttgggttttagtaaccttagagttactacccatacttccccttataaatcctgttataactgacaatggcaccacctgtaatgattttgcaagttctggagaccccaactacaacctcatttacagcatgtgtctaacactgttggggttccttattcctctttttgtgatgtgtttcttttattacaagattgctctcttcctaaagcagaggaataggcaggttgctactgctctgccccttgaaaagcctctcaacttggtcatcatggcagtggtaatcttctctgtgctttttacaccctatcacgtcatgcggaatgtgaggatcgcttcacgcctggggagttggaagcagtatcagtgcactcaggtcgtcatcaactccttttacattgtgacacggcctttggcctttctgaacagtgtcatcaaccctgtcttctattttcttttgggagatcacttcagggacatgctgatgaatcaactgagacacaacttcaaatcccttacatcctttagcagatgggctcatgaactcctactttcattcagagaaaagtgaggggcttgtgaaacagattgttctacagatgaatctgtaagccagttacagtttgccttaactcatagacatcaatcagagagtgtcacagatttaaccttgatctaaagacaagttgtacccagagtatgtgaaaagaatgggacgacaagaatgtactggtttcttcctctaagaattgaaaggagttgaactgccttatgtttgggcatgtaactccaaaatactaggtagtataaggctttctcaatcagtgcaaaaatggaagatatataaagcaacaagttgtctgcatttgatcactggtcagattgtaaaaaaaaaaaaaaaaaactcgag

SEQ ID NO: 1353 - DNA, 4412 bp, Homo sapiens
ctcgaggtcgacggtatcgataagcttgatatcgtttttttttgtttgtaaaaatgaatttattaaaatgctcataattataaaagaatattaaaatgcacagaaattaacattaataattataaaagaatattaaaatgcacagaaattaacattaattacaaactttacatcttatgccacaatgtgtgaaaagcatcatgaatagttctacttcagttaagctgctcatacatttttaccctctcaaacataatatgaacataaaatggtacaagaagtgtttcaacaagagtacattctgacccccattgtgaattaatgttttatgaaattcaaggcacacatgcaataaaaaagggaagactttggtgacagtttataagatggccttgtttagttttaaaataaaaatgatagctttccctttctaatgatatatagctaaattatctgagggatgtttaatgaaaaatcccctgagtatttgctctaatgtttcaatatgctaaaattcacaggcattaaaaaaggatataaagctcagtttctctagtggttaacactggacaggctgaaggctagattctccctcttcacaggtccactgccacacccatcaatttccccagggctgctgcctctgaagccacttacagatgcagccaccattgtctgcagacacagctccatgcttttctttatcactgcaagtcagccgtggactcactaacaaacactgtggatggcatggggaaatgaccctgcatctccactacaactttgctcttttgggcatcttaacagtgtcagatattacatttggtgcctttcaatatgtagagggtttttttttccctcctgtccacagcagcacatttaatctatgaagaggattttctctgctggggctatgaaaacaaatgcacatttcttttaagttctatcatacatacaggagataaggtaaaaacatttccttttctatgctgacatacatggcgagtaactgccaaatttaaacactaggagatagtcacacacttcagagaagagaagaggtactagagaggaagtgacacccgcttccagaagcagtatctcaggagtgaagagaggaacagtggcactcccgtcttggctgcgaatgagaaagagtttccttcagtgggaagaaattcatttctccatcccagtgcagtcagacttcatggggcctgtcttgaactctgattgcatcattaacacgatcaagagagacagtgaaatggggtcccggatccactgggacaattcaaaagcctacaatactgctttgatggatcctacataattacttacaaatcattcatggcaggcatttgaaatcaatcatgacctagagttacgctactttattgtaaaaagcctctaaaatctgagttttcctttgctgctgggattctgataggttggctcctctggtgtttaacagcatcccagtgaagcccatgcagcatgaccatgatgcaaatcacctccctcttgtgcacccagcaatgacctgttaccagtaggggtgagagggcctggctccctgtcttttccagagcgcccaggaggcctgacacttacaaggcaataaagtgaagtagactgctaggctgagcaaaagtgagggggcaagacgtgcatggcaagacaggagtgcagcaggaagtaatctccagataatggtagggtttgtgaccaaacccttttcctttattactcttaactgcctgattggctctagaggaggctaaaaaatcaaatctaatctgagtctctttacttgattatgaataagctgggtatactcctgtctctagtacaatcagacagttacatcaaattactgggcccagagtaacaggatggaggatgcaaggaagccacattctttatggcagagactttggtgtgttgatcactttggcatacagaaataagccaattcctgcagactccttgacaaaaggcactccccacccaatgaccacaatgagggcacttgctgtttctgcccatgcacacagttgtaccccaatggctgtgtagtgagccattcacaaaggcagctggtgatgtgtaatactgcaccttctgtatctaatgaataaaagtcaactggtagaaaattgaggggcttatcttttccagacaattatgttgataaaaatgtaattttaatcatgtgatatcactgttttccaagaaactacacatctttagaaaagattaattatccagatcaacatgagttaaaatgctgtttgaatctgtaactttccctgcttttgtcattttattcccttgagatctgcaaagcagtcaacattgattaggcacggaacctcctaggagtgctcctggaagataaaaagtgtcactgtggattaggacaaatatgcttcaaaaccttgctatcttcactccaacctactaagagtatttttttgagatggaaagacatgctcaaatgaagactgaaactatttcctctgattaactgaggtttcctttctggaggtattgaaaatacrcctaaatattgtgaatccttgagtctagttagctatttttaatcacatgmaagctattaaattaaatctataatgatggtactgtaaggaaaagatgaccctggaacagatctagccaagtgaagaaatgaaacatggcttaaaaataaaggagatcatgcgcctgagaatagacagaaatgaaaataatcaaacagaaaaaaaagaatccattctactttagaaggggtggtttttaagcacactgagggactttttctgtaaaattccaatttatcagaaaaaggtaacattgaggttttccgggtgataagttttatgcccttcatgatctaagttttacattttccagtttctgcatcgctagctgaaactgaaaaataatacatgaggaaatggcaatagttgagactcatatttgccaaagtgatttaacttacacattctcattagtgattcctaatatattttgacaaagctaaattccttaaagtgcttctcagaacataaagctcttattctgattttggccgtaaattgttatctactgcttctatcrtccgctcagctatcacccccatatttttcgtcatatctttgaggtgattctcatgaagaagcttttgggttaggtatttttctctctggatcttgctctttgtgcgttttgatacatcgggaattgcatatgaaatgaaaaatttcacagagtagatgacgtgctccatgacaatgataaaagccagcttggctgcaatcacatgccaatagtagatgttgtgtttatactcctgggggtgtccaggtgggtatcggaaatcacgatacctgcatgtggtatggttacccaggtcagagtacgggtttcccttgcttttgtttttgaagtctgcgactttgaagatggagagagtgttgttgatgtacccttccatggtgtaggaagtgtggtccccgtagggagggacggagaaggaccagtagtacactaggcgggggatcatgtccgacgtgaaagctatgatcatggcattggtcaccacagccagaattgctattccttgcatgatgggctgccatgctccaatgtcttgggctttctctggtaccaggcgtctaaactgggtggtcagtttccatgcgtccactcttatttccaatatattgttcacgagagccaacagaggggccagtggaaaagaggccacaaataaggtgacgaacccaaactgaataatcatttcaagatattcataaaataatcccagtttgcccataggctgcagatggtagtcctgttcccatcgtggggttatcttttctgatccagaaactctgtgaaatcgcccaattagattcatgatccagggcaataatacttcttgtatgttattccagattgcttttcctcccatgattattgtcagctgagttgtcagttcaagaagacagccacctgggtcacactcttcatttctgtattttcccaaccaataaactgggtctcctggatagcctacaaatttgcccttaaagaatgctatgtagaagcatgaagaktagtagttgacaaactggaataagaacatcttcatggtgaggctgttctcataatcagtctgggtccttgggagttcgaagttagtaatcataattgccactttttcatatatggtgttcagaatcatgataattataaagctgatgatggaggccgtgatggacgtggctgtctgtggagtcaggtatttctggattgggtctgttccattaatgttcttgggaagttttgcagaaaatacaatgaacaccgagagcctatagacaatgatcggacgcgtgggtcga

SEQ ID NO: 1354 - DNA, 1520 bp, Homo sapiens
  misc_feature (1256)..(1256): n equals a,t,g, or c
gccggcccctgcgtgctgggccaggagcgcttcacctcaggccgccactactgggaggtggaggttggggaccgcaccagctgggccctgggggtgtgcagggagaacgtgaacaggaaggagaagggcgagctgtccgcgggcaacggcttctggatcctggtcttcctggggagctattacaattcctcggaacgggccttggctccactccgggacccacccaggcgcgtggggatctttctggactacgaggctggacatctctctttctacagtgccaccgatgggtcactgctattcatctttcccgagatccccttctcggggacgctgcggcccctcttctcacccctgtccagcagcccgaccccgatgactatctgccggccgaaaggtgggtccggggacaccctggctccccagtgactcgggccctcctggaggagtcctgttgcctctcctgcccctccaggccactgagtgttttggccacttggaggacctgggaggagggagtgtgtcctttgagcaagaggaggaactcctggtgcctttctgagcctgcgtgggagaaccccaattctagcactccaggaaactgtgggagagtgtggggcaggctccgtcctccctgggagacccctccagccaccgggtgccacttaatgccaacagcccttaccaaagctgggagccccattgccccggcagctctggcctgtggttccagaagctgagaaaactccactggggcttgcagaatccagggttcacctaagctgcacagttcctgcagctttgccagccccctgaaagtcttgtgtaccccacctctgaagatgctgggggaggcagctgggatgggagccagccccatgcctgtctgtgaccccacagtgggtgagagcccgtcacagtcctgggtgtggctgctctggaagaattaggaggcagccataataagagtcttcagagagatgatgggaggggccagtgaggacaggaacagagagtagatgtcctataataaaggggcttctgggaggtgcctgggcacagatgtctgttcagcaggtgtgtgggcctagaggagagagcagagcccagaaatgtcttttgcaggcccacgttctgacttgaagctttcgtgggcatgttgccattgggttttgcccttgcaaaggcttcctaggtctccagtggcccctcaggacccagggtcccagctgctgcttggggatgtgcactgctgncgccggccttgcagtctctctaccctggggaggaacagtggcttctcagagcctggggcatacagaagaaggcaggagttgatttttgtgttgggtttggggtttctttgtcctcaaggtactgttctgtttctctttacccctctgctttatttattgtaagcattcccacgttaaataaactttggctgttgtctacaagtcaaaaaaaaaaaaaaaaaaaaaaaaaaaaaaaaaaaaaaaaaataaaaaaaaaaaaaaaaa

SEQ ID NO: 1355 - DNA, 2426 bp, Homo sapiens
  misc_feature (1)..(1): n equals a,t,g, or c
  misc_feature (8)..(8): n equals a,t,g, or c
  misc_feature (14)..(14): n equals a,t,g, or c
  misc_feature (49)..(49): n equals a,t,g, or c
  misc_feature (2402)..(2402): n equals a,t,g, or c
  misc_feature (2413)..(2413): n equals a,t,g, or c
nattgagngcaacnggtaagtcgacgcacgtagtaggggaaagcctggntacgcctgcaggtaccgggtccgsaattcccggggtcgacccacgcgtccgctgagaataatggcccggttggcccgggacgagtggaatgattaatgatgttttgcagcagttttctacgtctgaaattttttatgtctctggaacccagaatttgctaagagatggaggaacctcagaaaagctatgtgaacacaatggaccttgagagagatgaacctctcaaaagcaccggccctcagatttctgttagtgaattttcttgccactgctgctacgacatcctggttaaccccaccaccttgaactgtgggcacagcttctgccgtcactgccttgctttatggtgggcatcttcaaagaaaacagaatgtccagaatgcagagaaaaatgggaaggtttccccaaagtcagtattctcctcagggatgccattgaaaagttatttcctgatgccattagactgagatttgaagacattcagcagaataatgacatagtccaaagtcttgcagcctttcagaaatatgggaatgatcagattcctttagctcctaacacaggccgagcgaatcagcagakgggagggggattcttttccggtgtgctcacagctttaactggagtggcagtggtcctgctcgtctatcactggagcagcagggaatctgaacacgacctcctggtccacaaggctgtggccaaatggacggcggaagaagttgtcctctggctggagcagctgggcccttgggcatctctttacagggaaaggtttttatctgaacgagtaaatggaaggttgcttttaactttgacagaggaagaattttccaagacgccctataccatagaaaacagcagccacaggagagccatcctcatggagctagaacgtgtcaaagcattaggcgtgaagcccccccagaatctctgggaatataaggctgtgaacccaggcaggtccctgttcctgctatacgccctcaagagctcccccaggctgagtctgctctacctgtacctgtttgactacaccgacaccttcctacctttcatccacaccatctgccctctgcaagaagacagctctggggaggacatcgtcaccaagcttctggatcttaaggagcctacgtggaagcagtggagagagttcctggtcaaatactccttccttccataccagctgattgctgagtttgcttgggactggttggaggtccattactggacatcacggtttctcatcatcaatgctatgttactctcagttctggaattattctccttttggagaatctggtcgagaagtgaactgaagaccgtgcctcagaggatgtggagccatttctggaaagtatcaacgcaggggctttttgtggccatgttctggcccctcatccctcagtttgtttgcaactgtttgttttactgggccctgtactttaacccaattattaacattgatcttgtggtcaaggaactccggcggctggaaacccaggtgttgtgactggcactgcccaggctgagactcttcaagtcccgctgacgtctgagctttgatgcttaagaggggtgaggcagggagcggacttcctattttctaccctcagtaaaacaaggtgctgctttgtatatcaaaagctccaaccatgtcctctccccctcagcctgtgggtggcacgagcaaggactgacatccgcacagggaggattgtctgtttggctgacacagcagcagcccttcccacccagccaccttcctcacagggactaggaggctcagtccccaacggctggcaagactcagggtcctcagtggacatggtgtgggtgacatcagaagggtgccacatcagtcccctccccaacctcagtgactgacagaggatccggatctcagagcctgagaccaggtttattggggcctggcctgtcctctaagtcaagtttaggaaaacaaggataagattctgtcataggcatagagagttgcacataaaaaataccgaagaaaacccaaaattcaatcaacaattctgtcttattgaagagttgctaggattcagagtaaaactcaaaggattcagtttgagcctagaatgatggttagacttgtagtcactgggcttttgttttgctttatggaaatcattgaaggtctggatccctttctctgaatggagagattgagagggatgtcgggcagttcccattagatttagtggccttcatgttattcagaattgttttgggtgatacctcacccctgttaatcccagcactttggggtggggtgargscaggcggatcccttgaagccagggactttcaagaccagctttnggcccaacatnggttgaaacctcc

SEQ ID NO: 1356 - DNA, 1901 bp, Homo sapiens
  misc_feature (10)..(10): n equals a,t,g, or c
  misc_feature (16)..(16): n equals a,t,g, or c
aatgattcgntttctntagggaccacccaattaaatcttgtatcaagtatttgtggaaaactggaaatgtttctctggtatggttggtgaatgatgatttggaggaggtattaaagtttatccgatccagctttggcctggtgttccacgtagaaaaggatgtaggccttcgccttcaccacagtctcctcgtcagtcagtgttacagtactgtcattgaagtggaaccagcggccttcgtgagttgcgtatgctgtgtaatgtccagaaccaaccccggaaccatggtgcaccaccacagcggcgaggtcatacaggcagctctccgggccactgttctcaggctctagtaagtagcatttcatgtctaggcctctcagtggaaattctacgtatgtatcaactttatttcttaaatatgctgtccaatgaaatcttttcaaatgtaagcatagcaccttgggtagtttttgaatccaaaacttttttgtggacttttgtttctttttgcatttatggcacatatataactctgtctcatcaagttcttctaagtcggtaaaactgcgaagacaatctcgtaacgaacaaactggtccattttcttgattcttagagcgcttacttctgaactgacttggaatatctaatgaaaggtctaggaatggatcaaactttctagattctgtcccacatatgaggcagttaacctcattttggagaatgcctccgaatatagccgtgacaacagtagatgctccatttatgcaacacttgttacttgcagacagagtagaattctcctgcagaattgctgagcgggaaacaccgttgaaaccgccctgaagttccaagtgtaggtggtccaaaaggtagcgcatgaattcatgggcgtcctgctgttgatagcccctaaagtttggcataatcttccaaacaacataaaataaggactctgggctaaatgcagtctggctgccttgccataaagcacagagtgtctttctaaactcttctaccaaagacacattgttatccccttggctcctggtgtggtatgtccgccttcctgctgttttcccattccttaactccacggcgggcagttctttgaaataacagcaaaactgctcaatgttactgagtgactgaaggatggcattcatgaaacatgtgttccccaaattccgaaggcctgtggcacaaatggcagtggtgcttccatttacttttaataacttgctgtttagtgttgagttttccaaaagttttcttttcttatgcctgtcagctgtgaaagctgagttttccaagttctgtaagtgttctctgactttctgtaccagtcccagcttggtgtcattaaccacaaaatcatcacagcgataacagtatgtactgtagctactgcaatccatacatactgtgtgctgaactttatcttgcttttctgatttcttatggttggttaaaggtacttgtgcatcttcataatgtttttttgcatggccattcacatacctctcaaaatctaggagaggaatctgtctcttcaactgcagaatttaagtgcttctacttttcttcttttttaaaaaaaagttatctgtacaaagtattttcaggttccccaaatccttccacagtggacacttgaacaagtcaaacagacccaagggcttttgttggaccggcacacgctgcagcaccaggacgacggggagccgttggggaacttggctgagtccggagcaatgcagacgctggagctcaggtgtggacactccatggccacgaggagggcagctgggaggactgcggctccaggacccggcgaggtgggggcggaggaactccggaggctccgtctggtgtcgcttctagccgggcgctcggccgag

SEQ ID NO: 1357 - DNA, 913 bp, Homo sapiens
  misc_feature (865)..(865): n equals a,t,g, or c
  misc_feature (891)..(891): n equals a,t,g, or c
agagcctactggctcagtctcaaatcgaaatatggaaagggcagagtcacggagtggaagaggaggttctggtggtggtagtagttctggttccagttcgagttccagttccagttcgagttccagttccagttcaagttccagttccagtcctagttccagttccggtggtgaaagttcagaaactagctcagatttatttgaaggcagtaatgaaggaagctcatcatcaggctcatcaggtgccaggcgagagggtcgacatagggccccagtcacatttgatgaaagtggctctttgcccttccttagcctggctcagtttttcctctttaaatgaggatgatgatgaccaacctaggaggactcaccaaagaacagatttgacaacttgggcaatgagaagttttggtgaaaatgatgcattaaaaacctgtagtgtttgcattacagaatatcagaaggcaacaaacttcgtaaactaccttgttcccatgagtaccatgtccactgcatcgatcgctggttatctgagaattctacctgtcctatttgtcgcaragcagtcttagcttctggtaacagagaaagtgttgtgtaattaagatctgaactctyagctatgtagctgatatagtgatgggcaaacaggaatcacttgcttttatgtccactttttgagtggtacttaaatgtaaagtaacaacctgaattgagtcattgctttctgaaggaatcattgtcctttctccagtttttgttccagaataaaaggaaatattttaaaagccacgttataggacctaaaaactgatttccgtacccagttaaattgggagcatccactgttactgatatttaccanatacacttgccaattttccctttggnaaccttaaaagacctgccttag

SEQ ID NO: 1358 - DNA, 1249 bp, Homo sapiens
  misc_feature (465)..(465): n equals a,t,g, or c
  misc_feature (1241)..(1241): n equals a,t,g, or c
gtcgacccacgcgtccgctgtaacccgcacacgaatttcacggtgcccacggtttggggaagcaccgtgcaagtctcttggttggccctcatccaacgcggcgggggctgcaccttcgcagacaagatccatctggcttatgagagaggggcgtctggagccgtcatctttaacttccccgggacccgcaatgaggtcatccccatgtctcacccgggtgcagtagacattgttgcaatcatgatcggcaatctgaaaggcacaaaaattctgcaatctattcaaagaggcatacaagtgacaatggtcatagaagtagggaaaaaacatggcccttgggtgaatcactattcaatttttttcgtttctgtgtccttttttattattacggcggcaactgtgggctattttatcttttattctgctcgaaggctacggaatgcaagagctcaaagcaggaagcanaggcaattaaaggcagatgctaaaaaagctattggaaggcttcaactacgcacactgaaacaaggagacaaggkaaattggccctgatggagatagttgtgctgtgtgcattgaattgtataaaccaaatgatttggtacgcatcttaacgtgcaaccatattttccataagacatgtgttgacccmtggctgttagaacacaggacttgccccatgtgcaaatgtgacatactcaaagctttgggaattgaggtggatgttgaagatggatcagtgtctttacaagtccctgtatccaatgaaatatctaatagtgcctcctcccatgaagaggataatcgcagcgagaccgcatcatctggatatgcttcagtacagggaacagatgaaccgcctctggaggaacacgtgcagtcaacaaatgaaagtctacagctggtaaaccatgaagcaaattctgtggcagtggatgttattcctcatgttgacaacccaacctttgaagaagacgaaactcctaatcaagagactgctgttcgagaaattaaatcttaaaatctgtgtaaatagaaaacttgaaccattagtaataacagaactgccaatcagggcctagtttctattaataaattggataaatttaataaaataagagtgatactgaaagtgctcagatgactaatattatgctatagttaaatggcttaaaatatttaacctgttaacttttttccacaaactcattataatatttttcataggcaatttcctctcngtagtgat

SEQ ID NO: 1359 - DNA, 2826 bp, Homo sapiens
  misc_feature (2817)..(2817): n equals a,t,g, or c
cagtcttccagggcggcggtgggtgtccgcttctctctgctcttcgactgcaccgcactcgcgcgtgaccctgactccccctagtcagctcagcggtgctgccatggcgtggcggcggcgcgaagccrgcgtcggggctcgcggcgtgttggctctggcgttgctcgccctggccctgtgcgtgcccggggcccggggccgggctctcgagtggttctcggccgtggtaaacatcgagtacgtggacccgcagaccaacctgacggtgtggagcgtctcggagagtggccgcttcggcgacagctcgcccaaggagggcgcgcatggcctggtgggcgtcccgtgggcgcccggcggagacctcgagggctgcgcgcccgacacgcgcttcttcgtgcccgagcccggcggccgaggggccgcgccctgggtcgccctggtggctcgtgggggctgcaccttcaaggacaaggtgctggtggcggcgcggaggaacgcctcggccgtcgtcctctacaatgaggagcgctacgggaacatcaccttgcccatgtctcacgcgggaacaggaaatatagtggtcattatgattagctatccaaaaggaagagaaattttggagctggtgcaaaaaggaattccagtaacgatgaccataggggttggcacccggcatgtacaggagttcatcagcggtcagtctgtggtgtttgtggccattgccttcatcaccatgatgattatctcgttagcctggytaatattttactatatacagcgtttcctatatactggctctcagattggaagtcagagccatagaaaagaaactaagaaagttattggccagcttctacttcatactgtaaagcatggagaaaagggaattgatgttgatgctgaaaattgtgcagtgtgtattgaaaatttcaaagtaaaggatattattagaattctgccatgcaagcatatttttcatagaatatgcattgacccatggcttttggatcaccgaacatgtccaatgtgtaaacttgatgtcatcaaagccctaggatattggggagagcctggggatgtacaggagatgcctgctccagaatctcctcctggaagggatccagctgcaaatttgagtctagctttaccagatgatgacggaagtgatgagagcagtccaccatcagcctcccctgctgaatctgagccacagtgtgatcccagctttaaaggagatgcaggagaaaatacggcattgctagaagccggcaggagtgactctcggcatggaggacccatctcctagcacacgtgcccactgaagtggcaccaacagaagtttggcttgaactaaaggacattttattttttttactttagcacataatttgtatatttgaaaataatgtatattattttacctattagattctgatttgatatacaaaggactaagatattttcttcttgaagagacttttcgattagtcctcatatatttatctactaaaatagagtgtttaccatgaacagtgtgttgcttcagactattacaaagacaactggggcaggtactctaatataaaggacaggtggtgtttctaaataattggctgctatggttctgtaaaaaccagttaattctatttttcaaggtttttggcaaagcacatcaatgttagactagttgaagtggaattgtataattcaattcgataattgatctcatgggctttccctggaggaaaggttttttttgttgttttttttttaagaacttgaaacttgtaaactgagatgtctgtagcttttttgcccatctgtagtgtatgtgaagatttcaaaacctgagagcactttttctttgtttagaattatgagaaaggcactagatgactttaggatttgcatttttccctttattgcctcatttcttgtgacgccttgttggggagggaaatctgtttattttttcctacaaataaaaagctaagattctatatcgcacatgagcattaagttcttcattgccttgttaaggaaaatgagtaggcagactcagaatctgttatattgatttcagttacaatttaatctttacaattaaaagggcgaaagatgtagaattttagtttttgttgttgactcgaaataaccagttttcttgattagagtttaagcagatttaataccatgaccttgcttaaccgtttcttcttttttacttgcttgctgttcttttgggtcaaaggagcaggctaatgcaaagcttttggagactgctaagtgttaaaaagtgattaaacacacactctgctattttttcacttcttggaggtagaagtcgagtatgaggcagttattttttagagtgtggaattatagtctttccttgctcctagttattctgtatatctytactttgtaggtaaaaataaatgtttatttaamacaatttttaaaattataawtttatttttatagccatatgtaggatataaagatttatatagattattttctcaagctacttaatgctttaattctagctactcatcatgaaatagtaaacagttttactgaaataaactctacagacagatgcagtatgaggagctattgaagtagaaaatgtatttcgctttgcacactgagttggttttagcagacaacctcaagtaggtttccataacagccattacctttgaaatctaccttctgtagtttattataaataggaaaatacatcctgattctgtagcaagtagattgtttgctctttgtctttaagaaatactasgagggccgggcgcggtnggggggccc

SEQ ID NO: 1360 - DNA, 1515 bp, Homo sapiens
gcccacgcgtccggccggagggacgatgagctgcgcggggcgggcgggccctgcccggctcgccgcgctagccctgctgacctgcagcctgtggccggcacgggcagacaacgcgagccaggagtactacacrgcgctcatcaacgtgacggtgcaggagcccggccgcggcgccccgctcacgtttcgcatcgaccgcgggcgctacgggcttgactcccccaaggccgaggtccgcggccaggtgctggcgccgctgcccctccacggagttgctgatcatctgggctgtgatccacaaacccggttctttgtccctcctaatatcaaacagtggattgccttgctgcagaggggaaactgcacgtttaaagagaaaatatcacgggccgctttccacaatgcagttgctgtagtcatctacaataataaatccaaagaggagccagttaccatgactcatccaggcactggagatattattgctgtcatgataacagaattgaggggtaaggatattttgagttatctggagaaaaacatctctgtacaaatgacaatagctgttggaactcgaatgccaccgaagaacttcagccgtggctctctagtcttcgtgtcaatatcctttattgttttgatgattatttcttcagcatggctcatattctacttcattcagaagatcaggtacacaaatgcacgcgacaggaaccagcgtcgtctcggagatgcagccaagaaagccatcagtaaattgacaaccaggacagtaaagaagggtgacaaggaaactgacccagactttgatcattgtgcagtctgcatagagagctataagcagaatgatgtcgtccgaattctcccctgcaagcatgttttccacaaatcctgcgtggatccctggcttagtgaacattgtacctgtcctatgtgcaaacttaatatattgaaggccctgggaattgtgccgaatttgccatgtactgataacgtagcattcgatatggaaaggctcaccagaacccaagctgttaaccgaagatcagccctcggcgacctcgccggcgacaactcccttggccttgagccacttcgaacttcggggatctcacctcttcctcaggatggggagctcactccgagaacaggagaaatcaacattgcagtaacaaaagaatggtttattattgccagttttggcctcctcagtgccctcacactctgctacatgatcatcagagccacagctagcttgaatgctaatgaggtagaatggttttgaagaagaaaaaacctgctttctgactgattttgccttgaaggaaaaaagaacctatttttgtgcatcatttaccaatcatgccacacaagcatttatttttagtacattttattttttcataaaattgctaatgccaaagctttgtattaaaagaaataaataataaaataaaaaaaaaaaaaaaacycgagggggggcccgtacccaattcgccctatagtgagcgattc

SEQ ID NO: 1361 - DNA, 2447 bp, Homo sapiens
  misc_feature (961)..(961): n equals a,t,g, or c
  misc_feature (964)..(964): n equals a,t,g, or c
gctgattctctggctgtgtggggcgcacggtcccgggatactggggacggcggggtgggagggcgccgtctggggccgcgcgcgggcgggggagatggcggcgcgatggagcagcgaaaacgtggttgtagagttccgtgactcccaggcaactgcgatgtctgtggactgtcttgggcagcatgcagtgctttctggccgcakattcttatacatcgtcaatctagatgcccctttcagaaggtcaccgaaagatctctcgccagagcaaatgggacattggagctgtgcagtggaatcctcatgacagctttgcacactattttgcggcttcgagtaaccaacgagtagacctttacaagtggaaagacggcagtggggaagttggcacaacctttacaaggccacactcgtgtcatcagcgacttggacttgggcggtgtttgagcctgacctcctggttaccagctctgtggacacctacatctacatttgggatatcaaagacacaaggaaacctactgttgcactgtctgctgttgcgggtgcctcccaggtcaaatggaataaaaaaaatgctaactgccttgccaccagccatgacggcgatgtgcggatatgggataagaggaaacccagtacagcagtggaatatctagccgcccacctctccaaaatccatggcctggactggcacccagacagcgagcacattcttgctacctccagtcaagacaattctgtgaagttctgggattaccgccagcctcggaaatacctcaatattcttccttgccaggtgcctgtytggaaggccagatacacacctttcagcaatggattggtgactgtgatggttccccagctgcggagggaaaacagccttctcctgtggaatgtctttgacttgaacaccccagtccacaccttcgtggggcatgatgatgtggtcctggagttncantggaagaaagcagaaggaagggtccaaggactatcaactggtgacgtggtcccgggatcagaccttgagaatgtggcgggtggattcccagatgcagaggctttgtgcaaatgacatattagatggtgttgatgagttcattgagaktatttcccttctgccggaacctgagaagaccctgcacactgaagatacagatcaccagcacactgcaagccatggggaggaagaagccctaaaagaagatccccctagaaatctcctggaagagaggaaatcagatcaactggggctgcctcagaccttgcagcaggaattctccctgatcaatgtgcaaatccggaatgtcaatgtggagatggatgcggcagacaggagctgcacagtgtctgtgcactgcagcaaccatcgtgtcaagatgctggtgaagttccctgcacagtacccaaacaacgccgccccttccttccagtttattaaccccacaaccatcacatccaccatgaaagctaagctgctgaaggtgggggtctgggttcccaaattctccttgctgttctgcatcattgtctagatggattagtaaagaagaatgaaaactccagtagatgagattcggaagtcatctgtttcgtacacacactagtattagcaacgtaacctctgaacttgccatttactttgtgcagaaaacatcagagcagtggttcttaaccttttttgggtcatagacttcctttgaattctaatgaaaattatggacccttcctcagaaaaatctgcacaatgattgcatatgatttgagaaatattgcctgtaaatatgtgaattgcatagaatctgcccacagatctcattaatactatgcattcatctccggttaggagatttgcaatccaatttcatttagcagcccaggttaggagccctgcagtccaatttcatttacctgaaaacaacaagcaagatgtattctgaagctaaaagatattttataattagaaaaaaacatatgtaaggtcataaaaaaaattttatcccatagaaggagctggtgttatcctagagacaggctggctagctgcacagtaggtgtccaggtggaggcaccacagcctggcatctgtgtttaattctgcagattcagagatttaatgcatcagttcatccagagcaaatcaggtggaatctccatgacaaagccccatgagcctcttcataccsgttcagtctgagcagtgtcacaagtgaagggactgaagtattctgacaaactcaggccaagctgaatgttgctcattttttgtccagtttrggtcgtggacacttgattgttccaccttgttgggggtatcacatggaaccaggaaattttcaagtggcttaaggatctctgaaatgccagtaactcagatcttgtggtatttgacatgttaaacttggaatctgaatatgccgttgcctagtttggacatacaaaaa

SEQ ID NO: 1362 - DNA, 978 bp, Homo sapiens
  misc_feature (496)..(496): n equals a,t,g, or c
  misc_feature (975)..(975): n equals a,t,g, or c
tgacaaagggtggcttcaggatctgattgagaaagttgtcatcctgcgaaaagctgtgcaactcactcaagccatggacactagtactgtaggagttctcttggctgcgaagatgagtcagtatgccaatttgttggcagctcagggcagtattgctgcagccttggcttttcttcctgacaacaccaaccagccaaatatcatgcagcttcgtgacagactttgtagagcacaaggagagcctgtagcaggacatgaatcacctaaaattccgtacgagaaacagcagctccccaagggcaggcctggaccagttgctggccaccaccagatgccaagagttcaaactcaacaatattatccccatggagaaaatcctccacctccgggtttcataatgcatggaaatgttaatccaaatgctgctggtcagcttcccacatctccaggtcatatgcacacccaggtaccaccttatccacaggccamagccttnatcaaccagcccagccgtatcccttcggaamaggggggtcagcaatgtatcgacctcagcagcctgttgctcctcctacttcaaasgcttaccctaacaccccttacatatcttctgcttcttcctatactgggcagtctcagctgtacgcagcacagcaccaggcctcttcacctacctccagccctgctacttctttccctcctcccccttcctctggagcatccttccagcatggcggaccaggagctccaccatcatcttcagcttatgcactgsctyctggaacmacaggtacactgcctgctgccagtgagctgcctgcgtcccaaagaacaggtctgcgcttgaaagggatttggtttggccccctcctttatttgtttatgaacagatgggtggatggaggggtattatttctaactgtttgtaaactgggtaatgtgaggtgttgactgaggtttgggtttggtttttgngtt

SEQ ID NO: 1363 - DNA, 1092 bp, Homo sapiens
cttttctgacgtgcctgagcatgtccacattagaatctgtgacatacctacctgaaaaaggtttatattgtcagagactgccaagcagccggacacacgggggcacagaatcactgaaggggaaaaatacagaaaatatgggtttctacggcacattaaaaatgattttttacaaaatgaaaagaaagttggaccatggttctgaggtccgctctttttctttgggaaagaaaccatgcaaagtctcagaatatacaagtaccactgggcttgtaccatgttcagcaacaccaacaacttttggggacctcagagcagccaatggccaagggcaacaacgacgccgaattacatctgtccagccacctacargcctccaggaatggctaaaaatgtttcagagctggagtggaccagagaaattgcttgctttagatgaactcattgatagttgtgaaccaacacaagtaaaacatatgatgcaagtgatagaaccccagtttcaacgagacttcatttcattgctccctaaagagttggcactctatgtgctttcattcctggaacccaaagacctgctacaagcagctcagacatgtcgctactggagaattttggctgaagacaaccttctctggagagagaaatgcaaagaagaggggattgatgaaccattgcacatcaagagaagaaaagtaataaaaccaggtttcatacacagtccatggaaaagtgcatacatcagacagcacagaattgatactaactggaggcgaggagaactcaaatctcctaaggtgctgaaaggacatgatgatcatgtgatcacatgcttacagttttgtggtaaccgaatagttagtggttctgatgacaacactttaaaagtttggtcagcagtcacaggcmaatgtctgagaacattagtgggacatacaggtggagtatggtcatcacaaatgagagacaacatcatcattagtggatctacagatcggacactcaaagtgtggaatgcagagactggagaatgtatacacaccttatatgggcatacttccactgtgcgttgtatgcatcttcatgaaaaaa

SEQ ID NO: 1364 - DNA, 546 bp, Homo sapiens
ctgacaacaagatggaatttgcacaaatcagtcgtgttaagacatttcaggagaacctttcagcatttaaacgtgatccccaaatcaatattttgctgctgcccctgcacacaggttctaatggattaactatcattgaagcaactcatgttctcttggtggagcccatattgaaccctgcccatgagcttcaggccatagggagggtgcaccgaattggacagacaaaacctactattgtacacagattcttaattaaagcaacaatagaagaaagaatgcaggcaatgctgaaaactgctgagagaaggttttttgaggaacaggcgttattttgttttcatgacatcaccccattctcccacccctggtccctgacaactgccattctacagttgagagatttggtgatttgtgagttgttttttatttactttaaaaattttttgatttgttttttatcatctttttcaatttagagatgttttgcacaagtaaaaattatggggcttattcagtaatacatgtctgtaaggaataaacatt

SEQ ID NO: 1365 - DNA, 1804 bp, Homo sapiens
  misc_feature (1785)..(1785): n equals a,t,g, or c
  misc_feature (1804)..(1804): n equals a,t,g, or c
ggcgctcaccgcctcaggtccagcctttcctgccaaggtggctggctgagcctaactgtgtcagaaggaatgtcaccgaagacctggttcctatcgaggacatccctgacgtccatcctgacctgcagaagcagctgcgggcacacggcatctcgtcctactttccagtccaggcagctgtgattcctgccctcctggagagcgcagctgtgggtttctggtgggcagaggtggctaccggcctagcgacctctgtgtttctgccccaacaggcagtgggaagacactggccttcgtcatccctgtggtgcaggccctgctttcgagagtggtctgccacatccgtgccctggttgtgctgcccaccaaggagctggcccrgcaggtgagcaaagttttcaacatctacacagatgccacacctctgagagtctccctggttacgggacagaagtctctggccaaggagcaggagagcctcgtccagaaaacagctgatgggtaccgctgcttggctgacatcgtggtagccacccccggccgcctggtggaccacatcgaccagaccccaggattcagcctccagcagctccgcttcctgattatcgacgaggctgaccggatgattgacagcatgcatcagtcctggctgccgcgggtggtggcgrccgccttccagagcgaggaccccgcggacccctgtgccctgctccagcgaaggcaggcccaggctgtgacagccgccagcacctgctgtccccagatgcccctgcagaagctgctcttctcagctactctgacccagaaccctgaaaagctgcagcagctgggcctccaccagccccggcttttctccacagggctagcacacaggggcctggaagatacagatggggacggggattcggggaagtatgcctttcctgttgggctcacgcaccactacgtgccctgcagcctcagctctaagccgctggtcgtcctgcacctggtcctggagatgggcttctcgagggttctctgcttcactaactcccgagagaactcccacaggctcttcctgctggtgcaagcttttgggggtgtggacgtggctgagttctcctcgcgctacgggcctggccagaggaggatgatcctgaagcagtttgaacaggggaagatccagctgctcatcagcacggacgccaccgcgcgaggcatcgacgtgcagggtgtggagctggtggtgaactacgacgccccccagtacctgagaacctacgtgcaccgggttgggaggacagctcgcgctgggaaaactggacaggccttcacactgctcctgaaagtgcaggagaggagattcctccgaatgctaactgaagctggggcacctgagttgcagcggcacgagctctccagcaagctgctgcagccgctggttcctcggtacgaggaggccctgtcccagctggaggagtctgtcaaggaagagcgcaagcagagggcggcctaggctggggctcagagggccggagggactgaacgctcaccaccctgaccctccttccagagcagtgctgatcactggatcctgtatgtgaggaaaggaatcccccagtggacacagccttcctccccaagcacgtggtctctgcgccaggcagcccgggcgtcagagctcaagcacctgccccgactggagacttcagggcttgtcactttcagagtgtggaggtcaggatggctgcgggcaatgaagccttagtaaaacggtgaaaagtactcccagaaaaaaaaaantgaactataataaaaggan

SEQ ID NO: 1366 - DNA, 2539 bp, Homo sapiens
  misc_feature (1)..(1): n equals a,t,g, or c
  misc_feature (155)..(155): n equals a,t,g, or c
  misc_feature (511)..(511): n equals a,t,g, or c
  misc_feature (1257)..(1257): n equals a,t,g, or c
ncctgctgctgaatagggtgggttcacggtaaccctgctcggcaacggcgcgcaggatatcagggcttaaacccaaagaatcgaaagacmtaactactccgaaccgccccgaccgttaccggtgtagttttcagggagattactgaaaaggaaantgacaaaaaccacaatgtcatgagggagcggagtgtagcagtttttgtgacgcagcgcataaattatccctgtgactggcgttgctaaaattcttagccatactggacaactcccctatggagtcataatcttaatcaatcatttgattaagaatggactgtgcgatgaataatcctgccatgacaatcaagggtgaacaggcgaaaaaacagctgattgctgccgcactggcgcagtttggtgaatatggaatgaacgccaccactcgcgagatagccgcccaggccgggcagaatatcgctgccatcacctactacttcggttcgaaagaagatttgtacctcgcctgcgcccnagtggattgccgattttattggcgagcagttccgtccgcatgccgaggaagccgaacgcttgttcgcgcaaccacagcctgatcgggctgccatccgtgaactgatccttcgcgcctgcaggaacatgattaagctgctcacccaggatgacaccgtcaacctcagcaagtttatctcccgtgagcagctctctcccacggcagcctaccacctggtgcacgaacaggtgattagtccgctacacagccacctgacacgcctgattgccgcctggaccggctgcgacgccaatgacacccgcatgatccttcatacccatgcgttgattggtgagattctggcgttccgtcttggcaaagaaacaattctgttacgtaccggctggaccgcgttcgatgaagaaaagaccgaactgatcaaccagacggtgacctgtcatatcgacctgattttgcaaggattatcgcaaaggagtttgtagtgatgaaaaaacctgtcgtgatcggattggcggtagtggtacttgccgccgtggttgccggaggctactggtggtatcaaagccgccaggataacggcctgacgctgtatggcaacgtggatattcgtacggtaaatcttagtttccgtgttggggggcgcgttgaatcgctggcggtggacgaaggtgatgctatcaaagcgggccaggtgctgggcgaactggatcacaagccgtatgagattgccctgatgcaggcgaaancgggtgtttcggtggcacaggcgcagtatgacctgatgcttgccgggtatcgcaatgaagaaatcgctcaggccgccgcagcgktgaaacaggcgcaagccgcctatgactatgcgcagaacttctataaccgccagcaagggttgaaacakgacatacgttcaargattaaccccgwwtgaaggttagcttgttagttacatttagtaacacatatctggctacttaatccccattctgcccccgcggttacgctttcttatctattctttcaatcagcacttcacccaattcatccttaattctaataactggctattgcgccttacctcgtgttttgtctttttttcattaccaatgtgtgcatgtgaggaacaatatggcactgcaaaatgagaaaaatagtcgttatcttttgcgcgactggaaaccagaaaatccggccttctgggaaaataaaggaaaacatattgctcgaagaaatctctggatatcagtcagttgtctacttcttgccttctgtgtctggatgcwatttagcgcagttaccgytaatctcaataaaatcggttttaattttactaccgatcaactctttttattaaccgcattaccctccgtttctggcgcattattgcgtgttccctactcctttatggtgcctatattcggtggacgccgatggacggtttttagtactgcaatcctgattattccttgcgtctggctcggaattgccgtgcaaaatccgaatactccttttgggatatttatcgttatcgctttgctatgcggttttgcaggtgcaaactttgcttcgagcatgggcaatatcagtttcttctttccaaaagccaaacaagggagcgctcttgggattaatggcggattaggaaacttaggtgtaagtgtaatgcagctggttgcaccgctggtcatttttgtacctgtatttgcctttctcggcgtcaatggcgtaccgcaggccgacggttcggtgatgtcgctggcgaatgccgcatggatttgggtaccgctactggcgattgccacgatcgccgcatggtcagggatgaatgatatcgccagttcacgcgcctcaattgccgaccagctccctgtcttacaacgcctgcatctctggctgctgagcctgctttaccttgcccacttcggttcgtttatcggtttttctgcgggttttgccatgctggcaaaaacccagttcccggatgtgaatattctgcgcctggcgttctttggcccatttatcggtgccatc

SEQ ID NO: 1367 - DNA, 1475 bp, Homo sapiens
gcaatcagacacccgggtgtgctgagctagcactcagtgggggcggctactgctcatgtgattgtggagtagacagttggaagaagtacccagtccatttggagagttaaaactgtgcctaacagaggtgtcctctgacttttcttctgcaagctccatgttttcacatcttccctttgactgtgtcctgctgctgctgctgctactacttacaaggtcctcagaagtggaatacagagcggaggtcggtcagaatgcctatctgccctgcttctacaccccagccgccccagggaacctcgtgcccgtctgctggggcaaaggagcctgtcctgtgtttgaatgtggcaacgtggtgctcaggactgatgaaagggatgtgaattattggacatccagatactggctaaatggggatttccgcaaaggagatgtgtccctgaccatagagaatgtgactctagcagacagtgggatctactgctgccggatccaaatcccaggcataatgaatgatgaaaaatttaacctgaagttggtcatcaaaccagccaaggtcacccctgcaccgactctgcagagagacttcactgcagcctttccaaggatgcttaccaccaggggacatggcccagcagagacacagacactggggagcctccctgatataaatctaacacaaatatccacattggccaatgagttacgggactctagattggccaatgacttacgggactctggagcaaccatcagaataggcatctacatcggagcakggatctgtgctgggctggctctggctcttatcttcggcgctttaattttcaaatggtattctcatagcaaagagaagatacagaatttaagcctcatctctttggccaacctccctccctcaggattggcaaatgcagtagcagagggaattcgctcagaagaaaacatctataccattgaagagaacgtatatgaagtggaggagcccaatgagtattattgctatgtcagcagcaggcagcaaccctcacaacctttgggttgtcgctttgcaatgccatagatccaaccaccttatttttgagcttggtgttttgtctttttcagaaactatgagctgtgtcacctgactggttttggaggttctgtccactgctatggagcagagttttcccattttcagaagataatgactcacatgggaattgaactgggacctgcactgaacttaaacaggcatgtcattgcctctgyatttaagccaacagagttacccaacccagagactgttaatcatggatgttagagctcaaacgggcttttatatacactaggaattcttgacgtggggtctctggagctccaggaaattcgggcacatcatatgtccatgaaacttcagataaactagggaaaactgggtgctgaggtgaaagcataacttttttggcacagaaagtctaaaggggccactg

SEQ ID NO: 1368 - DNA, 1732 bp, Homo sapiens
agctatttaggtgacactatagaaggtacgcctgcaggtaccggtccggaattcccgggtcgacccacgcgtccggttgtccaaaaagctttctgaggtatagttacttttagaagaggaaataccgttttaattcatttgtgctcttgagattgtgtatgtgtggtaggtgtttttgttgtattattacaggttgatgaaaagcccagaaccttgatgacagattgtctggttataaagcattttttacgtaaaatcatcatggtgcaccctaaggtcagatttcatttcagtgtaaaggtaaatggaatcctctccacagagatctttggggtggagaatgaacccactttgaaccttgggaatggaattgctcttttggtcgactcccagcattatgtgagtagaccaaattttggtacaattgaatcacactgcagcagaattcaccctgtgctaggacatccagtaatgcttttcatccctgaagacgtggctggcatggacttgktgggagaactgatactgactycagcagctgcactgtgccccarcccaaaggtttcttccaaccagcttaacaggatttcttcagtttccatatttctatatggacctttgggtctgcctctgatattgtcaacttgggagcagccgatgactactttcttcaaagatacctcttctttagttgactggaaaaaataccatttgtgtatgatacccaatttggatctcaatttggatagagatttggtgcttccagatgtgagttatcaggtggaatccagtgaggaggatcagtctcagactatggatcctcaaggacaaactctgctgctttttctctttgtggatttccacagtgcatttccagtccagcaaatggaaatctggggagtctatactttgctcacaactcatctcaatgccatccttgtggagagccacagtgtagtgcaaggttccatccaattcactgtggacaaggtcttggagcaacatcaccaggctgccaaggctcagcagaaactacaggcctcactctcagtggctgtgaactccatcatgagtattctgactggaagcactaggagcagcttccgaaagatgtgtctccagacccttcaagcagctgacacacaagagttcaggaccaaactgcacaaagtatttcgtgagatcacccaacaccaatttcttcaccactgctcatgtgaggtgaagcagcgctaaccctagaaaaaaaggactcagcccagggcactgaggacgcacctgataacagcagcctggagctcctagcagataccagcgggcaagcagaaaacaagaggctcaagaggggcagcccccgcatagaggagatgcgagctctgcgctctgccagggccccgagcccgtcagaggccgccccgcgccgcccggaagccaccgcggcccccctcactcctagaggaagggagcaccgcgaggctcacggcagggccctggcgccgggcagggcgagcctcggaagccgcctggaggacgtgctgtggctgcaggaggtctccaacctgtcagagtggctgagtcccagccctgggccctgagccgggtccccttccgcaagcgcccaccgatccggaggctgcgggcagccgttatcccgtggtttaataaagctgccgcgcgctcaccaaaaaaaaaaaaaaaaaaaaaaccggcacgagggggggcccgtacccaa

SEQ ID NO: 1369 - DNA, 1593 bp, Homo sapiens
  misc_feature (524)..(524): n equals a,t,g, or c
  misc_feature (654)..(654): n equals a,t,g, or c
gcgcgacggtgcggttggcggacccggkctggcttgtggggaaacgaaactgagggaggaggcggcggctctggcagcggcggcgacagtgtcggcctgaccccccctccgctccccggcagctcgctctctcccctcagcttaacgatgaagaggagaactgacccagaatgcactgcccccatcaagaaacagaaaaaaagagttgcagagcttgccctgagcctcagctccacgtccgatgatgaacctccctcctctgtcagtcatggagcaaaagcatctactacaagccttagtgggtctgatagtgagaccgaggggaaacaacacagctctgactcttttgacgatgcattcaaagcagactctcttgtggaaggaacttcttctcgctattccatgtataatagcgtctcccagaagcttatggccaagatgggcttcagggaaggtgaaggattgggtaaatacagccagggtcggaaggacatcgttgaggcttccagtcagaaaggtcgaanaggcttgggtctgacactccggggctttgaccaggagctgaacgtggactggcgagatgagccagarcccagtgcttgtgarcargtgtcatggkttccagaatgkaccactgaaattcctgacactcangaaatgagcgattggatggtggtgggaaagagaaagatgattattgaagatgaaacagagttttgtggggaagagctgcttcacagtgtgttgcagtgtaagagcgtgtttgatgtcttggatggggaagagatgcggcgagctcggactcgggccaatccctatgagatgatccgaggagtcttctttctaaacagggcagcaatgaagatggctaacatggattttgtatttgatcgcatgttcacaaatccgcgggactcttatgggaagccactggtgaaggaccgggaagctgagcttctgtactttgctgatgtctgcgcaggcccaggtggcttctcagagtatgtgctgtggaggaagaagtggcatgcaaagggctttggaatgactttgaagggccctaatgacttcaagctggaggacttctactctgcttccagtgaactcttcgaaccctactatggtgagggtgggattgatggagatggagatatcacccgcccagagaacatctctgcttttcggaattttgtcctggataacacagatcgcaagggtgtccattttctgatggctgatgggggtttctcggtggaggggcaggagaacctgcaggagatcctcagcaagcagctgcttctgtgtcagttcctcatggcgctgtccattgtccggacaggaggccacttcatctgtaaaacctttgacctgttcacaccgtttagtgtggggcttgtctacctgctgtactgctgctttgaacgartttgtctcttcaagcctattaccagccgtcctgccaactcagagaggtatgtggtgtgcaagggcctgaaggtgggcatagatgatgtkcgggattacctcttcgcagtgaatatttaaactcaatcagctgcgggaacacgggattccgacgtcaactttggtggt

SEQ ID NO: 1370 - DNA, 2508 bp, Homo sapiens
  misc_feature (2498)..(2498): n equals a,t,g, or c
ggacctgtgtgctgcaaggagctaaggccttcagtgtccccttccttacccaggtttctcacagaatggattcccagcgggaacttgcagaggaactgcggctttaccaatccacccttcttcaggatggtctaaaagatctcctggatgagaaaaaattcatcgattgcaccctaaaagcaggtgacaaaagtcttccttgccacagattgattttgtcagcttgtagtccttacttccgtgagtactttttatctgaaattgatgaggcgaaaaaaaaggaggtagtgctagacaatgtggatcctgctatacttgatttaatcatcaaatacctgtactctgccagtattgatctcaatgacggaaatgtgcaagatatttttgcattggccagccgctttcagatcccctcagtgtttactgtctgcgtttcttatcttcagaaaagacttgctcctggtaactgtctagccatcctaagattaggacttcttcttgactgcccgagactcgccatttctgcccgtgaatttgtgtctgatcgctttgtacagatttgtaaggaagaggactttatgcaactgtctccacaggaactgatctcagtcatttcaaatgacagcctaaatgtagaaaaagaagaagcagtatttgaggcagtgatgaaatgggtgcgaacagacaaggaaaacagggttaaaaaccttagtgaagtgtttgattgtatccgttttcgccttatgacagaaaaatattttaaggatcatgttgagaaagatgatataattaaaagcaacccagacctccagaaaaaaatcaaagttctaaaagatgctttcgcaggcaaactcccagaacctagcaaaaatgccgcgaagactggggctggtgaggtgaatggtgatgttggtgatgaagatttacttcctggttacctgaatgacattcccaggcatggaatgtttgtaaaagacctcatcctcttggttaatgacacagcagcagtggcttatgaccccacggaaaatgaatgctaccttactgcactggctgagcagattcccagaaatcattccagcattgttacccagcaaaatcagatatatgtggtaggaggactatatgtggatgaagaaaataaggatcaacctctacagtcatacttcttccagctcgatagcatagcatctgaatgggttggacttccacctctgccttcagccaggtgtctcttcggtctgggagaggtggatgataaaatctatgtagttgcaggcaaagaccttcaaacagaggcttcgctggattcagtattatgctatgatcctgtggctgcaaaatggaacgaagtaaaaaaactccctatcaaagtctatggccataatgtgatttcacataaagggatgatatattgtctaggaggaaagacagatgacaaaaaatgtacaaacagggtgtttatcttcaaccccaaaaaaggagattggaaagatctggctccaatgaaaattcctcgttccatgtttggagtagcagtccataaaggcaaaattgtgattgcaggaggtgtcactgaagatggtctttcagcttcagttgaagcttttgaccttacaacaaataaatgggatgtaatgaccgaatttccccaagaaagaagctccatcagtttggtcagcctggctggatctctgtatgcaattggtggttttgctatgattcaactggagtctaaagaatttgcacccactgaagtcaatgacatatggaagtatgaagatgataaaaaagaatgggctgggatgttgaaggaaatacgttatgcttcaggagctagttgcctagcaacacgtttaaatctcttcaaactgtctaaactgtgaacaaggtgacaaaacataatagattgggaggtggtttgtttggtgaatggggctttaatttattctgttttttaaaagcttgtacagacactcatgtagaaattattcaagaagttattgtctaagagatgagcagtaggtaagaaaacctcagtcattgactcttcaatgtaatgatcagagtttaaaaccattttctaataataaattaaatcttcagttgaacaaattattttgtgaatctgtttcactcaatggattgtaaagaaggctcctaaatttgagttgtttgctaatcatttcatttgcatcattagggtatccttaaactgattttctattacaattggaagtggagaatatgtgcatctacactaaaaaaatgtttaagatatcaaaaacctctcctcgtgcttcaaaatgacaggaatcctgtgcattatactaagaattacatgccataagatgacttcagaaatcctacttcagaagtgtaataaatggatggggaaatcgtttgatggggaaaagtctcttgtaagtaaaagtagtcaaattcaaacaaaaaaaaaaaaaaaaaaaaaaaaaaaaaaaaaaaaaaaaaaaaaaaanaaaaaaaaaa

SEQ ID NO: 1371 - DNA, 2665 bp, Homo sapiens
  misc_feature (689)..(689): n equals a,t,g, or c
  misc_feature (2662)..(2662): n equals a,t,g, or c
gggaggcacaggagcaaggggagcaacagagctggccagtctgtgtgtggtggggctgatgcctgcctgctcacccctgtcccctgttttgccaactgtcaggccacagttgtaagggatcttgtggctgtcaggatggcagaggagcaggagttcacccagctctgcaagttgcctgcacagccctcacacccacactgcgtgaacaacacctaccgcagcgcacagcactcccaggctctgctccgagggctgctggctctccgggacagcggaatcctcttcgatgttgtgctggtggtggagggcagacacatcgaggcccatcgcatcctgctggctgcgtcctgcgattacttcagaggaatgtttgctgggggattgaaggagatggaacaggaagaggtcctgatccacggtgtgtcctacaatgctatgtgccaaatcctacatttcatatacacctccgagctggagctcagcctgagcaatgtacaagagacactggtggctgcctgccagcttcagatcccagaaattatccatttctgctgtgatttcctcatgtcctgggtggacgaagagaacattctcgatgtctaccggctggcagagctgtttgacttgagccgcctgactgagcaactggacacctatatcctcaaaaactttgtggccttctctcggantgacaagtaccgccagcttccattggagaaggtctactccctcctcagcagcaatcgcctggrggtctcctgcgagaccgaggtatatgagggggcccttctctaccattatagcctggagcaggtgcaggctgaccagatctcgctgcacgagcccccaaagctccttgagacagtgcggtttccctgatggaagctgaggtcctgcagcggctgcatgacaagctggaccccagccctttgagggacacagtggccagcgccctcatgtaccaccggaacgagagcctacagcccagcctgcagagcccgcaaacggagctgcggtcggacttccagtgcgttgtgggcttcgggggcattcactccacgccgtccactgtcctcagcgaccaggccaagtatctaaaccccttactgggagagtggaagcacttcactgcctccctggccccccgcatgtccaaccagggcatcgcggtgctcaacaacttcgtatacttgattggaggggacaacaatgtccaaggatttcgagcagagtcccgatgctggaggtatgacccacggcacaaccgctggttccagatccagtccctgcagcaggagcacgccgacctgtccgtgtgtgttgtaggcaggtacatctacgctgtggcgggccgtgactaccacaatgacctgaatgctgtggagcgctacgaccctgccaccaactcctgggcatacgtggccccactcaagagggaggtgtatgcccacgcaggcgcgacgctggaggggaagatgtatatcacctgcggccgcagaggggaggattacctgaaagagacacactgctacgatccaggcagcaacacttggcacacactggctgatgggcctgtgcggcgcgcctggcacggcatggcaaccctcctcaacaagctgtatgtgatcgggggcagcaacaacgatgccggatacaggagggacgtgcaccaggtggcctgctacagctgcacgtctggacagtggtcatctgtctgcccactccctgctgggcacggtgagcctggcattgctgtgctggacaacaggatctatgtgttaggtggccgctcacacaaccgcggcagccgcacaggctacgtgcacatttacgatgtggagaaggactgctgggaggaagggccccagctggacaactccatctcaggcctggcggcctgtgtgctcaccctgccccgctccctgctccttgagccgccccgcgggacccctgaccgcagccaggccgacccggactttgcctctgaggtgatgagtgtgtctgactgggaggagtttgacaactccagtgaggactaggctccctgtgcctggcatcagagggaagggaggctggggctgcagggcagtgaaacccacgcagcctaggccagagcactttactccaggcagggcccctgcccctgttggccacagcttatgggccctgccctctttcttcacaccagccccttggccagcctgccgcaggcatctcagggccrtgcagatcccaggctgtggattacgtcactgcaggaactgcttctgaaaggctttggmcttcctcagtgagccctggaggggttggccttctctcctccctgcctagatcagtccttctccaaaaggacctgggagctggcagcctgggcaggggggctgaggcacgtggtagccctctttctgtgaatggggtggggctgtgggggcagctggggttggaggatgagagctcctgaggggcagaggagcagagatgcatcagctcgcctgggactggctctgtgataaaaagacccctccgctgggttttcagaccccatgttgttggtcaatgaaataaagcatcttacagaaggtgttaactgttaaaaaaaaaaaaaaaaaataaaaaaaaaaaaaaaaaaaaaaaaaaaaaaaaaaaaaaaaacccacgcgtnccg

SEQ ID NO: 1372 - DNA, 2771 bp, Homo sapiens
  misc_feature (448)..(448): n equals a,t,g, or c
cagggatgaggctgagaaatgtgtcgwgatcgccgggaggccctgaacgccggcaaccgcgagaaggcccagcgcttcctgcagaaggccgagaagctctacccactgccctcggcccgcgcactattggaaataattatgaaaaatggaagcacggctggaaatagccctcattgccgaaaaccatcaggtagtggcgatcaaagcaagcctaattgcacaaaggacagcacatctggtagtggtgaaggtggaaaaggctataccaaagaccaagtagatggagttctcagcmtaaacaaatrtaaaaattactatgaagtacttggagttacgaaagatrstggtgatgaagatttgaaaaaagcttatagaaagcttgctttgaagtttcatccagacaaaaaccatgcacctggagcaacagatgcttttaaaaaggttgggnaatgcttatgctgttttaagtaatccagaaaagcgaaaacagtatgacctcacgggcaatgaagaacaagcatgtaaccaccaaaacaatggcagatttaatttccatagaggttgtgaagytgatataactccagaagacttgtttaatatattttttgggggtggrtttccttcaggtagtgtacattctttttcaaatggaagagctggttatagccaacaacatcagcatcgacatagtggacatgaaagagaagaggaaagaggagatggaggtttttctgtgtttatccagctgatgcccataattgtattgatcctcgtgtcattattaagccagttgatggtctctaatcctccttattccttatatcccagatctggaactgggcaaactattaaaatgcaaacagaaaacttgggtgttgtttattatgtcaacaaggacttcaaaaatgaatataaaggaatgttattacaaaaggtagaaaagagtgtggaggaagattatgtgactaatattcgaaataactgctggaaagaaagacaacaaaaaacagatatgcagtatgcagcaaaagtataccgtgatgatcgactccgaaggaaggcagatgccttgagcatggacaactgtaaagaattagagcggcttaccagtctttataaaggaggatgaactggaatttttatttataccttttagcgtactctttattttttctgtaagtaagtttggtttcatcatgagggatgaaggaaaagatttgatactgaaaactaaactgaatagttggttcctgaaatcttggactgtttatgacctactggctcctttaaatagtaactgaaaactaaaatggaatattttagttaacgcttctacaagtattttcattttaaaagcttacatgattcctaactaaagtgtcatgagaaaggattatcacacctgtagcaatttccagttttagtgattctccattttttcccttgtcatgtaaatatttatggaatgatcattttgtgtacatacaggttactgcttttttatttaaattcttttagtgtttagctccatgagacacttcagtttaaattgatggaataaatgttatatgacacatttacattttccttatcaaggtgtcaaatatgtggactttaaacaatgaaactttttcaaaaagaaaaamcaaaaactttaactttgtgtaaaatcttatagtattatcagcttagagggaattgatatttttaatattgccgttatattccaaaatatatattgagataaatgaactggtgtagaatatcagtttgctatttagttttatgaattactatacatatacatgcatagaaatgaaatgctatactgataaattttaaagaaaatatgaggaaatggctataaatattaaactaaaagggtcttcaacagtaaagtgcagttatgtcatttaaaattccaatactttaaaggccaccaaattttgatgtatatgtccttgaagggctgctaaaatttatgaagaggactcacattttcccccatagaaatttgcagtttcttggtgatcatttaagcaggatccaaagaagttcctttacaaataagtaataagaaaaatgagtactaaaatacagctttgtgccttttaaccctatgccaactcctaaacatataagtagattacagtatacttatctgatcagagcatgatctgtttggccacatgcaagtgtgagcagaaatagagcagcacgtagaatagtaacttaaagcaagtcatcctttaaaaattctgagctaaaatctatttaccattgagtaattgaattaatcccataggaataagctccttgtaagtaaatccatgatatgaattagaaaaaaaaaacagctggaaattgaagtttttgatgcctgtatactggatatgaaactatttgatttctagtcttctgtgtttagcagttgtaatattttaatgattttgcttcatactcggttaatggaacataaacatatctttgatacttctttgtgagtgagagaatgctagatagggtggctttgttctttgtttaagttttttttcctgaatgtagttaatttatggcatctgttgaataaaactgctaaaatgacctcttaaaaatgttctgttgtatccccttttccaggtgaatcaatagaaatgcctgattgaattagtaggttaaactaaacaacatactgtcataggaaaactggagagcttaaccaacttgctcttagaaatgttaccttaaaaaaaaaaaaaaagggcggccgc

SEQ ID NO: 1373 - DNA, 1178 bp, Homo sapiens
  misc_feature (1147)..(1147): n equals a,t,g, or c
  misc_feature (1176)..(1176): n equals a,t,g, or c
agggattttacacggtgtatcgtaatgtttttgaaatgattgccaaggaagaactagaatctgtgttagaggaagaggttgatgatttcccaacttttggagactcccagagtgactatgatacggtagtccatcctttctacgcttattggcagagtttctgcactcaaaagaattttgcatggaaggaagaatatgatacacgacaggcttcaaaccgctgggaaaaacgagccatggaaaaagaaaacaaaaagattcgggacaaagcaaggaaagagaagaatgagcttgtccgtcagctggtagctttcattcgtaaaagagataaaagagtgcaggcgcatcgaaaacttgtggaagaacagaatgcagagaaggcgaggaaagccgaagagatgaggcggcagcagaagctaaagcaggccaaactggtggagcagtacagagaacagagctggatgactatggccaatttggagaaagagctccaggagatggaggcacggtacgagaaggagtttggagatggatcggatgaaaatgaaatggaagaacatgaactcaaagatgaggaggatggtaaagacagtkatgaggccgaggacgytgagctctwtgatgacctttactgcccagcatgtgacaaatcgttcaagacagaaaaggccatgaagaatcacgagaagtcaaagaagcatcgggaaatggtggccttgctaaaacaacagctggaggaggaagaagaaaatttttcaagacctcaaattgatgaaaatccattagatgacaattctgaggaagaaatggaagatgcaccaaaacaaaagctttctaaaaaacagaagaaaaagaaacagaaaccagcacaggatgtacctggcaaagattcatatctgcctgcagctcactttcagatggcttggggaaaaaagtgtgtgttgggagagagaagagatggagagagcgagcacaaatgtgccaaaatgttgcttgaaaacagacaggtacgcttaggatatgtttgccaggcgtctttcttttataatgcctgtttgttgttgccattgtttgtgactgtagaagaatagttgctcattgcttatcatttggaatatggaaaagtatcatccttaattttacctgnagagattacttaataaagaattaaattgnga

SEQ ID NO: 1374 - DNA, 558 bp, Homo sapiens
  misc_feature (478)..(478): n equals a,t,g, or c
  misc_feature (502)..(502): n equals a,t,g, or c
  misc_feature (505)..(505): n equals a,t,g, or c
  misc_feature (510)..(510): n equals a,t,g, or c
ctggagaaaaacttacaaatgtaaacaatgtggtaaagccttcatttccgcaggttaccttcggacacatgaaatcagatctcacgcgctggagaaatcccaccaatgtcaggaatgtgggaaaaaactcagttgttccagttcccttcacagacatgaaagaactcatagtggaggaaaactctacgaatgtcaaaaatgtgccaaagtctttagatgtcccacgtcccttcaagcacatgaaagagctcacactggagaaagaccttatgaatgtaataaatgtggtaaaaccttcaattatcccagttgttttcgaagacataaaaaaaactcatagtggagaaaagccatatgaatgtacaaggtgtggtaaagcctttgggtggtgcagttccctccgaagacatgaaatgactcacactggagaaaaaccctttttttgtaaacagtgtggtaaagtctttactttttcaanttaccttagacttcaggaaagaantcnttggncgggcgtaccagttgcttttggcaggaggcaggggggtccaccccccc

SEQ ID NO: 1375 - DNA, 1831 bp, Homo sapiens
  misc_feature (1803)..(1803): n equals a,t,g, or c
gcgtccgcsgggctgggcggcggggacagcggggacggcacggcgcgcgcacttctaagtgccagatgatggaggagcgtgccaacctgatgcacatgatgaaactcagcatcaaggtgttgctccagtcggctctgagcctgggccgcagcctggatgcgacmatgcccccttgcagcagttctttgtagtgatggagcactgcctcaaacatgggctgaaagttaagaagagttttattggccaaaataaatcattctttggtcctttggagctggtggagaaactttgtccagaagcatcagatatagcgactagtgtcagaaatcttccagaattaaagacagctgtgggaagaggccgagcgtggctttatcttgcactcatgcaaaagaaactggcagattatctgaaagtgcttatagacaataaacatctcttaagcgagttctatgagcctgaggctttaatgatggaggaagaagggatggtgattgttggtctgctggtgggactcaatgttctcgatgccaatctctgcttgaaaggagaagacttggattctcaggttggagtaatagatttttccctctaccttaaggatgtgcaggatcttgatggtggcaaggagcatgaaagaattactgatgtccttgatcaaaaaaattatgtggaagaacttaaccggcacttgagctgcacagttggggatcttcaaaccaagatagatggcttggaaaagactaactcaaagcttcaagaagagctttcagctgcaacagaccgaatttgctcacttcaagaagaacagcagcagttaagagaacaaaatgaattaattcgagaaagaagtgaaaagagtgtagagataacaaaacaggataccaaagttgagctggagacttacaagcaaactcggcaaggtctggatgaaatgtacagtgatgtgtggaagcagctaaaagaggagaagaaagtccggttggaactggaaaaagaactggagttacaaattggaatgaaaaccgaaatggaaattgcaatgaagttactggaaaaggacacccacgagaagcaggacacactagttgccctccgccagcagctggaagaagtcaaagcgattaatttacagatgtttcacaaagctcagaatgcagagagcagtttgcagcagaagaatgaagccatcacatcctttgaaggaaaaaccaaccaagttatgtccagcatgaaacaaatggaagaaaggttgcagcactcggagcgggcgaggcagggggctgaggagcggagccacaagctgcagcaggagctgggcgggaggatcggcgccctgcagctgcagctctcccagctgcacgagcaatgctcaagcctggagaaagaattgaaatcagaaaaagagcaaagacaggctcttcagcgcgaattacagcacgagaaagacacttcctctctactcaggatggagctgcaacaagtggaaggactgaaaaaggagttgcgggagcttcaggacgagaaggcagagctgcagaagatctgcgaggagcaggaacaagccctccaggaaatgggcctgcacctcagccagtccaagctgaagatggaagatataaaagaagtgaaccaggcactgaagggccacgcctggctgaaagatgacgaagcgacacactgtaggcagtgtgagaaggagttctccatttcccggagaaagcaccactgccggaactgtggccacatcttctgcaacacctgctccagcaacgagctrgccctgccctcctascccaagcnggtgcgagtgtgcgacactggccacacc

SEQ ID NO: 1376 - DNA, 1159 bp, Homo sapiens
  misc_feature (1040)..(1040): n equals a,t,g, or c
  misc_feature (1120)..(1120): n equals a,t,g, or c
gggcttttccggaaggagcggctcggtgttggggctaggccggtattctaggcccaagcccaggcccaggcctgtgttcccggcccttgctcaaagacaggccggtggccgctgcgacactctaggtacagcggagggcgcagcgggccgttcgctgaggtgtccggacccgccgccgagcgggccgtggagccacagtacgtggcggcgcctcttccttgcccgaagcggaactgctgaaggagcggcarcgcaggccggacgaggtgaaccaggtcatttaaccgccttcaggtgatgaatcatctgtctaataatcagatttgaggtccacagccctttgtggtcctgctacarggtgattttcartggatgactgactggcgtggcccgaggggtgccgcagtgactgccttcccttgataaggaaacgagctttctgttctttctggacacctcgttacctgtaaaacattccggktataacttctttatccggcttgcatctctgtgcaagaggaaagctttcacatgaaagtgtcccttggtaacggcgaaatgggcgtctctgcccatttgcagccttgtaaggcaggaaccacacgcttttttaccagcaatactcacagttcggtggtattgcaaggctttgatcagcttagaatagaaggattgctttgtgatgtgaccctggtaccaggtgatggagatgaaatcttccctgttcacagagctatgatggcgtctgctagtgattatttcaaarccatgttcacaggtggaatgaaagaacaagatttgatgtgcattaagcttcatggggtgaacaaggttggtctgaagaaaatcattgattttatttatactgcaaaactttctcttaatatggacaatcttcaggacacacttgaagctgctagctttttacaaatattacccgttttggatttctgtaaagtatttcttatatcaggagtctctttggataactgtgttgaggttggacgaattgctaacacctacaatcttatagaagtggntaaatatgttaataatttcatcctgaagaactttcctgctttattgagtactggggagtttctaaaactcccttttgaangacttgcatttgtgctttccagtaatagcttaagcactg

SEQ ID NO: 1377 - DNA, 527 bp, Homo sapiens
  misc_feature (458)..(458): n equals a,t,g, or c
  misc_feature (487)..(487): n equals a,t,g, or c
gaattcggcagagctgagaaaccctacgaatgtaaggaatgtggcaaggcctttcgtcatgccacaagcctcatatatcatgaccgaactcatgctggtgaaaagtcctatgaatgtaaagaatgtggggaaacttttagtcatgcttcacatcttattattcatgagagaattcataccagtgataaaccctatgaatgtaaaagatgtgggaaggcatttcactgtgcctcatatcttgttagacatgaaagcgttcatgctgatggaaatccctatatgtgtgaagagtgtgggaaagcttttaatagtagccatgaacttagtatacatcatagrgttcatactggtgagaaaccctttaaatgtaacaaatgcagaaggtcctttaggcttagatccatccttggaagtacatcagaggaattcatatttggttagaggaattgtgggcattntacaggtaggtaaaggaaaggcacattgngtccatggattttatccccactggaacatttttggattgg

SEQ ID NO: 1378 - DNA, 2937 bp, Homo sapiens
  misc_feature (48)..(48): n equals a,t,g, or c
tgccaaaaggggattttcttccaagccgatttaagttggttaccccanggtttttcccagtccacgacgttgttaaacgacggcccatgaattgtaatacgactcactatagggcgaattgggtaccgggccccccctcgagttttttttttttttttttggctgtggttgtaggaaccaccctacagcctagaagactttattaagatcttattgcttatgcagttaaagagacactgattgagctacaggtttcctgtacctggtctcaggtcactctgtgcagagcttccccaggctgttgggagctgggagactgctaggcaggggcaggccccagagtgggaagcatggtacctcctaggagcctcagagtgggtagcgggcttcaagacagccctcagggtgaacagagaggtcaggagtgtcggcttaagccagggcccaggggctacattccctgagatgagtcaagcccagccctctctggggtttccagaacaaaggctaggtgtggggagcagcactgtggagagggcagggagcatgtctctaggcattgctggaactggaggagactgtcagagtggtttgggtaatggttgtataatctgtggcaactgggccttcttgcatgaaagtggaagggtgaggatcccttatggaagagtcatgcaccatggctgggctggactagccagctccagtggctctgctgggtgactaaagtaggcaaggaaagccacttgttgcccacaccccactttcatcaactctgttcatgcaggacaaagcagggagctgcccaacaaggatggggttatttctcaggcctaggtattgatgttaccttaattctttagtctggaagaacttggttgggggtgggggatggtaagcatttccttaaccaaacccacacttcacatctcctaggggtaccccttcatccaccaacctccagagaataacctggctgccctcacttctccagcttttctcacaaggcacttgttacagggctgctgatgggagagggaggaaggcctgggagggggatctggtggtggcgcccaatctacagggtccggaatcagggtggaagttgtcagggactagcggctgccatagtacaggcgcatggccaggccaatgagcaatgtggccaggaagaaggcggctgtgagctgcagccgtagcaggactgctgagagcacggcgttgaccaccagcgagcaggacaccacaaagaggcgtgtgatgctgctgccatgcttcatgacagcagacatgagcagtccatttagtgcctggctcagcaccacgagtgctgcccatcctgagaaaccttccaggaggcctgggccagagccgccgccagcatgcagacctagattcagaagcacaccaaaagtgtagaggaagaggttctgaagtgccaggggcagccgctgtcgcttcatgagcagctctgtgtacactgacgacaagcctgagatgaggcagtacagaatgaggagcagcaggcctagcggagtgatatgcaggggcatggggctggcagcagctgctggagggggactgggaagggtgttcccgggaacttgaaggccccctgctgcatagcaggctcccgcagccatcagcagcagcagcgctaacccctgacgcacagagaggcggtgccggaggcagaggcagtagagcacagctgtgcttccaatcttgagattactcagcacctggtaggtgctggggtccatgtaacgctgaagatagatcaccaggttgttgttagcgccatagagcagggctgatagtgcgaagggagcagcctggcgccagggtgggggcccctggggccatgcttgccagcctaccagaagggagaaggcgcataacagtagcttggtcagctcagtcagcagcacggctgaggagggccggaagggcactcggccgtccacatggcacagtgccagcaatggggcatgggcaccgtacatggcagtggataggagtagcatcagggtccagcgggcctgcctgggacggcccaggcctggcatacccccatcctctacactcatacccacacaagaccctgggtggctaaggggcagcagggattgcaacacgtttggggaaaatcaagttatggagccagctcccaggaaggagaagccgtggaacattgccagagagaatactgaggatyagaggcatctaccaactccacagtcagggcttgaagagtaaggggctggtggtccttgaagccacagtcttggggcgagtcccatggagctaggaaggggaagaaggaatccagggtgcaggctgaggaactactgtccacaatctgcaggaagggaggcaaggatgaaggtggcaggaaagttggagatagcaaatggatgacagctggggaatccagataaagtgtctccacctgaaggctgagctgctcatcctgcctcttccatggcacctagagctagtcgggccccttgcgtagcaactgcaaatagtcccttaatgtcttctccacgttgggcacagcatatgcctgagccgcatagatgccagtgcaggtgcccacagcaaagcccaatactgctgatgccctcagtttggccaccacatagccagccaggaatcccttgaggaacggggaggacaacagcgagccatcctggcccactccactgttgacttcgtcttctacacgccgctgcaggctttccagctggttcttgagaaatgccaggtccttaagcttaggcagagaatcctaggacaagcgagaggctggctccagcagtctgactaagccccaccccttgctcaattccatcagaagctgggaattgggaggggatggggtgagccagaaagaccttttcctataaaagcttccttgtcatccgccatctc

SEQ ID NO: 1379 - DNA, 1975 bp, Homo sapiens
  misc_feature (60)..(60): n equals a,t,g, or c
  misc_feature (119)..(119): n equals a,t,g, or c
  misc_feature (753)..(753): n equals a,t,g, or c
atagggagatagctatgacgtcgcatgcacgcgtaagcttgggcccctcgagggatcctntagagcggccgccctttttttttttttttttttttttttttttttttttttttttttkngaccgtgaaccatttatttccaaactataaagaaacctgctctctgagaaaagacactgcccaggtgatgaagctccagcccctggaggtccaaaacccagtccaaactcagtccctttagaaagctgctgtgccttggaaatgagtctcggctgtcagagcctgggaagtggtgggaagaaccagcccactcccctctcctgctgcgattccagcgcagcttgggcccagctctggccagtcccaggctggcctggtgctcgccccttgtgtgaccaggctctgaagggaggggcaaaagtcatgagtccctggcttggccccaccacctggtgactcccgtccacagctcccagctaccatgatgagccctggcggcttgagcacagtgagtgctggcagcaggctggggagtggcctgcttctaagccatttgccctggctggtcactgctgcccctgggccacaaagtactcctcctcctcattgtcaccttcctcccgctggctgctccggagcagcagctccaggtcggggctggagcccagccccttcaaggccttggggccaccatcacytctggaatgcagggctttgagggcaacgtggagggatattcccgagaggcagaggncgaagcccagccagttcaggaggctgatctgatcgcccagcagatgagctgccaacagcaaagtgcagacttccttaaaaatgccggcaatggagagagtgaggctggaggttctggagaccaggaggaactcagagaagcccaaaccaaaggcgagaatcccgccaaggaagaggctcccaagtacccgcaggagcagccctgtgtcctggaaacggaagattttctcagatgtggacaaatggagaccttcaaatacagcaaagagagggaagagccccaggaacatgagtggctgcaggtggaacatggtgtcgatgggattctggaggccgagttcagccttctgcaggagcatctgggtgagggtccagcgaatgccaccgatgaacgaggcccccagcaccaaggcgaagccctccacgttgaactgtgtggacttgtaggtgaacatgaagagacccccggcgatgaggaggaccaccaggaccagtgccgcgcgcagctcctccagcttgaagatcagagagaagatcaagatgaagaggacagctgaggatttggtcattgtgtacagcgagacggtgacatacaggaagctccagttggacaagcccacgtcaagcgccgtcgccagagctgtgggagccactcttctgaggtagtcggcccagctcagcaccacacgggccctgtggctggagcactgaaccagcgccctggacagggcggagaagaggaagatcacggccaggtgcagcatcgtcatgaagagggggaaatggaagctctttgtcagccacttgttgtagaaggtgatgccgatggagaagcagtagtagagaagcaccagccccagggtcaacaccgccttccacaaaaaggccacatcgagggcccacctccccattcgtggcggctgcagcaccggagctcctgagtcagcgggggcaggcacccctcttgaatacaatgtgcaggaagagccggtggagttagaccacagctttcaccaagaacgtctccaggctggaggagctctctgcagctccatgattcggaaccatcagcagagccccaggcagagtcctcacctaaggggctggtggctggtgctgacccttcccatggttaattggatgcagcgctcacaggtcccaaggtctgctcggccctgggagctccaggccggaatctccccaccggaagtgcgaggccggct

SEQ ID NO: 1380 - DNA, 2049 bp, Homo sapiens
  misc_feature (12)..(12): n equals a,t,g, or c
  misc_feature (48)..(48): n equals a,t,g, or c
  misc_feature (322)..(322): n equals a,t,g, or c
  misc_feature (1819)..(1819): n equals a,t,g, or c
  misc_feature (1987)..(1987): n equals a,t,g, or c
  misc_feature (2021)..(2021): n equals a,t,g, or c
cggtcacgttgngcgtaaccaccacacccgccgcgcttaatgcgccgntacagggcgcgtcccattcgccattcaggctgcgcaactgttgggaagggcgatcggtgcgggcctyttcgctattacgccagctggcgaaagggggatgtgctgcaaggcgattaagttgggtaacgccagggttttcccagtcacgacgttgtaaaacgacggccagtgaattgaatttaggtgacactatagaagagctatgacgtcgcatgcacgcgtacgtaagcttggatcctctagagcggccgccctttttttttttttttttttncacatgagaagtgtcagtttaatgaagccagcttatcagcagggcggcggagcacacctgccccctcgcaggtgtgcctggctcgggctaaagtgcctgtgcagaacgaggctgcctggcggggttaggagtcggcgccctcgtcctcctcctcgggcaggatctccaggctgctgtcgggctgcggggctgtgtccgtggagggcggcggggtgggcggggcccgggtgggcgacagaggcagcggggaggcggtgggcgaggggctgtggggctctgcgggcggggccagccccaggatctcctgcacgttgtggggcagctcggggcaggcggttagctggcggtgcagggcctcggcgcgggtcagcacgtcctccacgctcagcttcatagtcagctcgttgatgtgcttgaggatctcattggagccgaagccggacagcatgagggtgtccctctccatgtccaggatggcgcaggccaccagcaggtgcagattggggccagggagccctgtccacagcacctcccacagccgaaggacatccgggaaggggaattccctcttgaaccagatgagcagccaccggaaacagaagcagagagagccggagtcctgggaatccaggaagtcgcagagcagggggtccagcaccctcaggagcagcagcagtcgcccgagttgccgcttcatggtctcctggctctcttcaaagttcccttgcacgagctccatgaagccacagaaacaccagaaagcatccacctcgttctgaatgacgtagaggatcggggagagaagatcactcatgccctggacgtagccgaggtcgaagtgatacatgcagtaggtgaggaggatatcgttcagcaggcccagccccgggttctcgggaccctcgtagaacttgttggtcctgtcagtgcggctcacatccctttcgatgaggctgcggtatccatgcagaagtgagtttctccgctcctgctcagggctcacagatttccactgcagcttcatgcggaaatactcatccgttttcttgcgtatgtgggccttgtgctcctcagctgtgccttcccagctgaggtaccctaggaggaacttccaggcctcgcgccgcaggctggggctcagaccccccgagaagatccggttcttcagctcagggacctgctgcaggcgaccttcagggcccacgtggcgtgcccactcctcctctgtaactggagggcccgctccacggttgccgaggccccagctccacacaggaaatgacctcgaatccaggctcgggctcatcgtcgggtggcgggggaaggtcggaggcggctccctcaggctgtggctgcagggcaccccggaagaagttggtcactcgggagaagctgctgaaggtggtggagtagggatcctggaggaagcgctggggacgaggccaaagggaggtcacggcccgccccttstcgtccctccctgcccacacccgccangcctcctgctggggacactcacttgacaacacattggagctgtcctggtcaaagagctgcaggtggtgggaaggagtttgggagagagcagaggagtcgtggggggaagacaaggtagaggcgggaktcctgcggggagctgggaggcgggaggtgacgcacagttgntgcacagttaggggcccattttcccagttgtttntgtttggccgacatcgtttccattgcag

SEQ ID NO: 1381 - DNA, 2476 bp, Homo sapiens
  misc_feature (1)..(1): n equals a,t,g, or c
  misc_feature (14)..(14): n equals a,t,g, or c
  misc_feature (18)..(18): n equals a,t,g, or c
  misc_feature (23)..(23): n equals a,t,g, or c
ncgggggcacctangaantggcnaccgggccccccctcgagtttttttttttttttttttttgcaatttcatagtttttattcagtggacttaaagccaagaaaccatcccaataattatttacaatttaataactgaatgattatcagatcgtgttatactgcaaaactgttcttacaccatgaatgctgatgctgtgaactttggatgttaaactggtaaaagctggaggcttcaaatggcatatgcaaatgtaaccaaagcctgaggactatgaagaaagaggagtttctaccactcggcatttatagtttttatatgcattgcagaagcatggggaattaagtgatctctgaaaaaaatgctttaaaaaactgagtatacatatagcctataaggtaaaaatccaagttacaagtgtattaaacactggcaactatgttatcagagggaatactgaattatatatatacataaactgtcattaaactgtgattacatgatacttcctaccacagcttattagactgtacaacagaagatattcctgtggctctctaaggctccaggtttaaaagaatttagtattttccccttggctcaaagtctaatcagtatcattctataacataaatcagaaactacgctttttgcttttaaggaaataagaaacataattgcaaccattacagctccaacatacactgcaaaaatgatatctacaagcagttgccattgcatttgaaaaatgcattttctgaataagcttcacttagtaccaaggatgcctttcaagtcagcttctacattctgaataragtacataatgggatttaagtaaatctttagaagtcccggagtttgccttttctaacattttcatatcaggtgaaaacaattttttcatatgggtgattgtatttaccaacatgagcaaatgtctacagaagaatgcgctgttctatatgtctgtaaggaatctgcacttaactggaaactacagggtccatcagaaagttaaatttaaaaaagatcagccatagccaagttcttcgtagattatgaaaaaaaaatggcactgataggtctaggttctgaagaggggccacggwtgaatggaaatgcttctacatgggacaggaatgtcgtgaatctggagttctcgggtctcttggtggcagaagacgccgtctgtgcgtctcacagtgctttctgatgcccatttacagaaggcttggctgtttctgaatcccttgaagtatttggtaagtgaagtttatgaagccctagggccttgaaaagttcttctcgaactgcagaggtgaattttcggaccagacacaatgttgtcacaatagcaaaaagcaaattgtaggataatacaatatagaaatttcccagccaattaaaccttccaaagtcgccaagtagatcaaatctagtgattcccagtgttctcgacatcacaggcagagcagagctcaaaaccaagatggacacacaatttccaatgatctttgtcatagttgtgtcatctttcttgggagtaaagtttccaaaaaatcgaaggctatagaagccgacaacagaggacaccataagatagaaaatcaaaatgatttcaagcgcagctcccacaaaaccaaacgtagaaagagaggcatttcctattccaggcccccttgttccttttggcattgctgtttcatcaaccaataggcaaagaatattacaagccaccaagaggaccgagatggatgtctcaataagaaggagaaccataacagcgggatacaccaaatttctttcccatgctgaagccttttttcgcctctctaattttgtcttaagagtctttacattttcaagttcttgttccaactccattatgttgtattccaccgatgaagacagcccatttagtcgtctctggagtgcttcttcctctaaggtaatgatataaatttgttcatccaggtcttcaagaattgttggcttcactagcaactgacccatcactgtgaacatacgagaaaggccaactggtgtacacaagagaagtaacaaacatcccatcaatgatatacaggaatataaatagggtagatagaactcccagagatcatataaagattccatgcttgcggcatcgttgtcaatgagtgctgaagctacccacactatcccaagaatgagtaacgcaagaagaagaagcatgaccaaagtctctaaaatgcgggctcggattccctttttcaggccagcaaagccttctgattccagaaagaaaaaggcaaagggcatcaatacaaataarcaaaggttggaaaaaagggaagcaagattccacaaaccatgaatcagggagccatttagccactgaatatagtagttctgaggaaaagaaagcaggatttcattgctgctcgtgccgaattcctgcagcccgggggatccactagttctagagcggccg

SEQ ID NO: 1382 - DNA, 1409 bp, Homo sapiens
  misc_feature (700)..(700): n equals a,t,g, or c
  misc_feature (985)..(985): n equals a,t,g, or c
  misc_feature (999)..(999): n equals a,t,g, or c
tggagctccaccgcggtggcggccgctctagaactagtggatcccccgggctgcaggaattcggcacgagcgggggtgtaggtgccaagcgccatggcttagacccgagattggagtccggccgccccccgacagcagccgcctcctgccccccgtgcgccctaggcgccaccatgtcgggagacaaacttctgagcgaactcggttataagctgggccgcacaattggagagggcagctactccaaggtgaaggtggccacatccaagaagtacaagggtaccgtggccatcaaggtggtggaccggcggcgagcgcccccggacttcgtcaacaagttcctgccgcgagagctgtccatcctgcggggcgtgcgacacccgcacatcgtgcacgtcttcgagttcatcgaggtgtgcaacgggaaactgtacatcgtgatggaagcggccgccaccgacctgctgcaagccgtgcagcgcaacgggcgcatccccggagttcaggcgcgcgacctctttgcgcagatcgccggcgccgtgcgctacctgcacgatcatcacctggtgcaccgcgacctcaagtgcgaaaacgtgctgctgagcccggacgagcgccgcgtcaagctcaccgacttcggcttcggccgccaggcccatggctacccagacctgagcaccacctactgcggctcagccgnctacgcgtcacccgaggtgctcctgggcatcccctacgaccccaagaagtacgatgtgtggagcatgggcgtcgtgctctacgtcatggtcaccgggtgcatgcccttcgacgactcggacatcgccggcctgccccggcgccagaaacgcggcgtgctctaccccgaaggcctcgagctgtccgagcgctgcaaggccctgatcgccgagctgctgcagttcagcccgtccgcaggcccttccgcgggccaggtagcgcgcaactgctggctgcgcgccggggnaytccggctagaanccsggtggttccagccattcctgcagccaagggcactgggccagggcggcgcacgcgcaagargcgcgcttcgagggaatatgcgaagctgccgcgtgctgctgcacatgcgctttttcccttccgcttccctccctttcttcccacgggggartccgcagttgcccttgttcggaatccacgttccccgcgatcccgggagctggaggcgcatgcgcatccgcgattccctgcgaccaggccccgagagggcgagaccagaggggacggaagcattgcgcctgcgcggaactctcagcctctgcgcggagggcgtcccttcccaaccagccgtgggtgccaggttcccggttggaacctgcaataaactcgctgttcctcgcaaaaaaaaaaaaaaaaaaaaaactcga

SEQ ID NO: 1383 - DNA, 1764 bp, Homo sapiens
  misc_feature (1587)..(1587): n equals a,t,g, or c
  misc_feature (1594)..(1594): n equals a,t,g, or c
  misc_feature (1736)..(1736): n equals a,t,g, or c
  misc_feature (1747)..(1747): n equals a,t,g, or c
  misc_feature (1750)..(1750): n equals a,t,g, or c
aaaaacaaaaacaacaacaacaacaaaaattttttaaagggggagtgagatgggagagaagggggccttatttctcggaaaccagccctgctgccctcttcccatggccacaggagcctccccagtgacggagttgtgagattgggggtttctggtgtcctgacttccgtcccagggatcaccttgggtttcccacgttgcagagactaactgaaaggacatgagggctttaccctgggaatgctctgctggggcaggtgggtgttagctgcgattctgtgttattttcccatcctcagaggtctgcggggtttccgagaggctcgccgggatttctggcggggggctgagagcctggaggctgccctgacccacaacgcagaggttcccaggcgccgggcccaggaggcagaagaggcaggagctgctttgaggacggctcgagctgggtaccggggacgggcactggattatgccctgcagatcaacgtgattgaggacaagakgaagtttgacatcatggartttgtgctgcgtttggtggaggcccaggctacccatttcagcaggccatgaggagctgagccggctgtcccagtatcgaaaggarctgggcgcccagttgcaccagctggtcttgaattcagcacgagagaagagggacatggagcagagacacgtgctgctgaaacagaaggagctgggtggggaggagccagaaccaagcttaagagaggggcctggtggcctggtgatggaaggacatctcttcaaacgggccagcaacgcatttaagacctggagcagacgctggttcaccattcagagcaaccaactggtttaccagaagaagtacaaggaccctgtgactgtggtggtggatgaccttcgtctctgcacagtgaactctgccctgactcagaaaggcggttctgctttgaggtkgtgtccaccagcaagtcctgcctcctccaggctgactcagagcgcctcctgcagctgtgggtcagtgctgtgcagagcagcattgcttctgccttcagtcaggctcgccttgatgacagcccccggggtccaggccagggctcaggacacctggccataggctctgctgccaccctgggctctggtggaatggccaggggaagggagcctgggggagtcgggcacgtggtggcccaggtccagagtgtggatggcaatgcccagtgctgcgactgccgggagccagccccggagtgggccagcatcaaccttggtgtcaccctctgcattcagtgttccggcatccacaggagccttggtgttcacttctccaaagtccggtctctgacccttgactcatgggagccagaactagtgaagctcatgtgtgagctgggaaatgtcatcatcaaccagatctatgaggcccgcgtggaggccatggcagtgaagaaaccagggcccagctgctcccggtgagcttggggtttagcctcccaggggaatgggggacccctggagcagaagagggaagactgcctgcttctccccttccacaggcaggagaaggaggcctggattcacgctaaatacgtggagaanaaagttnctgaccaagcttgcctgagaattcgagggccaaaaaagtggcccgggggcgcccaagggggcaagcctcctggtgcccccaaagcctttcattaaggccccgggccaagggaagcttggaaatccaagccaggtattagggnttgggttgggncanttcatttgagcaat

SEQ ID NO: 1384 - DNA, 1181 bp, Homo sapiens
ggctagacagactctcttgcttggatggtactccaccactttcttggcacatgagatgcaagattgctcagggtgcagctaatggcatcaattttctacatgaaaatcatcatattcatagagatattaaaagtgcaaatatcttactggatgaagcttttactgctaaaatatctgactttggccttgcacgggcttctgasaagtttgcccagacagtsatgactagcagaattgtgggaacaacagcttatatggcaccagaagctttgcgtkgagaaataacacccaaatctgatatttacagctttggtgtggttttactagaaataataactggacttccagctgtggatgaacaccgtgaacctcagttattgctagatattaaagaagaaattgaagatgaagaaaagacaattgaagattatattgataaaaagatgaatgatgctgattccacttcagttgaagctatgtactctgttgctagtcaatgtctgcatgaaaagaaaaataagagaccagacattaagaaggttcaacagctgctgcaagagatgacagcttcttaaaactttattggaaaagactcttgactttttatatacacctatctcaaccatttttttaactgatttttttcctaaatattcttctttacctttaacaaggcataggctgttgcaggacagtggttattaaagcatgggttgaacttccaaaatataaaaatagagccaccatatcaacacttagccctacccattagtatcacccccagttcttacagtaatccctgagaaatctccttcaagcatcaccaaacacagtttgaaaattacagggttagcaaaaagagcctgggctgtatgtagggtggaaacactctgatctgaagcccagctgactccactactaatttgctgtaaagctttggacatacacttagctgctgtgagccactaataacattgggctaatatctgctgtgcttctctgacaggtagtcatgaaaatcaaatgatgcaaaatatatacaagcactttgtaaattgtaaaatgatacaaaatttaaagtttatagagccagttacaaaatcctattagtcatatatttatagattgtgttcacagcaatcatttaaccacaaataaaatatcccttgatgatactgcca

SEQ ID NO: 1385 - DNA, 1615 bp, Homo sapiens
  misc_feature (1589)..(1589): n equals a,t,g, or c
  misc_feature (1603)..(1604): n equals a,t,g, or c
gcccacgcgtccgctcgccgctctagccctgcgccccagcccggccgcggcacctccgcctcgccgccgctaggtcggccggctccgcccggctgccgcctaggatgaatatcatggacttcaacgtgaagaagctggcggccgacgcaggcaccttcctcagtcgcgccgtgcagttcacagaagaaaagcttggccaggctgagaagacagaattggatgctcacttagagaacctccttagcaaagctgaatgtaccaaaatatggacagaaaaaataatgaaacaaactgaagtgttattgcagccaaatccaaatgccaggatagaagaatttgtttatgagaaactggatagaaaagctccaagtcgtataaacaacccagaacttttgggacaatatatgattgatgcagggactgagtttggcccaggaacagcttatggtaatgcccttattaaatgtggagaaacccaaaaaagaattggaacagcagacagagaactgattcaaacgtcagccttaaattttcttactcctttaagaaactttatagaaggagattacaaaacaattgctaaagaaaggaaactattgcaaaataagagactggatttggatgctgcaaaaacgagactaaaaaaggcaaaagctgcagaaactagaaattcatctgaacaggaattaagaataactcaaagtgaatttgatcgtcaagcagagattaccagacttctgctagagggaatcagcagtacacatgcccatcaccttcgctgtctgaatgactttgtagaagcccagatgacttactatgcacagtgttaccagtatatgttggacctccagaaacaactgggaagttttccatccaattatcttagtaacaacaatcagacttctgtgacacctgtaccatcagttttaccaaatgcgattggttcttctgccatggcttcaacaagtggcctagtaatcacctctccttccaacctcagtgaccttaaggagtgtagtggcagcagaaaggccagggttctctatgattatgatgcagcaaacagtactgaattatcacttctggcagatgaggtgatcactgtgttcagtgttgttggaatggattcagactggctaatgggggaaaggggaaaccagaagggcaaggtgccaattacctacttagaactgctcaattaagtaggtggactatggaaaggttgcccatcatgactttgtatttatatacaattaactctaaataaagcaggttaagtatcttccatgttaatgtgttaagagactgaaaataccagccatcagaaactggcctttctgccaataaagttgcatggtaaatatttcattacagaatttatgttagagctttcatgccaagaatgttttcttacaaaattctctttttattgaggtttcactaataagcagcttctacttttgagcctcaacttaaagcagaactgttttctactggatttttcattaacagcaagctttttcttttatgtaaaataaatctattgtgaattgaaaaaaaaaaaaaaaaaatccgggggggggccccgncccctttgggcccnngggggggggtt

SEQ ID NO: 1386 - DNA, 4107 bp, Homo sapiens
  misc_feature (3861)..(3861): n equals a,t,g, or c
aattccgcttccgtttggaaagccgcagcctcagtcccgccgccgcccgctgcgtccgcccagcgccagctccgcgtcccgaccggcccgcggcagcctgcgccgcgccatggccacctccccgcagaagtcgccttctgtccccaagtctcccactcccaagtcgcccccgtcccgcaagaaagatgattccttcttggggaaactcggagggaccctggcccggaggaagaaagccaaggaggtgtccgagctgcaggaggagggaatgaacgccatcaacctgcccctcagcccaattccctttgagctggaccccgaggacacgatgctggaggagaatgaggtgcgaacaatggtggatccaaactcacgcagtacgcccaagcttcaagaactgatgaaggtattaattgactggattaatgatgtgttggttggagaaagaatcattgtgaaagacctagctgaagatttgtatgatggacaagtcctgcagaagcttttcgagaaactggagagtgagaagctaaatgtggctgaggtcacccagtcagagattgctcagaagcaaaaactgcagactgtcctggagaagatcaatgaaaccctgaaacttcctcccaggagcatcaagtggaatgtggattctgttcatgccaagagcctggtggccatcttacacctgctcgttgctctgtctcagtatttccgygcaccaattcgactcccagaccatgtttccatccaagtggttgtggtccagaaacgagaaggaatcctccagtctcggcaaatccaagaggaaataactggtaacacagaggctctttccgggaggcatgaacgtgatgcctttgacaccttgttcgaccatgccccagacaagctgaatgtggtgaaaaagacactcatcactttcgtgaacaagcacctgaataaactgaacctggaggtcacagaactggaaacccagtttgcagatggggtgtacctggtgctgctcatggggctcctggagggctactttgtgcccctgcacagcttcttcctgaccccggacagctttgaacagaaggtcttgaatgtctcctttgcctttgagctcatgcaagatggagggttggaaaagccaaaaccgcggccagaagacatagtcaactgtgacctgaaatctacactacgagtgttgtacaacctcttcaccaagtaccgtaacgtggagtgaggggctgccctgggcccaccactgcccaagagttcttgctgttggcgtactggaccctcctccgaactgccttaccctgcttattcctgtctcttgcactgtgctctcccacaagtccagctgcaacccagagatagtggaaactgaaattaggaaggaaatcatcaataactcagtgggctgacccatccctcccaggcgctggggaccaacctagcaatgaaggttgggaaggttgttcccttcccggtgccaggtccagatttccctccatgatttgggaaccagsttaggcaaaagagtccccacaagatgaaaataaagatcctagttaccattcaaaggatgctaactgtgtgtcaggccccacactaagtgctctgctctgatatactcaaggccattaatcttcaggactcccattgacgtaggtgtttcattccccttttacagatgaggaaactaaggcttggaggttaaatgacttgccagaagttggaatttttttcctctttgaacataacctctcccttctccctaaaggtaaccactattctgagtccaatcatcaaggttttgcttttctttttagctaagtatgcattcctcaatagtagacagtacaacatgtttataacaagccaattacattatgttctttgcatgttctaaagttgtgtatgtgtgtgcacatctgagcacgtgcacatgtacacctgagccaaaaacacgagaacccactgatctcaccactggggcaagctaggtcagagcttagtgattcacactgaaattggcaaattggatttaacccaattaatagtgtgtgtgtggcaggagtcatgtccctcacatcctttgtacaaatgaaaattactcttaattccttcagatttataataactctgtactttggtttcagggtgacatttgggaaggattttgtttagaattaatggagtggcacattttgcagcctttttgcttgattgcatgtaatggaaatgccctatattttcctgcaaaataagtactaaattcattatcgttaagcaaatgtacaatatgctcaggcaccgcagagagctgggcacgggcccatgtgagcatcactttggaagtagggctcttcaacagggacccttgaactttaaagaaaggaacttctttttgccttctaattgatcatttagactattctggctaagtctgcccacatgtaattaccggctaattcaagcgaggaaaaatgtaagtcatttagaccaaagccaagcagtttctttgcgtgggttactcaagggcttgtggttacttgtatctcctctatgtgaacttgactttgaaagacagagctctagtgtgccagcctgctaagtcctgtaagaatagggaagggcggaggggggtgggcagtgactaggggacgagaagcatggggaaaatatttgcactctaaacatacagagatagaggtggggcttgtggtacttaacacttgtagccatcaactgactgagaccttgggctaaataatcaattgtgctgatattacatctcgttatggaatgttcctaaatatgccaggtagacaccagcccaagtaccctcctccagaagtctgtgactaccttgtcactactttaggcccattccacaaagcccatctctggtttgagaattcattttgatctgtatctacaccacccaaagttaggcctcctataatgtccaaaacattcctttcagcctttttatttcttactgtactgtctcttactgtactgtctatctgcagtaattgaggacccataaaatttagataactacatgtctttgctcttagaattgtcactcagcataatgagcatttaacatacaaaggcaatgtactgttttgtgttgatctatgtaaaagaatacaattcttttttacataattagtgaaattttattttttattaggaaacactaaatagtgtaatatttcttttgcttttaaaaaaattcctggtagcaaatcaagataaataattgcttcattttcttgagcaatactgaagcaggatgaagtaagaggaatgcattcatttaaacatgctttgctttatgaattttgtctcttttttggtctctttttcttatattcaagttacaaatgtacaagtatccttactaagagtgctccttttgtattttacatatatacagtatgaaaatacattggaacactaggaaagtttttaaataacagttctaatttatcagaaaattgtgttttgggattgagttctttgtctcagcccagaatcccaggtcctgggcctggttttctaatgctgtcatctcagttcgatattttactttagaayctggaatctcctacttaatatatgaccatgactttgaaaggcaaaagaggaatcaagaataaataaaacaaacttaatcttcatctttaaaaaaaagaaaaaagaaaccaaaatgagaatcaacacttcataggctcactgggttttcttttcttttctgttaatttaaactcagttatttttaatgcttaatacatacatggtgcaaaatttaaaaagcgcaaataggtatctagtggaaaacctaagcctccctctctnctccggcacccattacctctccctggaggcaactgttttgatccatttcttacacacactgccagagatactctaggcatgtaaagcacaaacatacatataaaatctgcgggcttcaaaaaatataagtaggatgtcatctatactgtcatacactttgttttttatcacttacttaatgttatatcttggatattgtattaccctgggtattaaaaagaactcctttcacattttaaaataaaa

SEQ ID NO: 1387 - DNA, 1460 bp, Homo sapiens
cgacccacgcgtccgggcagaaggatgactctcagagatgaccaacctgcaaagctagaaaaggagcccaagacgaggccagaagagaacaagccagagcggcccagcggtcggaagccacggcccatgggcatcattgccgccaatgtggaaaagcattatgagactggccgggtcattggggatgggaactttgctgtcgtgaaggagtgcagacaccgcgagaccaggcaggcctatgcgatgaagatcattgacaagtccagactcaagggcaaggaggacatggtggacagtgagatcttgatcatccagagcctctctcaccccaacatcgtgaaattgcatgaagtctacgaaacagacatggaaatctacctgatcctggagtacgtgcagggaggagacctttttgacgccatcatagaaagtktgaagttcccggagcccgatgctgccctcatgatcatggacttatgcaaagccctcgtccacatgcacgacaagagcattgtccaccgggacctcaagccggaaaaccttttggttcagcgaaatgaggacaaatctactaccttgaaattggctgattttggacttgcaaagcatgtggtgagacctatatttactgtgtgtgggaccccaacttacgtagctcccgaaattctttctgagaaaggttatggactggaggtggacatgtgggctgctggcgtgatcctctatatcctgctgtgtggctttcccccattccgcagccctgagagggaccaggacgagctctttaacatcatccagctgggccactttgagttcctccccccttactgggacaatatctctgatgctgctaaagatctggtgagccggttgctggtggtagaccccaaaaagcgctacacagctcatcaggttcttcagcacccctggatcgaaacagctggcaagaccaatacagtgaaacgacagaagcaggtgtcccccagcagcgagggtcacttccggagccagcacaagagggttgtggagcaggtatcatagtcaccaccttgggaatctgtccagcccccagttctgctcaagggrcmgrgaaaaggrtwgkaagtttgagrgaaaaacmatgkaaagrggcttcttcacataattggtgaatcagagggagagacactgagtatattttwaagcmtattaaaaaaattaagtcaatgttaaatgtcacaacatatttttagatttgtatatttaaagcctttaatacatttttggggggtaagcattgtcatcagtgaggaattttggtaataatgatgtgttttgcttcccctttgtaaccaagtttattctgtactacaggagtggtgcttaccagggtctaaactccccctgtgagattaataaggtgcattgtggtctttctgtgttaataaaatgtgctctgaataacaaaaaaaaaaaaaaaa

SEQ ID NO: 1388 - DNA, 1361 bp, Homo sapiens
  misc_feature (1346)..(1346): n equals a,t,g, or c
gctatcgatgagtacatgaagctcgtggcacaggattacctccaggagaccctgggtgagctgggggagagtccatgtcagcggcctgctggtgagctaggggacctgggtgaagttctaagagtccttgagcaacctggattctggtagtgastggtgttttgggggtgctaggatcctggggacaattgggagctccccaagatgttgggtgcctccggaataacctgaagacaaggttggaggatgggtgtggcaggttttggtggtcatggccccagcccctatctggctgtgctgggctgcaggacaggttgtgcggcgtctctgtgcttctactgaggactgtgaagtggaccccagcaaatgtccagcctcggagctgccagagcaccaggccagacttcggaacagctgcgaggagyctccccgtctgaccattcattgcctcttctgcaccagctggttccctgcggagctgggcatcgtgttctcaagctggcgagaagcatgtaaagaacgtggctctgaggtgctgggcccccgactggtgtgcgcctccctcttcctgcggctcctgtgccctgccatcctggcacccagcctctttggtttggcaccagaccatccagcacccggcccagcccgcaccctcacactgattgccaaggtcatccagaacctcgccaaccgtgccccgttcggtgagaaggaggcctacatgggcttcatgaatagcttcctggrggaacatggaccagccatgcaatgcttcctggaccaggtagccatggtggatgtggatgctgcccccagtggttaccagggcagtggtgatctggccctccagttagctgtcctgcatgcccagctctgtacaatttttgctgagcttgaccagacaacccgagacaccctggaaccactgcccaccatcctgcgagccattgaggagggccagcctgtgcttgtgtcagtgccaatgcgtctcccactgcccccggcccaggtccactccagcctctccgcagggagaagcccggcttcctggccccccgggacctccccaagcacacccctctcatctccaagagccagtctctgcgcagtttcgccgctcagagagttgggcccggccacggccggacgaagagcggcccctgcggcggccccggccggtgcagcgcacgcagagtgtcccggtccggcgtcctgcccgccgccgccaatctgcggggccctggccgcgacccaaaggctccctgagcatgggaccagcgccccgsgcccggccttggacccgggamtccgcttcgctgcttcggaagcgtcggtaaccttggcancgccaaattggaaca

SEQ ID NO: 1389 - DNA, 897 bp, Homo sapiens
  misc_feature (497)..(497): n equals a,t,g, or c
cgcgtgcgcccaggycaggyggagggactgccccgccctggtccagtgattgatcagcagtgattactgaggctttaatggtccgcttggatgggaattaattctgggatggataaataatgcatcgaggtttatgtagtccaaggcgagccgtccgtccggagccaggagaggtagccgagggagcctgacgggtgacgccagcggccacggggccccgaacgagcaggacatgaggggcgactaggcgcgaggacgagcaaaagcaagtggatgacagcatgaacggccctgcggggctggccggacggctgcaagaacatgctgagcccaaagwtcaggcasgccaggarggcccgctccaaaagcctagtgatgggggagcagarccggagccctgggcggatgccgtgccctcacasgctgggccccgtgctgaaggcgggctggctgaagaagcagaggagcatcatgaagaactggcagcagcgctggtnttgtgctgcgtggggatcagcttttytactacaaggmcaaagatgagatcaagccccaggagaataagtgagggaagctcagcaataaggagccatagaagattgatttaaagtttgatgtgattgagtaaaagcttgagactggtggggagaaagtcaagatggatgggaaagcacatgcacttctaggagtggaacattaatattggacagtcggaaaccagaaatctttaagaaagaggaaacctcaggggaagaaagagaggccatcctatcccataacttgaaagtcacaggaatatttcagcctgcagggaatcttcatttcccagcccattgtttaccaaacttgcacgtcaaaaacaaaaacaaaaaataaaatgttgctttcatgaaaaaa

SEQ ID NO: 1390 - DNA, 717 bp, Homo sapiens
  misc_feature (21)..(21): n equals a,t,g, or c
  misc_feature (716)..(716): n equals a,t,g, or c
ggcagaagcttacggagctgntttcgggacctggtgggcatagagaacctcattgctcctggcagggagttcatccgtgagggctgccttcacaagctcaccaagaagggcctgcagcagaggatgttttttctgttctcagatatgttgctgtacacaagcaaaggagttgcagggaccagccacttccggatccggggcctccttcccctccaaggcatgctggtggaagaaagtgataacgagtggtctgttccacactgtttcaccatctacgcggctcagaaaacaatcgtggtggcagccagcactcggctggagaaagagaagtggatgctggacctgaactccgcgatccaagcagccaagagtggcggtgacacggcccctgcactgccaggccgcactgtgkcactcgtccccccagatcccccaacgaggkatctctggagcaggagtcagaagatgatgctcggggtgtccgcagctccctggaggggcatggcagcaccgggccaacaccacaatgcacgtgtgctgggtaccggaacaccagcgtgtccagggcaagaccacagtgcagctgtcgagaaccaagctttcaggatatctgctaagaaagttcaaaaacaagtcatgggctggcagaagctctgggtcgtctttaccaacttctgttttgttcttcttacaaaactcatcagggatgactaccnc

SEQ ID NO: 1391 - DNA, 465 bp, Homo sapiens
ggcagagctcatagcttgttggttacctccatggggcacataaagctgacagattttggattatctaaggtgggactaatgagcatgactaccaacctttacgagggtcatattgagaaggatgctagagagttcctggataaacaggtctgtggcacacctgaatacattgcaccagaagtgattctgaggcagggttatggaaagccggtggactggtgggccatggggattatcctctatgaatttctggttggatgcgtgccattctttggggatactccagagggctatttggacaagtcatcagtgatgagatcaactggcctgagaaggatgaggcaccccacctgatgccaggatctgattaccttactcctcaggcagaatccctggagaggctgggacaggtggtgcatatwaagtaaacagcatcgattttccgttctttagctggacagtttc

SEQ ID NO: 1392 - DNA, 867 bp, Homo sapiens
  misc_feature (77)..(77): n equals a,t,g, or c
  misc_feature (812)..(812): n equals a,t,g, or c
  misc_feature (831)..(831): n equals a,t,g, or c
  misc_feature (855)..(855): n equals a,t,g, or c
  misc_feature (862)..(862): n equals a,t,g, or c
ggccaccgcacaaatggaagagcgactagcagagtttatttcctccaacactccagacagcgtgctgcccttggcanatggagccctgagctttattcatcatcaggtgattgagatggcccgagactgcctggataaatctcggagtggcctcattacatcacaatacttctacgaacttcaagagaatttggagaaacttttacaagatgctcatgagcgctcagagagctcagaagtggcttttgtgatgcagctggtgaaaaagctgatgattatcattgcccgcccagcacgtctcctggaatgcctggagtttgaccctgaakagttctaccaccytttagaagcagctgagggccacgccaaagagggacaagggattaaatgtgacattccccgctacatcgttagccagctgggcctcacccgggatcccctagaagaaatggcccagttgagcagctgtgacagtcctgacactccagagacagatgattctattgagggccatggggcatctctgccatctaaaaagacaccctctgaagaggacttcgagaccattaagctcatcagcaatggcgcctatggggctgtatttctggtgcggcacaagtccacccggcagcgctttgccatgaagaagatcaacaagcagaacctgatcctacggaaccagatccagcaggccttcgtggagcgtgacatactgactttcgctgagaacccctttgtggtcagcatgttctgctcctttgataccaagcgccaattgtgcatggtgatggagttacgttgaagggggagangtgccactctgctgaaganaattggggcctgctgttgaaatgngggttanatttg

SEQ ID NO: 1393 - DNA, 613 bp, Homo sapiens
gatgagctgagcttcaaggctggggatgagctgaccaagatggaggacgaggatgagcagggctggtgcaaggaacgcttggacaacgggcaaattatgtggaggcgatccagtgatgagtcggggacaggccagcggggggacggaggcggcgggcccaggagcctcagccagccacgtgggcatccactccttttcctgcaagagatgatggttccattgctcttggcttcatggtgttcctggaaggcagatgagctggtcatttcgcctgggactcggcacctttycgagtgcagctggagggatctgagcgcaggaagacgcagaacaacagaawtagccgcccctccccgcccactgtcctgttggcctatcatagatctctatgttcttgactttgtctctcctttccgagtcaatggtggtttacacctaatcctggttccactgataactcttctccggaacggagtccattcaacctggcaacctaaatggacaaggttaacattcccaatttggaatgaaggaatttggaggttttttttttaaagggcttgtgttacaatttattacttttttattacacctgttcatttctacttaaatt

SEQ ID NO: 1394 - DNA, 2107 bp, Homo sapiens
gggctcaggatgagtgtggatggcatgaactcacactagcactggctccacctgtgctccttcggaaggagccctcagccctgagccccaaggctccagtgccctccccttgcggggcgggggcctcacaccctctgccgccctgtgctgagggccctgtggcctcccctttcttgcagtgtgagcagctacgagaagacccagagctatcccaccgactggtcagacgatgagtctaacaaccccttctcctccacggatgccaatggggactcgaatccattcgacgacgacgccacctcggggacggaagtgcgagtccgggccctgtatgactatgaggggcaggagcatgatgagctgagcttcaaggctggggatgagctgaccaagatggaggacgaggatgagcagggctggtgcaagggacgcttggacaacgggcaagttggcctatacccggcaaattatgtggaggcgatccagtgatgagtcggggacaggccagcggggggacggaggcggcgggcccaggagcctcagccagccacgtgggcatccactccttttcctgcaagagatgatggttccattgctcttggcttcatggtgttcctggaaggcagatgagctggtcatttcgcctgggactcggcacctttccgagtgcagctggagggatctgagcgcaggaagacgcagaacaacagaaatagccgcccctccccgcccactgtgcctgttggcctatcatagatctctatgttcttgactttgtctctcctttccgagtcaatggtgggttacactgatcttgttccactgattactctctctgacgagtccatcacctgcaacttaaatgaacaagcttacatcccattttgagtgaagattttgaggtttttaatttaaaggctgtgtacagttatacttttttatacacctgttcatttctacttaaattatggcacagattgatgcgcaccagtcttgaggaaacgatctccctattcccttaccctgttactcagccacgccgtgtgtaggcttagcctcaggtggcagatgtttgaggaaaggaattatgccaggaaggtgggaccgggttatggtcgggtttctattgggaatgctctttgtgcttttgggcatctgaatggaagctttacatagaaccttaggtagaactcccccaaatcgccatatttaaaaattattttcactctattcttgcttaaaactgtactcttttgcaaattaacaattttatcactgattcagagttaaaaagaagactaacttttcaagcaaatgcatctgtaaagatgctttagattagactgtcatgtctcagtgtctatctgtatatattatttgatattcagagaatctaaagcactcgtctactgttttaatgagatttaacagcttttaacagtgagtttcgtttgtaaactgcttgaagtctgtggcattcaggcacacrtctggctggccggctgggtctcctcccgggctcagtgggcctggggctctctgacgtggtgcctgctggagggaggctcgtcgtcaccagctgactgctggtccggcttctgaccggcctttgtcctggctccgtagcagaacactgtaaaagtgcccgcgtctttgcagtagttgcagatttcagtcgtcgtgttacttgtgcacaaacagaagctgggtcttacccgcagcacgagtgtctcgggctgcccggagtcgcccgggagcaggtgctgcagccagagttacgcgggggccacgcgggccggcgggggtggggggaacgtgggggaacctgtgtttcacgtgactcagcagtgcccgccgccgtcaccagctatgcattcactccgtttccagtgagcagatgtcttgcttggaaagtggacctgtgtctgtgtctgtcctgagaacttaccagcagaaatcctcatttctgtgctacggatttaccaaaaattgtcaagtctttttcagtttaacagttcctttamatgtgtagtatttgaggaaaaaaatcaataaacagttgatctcgtgcaaaaaaaaaaaaaaaaaaaaaaaaaaaaaaaaaaaa

SEQ ID NO: 1395 - DNA, 1184 bp, Homo sapiens
  misc_feature (633)..(633): n equals a,t,g, or c
  misc_feature (1102)..(1102): n equals a,t,g, or c
  misc_feature (1120)..(1120): n equals a,t,g, or c
  misc_feature (1127)..(1127): n equals a,t,g, or c
  misc_feature (1141)..(1141): n equals a,t,g, or c
  misc_feature (1164)..(1164): n equals a,t,g, or c
gttcccctgtcttccccaacgccccggagccgccggccgctagcgtcagcgccagccagaattaaggaagttcactggagtaaaatggaggcctcagtaatattacccattctgaagaaaaaactagccttcctttcaggaggaaaggacagacggagtggcctcattttgacaattccattatgcctcgaacagacaaatatggatgagctgagtgtcaccttagactacctactcagcattccaagtgagaagtgtaaggctagaggatttaccgtgattgtggatggcagaaaatcacagtggaatgtggtgaaaacagtagtcgtaatgctacagaatgttgttccagctgaggtgtcccttgtttgtgtggtaaagccagatgaattctgggataagaaagtaacgcatttttgtttttggaaggagaaggatagacttggctttgaggttattttagtgtccgccaacaaattgactcgttatatagaaccatgccaattaacagaagattttggtgggagtctcacctatgatcacatggactggttaaataagaggctggtttttgagaagtttacaaaggaatctacatsattattagatgaacttgctttgattaacaatggnaagtgcatwaaggaaatcagcaagagaaagaaaggtctgtggatttaaactttcttccatcggttgatcctgaaacagttcttcagacagggcatgaattgttgtccgaattacagcagcgtcgatttaatggctcagacggaggggtttcatggtctcctatggatgatgaacttcttgcacagccacaggttatgaaattattagattcactccgagagcaatatacccgctaccaggaaagtttgtaggcaacgtakcaagcgcacacagttagaagagattcaacagaaggtaatgcaggtggttgaactggctagaagggcctggatcagaacaacttaagagccccagtggggcatttggagactccattagggcctcccaggccttacagcagaaacacgaagagatttgagagccagcacagtgaatggtttgcagtgtaatgttggacctttatccagcnatttgcagcactccttgnatgcctngcgaattaaggaanatctttgttggacctaaagttcncttgcggcaacactttgggg

SEQ ID NO: 1396 - DNA, 839 bp, Homo sapiens
tatacgaaagctgagaaattcaaaagctttcaacattcaagattatatcagcaatttaatgaaaataattctattggggagacacaagcccgaaaactttcaaaattgcgagtccatgagtttatttttcacaccaggaagttcattaccagaatatatcccaaagcaacaagagcagactcttctaattttaatccccaagaattttggaatataggttgtcaaatggtggctttaaatttccagacccctggtctgcccatggatctgcaaaatgggaaatttttggataatggtggttctggatatattttgaaaccacatttcttaagagagagtaaatcatactttaacccaagtaacataaaagagggtatgccaattacacttacaataaggctcatcagtggtatccagttgcctcttactcattcatcatctaacaaaggtgattcattagtaattatagaagtttttggtgttccaaatgatcaaatgaagcagcagactcgtgtaattaaaaaaaatgcttttagtccaagatggaatgaaacattcacatttattattcatgtcccagaattggcattgatacgttttgttgttgaaggtcaaggtttaatagcaggaaatgaatttcttgggcaatatactttgccacttctatgcatgaacaaaggttatcgtcgtattcctctgttttccagaatgggtgagagccttgagcctgcttcactgtttgtttatgtttggtacgtcagataacagctaatgataaatgacatatcattagctatgcatcgcaataaaacagccaaaatgaaaaaaaaaaataaaaa

SEQ ID NO: 1397 - DNA, 1017 bp, Homo sapiens
  misc_feature (9)..(9): n equals a,t,g, or c
  misc_feature (79)..(79): n equals a,t,g, or c
  misc_feature (126)..(126): n equals a,t,g, or c
  misc_feature (128)..(128): n equals a,t,g, or c
  misc_feature (1014)..(1014): n equals a,t,g, or c
ggcgtgctngccagctaccatacggtgtctttacagttgctagacctgatgcacaccctgcacacgcgggcagcctctntctacagctcatgggcggaggagcaacgccacctggagacaggtgcnangaagattgaagctgattctcgcaccctctgggcccactgctggtgccctttactgcagggtattgcctgcctgtgctgcgatgcccggcgccaggtacggatgcaggcactgacctatctgcagcgagcactacttgtacatgatctgcaaaagctagatgccctggaatgggagtcctgttttaacaaggtgctgtttcctctacttaccaagctcttggagaacatcagccctgcagatgtgggtgggatggaggagacccggatgagggcttccacattgctctctaaggtcttcctgcagcacctgtctccactgctgtcactctctacctttgcggccctctggctcaccatcttggacttcatggacaagtacatgcacgcaggctccagcgacttactgtcagaggcgatccctgagtctctgaagaacatgcttctggtgatggacacagcggagattttccacagtgcagatgcacggggaggcggcccctcggccctctgggagatcacctgggaacgcattgactgttttctccctcacctacgagatgaactcttcaagcagaccgtcatccaggaccccatgcccatggagcctcaaggccaaaagcctctcgcctcagcccacctgacttccgctgctggcgacactaggacacctggccatccaccgcccccagagattccatctgagctgggggcctgtgactttgagaagcccgagagcccccgagccgccagcagcagctccccaggatcaccagtggcctcaagccccagcaggctgagccccamccccgamggcctccamccttggctcarcccccactgatctgcagcccttggstccccaatgcagtgggcgtgccaactatgnctt

SEQ ID NO: 1398 - DNA, 2170 bp, Homo sapiens
tttttttttttttttttaaaagtaaacaaatctacttttattcagaaatgatgctttttaagtaagggtaggaaatcttcattttctttaataactaactctttttccctcttcctaatttaattcaatttttacagaccccctattgataaagatgtaagatctgctattcattgtctttcttatacatagaagtaaaatcacagaaataattattattttatgggaggataaaacatttatttaaatggaaacactaatctttattttcatcatgctgaagtgtgtggttacaatttccaataaaacactatatataataagcaaaataagttagtacattgtaaacttatgcacagtttcatcaattaacagtttaagaacaaacaagccatttaagactttggagctacatttagtaaaaaattgcaaacactcaaatcttatcaaccccaagtaagacagtaaagagctattcaagacttcttcaaaccaattacacaaatacatgtttatttttggttacagtcccctgctatgcacaagaccattggaatgctggaacaattacacattttaaaacggcaaaaagcaaagcaaggagataacatgccagccttagagaagctgtcttgaaagtgcaaactgcgttttctcttcctgaaccactaggataagaacgggtacctcagacgacacggcagggtcatgagcatgctttctataccccactggtgggacatttactggaaccaggtctccatgcctttgaagatacctccggttttaaacagtgaacaggcttcaactaaatatagtgcaaatcaaataccaaggagcaaaacgacagaatagagactgtcacagatgattgacttcctgtttctctacctggcacaacccacatgggacacattggcacacggtaacaacaacttctatttaggttttgatacggaaggcggtgcggcggagcgaatgcagggcaaccacgcaacagcccctgagcaaggccccgatgttatacacaggatccgttccccctctctgagtactgaatgcccacagaamcstggggaccacgggggcagccacagccaggagatccaccaggaagctgctgctccagtactgcctcacracgcccccgcgagccagtgggatgacaccatccaacctctcttccacgcaggctgcaaaatccagctctctcatgaggcggtttgcatgaacttctgcatccacattggcgtagggggtctccacgggagacaaaaggatggctgagtttggatttcttggagttaaatcaaccactaaggcagagagggactctgggaagctctccatcgagtctggttcagactcatcaggggacgccaagctcgagggacaggggtcctggagcttctgcagcacactctgaatgagctctgagatggctgggctgtagggcaccacgtcggtctgaacggctcgctccaccaccacactgccctcctcctgacccatgactatgggcagcagctccaggacgttagccccaggggtggaatgcacaagctccaggtcaccagattctgtggtggtggctgtcactatctcatcgaacaaatctgtgctgttggctatgctatctcctaccagtagctccctgtcagccccttcccccgtgacctgctcttccagagataacccatctgccattgtgtcaagaggggggttgagggttaagctcttctctggggaatcacatggaaagtctaggcacagttcgtccctcagagagccactgtgtgccatctccatgctctgaaggagagactccagcttcttgttttggatgtttatgtccacaaaatatttctgaatgcctttatctttatcagccaagctgctccgcatggtttcgatgacctgtttgagctgtttaatctctttcctggcttctttgagtgccaactgggcctctacccggtgacactcctcctcaatccagtcctctcgcatgcgggccagctgggacttaagctccacgatttcactttccctagagtgccaagacaagcatggttaattaaaaaaaaaraaaaaaaaaaactcgagagtacttctagagcggccgcgggcccatcgattttccacccgggtggggtaccaggtaagtgta

SEQ ID NO: 1399 - DNA, 631 bp, Homo sapiens
cctactaaagggaacaaaagctggagctccccgcggtggcggccgctctagaactagtggatcccccgggctgcaggaattcggcacgagggagcatggagcgcttggcagccttggggaacatgcagcgaaagttgtgggaaaggtactcagacaagagcaagactttgtaataacccaccaccagcgtttggtgggtcctactgtgatggagcagaaacacagatgcaagtttgcaatgaaagaaattgtccaattcatggcaagtgggcgacttgggccagttggagtgcctgttctgtgtcatgtggaggaggtgccagacagagaacaaggggctgctccgaccctgtgccccagtatggaggaaggaaatgcgaagggagtgatgtccagagtgatttttgcaacagtgacccttgcccaacccatggtaactggagtccttggagtggctggggaacatgcagccggacgtgtaacggagggcagatgcggcggtaccgcacatgtgataaccctcctccctccaatgggggaagagcttgtgggggaccagactcccagatccagaggtgcaacactgacatgtgtcctgtggatggaagttggggaagctggcatagtggag

SEQ ID NO: 1400 - DNA, 1644 bp, Homo sapiens
  misc_feature (1138)..(1138): n equals a,t,g, or c
  misc_feature (1636)..(1636): n equals a,t,g, or c
cgacccacgcgtccgggacagcagggctccgggcaaggaggtctggatgctgagggcggtccctgaggggcgggcggggcccgaccggcgctctgtgtggccgaggccatgaagccgcagccgcccggctaggccccgggcggctctagcccagggcggcccgcggggcgctgggcctggctcccggctccggtttccgggccggcgggtggccgctcaccatgcccggcaagcaccagcatttccaggaacctgaggtcggctgctgcgggaaatacttcctgtttggcttcaacattgtcttctgggtgctgggagccctgttcctggctatcggcctctgggcctggggtgagaagggcgttctctcgaacatctyagcgctgacagatctgggaggccttgamcccgtgtggctgtttgtggtagttggaggcgtcatgtcggtgctgggctttgctggctgcattggggccctccgggagaacaccttcctgctcaagtttttctccgtgttcctcggtctcatcttcttcctggagctggcaacagggatcctggcctttgtcttcaaggactggattcgagaccagctcaacctcttcatcaacaacaacgtcaaggcctaccgggacgacattgacctccagaacctcattgactttgctcaggaatactggtcttgctgcggagcccgaggccccaatgactggaacctcaatatctacttcaactgcactgacttgaaccccagccgggagcgctgcggggtgcccttctcctgctgcgtcagggaccctgcggaggatgtcctcaacacccagtgtggctacgacgtccggctcaaactggagctggagcagcagggcttcatccacaccaaaggctgcgtgggccagtttgagaagtggctgcaggacaacctgattgtggtggcgggagtcttcatgggcatcgccctcctccagatctttggcatctgcctggcccagaacctcgtgagtgacatcaaggcagtgaaagccaactggagcaaatggaatgatgactttgaaaaccactggcttacgcccaccatttccgaggtcctgtccacggcggggcctcagcagaactctctgactggggcccctggccnggccccacccagccgacatgttttctttggcctgggtggtttataccctgagccaacctttaaaaattggtagatttcacataaaagtccagatccacagcttctcttgaagaatgaccacctggctacgcggctcttcggtggcaacactacctgggacactgcctccccagtcaccaagggccccagctggcccgttctactcacctaagtgccgcctgacccttgtacactaggagctggcctcccacctctgcagggttatttcctgcacctcgaggccgctgcgggccaatctggagtgaaacacggggacctgaaggatggagaggctggaccccgctttgaagagggtgcagcctgggaagggcggccttgctggggactgcggtgggagtagagtkcccaggararggtctgaggggtkggattgggggkcaggacaatttttgcaaaagaagtagcttggaggccatgggactggcgggagctgttttngggggatt

SEQ ID NO: 1401 - DNA, 2867 bp, Homo sapiens
  misc_feature (2825)..(2825): n equals a,t,g, or c
  misc_feature (2845)..(2845): n equals a,t,g, or c
  misc_feature (2850)..(2850): n equals a,t,g, or c
  misc_feature (2858)..(2858): n equals a,t,g, or c
  misc_feature (2866)..(2866): n equals a,t,g, or c
tcgcagcagggtgtgtccagatggtcagtctctggtggctagcctgtcctgacaggggagagttaagctcccgytctccaccgtgccggctggccaggtgggctgagggtgaccgagagaccagaacctgcttgctggagcttagtgctcagagctggggagggaggttccgccgctcctctgctgtcagcgccggcagcccctcccggcttcacttcctcccgcagcccctgctactgagaagctccgggatcccagcagccgccacgccctggcctcagcctgcggggctccagtcaggccaacaccgacgcgcagctgggaggaagacaggacccttgacatctccatctgcacagaggtcctggctggaccgagcagcctcctcctcctaggatgacctcaccctccagctctccagttttcaggttggagacattagatggaggccaagaagatggctctgaggcggacagaggaaagctggattttgggagcgggctgcctcccatggagtcacagttccagggcgaggaccggaaattcgcccctcagataagagtcaacctcaactaccgaaagggaacaggtgccagtcagccggatccaaaccgatttgaccgagatcggctcttcaatgcggtctcccggggtgtccccgaggatctggctggacttccagagtacctgagcaagaccagcaagtacctcaccgactcggaatacacagagggctccacaggtaagacgtgcctgatgaaggctgtgctgaaccttaaggacggggtcaatgcctgcattctgccactgctgcagatcgacmgggactctggcaatcctcagcccctggtaaatgcccagtgcacagatgactattaccgaggccacagcgctctgcacatcgccattgagaagaggagtctgcagtgtgtgaagctcctggtggagaatggggccaatgtgcatgcccgggyctgcggcgcttcttccagaagggccaagggacttgcttttatttcggtgagctacccctctctttggccgcttgcaccaagcagtgggatgtggtaagctacctcctggagaacccacaccagcccgccagcctgcaggccactgactcccagggcaacacagtcctgcatgccctagtgatgatctcggacaactcagctgagaacattgcactggtgaccagcatgtatgatgggctcctccaagctggggcccgcctctgccctaccgtgcagcttgaggacatccgcaacctgcaggatctcacgcctctgaagctggccgccaaggagggcaagatcgagattttcaggcacatcctgcagcgggagttttcaggactgagccacctttcccgaaagttcaccgagtggtgctatgggcctgtccgggtgtcgctgtatgacctggcttctgtggacagctgtgaggagaactcagtgctggagatcattgcctttcattgcaagagcccgcaccgacaccgaatggtcgttttggagcccctgaacaaactgctgcaggcgaaatgggatctgctcatccccaagttcttcttaaacttcctgtgtaatctgatctacatgttcatcttcaccgctgttgcctaccatcagcctaccctgaagaagcaggccgcccctcacctgaaagcggaggttggaaactccatgctgctgacgggccacatccttatcctgctaggggggatctacctcctcgtgggccagctgtggtacttctggcggcgccacgtgttcatctggatctcgttcatagacagctactttgaaatcctcttcctgttccaggccctgctcacagtggtgtcccaggtgctgtgtttcctggccatcgagtggtacctgcccctgcttgtgtctgcgctggtgctgggctggctgaacctgctttactatacacgtggcttccagcacacaggcatctacagtgtcatgatccagaaggtcatcctgcgggacctgctgcgcttccttctgatctacttagtcttccttttcggcttcgctgtagccctggtgagcctgagccaggaggcttggcgccccgaagctcctacaggccccaatgccacagagtcagtgcagcccatggagggacaggaggacgagggcaacggggcccagtacaggggtatcctggaagcctccttggagctcttcaaattcaccatcggcatgggcgagctggccttccaggagcagctgcacttccgcggcatggtgctgctgctgctgctggcctacgtgctgctcacctacatcctgctgctcaacatgctcatcgccctcatgagcgagaccgtcaacagtgtcgccactgacagctggagcatctggaagctgcagaaagccatctctgtcctggagatggagaatggctattggtggtgcaggaagaagcagcgggcaggtgtgatgctgaccgttggcactaagccagatggcagcccsgatgagcgctggtgcttcagggtggaggaggtgaactgggcttcatgggagcagacgctgcctacgctgtgtgaggacccgtcaggggcaggtgtccctcgaactctcgagaaccctgtcctggcttcccctcccaaggaggatgaggatggtgcctctgaggaaaactatgtgcccgtccagctcctccagtccaactgatggcccagatgcagcaggaggccagaggacagagcagaggatctttccaaccacatctgctggctctggggtcccagtgaattctggtggcaaatatatattttcactaactaaaaaaaaaaaaaaaaaactcgngggggggcccggaacccagntcggngtaatccnattagacnt

SEQ ID NO: 1402 - DNA, 813 bp, Homo sapiens
  misc_feature (779)..(779): n equals a,t,g, or c
  misc_feature (809)..(809): n equals a,t,g, or c
gatcccattcttctctcggtgggaatgcttgtggggggaaaaagaaacgcaatagataaagcggggcgcatgcgctcccggcacaggcttcgattgtraggaargccggctagtctccgagctcatcccgccttgcgcatgcggagaaggtaaaccagcgccccgagttgaggcgcgggtttggtggcgcgtttcagcgaagtcgcacgtgaaggatagcagtggcctgagaaagacccagtcatggcagcctccagcatcagttcaccatggggaaagcatgtgttcaaagccattctgatggtcctagtggcccttatcctcctccactcagcattggcccagtcccgtcgagactttgcaccaccaggccaacagaagagagaagccccagttgatgtcttgacccagataggtcgatctgtgcgagggacactggatgcctggattgggccagagaccatgcacctggtgtcagagtcttcgtcccaagtgttgtgggccatctcatcagccatttctgtggccttctttgctctgtctgggatcgccgcacagctgctgaatgccttgggactagctggtgattacctcgcccagggcctgaagctcagccctggccaggtccagaccttcctgctgtggggagcaggggccctggtcgtctactggctgctgtctctgctcctcggcttggtcttggccttgctggggcggatcctgtggggcctgaagcttgtcatcttcctggccggcttcgtggccctgatgaggtcggngcccgacccttccacccggccctgctactnctgg

SEQ ID NO: 1403 - DNA, 552 bp, Homo sapiens
tatgttcaccctggacgtggaggagaatgagaatggggagcgcaccccctacctaattgtcatgggtgctttggacagggaaacccaggaccagtatgtgagcatcatcatagctgaggatggtgggtctccacacttttgggcagtgcactctcaccattggcatcagtgacattaatgacaattgccctctcttcacagactcacaaatcaatgtsactgtgtatgggaatgctacagtgggcaccccaattgcagctgtccaggctgtggataaagacttggggaccaatgctcaaattacttattcttacagtcagaaagttccacaagcatctaaggatttatttcasctggatgaaaacactggagtcattaaacttttcagtaagattggaggaagtgttctggagtcccacaagctcaccatccttgctaatggaccaggctgcatccctgctgtaatcactgctcttgtgtccattattaaagttattttcagaccccctgaaattgtccctcgttacatagcaaacgagatagatggtgttg

SEQ ID NO: 1404 - DNA, 2422 bp, Homo sapiens
gccaacagtgctccctcatagatggacgaagtgtgaccccccttcaggcttcagggggactggtcctcctggaggagatgctcgccttggggaataatcactttattggttttgtgaatgattctgtgactaagtctattgtggctttgcgcttaactctggtggtgaaggtcagcacctgtgtgccgggggagagtcacgcaaatgacttggagtgttcaggaaaaggaaaatgcaccacgaagccgtcagaggcaactttttcctgtacctgtgaggagcagtacgtgggtactttctgtgaagaatacgatgcttgccagaggaaaccttgccaaaacaacgcgagctgtattgatgcaaatgaaaagcaagatgggagcaatttcacctgtgtttgccttcctggttatactggagagctttgccagtccaagattgattactgcatcctagacccatgcagaaatggagcaacatgcatttccagtctcagtggattcacctgccagtgtccagaaggatacttcggatctgcttgtgaagaaaaggtggacccctgcgcctcgtctccgtgccagaacaacggcacctgctatgtggacggggtacactttacctgcaactgcagcccgggcttcacagggccgacctgtgcccagcttattgacttctgtgccctcagcccctgtgctcatggcacgtgccgcagcgtgggcaccagctacaaatgcctctgtgatccaggttaccatggcctctactgtgaggaggaatataatgagtgcctctccgctccatgcctgaatgcagccacctgcagggacctcgttaatggctatgagtgtgtgtgcctggcagaatacaaaggaacacactgtgaattgtacaaggatccctgcgctaacgtcagctgtctgaacggagccacctgtgacagcgacggcctgaatggcacgtgcatctgtgcacccgggtttacaggtgaagagtgcgacattgacataaatgaatgtgacagtaacccctgccaccatggtgggagctgcctggaccagcccaatggttataactsccactgcccgcatggttgggtgggagcaaactgtgagatccacctccaatggaagtccgggcacatggcggagagcctcaccaacatgccacggcactccctctacatcatcattggagccctctgcgtggccttcatccttatgctgatcatcctgatcgtggggatttgccgcatcagccgcattgaataccagggttcttccaggccagcctatraggagttctacaactgccgcagcatcgacagcgagttcagcaatgccattgcatccatccggcatgccaggtttggaaagaaatcccggcctgcaatgtatgatgtgagccccatcgcctatgaagattacagtcctgatgacaaacccttggtcacactgattaaaactaaagatttgtaatctttttttggattatttttcaaaaagatgagatactacactcatttaaatatttttaagaaaataaaaagcttaagaaatttaaaatgctagctgctcaagagttttcagtagaatatttaagaactaattttctgcagcttttagtttggaaaaaatattttaaaaacaaaatttgtgaaacctatagacgatgttttaatgtaccttcagctctctaaactgtgtgcttctactagtgtgtgctcttttcactgtagacactatcacgagacccagattaatttctgtggttgttacagaataagtctaatcaaggagaagtttctgtttgacgtttgagtgccggctttctgagtagagttaggaaaaccacgtaacgtagcatatgatgtataatagagtatacccgttacttaaaaagaagtctgaaatgttcgttttgtggaaaagaaactagttaaatttactattcctaacccgaatgaaattagcctttgccttattctgtgcatgggtaagtaacttatttctgcactgttttgttgaactttgtggaaacattctttcgagtttgtttttgtcattttcgtaacagtcgtcgaactaggcctcaaaaacatacgtaacgaaaaggcctagcgaggcaaattctgattgatttgaatctatatttttctttaaaaagtcaagggttctatattgtragtaaattaaatttacatttgagttgtttgttgctaagaggtagtaaatgtaagagagtactggttccttcagtagtgagtatttctcatagtgcagctttatttatctccaggatgtttttgtggctgtatttgattgatatgtgcttcttctgattcttgctaatttccaaccatattgaataaatgtgatcaagtcaaaaaaaaaaaaaaaaaaaaaaactcgagggggggtcccgt

SEQ ID NO: 1405 - DNA, 1516 bp, Homo sapiens
ctgccatctcccctcgtcctgcgtcccggacccatctacgctgaggacggagaccgcggcatcaaccagcccatcatctacagcatctttaggggaaacgtgaatggtacattcatcatccacccagactcgggcaacctcaccgtggccaggagtgtccccagccccatgaccttccttctgctggtgaagggccaacaggccgaccttgcccgctactcagtgacccaggtcaccgtggaggctgtggctgcggccgggagcccgccccgcttyccccagagactgtatcgtggcamcgtggcgcgtkgcgctggagcgggcgttgtggtcaaggatgcagctgscccttytyagsctctgaggrtycaggctcaggacccggagttctcggacctcaactcggccatcacatatcgaattaccaaccactcacacttccggatggagggagagttgtgctgaccaccaccacactggcacaggcgggagccttctacgcagaggtgcggggcagggcaggcgggcatctccaagggtgtggggcttaaagatgtgtctaggagggacaagccccttcctgccccaggttgaggcccacaacacggtgacctctggcaccgcaaccacagtcattgagatacaagtttccgaacaggagcccccctccacagcacagaccccagaggcaggaacctctcagccgatgccccccggtatgggaaccagcacctcccaccaaccaaccacacccggtgggggcacagcacagaccccagagccaggaacctctcagccgatgcccctcagcaagagcaccccatcttcaggtggcggcccctcggaggacaagcgcttctcggtggtggatatggcggccctgggcggrgtgctgggtgcgctgctgctgctggstctccttggcctcgccgtccttgtccacaagcactatggcccccgctcaagtgctgctctggcaaagctccggagccccagccccaaggctttgacaaccaggcgttcctccctgaccacaaggcmaactgggcgcccgtccccagccccacgcacgaccccaagcccgcggaggcaccgatgcccgcagagcccgcaccccccggccctgcctccccaggcggtgccctgagccccccgcagcggcccgagctggcggaagccccacggcggtgaggtccatcctgaccaaggagcggcggccagagggcgggtacaaggctgtctggtttggcgaggacatcgggacggaggcagacgtggtcgttctcaacgcgcccaccctggacgtggatggcgccagtgactccggcagcggcgatgagggcgagggcgcggggaggggtgggggtccctacgatgcgcccggtggtgatgactcctacatctaagtggcccctccaccctctcccccagccgcacgggcactggaggtctcgctcccccagcctccgacccgaggcagaataaagcaaggctcccgaaaaaaaaaaaaaaaaaa

SEQ ID NO: 1406 - DNA, 1187 bp, Homo sapiens
tcccggtcgacccacgacgtccgcccgcccgccccgccgctcctcctccctgtaacatgccatagtgcgcctgcraccacacggccggggcgctagcgttcgccttcagccaccatggggaatgggatgaacaagatcctgcccggcctgtacatcggcaacttcaaagatgccagagacgcggaacaattgagcaagaacaaggtgacacatattctgtctgtccacgatagtgccaggcctatgttggagggagttaaatacctgtgcatcccagcagcggattcaccatctcaaaacctgacaagacatttcaaagaaagtattaaattcattcacgagtgccggctccgcggtgagagctgccttgtacactgcctggccggggtctccaggagcgtgacactggtgatcgcatacatcatgaccgtcactgactttggctgggaggatgccctgcacaccgtgcgtgctgggagatcctgtgccaaccccaacgtgggcttccagagacagctccaggagtttgagaagcatgaggtccatcagtatcggcagtggctgaaggaagaatatggagagagccctttgcaggatgcagaagaagccaaaaacattctggccgctccrggaattctgaagttctgggcctttctcagaagactgtaatgtacctgaagtttctgaaatattgcaaacccacagagtttaggctggtgctgccaaaaagaaaagcaacatagagtttaagtatccagtagtgatttgtaaacttgtttttcatttgaagctgaatatatacgtagtcatgtttatgttgagaactaaggatattctttagcaagagaaaatattttccccttatccccactgctgtggaggtttctgtacctcgcttggatgcctgtaaggatcccgggagccttgccgcactgccttgtgggtggcttggcgctcgtgattgcttcctgtgaacgcctcccaaggacgagcccagtgtagttgtgtggcgtgaactctgcccgtgtgttctcaaattccccagcttgggaaatagcccttggtgtgggttttatctctggtttgtgttctccgtggtggaattgaccgaaagctctatgttttcgttaataaagggcaacttagccaagtttaaaaaaaaaaaaaaaaaaaaaaaaaaaaaaaaa

SEQ ID NO: 1407 - DNA, 467 bp, Homo sapiens
  misc_feature (342)..(342): n equals a,t,g, or c
  misc_feature (465)..(465): n equals a,t,g, or c
cgaaagtcggggcctcgatgggtcattgcagaggagggcgggcatgcggttttytcctgctctggagatggagacccagcccccactgtctcctggatgaggcctcatggggcttggctgggcagggctgggagagtaagggtcctagaggatgggacactggagatccgytcagtgcagctacgggacagaggggcctatgtctgtktggttagcaatgtcgctgggaatractccctgaggacctggctggaagtcatccaggtggaaccaccaaacggaacactttctgaccccaacatcaccgtgccagggatcccagggcctttttttctggatagnagaggtgtggccatggtgctggaagtcggtttcctccccttcctcacctcagtgaccctctgttttggcctgattgcccttgggagcaagggcaaaggtcgggtcaaacatcacatgaccttnga

SEQ ID NO: 1408 - DNA, 1200 bp, Homo sapiens
  misc_feature (1182)..(1182): n equals a,t,g, or c
  misc_feature (1186)..(1186): n equals a,t,g, or c
  misc_feature (1192)..(1192): n equals a,t,g, or c
gcggccgcagccgctgccccgggccgggcgcccgcggcggcaccatgagtccccgctcgtgcctgcgttcgctgcgcctcctcgtcttcgccgtcttctcagccgccgcgagcaactggctgtacctggccaagctgtcgtcggtggggagcatctcagaggaggagacgtgcgagaaactcaagggcctgatccagaggcaggtgcagatgtgcaagcggaacctggaagtcatggactcggtgcgccgcggtgcccagctggccattgaggagtgccagtaccagttccggaaccggcgctggaactgctccacactcgactccttgcccgtcttcggcaaggtggtgacgcaagggactcgggaggcggccttcgtgtacgccatctcttcggcaggtgtggcctttgcagtgacgcgggcgtgcagcagtggggagctggagaagtgcggctgtgacaggacagtgcatggggtcagccacagggcttccagtggtcaggatgctctgacaacatcgcctacggtgtggccttctcacagtcgtttgtggatgtgcgggagagaagcaagggggcctcgtccagcagagccctcatgaacctccacaacaatgaggccggcaggaaggccatcctgacacacatgcgggtggaatgcaagtgccacggggtgtcaggctcctgtgaggtaaagacgtgctggcgagccgtgccgcccttccgccaggtgggtcacgcactgaaggagaagtttgatggtgccactgaggtggagccacgccgcgtgggctcctccagggcactggtgccacgcaacgcacagttcaagccgcacacagatgaggacctggtgtacttggagcctagccccgacttctgtgagcaggacatgcgcagcggcgtgctgggcacgaggggccgcacatgcaacaagacgtccaaggccatcgacggctgtgagctgctgtgctgtggccgcggcttccacacggcgcaggtggagctggctgaacgctgcagctgcaaattccactggtgctgcttcgtcaagtgccggcagtccagcggctcgtggagttgcacacgtgccgatgaccgcctgcctagccctgcgccggcaaccacctagtggcccagggaaggccgataatttaaacagtctcccaccacctaaaaaanaaanaaaaanaaaaaaaa

SEQ ID NO: 1409 - DNA, 2884 bp, Homo sapiens
caaggattgtagcttggactgtgcgggttcgccccagaaacctctctgcgcatctgacggaaggaccttcctttcccgttgtgaatttcaacgtgccaagtgcaaagatccccagctagagattgcatatcgaggaaactgcaaagacgtgtccaggtgtgtggccgaaaggaagtatacccaggagcaagcccggaaggagtttcagcaagtgttcattcctgagtgcaatgacgacggcacctacagtcargtccagtgtcacagctacacgggatactgctggtgcgtcacgcccaacgggaggcccatcagcggcactgccgtggcccacaagacgccccggtgcccgggttccgtaaatgaaaagttaccccaacgcgaaggcacaggaaaaacagatgatgccgcagctccagcgttggagactcagcctcaaggagatgaagaagatattgcatcacgttaccctaccctttggactgaacaggttaaaagtcggcagaacaaaaccaataagaattcagtgtcatcctgtgaccaagagcaccagtctgccctggaggaagccaagcagcccaagaacgacaatgtggtgatccctgagtgtgcgcacggcggcctctacaagccagtgcagtgccacccctccacggggtactgctggtgcgtcctggtggacacggggcgccccattcccggcacatccacaaggtacgagcagccgaaatgtgacaacacggccagggcccacccagccaaagcccgggacctgtacaagggccgccagctacaaggttgtccgggtgccaaaaagcatgagtttctgaccagcgttctggacgcgctgtccacggacatggtccacgccgcctccgacccctcctcctcgtcaggcaggctctcagaacccgaccccagccataccctagaggagcgggtggtgcactggtacttcaaactactggataaaaactccagtggagacatcggcaaaaaggaaatcaaacccttcaagaggttccttcgcaaaaaatcaaagcccaaaaaatgtgtgaagaagtttgttgaatactgtgacgtgaataatgacaaatccatctccgtacaagaactgatgggctgcctgggcgtggcgaaagaggacggcaaagcggacaccaagaaacgccacacccccagaggtcatgctgaaagtacgtctaatagacagccaaggaaacaaggataaatggctcataccccgaaggcagttcctagacacatgggaaatttccctcaccaaagagcaattaagaaaacaaaaacagaaacacatagtatttgcactttgtactttaaatgtaaattcactttgtagaaatgagctatttaaacagactgttttaatctgtgaaaatggagagctggcttcagaaaattaatcacatacaatgtatgtgtcctcttttgaccttggaaatctgtatgtggtggagaagtatttgaatgcatttaggcttaatttcttcgccttccacatgttaacagtagagctctatgcactccggctgcaatcgtatggctttctctaacccctgcagtcacttccagatgcctgtgcttacagcattgtggaatcatgttggaagctccacatgtccatggaagtttgtgatgtacggccgaccctacaggcagttaacatgcatgggctggtttgtttcttgggattttctgttagtttgtcttgttttgctttccagagatcttgctcatacaatgaatcacgcaaccactaaagctatccagttaagtgcaggtagttcccctggaggaaataatattttcaaactgtcgttggtgtgatactttggctcaaaggatctttgcttttccattttaagcttctgttttgagttttgccctggggcttgaatgagtcccagagagtcgttcggatggtgggaggctgcctaggaggcagtaaatccagtcacagtgcctgggaggggcccatccttccaaaatgtaaatccagtcgcggtgtgaccgagctggctaacaggcttgtctgcctggttttcctcctacacgtggacattattctcctgatcctcctacctggtccaccccagggctaccggaaggtaaaatcttcacctgaaccaattatgagcagtctccttactgaaggtacagccggatacgtggtgcccccggggctggtgttggcagccggggggaggtgcctgagggtccccacggttcctttctgcttttctgaatgcatcaagggtacgagaacttgccaatgggaaattcatccgagtggcactggcagagaaggataggagtggaatgcccacacagtgaccaacagaactggtctgcgtgcataaccagctgccaccctcaggcctgggccccagagctcagggcacccagtgtcttaaggaaccatttggaggacagtctgagagcaggaacttcaagctgtgattctatctcggctcagacttttggttggaaaaagatcttcatggccccaaatcccctgagacatgccttgtagaatgattttgtgatgttgtgatgcttgtggagcatcgcgtaaggcttcttgcttatttaaactgtgcaaggtaaaaatcaagcctttggagccacagaaccagctcaagtacatgccaatgttgtttaagaaacagttatgatcctaaactttttggataatcttttatatttctgacctttgaatttaatcattgttcttagattaaaataaaatatgctattgaaactaaaaaaaaaaaaaaaaaaaaaaaaaaaaaaaaaaaaaaaaaaaaaaaaaaaaaaaaaaaaactcgagggggggcccgtacccaattcgccctatagtgag

SEQ ID NO: 1410 - DNA, 1294 bp, Homo sapiens
  misc_feature (1271)..(1271): n equals a,t,g, or c
ggcagagcgccgaaggaggcggaaggagcagaggaccggcagccggcgtcgaggcggggcgcgggaacgacggcggccatggcggcctcggggcccgggtgtcgcagctggtgcttgtgtcccgaggtgccatccgccaccttcttcactgcgctgctctcgctgctggtttccgggcctcgcctgttcctgctgcagcagcccctggcgccctcgggcctcacgctgaagtccgaggcccttcgcaactggcaagtttacaggctggtaacctacatctttgtctacgagaatcccatctccctgctctgcggcgctatcatcatctggcgctttgctggcaatttcgagagaaccgtgggcaccgtccgccactgcttcttcaccgtgatcttcgccatcttctccgctatcatcttcctgtcattcgaggctgtgtcatcactgtcaaagctgggggaagtggaggatgccagaggtttcaccccagtggcctttgccatgctgggagtcaccaccgtccgttctcggatgaggcgggccctggtgtttggcatggttgtgccctcagtcctggttccgtggctcctgctgggtgcctcgtggctcattccccagacctctttcctcagtaatgtctgcgggctgtccatcgggctggcctatggcctcacctactgctattccatcgacctctcagagcgagtggcgctgaagctcgatcagaccttccccttcagcctgatgaggaggatatccgtgttcaagtacgtctcagggtcttcagccgagaggagggcagcccagagccggaaactgaacccggtgcctggctcctaccccacacagagctgccaccctcacctgtccccaagccaccctgtgtcccagacgcagcacgccagtggtcagaagctggcctcctggccctcctgcacccccgggcacatgcccaccttgcctccgtaccagcctgcctccggcctgtgctatgtgcagaaccactttggtccaaaccccacctcctccagtgtctacccagcttctgcgggcacctccctgggcatccagccccccacgcctgtgaacagccctggcacggtgtattctggggccttgggcacaccaggggctgcaggctccaaggagtcctccagggtccccatgccctgagagaatttctagggaagtcatctcacttggccttctgaaggtcctccctaagagtctcctgacaaaagttacttattgaacacctctatgtgccargntcygtgttggggamtttgatcca

SEQ ID NO: 1411 - DNA, 1500 bp, Homo sapiens
  misc_feature (1380)..(1380): n equals a,t,g, or c
  misc_feature (1406)..(1406): n equals a,t,g, or c
  misc_feature (1477)..(1477): n equals a,t,g, or c
  misc_feature (1484)..(1484): n equals a,t,g, or c
cgggccccaggcagctgcgcccccggcgtcgccagagcctttcgcgcacatccaggcagtgtttgcagggagtgacgacccctttgccaccgccctgagcatgagcgagatggaccggaggaacgacgcctggcttcccggcgaggctacgcgtggagtcctgcgggccgtggccacccagcagcgcggcgccgtgttcgtggacaaggagaacctcaccatgccgggcctcaggttcgacaacatccagggagatgcagttaaagacttgatgcttcgctttctgggtgaaaaagctgcagcaaagagacaagtcctaaatgccgactcagtggaacaatcttttgttggattgaaacagctaatcagctgcagaaactggagggcagcagtggacctgtgcggacgtctcctcacagcccacggccagggctacggcaagagcgggctgctcaccagccacacgacagattcactgcagctctggtttgtcaggctggcactactagtgaagttgggccttttccagaatgctgagatggaatttgaacccttcggaaatcttgatcagccagatctttattacgagtactacccgcacgtgtaccctgggcgcaggggctccatggtccccttctcgatgcgcatcttgcacgcggagcttcagcagtacctggggaacccacaggagtcgctggatagactgcacaaggtgaagactgtctgcagcaagatcctggccaatttggagcaaggcttagcagaagacggcggcatgagcagcgtgactcaggagggcagacaagcctctatccggctgtggaggtcacgtctgggccgggtgatgtactccatggcaaactgtctgctcctgatgaaggattatgtgctggccgtggaggcgtatcattcggttatcaagtattacccagagcaagagccccagctgctcagcggcatcggccggatttccctscagattggagacataaaaacagctgaaaagtattttcaagacgttgagaaagtaacacagaaattagatggactacagggtaaaatcatggttttgatgaacagcgcgttccttcacctcgggcagaataactttgcagaagcccacaggttcttcacagagatcttaaggatggatccaagaaacgcagtggccaacaacaacgctgccgtgtgtctgctctacctgggcaagctcaaggactccctgcggcagctggaggccatggtccagcaggaccccaggcactacctgcacgagagcgtgctcttcaacctgaccaccatgtacgagctggagtcctacggagcatgcagaagaaacaggccctgctggaagctgtcgccggcaaggagggggacagnttcaacacacagtgccttaagctggnctaacttgcttcaacacactacgtcagaaggacccggtctttgaactggggcttgaactaaggattaatgngcctggnggactaataaactctg

SEQ ID NO: 1412 - DNA, 522 bp, Homo sapiens
  misc_feature (1)..(1): n equals a,t,g, or c
  misc_feature (5)..(5): n equals a,t,g, or c
  misc_feature (15)..(15): n equals a,t,g, or c
  misc_feature (45)..(45): n equals a,t,g, or c
ngggntacttctacngaaagaccctgaccctgtttagaccctgantcaagacatggcttgagtgtgtgaatatgatgtgtgcacatgcttaatgagcgtgcaagtgtgcacacgtttgtggagaggagggtgttctggcctgagaaggtaaagaagaggcatgtccagtatgctttgcagggtgtgtttgctcttttccatgcccatgcaacccagattggggtggagcaggaaggagctcttttctgttcccaagcctcagaactcttgagctgtggcttacttgctgtcttcaccaggttcaagctccgtgggccacactgctgctgtgccaagaaggtgtacagcctccccaggatggggcctcatacaacccttcatctgcactcaacatttaatcgtgtccttgctgtctttttattttcctttttgtttgttagcaaaaacctctatttagatttcaataatcagagaagtgtaaaataaaacagattatattgtaaaaaaaaaaaaaaaaaactc

SEQ ID NO: 1413 - DNA, 692 bp, Homo sapiens
  misc_feature (501)..(501): n equals a,t,g, or c
  misc_feature (632)..(632): n equals a,t,g, or c
  misc_feature (678)..(678): n equals a,t,g, or c
  misc_feature (680)..(680): n equals a,t,g, or c
  misc_feature (690)..(690): n equals a,t,g, or c
taacctacctaagccacgagcactgggagacaagcctcgagacctgtatcccctctcccgctgcaggaagaacctctctatccagggcctccgctggtggctacagtggctgggcatcaacttcacccttttcctggggctatttttcctgaccacaccctccatcatcctgtccaccatggacaagtttaatgtcaccaaacccatccatgcgctgaataacccgatcatcagccagttcttccccaccctcctgctctggtccttmtcggccctgmtcccctccattgtctactactctacactgctggagtctcactggaccaagtcgggggaaaaccagatcatgatgaccaaagtctacatattcttgatcttcatggtgctgatcctgccctccctgggtctcaccagtctagattttttcttccggtggctctttgacaaaacttcctcggaagcctccatcaggtttggagtgcgtcttccctgcctgaccanggtgccttctttgtgaactatgtcatcgcctccggcttcatccgcaatggcatggacttgctgcggctgccaagtctcatcctctatacttccgcatgatcatggcaaaaagctgtgacgcaagaatgtcnacaaaaccaagctccatacaatttggagcattttgatgatgtgttntntcctgtatcntg

SEQ ID NO: 1414 - DNA, 1070 bp, Homo sapiens
  misc_feature (34)..(34): n equals a,t,g, or c
  misc_feature (40)..(40): n equals a,t,g, or c
  misc_feature (525)..(525): n equals a,t,g, or c
  misc_feature (529)..(529): n equals a,t,g, or c
  misc_feature (557)..(557): n equals a,t,g, or c
  misc_feature (837)..(837): n equals a,t,g, or c
  misc_feature (912)..(912): n equals a,t,g, or c
  misc_feature (956)..(956): n equals a,t,g, or c
  misc_feature (965)..(966): n equals a,t,g, or c
  misc_feature (1025)..(1025): n equals a,t,g, or c
  misc_feature (1047)..(1047): n equals a,t,g, or c
ggggggggagtgatatgtatttggaggctctctntatganagacaaggaggaaggacatggataaagcagatgtttattggggcattccttatcccagctatggtgtgtggcactgccttcttcatcaatttcatagccatttattaccatgcttcaagagccattccttttggaacaatggtggccgtttgttgcatctgtttttttgttattcttcctctaaatcttgttggtacaatacttggccgaaatctgtcaggtcagcccaactttccttgtcgtgtcaatgctgtgcctcgtcctataccggagaaaaaatggttcatggagcctgcggttattgtttgcctgggtggaattttaccttttggttcaatctttattgaaatgtatttcatcttcacgtctttctgggcatataagatctattatgtctatggcttcatgatgctggtgctggttatcctgtgcattgtgactgtctgtgtgactattgtgtgcacatattttctactaaatgcagnaagnattaccggtgtgccattcattcaaaagnagatttatcttctttccccctcccgccaccaggcaatggacaagttttctctctgctgcatcaactgcaatctatgtttacatgtattccttttactactattttttcaaaacaaagatgtatggcttatttcaaacatcattttactttggatatatggcggtatttagtacagccttgggggataatgtgtggagcgattggttacatgggaacaagtgcctttgtccgaaaaatctatactaatgtgaaaattgactagagacccaagaaaacctgnaactttggatcaatttctttttcataggggtggaacttgcacagcaaaaacaaacaaacgcaagaagagatttgngctttaacacactggggtactttgggggtctctctttcgtcggnggcttaaannaacatctatttccatggatcctaggttcttcctggactgctttcttcaactgttcacancaaaagcttggaatttatgcantaggcattactacagtacatggg

SEQ ID NO: 1415 - DNA, 1219 bp, Homo sapiens
cactctaaagttggtacgcctgcagctaccggtccggaattcccggtcgacccacgcgtccgaacctgacagcacagcctgagatcttggggatccctcagcctaacacccacagacgtcagctggtggattcccgctgcatcaaggcctacccactgtctccatgctgggctctccctgccttctgtggctcctggccgtgaccttcttggttcccagagctcagcccttggcccctcaagactttgaagaagaggaggcagatgagactgagacggcgtggccgcctttgccggctgtcccctgcgactacgaccactgccgacacctgcaggtgccctgcaaggagctacagagggtcgggccggcggcctgcctgtgcccaggactctccagccccgcccagccgcccgacccgccgcgcatgggagaagtgcgcattgcggccgaagagggccgcgcagtggtccactggtgtgcccccttctccccggtcctccactactggctgctgctttgggacggcagcgaggctgcgcagaaggggcccccgctgaacgctacggtccgcagagccgaactgaaggggctgaagccagggggcatttatgtcgtttgcgtagtggccgctaacgaggccggggcaagccgcgtgccccaggctggaggagagggcctcgagggggccgacatccctgccttcgggccttgcagccgccttgcggtgccgcccaacccccgcactctggtccacgcggccgtcggggtgggcacggccctggccctgctaagctgtgccgccctggtgtggcacttctgcctgcgcgatcgctggggctgcccgcgccgagccgccgcccgagccgcaggggcgctctgaaaggggcctgggggcatctcgggcacagacagccccacctggggcgctcagcctggcccccgggaaagaggaaaacccgctgcctccagggagggctggacggcgagctgggagccagccccaggctccagggccacggcggagtcatggttctcaggactgagcgcttgtttaggtccggtacttggcgctttgtttcctggctgaggtctgggaaggaatagaaaggggcccccaatttttttttaagcggccagataataaataatgtaacctttgcggtttaagaggataaaaaaaaaaaaaaaawaaawaaaaaaaaaaaaaactckagggggg

SEQ ID NO: 1416 - protein, 136 aa, Homo sapiens
  MISC_FEATURE (119): Xaa equals any of the twenty naturally occurring L-amino acids
  MISC_FEATURE (126): Xaa equals any of the twenty naturally occurring L-amino acids
  MISC_FEATURE (130): Xaa equals any of the twenty naturally occurring L-amino acids
MPSPQLLVLFGSQTGTAQDVSERLGREARRRRLGCRVQALDSYPVVNLINEPLVIFVCATTGQGDPPDNMKNFWRFIFRKNLPSTALCQMDLAVLGLRGSSYANFNFVGQEVHRRVMAXLGGRASXARVXLGDEPA

SEQ ID NO: 1417 - protein, 177 aa, Homo sapiens
  MISC_FEATURE (16): Xaa equals any of the twenty naturally occurring L-amino acids
  MISC_FEATURE (22): Xaa equals any of the twenty naturally occurring L-amino acids
  MISC_FEATURE (26): Xaa equals any of the twenty naturally occurring L-amino acids
  MISC_FEATURE (148): Xaa equals any of the twenty naturally occurring L-amino acids
  MISC_FEATURE (177): Xaa equals any of the twenty naturally occurring L-amino acids
PFLWEKNLCPSFLLGXNPCPTXRINXCPNPIKTERSQKLTKSKRKMQEHGAASKGSLNARSKQTPEVEAGRARHVTGRALHGLQRLPAQLSPAFNIPSGGPPYGPRCQSTFTRLAHQLRAHGQDPTVQASPRCSSGNPRPRLSAHTPXFHSQEHVPHALGEKTRQQRSTLFKRKKKX

SEQ ID NO: 1418 - protein, 150 aa, Homo sapiens
  MISC_FEATURE (110): Xaa equals any of the twenty naturally occurring L-amino acids
MAGLAILANMLVPQDLQTLRVVFAVLGKGCFGISLTCLTIYKAELFPTPVRMTADGILHTVGRLGAMMGPLILMSRQALPLLPPLLYGVISIASSLVVLFFLPETQGLPXPDTIQDLESQKSTAAQGNRQEAFTVESTSLLEIVALHGAL

SEQ ID NO: 1419 - protein, 120 aa, Homo sapiens
  MISC_FEATURE (32): Xaa equals any of the twenty naturally occurring L-amino acids
  MISC_FEATURE (34): Xaa equals any of the twenty naturally occurring L-amino acids
  MISC_FEATURE (36): Xaa equals any of the twenty naturally occurring L-amino acids
  MISC_FEATURE (38): Xaa equals any of the twenty naturally occurring L-amino acids
  MISC_FEATURE (39): Xaa equals any of the twenty naturally occurring L-amino acids
  MISC_FEATURE (40): Xaa equals any of the twenty naturally occurring L-amino acids
  MISC_FEATURE (41): Xaa equals any of the twenty naturally occurring L-amino acids
  MISC_FEATURE (48): Xaa equals any of the twenty naturally occurring L-amino acids
  MISC_FEATURE (49): Xaa equals any of the twenty naturally occurring L-amino acids
  MISC_FEATURE (51): Xaa equals any of the twenty naturally occurring L-amino acids
  MISC_FEATURE (52): Xaa equals any of the twenty naturally occurring L-amino acids
  MISC_FEATURE (53): Xaa equals any of the twenty naturally occurring L-amino acids
  MISC_FEATURE (60): Xaa equals any of the twenty naturally occurring L-amino acids
  MISC_FEATURE (61): Xaa equals any of the twenty naturally occurring L-amino acids
  MISC_FEATURE (62): Xaa equals any of the twenty naturally occurring L-amino acids
  MISC_FEATURE (63): Xaa equals any of the twenty naturally occurring L-amino acids
  MISC_FEATURE (77): Xaa equals any of the twenty naturally occurring L-amino acids
  MISC_FEATURE (91): Xaa equals any of the twenty naturally occurring L-amino acids
  MISC_FEATURE (92): Xaa equals any of the twenty naturally occurring L-amino acids
  MISC_FEATURE (93): Xaa equals any of the twenty naturally occurring L-amino acids
  MISC_FEATURE (94): Xaa equals any of the twenty naturally occurring L-amino acids
  MISC_FEATURE (110): Xaa equals any of the twenty naturally occurring L-amino acids
MLLTLEKAETKAHLPSLLSPVTLQIDVWEGSXAXRXRXXXXLLCLLAXXLXXXGMVCAWXXXXSSFPGTLMPHNPAXPQSRPQAPVCVGSXXXXSTSRLWSTKGGKLRVXGLVCRGRWLN

SEQ ID NO: 1420 - protein, 117 aa, Homo sapiens
MFLSSVGFSVVMMSIWPYLQKIDPTADTSFLGWVIASYSLGQMVASPIFGLWSNYRPRKEPLIVSILISVAANCLYAYLHIPASHNKYYMLVARGLLGIGAGKVVCICLVVSYSHSF

SEQ ID NO: 1421 - protein, 144 aa, Homo sapiens
  MISC_FEATURE (97): Xaa equals any of the twenty naturally occurring L-amino acids
  MISC_FEATURE (109): Xaa equals any of the twenty naturally occurring L-amino acids
MGYCSGRCTLIFICGMQLVCVLERQIFDFLGYQWAPILANFVHIIIVILGLFGTIQYRPRYITGYAVWLVLWVTWNVFVICFYLEAGDLSKETDLIXTFNISMHRSWWXENGPGCTVTHGHLPQTGPQKTIATSRSQVFAGYHT

SEQ ID NO: 1422 - protein, 219 aa, Homo sapiens
MHQEDFSGSLSSSGKPDVPCSLYMKELQGFIARVMSDYFKHFECLDFVFDNTEAIAQRAVELFIRHASLIRPLGEGGKMRLAADFAQMELAVGPFCRRVSDLGKSYRMLRSFRPLLFQASEHVASSPALGDVIPFSIIIQFLFTRAPAELKSPFQRAEWSHTRFSQWLDDHPSEKDRLLLIRGALEAYVQSVRSREGKEFAPVYPIMVQLLQKAMSALQ

SEQ ID NO: 1423 - protein, 132 aa, Homo sapiens
  MISC_FEATURE (74): Xaa equals any of the twenty naturally occurring L-amino acids
MTLVGHWGRCYLLTERRSLPCGLTEHVFRPAPSSLADAEDARKATCLMLAWPGDRSPLGLCPVAAGLAGRGAQXWGASEWSPTFQPWGCCIGLPHVTSQALMLLLLKGVRPDGQVKSVLQGGVYLPCPGVVP

SEQ ID NO: 1424 - protein, 117 aa, Homo sapiens
  MISC_FEATURE (116): Xaa equals any of the twenty naturally occurring L-amino acids
MNLELGEDLNFNQTPGPRKITIENVQGSVFNIKLPQGKHKLVFLEREKGLSHTVLVFEAVLVSRGWCQNGSPIVVTLRWASCTILLCQIVFKQWVGGVTGDKELVLKSFTKPKTGXV

SEQ ID NO: 1425 - protein, 100 aa, Homo sapiens
  MISC_FEATURE (17): Xaa equals any of the twenty naturally occurring L-amino acids
  MISC_FEATURE (65): Xaa equals any of the twenty naturally occurring L-amino acids
  MISC_FEATURE (96): Xaa equals any of the twenty naturally occurring L-amino acids
MWRPVQLCHFHSALLHXRQKPWPSPAVFFRRNVRGLPPRFSSPTPLWRKVLSTAVVGAPLLLGAXYVMAEAREKRRMRLVVDGMGRFGRSLKSACXSPWT

SEQ ID NO: 1426 - protein, 118 aa, Homo sapiens
MSSRPGTGGCRWSTGSAPGLCWAHCFTIAGQWRSRQTKRMAQQVKYPVNSLNAQKDFMWKQLSHIKKILFQIQKRSSTIGNHGLVALVQNHDWLLNSENQDLVQHLNLIVALIPILGL

SEQ ID NO: 1427 - protein, 125 aa, Homo sapiens
  MISC_FEATURE (83): Xaa equals any of the twenty naturally occurring L-amino acids
  MISC_FEATURE (109): Xaa equals any of the twenty naturally occurring L-amino acids
MLGSLLAFHYGLYFYTVKFLAVVFCLIGYVPSVILFTYIASFTFKKILNTKEFWSFIYSVAALACIAITEITFFMGYTIATIXHYAFCIIIPIYPLLGCLISFIKISWXNVRKMWDTYNPGIGFQ

SEQ ID NO: 1428 - protein, 191 aa, Homo sapiens
  MISC_FEATURE (23): Xaa equals any of the twenty naturally occurring L-amino acids
  MISC_FEATURE (125): Xaa equals any of the twenty naturally occurring L-amino acids
  MISC_FEATURE (159): Xaa equals any of the twenty naturally occurring L-amino acids
  MISC_FEATURE (186): Xaa equals any of the twenty naturally occurring L-amino acids
MPPGPWESCFWVGGLILWLSVGXSGDAPPTPQPKCADFQSANLFEGTDLKVQFLLFVPSNPSCGQLVEGSSDLQNSGFNATLGTKLIIHGFRVLGTKPSWIDTFIRTLLRATNANVIAVDWIYGXTGVYFSAVKNVIKLSLEISLFLNKLLVLGVSESXIHIIGVSWGPTLGAWWDSFRRQAGTDXRPEPA

SEQ ID NO: 1429 - protein, 101 aa, Homo sapiens
MERPDKAALNALQPPEFRNESSLASTLKTLLFFTALMITVPIGLYFTTKSYIFEGALGMSNRDSYFYAAIVAVVAVHVVLALFVYVAWNEGSRQWREGKQD

SEQ ID NO: 1430 - protein, 125 aa, Homo sapiens
  MISC_FEATURE (77): Xaa equals any of the twenty naturally occurring L-amino acids
  MISC_FEATURE (92): Xaa equals any of the twenty naturally occurring L-amino acids
  MISC_FEATURE (106): Xaa equals any of the twenty naturally occurring L-amino acids
  MISC_FEATURE (107): Xaa equals any of the twenty naturally occurring L-amino acids
  MISC_FEATURE (118): Xaa equals any of the twenty naturally occurring L-amino acids
MANTNFLSTLSPEHCRPLAGECMNKLKCGAAEAEIMNLPERVGTFSAIPALGGISLPPGVIVMTALHSPAAAFSSRXRQCVSNCQSGRLPAXSFLLLLVLLRGSLXXQPQPRRRGKGXGSSCPAR

SEQ ID NO: 1431 - protein, 177 aa, Homo sapiens
MKKKAKIGIHHKNSPPKVTVPTSGNTIESPLHENISNSTSFKDEKIMETDSEPEEGEITDSQTEDSYDEAITSEGNVTAEDSEDEDEDKIWPPCIRVIVIRSPVLQIGSLFIITAVNPATIGREKDMEHTLRIPEVGVSKFHAEIYFDHDLQSYVLVDQGSQNGTIVNGKTDSSAEN

SEQ ID NO: 1432 - protein, 102 aa, Homo sapiens
  MISC_FEATURE (64): Xaa equals any of the twenty naturally occurring L-amino acids
  MISC_FEATURE (102): Xaa equals any of the twenty naturally occurring L-amino acids
MIEGRQDLGASIRPLTKSPRSGVTACSGGAELPLLIFHLHPDRVVFPQTAALRVRICGRFHLIXQRTSYFRTGNMGPGQGDYFVGCCGILLLIKFTGFVLIX

SEQ ID NO: 1433 - protein, 108 aa, Homo sapiens
  MISC_FEATURE (62): Xaa equals any of the twenty naturally occurring L-amino acids
  MISC_FEATURE (102): Xaa equals any of the twenty naturally occurring L-amino acids
MQAEPEQILGSHWRDLTVVTFLISSSSFFPSLYPSLFSQSHLEMLESHMLILVLERNYRDFXSPFLLPGAVVPLFLYIPTVRKNGVTEKWGTTFGGSRIRTXILVEYP

SEQ ID NO: 1434 - protein, 135 aa, Homo sapiens
  MISC_FEATURE (53): Xaa equals any of the twenty naturally occurring L-amino acids
  MISC_FEATURE (134): Xaa equals any of the twenty naturally occurring L-amino acids
MEVLSGEQNMMTKVRENNYTYEFDFSKVYWNPRLSTEHSRITELLKPGDVLFXVFAGVGPFAIPVAKKNCTVFANDLNPESHKWLLYNCKLNKVDQKVKVFNLGWERLPPRTSQRRVNAAAGSVQKKENPLCTXS

SEQ ID NO: 1435 - protein, 172 aa, Homo sapiens
  MISC_FEATURE (172): Xaa equals any of the twenty naturally occurring L-amino acids
MACSIYVMQTLFYLPFFILGALAFIFPHLKALFTTPSRGCTLAAALAFVAYLLNQRYGSGDAWMYETESVITMVLGLWMVNVVFSFGHRLLNFQSARVTYFVNASLFIYLVHHPLTLFFGAYITPHITSNWLGFLCGLIFVVGIAIILYEIHLRIPLLKFLFSGKPVPNSPX

SEQ ID NO: 1436 - protein, 119 aa, Homo sapiens
  MISC_FEATURE (90): Xaa equals any of the twenty naturally occurring L-amino acids
MNMSPVSRLKKTWGQSEDGQVFHPRAPDGPNGNFCNYRTALRGAAHRSLTAHSSREKIVIPFFSLLIKDIYFLNEGCANRLPNGHVNFEXFLELAKQVGEFITWKQVECPFEQDASITH

SEQ ID NO: 1437 - protein, 117 aa, Homo sapiens
  MISC_FEATURE (99): Xaa equals any of the twenty naturally occurring L-amino acids
  MISC_FEATURE (112): Xaa equals any of the twenty naturally occurring L-amino acids
MVQSLKSMEGIQVEPARKRTKGRTYFCPSVSLNGASNGESLRHGKSWDSLLVLIPATTIVATINQVSTCHTVYIHYSLLPSNSPVCAYFPILPEGNLRXRRVKCLGQGQKVXMGDTG

SEQ ID NO: 1438 - protein, 139 aa, Homo sapiens
  MISC_FEATURE (60): Xaa equals any of the twenty naturally occurring L-amino acids
  MISC_FEATURE (136): Xaa equals any of the twenty naturally occurring L-amino acids
MELEDGVVYHGGARRLRGRDVGAGVRLAGSIYREFERLIGRYDEEVVKELMPLVVAVLEXLDSVFAQDQEHQVELELLRDDNEQLITQYEREKALRKHAEEKFIEFEDSQEQEKKDLQTRVESLESQTRQLELKAXKLC

SEQ ID NO: 1439 - protein, 111 aa, Homo sapiens
  MISC_FEATURE (69): Xaa equals any of the twenty naturally occurring L-amino acids
MRCSGGCTWPDSPSCPVHSHLPVERTLRVPSPGLVTCVCAGAAHEDCLPLRAWAAAAAILVLGNGAAWXATHWCPVSCRPVLPISPKYHSQFPDGPQTGEENQWPSQKLKG

SEQ ID NO: 1440 - protein, 230 aa, Homo sapiens
  MISC_FEATURE (96): Xaa equals any of the twenty naturally occurring L-amino acids
  MISC_FEATURE (144): Xaa equals any of the twenty naturally occurring L-amino acids
  MISC_FEATURE (162): Xaa equals any of the twenty naturally occurring L-amino acids
MKLSLSPPPYADAPVVVLISGLGGSGSYWLPQLAVLEQEYQVVCYDQRGTGNNPDTLAEDYSIAQMAAELHQALVAAGIEHYAVVGHALGALVGMXLALDYPASVTVLISVNGWLRINAHTRRCFQVRERLLYSGGAQAWVEAXRCSSIPPTGWRPAHLAWXQKTRWHWRIFRAKIIYCVDLTPSNALTLVTMRIASAARCKSSAPVMICWCQQHVPVNFMPPCPIARKW

SEQ ID NO: 1441 - protein, 213 aa, Homo sapiens
  MISC_FEATURE (3): Xaa equals any of the twenty naturally occurring L-amino acids
MLXVEMGGGCRGSMGPGPGYSAGSRVCRGSSLPQVAPFNPSRAHLLPPPVGGGLNSVWLSGVQLSTPPYADWEGVGQSPQPRGPWMGSSSLGTVGPGCVLSGCPTVKANGGSPCSEMLGERRLLEPSVGPVSGCPERREGGHGARGAAGVVVKGHASVQLNFLSLIMFYPPCPFFPQLCFCIFFLGKCKLSLSFMTCEISVSLEFVRRRGNHA

SEQ ID NO: 1442 - protein, 103 aa, Homo sapiens
  MISC_FEATURE (75): Xaa equals any of the twenty naturally occurring L-amino acids
  MISC_FEATURE (83): Xaa equals any of the twenty naturally occurring L-amino acids
  MISC_FEATURE (98): Xaa equals any of the twenty naturally occurring L-amino acids
MGGEGPFLPVLTPTSVKGTLYKMLRKPKKVRVQAASCDLLRGLLVSPLLLPVRLLLAGWAHAWMHGCGGWEPRIXQQSASCQXLAKGRNQGSTKSFKXKLEDS

SEQ ID NO: 1443 - protein, 113 aa, Homo sapiens
  MISC_FEATURE (112): Xaa equals any of the twenty naturally occurring L-amino acids
MPAVNIQYEVIDNACVLFAVSVLMFIISSMLVYGAISYQVGWLIPFFCYRLFDFVLSCLVAISSLTYLPRIKEYLDQLPDFPYKGWTSWALGLQLPPVPLFLCSCLFIILRXI

SEQ ID NO: 1444 - protein, 103 aa, Homo sapiens
  MISC_FEATURE (58): Xaa equals any of the twenty naturally occurring L-amino acids
  MISC_FEATURE (97): Xaa equals any of the twenty naturally occurring L-amino acids
  MISC_FEATURE (102): Xaa equals any of the twenty naturally occurring L-amino acids
MTMMIVFLSLSLSLYIYTHIYTHIYTHIYIHIYIYTYIYIYTHTHTYICFVLLLFCFXVLRQGLVLFPRAGSAVTQSWIHWQPWTSWVFKLASQLQXFPVAXG

SEQ ID NO: 1445 - protein, 117 aa, Homo sapiens
  MISC_FEATURE (108): Xaa equals any of the twenty naturally occurring L-amino acids
MVSILCVSYCEELGDTTLQDTMVKSQITFHFLSHHYLLLHSCPMPFLIIWIYVICVSPFSCRESPSSSSLMGGFLSDMFQTSPHLRTHFLHRTSLLASLVARALTVLXFLTPSQTIS

SEQ ID NO: 1446 - protein, 266 aa, Homo sapiens
AQPVPAVRPQRARERLLPMPTWILVLSLSLAGALFLLAGLVAVALVVRKVKLRNLQKKRDRESCWAQINFDSTDMSFDNSLFTVSAKTMPEEDPATLDDHSGTTATPSNSRTRKRPTSTSSSPETPEFSTFPGLPVRLRTGGPLCLQAFGGLRSLQLLLGGLCQPLSQGIGQRKGRGTLALGFSSQRSGRGDTGMGLALYRQQEVPLSTSAPQDHQRRRCQDPFLSPSWAIRRPRSLHTRGIPPFPSGFLSIGCPWVCCVSACWLA

SEQ ID NO: 1447 - protein, 105 aa, Homo sapiens
  MISC_FEATURE (52): Xaa equals any of the twenty naturally occurring L-amino acids
MEKRTGTGQALGEGGLPSSHGAPGTPSGTGRTSGRTDTVSCEIVFLLLFCVXIFFNFSLSVHTTYSSGTFFLCQALDLEWGPVSNTVEGEADVSVMVRIPKGSDK

SEQ ID NO: 1448 - protein, 130 aa, Homo sapiens
  MISC_FEATURE (87): Xaa equals any of the twenty naturally occurring L-amino acids
MTVENIDLKTIGFFSLVGQAYVFKFLWSPLMDRYTPPFFGRRRGWLLATQILLLVAIAAMGFLEPGTQLRWMAALAVVIAFCSASQXYSLRCVENRCASGRRTWCGRGNQRAGLPFRDAGFRRPSPVAGR

SEQ ID NO: 1449 - protein, 186 aa, Homo sapiens
  MISC_FEATURE (157): Xaa equals any of the twenty naturally occurring L-amino acids
MIQEAHVGIGIMGKEGRQAARNSDYAIARFKFLSKLLFVHGPFYYIRIATLVQYFFYKNVCFITPQFLYQFYCLFSQQTLYDSVYLTLYNICFTSLPILIYSLLEQHVDPHVLQNKPTLYRDISKNRLLSIKTFLYWTILGFSHAFIFFFGSYLLIXKDTSLLGNGQMFGKLDIWHFGLHSHGYYS

SEQ ID NO: 1450 - protein, 114 aa, Homo sapiens
  MISC_FEATURE (8): Xaa equals any of the twenty naturally occurring L-amino acids
  MISC_FEATURE (10): Xaa equals any of the twenty naturally occurring L-amino acids
  MISC_FEATURE (17): Xaa equals any of the twenty naturally occurring L-amino acids
  MISC_FEATURE (39): Xaa equals any of the twenty naturally occurring L-amino acids
  MISC_FEATURE (43): Xaa equals any of the twenty naturally occurring L-amino acids
  MISC_FEATURE (48): Xaa equals any of the twenty naturally occurring L-amino acids
MQYRSGNXGXTHASGLXLLRDSTSLLLKASSDMFVFVIXICSXKIDLXGDSLSIMHILCLLSRILFTRNTSKQRKLYLHEPEHVEMHTMYTGNAVSISQSLPSTACVVSPSHLV

SEQ ID NO: 1451 - protein, 125 aa, Homo sapiens
  MISC_FEATURE (3): Xaa equals any of the twenty naturally occurring L-amino acids
  MISC_FEATURE (27): Xaa equals any of the twenty naturally occurring L-amino acids
MAXLPGLEQEWRQFLKTKVAGQEKIIXTPQKIMQRKHRLEDSRIDLSSRREIRESMKEELSGTGIRNQKLSCLTLCESTLLILLHLSINFYFSFIKNSTLMVVLLEPIIPHSLWMRVGQGKQDIL

SEQ ID NO: 1452 - protein, 127 aa, Homo sapiens
  MISC_FEATURE (91): Xaa equals any of the twenty naturally occurring L-amino acids
  MISC_FEATURE (111): Xaa equals any of the twenty naturally occurring L-amino acids
  MISC_FEATURE (117): Xaa equals any of the twenty naturally occurring L-amino acids
MKRSCVSCGLEPWESGWERVGEITHPWAWGEFPEMVLAIRMYKYVFTHAFISLSTSSDGSACVLSAGAGAGCPLACQFALFWTGPLALCLXAGRAERVLSVKEGLGPVPSXQACHGXVVFLLGLLTL

SEQ ID NO: 1453 - protein, 138 aa, Homo sapiens
  MISC_FEATURE (106): Xaa equals any of the twenty naturally occurring L-amino acids
  MISC_FEATURE (112): Xaa equals any of the twenty naturally occurring L-amino acids
  MISC_FEATURE (113): Xaa equals any of the twenty naturally occurring L-amino acids
  MISC_FEATURE (116): Xaa equals any of the twenty naturally occurring L-amino acids
  MISC_FEATURE (122): Xaa equals any of the twenty naturally occurring L-amino acids
  MISC_FEATURE (134): Xaa equals any of the twenty naturally occurring L-amino acids
MPWSVVEASTQLGPSTKVLHGLYNKVSQFPELTSHTMRFNAFILGLLNIRSLEFWFNHLYNHEDIIQTHYQPWGFLSAAHTVCPGLFEELLLLLQPLALLALQPRXAVPAPXXAKXGSSSGXTRNCCGVVPRDXLVVL

SEQ ID NO: 1454 - protein, 123 aa, Homo sapiens
  MISC_FEATURE (96): Xaa equals any of the twenty naturally occurring L-amino acids
  MISC_FEATURE (98): Xaa equals any of the twenty naturally occurring L-amino acids
  MISC_FEATURE (103): Xaa equals any of the twenty naturally occurring L-amino acids
  MISC_FEATURE (104): Xaa equals any of the twenty naturally occurring L-amino acids
MCGYEWSRLGVGIGPRVASQSKAFRSRGSTLSDLTWAAKDKKPLAQEEELISGSHQGGWKVRVSRLFWNLGAVGLVRWLMLVIPVLWEAEAGGSLXAXEFPEXXGQHSEIFVYKKKKKKKKKG

SEQ ID NO: 1455 - protein, 115 aa, Homo sapiens
  MISC_FEATURE (27): Xaa equals any of the twenty naturally occurring L-amino acids
  MISC_FEATURE (107): Xaa equals any of the twenty naturally occurring L-amino acids
MLPLAAVRICLPHQPGPQAKSSASALXQLPANQKLTVIPKMFLSPGTPAPKIFSSFPQTSFKGGMHNSVLERTVVGFLDFRHIYFPVMEICFILISYLFFILCFCIXLINPFWSL

SEQ ID NO: 1456 - protein, 103 aa, Homo sapiens
  MISC_FEATURE (3): Xaa equals any of the twenty naturally occurring L-amino acids
  MISC_FEATURE (42): Xaa equals any of the twenty naturally occurring L-amino acids
  MISC_FEATURE (64): Xaa equals any of the twenty naturally occurring L-amino acids
MRXYMVLAAHFQRTTEETEGLTCQVCQMLLPNQCSFCAHQRXSCTQVPLLLPGVWGPLPLCLLXDPCKGELPALCPQGGLQVHPLWCRPPDLGLAEKAHPGAT

SEQ ID NO: 1457 - protein, 102 aa, Homo sapiens
  MISC_FEATURE (32): Xaa equals any of the twenty naturally occurring L-amino acids
  MISC_FEATURE (35): Xaa equals any of the twenty naturally occurring L-amino acids
MQLEARGTPTNPSSDSFQGSISLRNLIRKVTXVFXKSPLYPPIPALPTTASCIPATTPFSKSIFIHLLFWSVALIPTIECTETAQWLVRLVNNDTWWINVTF

SEQ ID NO: 1458 - protein, 137 aa, Homo sapiens
  MISC_FEATURE (137): Xaa equals any of the twenty naturally occurring L-amino acids
MRQMGPSLLKSLGRLISCLSCQTRESRGVYTLYKLFSHRGCLSFLPPCFVASLPPFLTSLPFPPPCPHPFLPLPLFVSLSFILSCPPAYFPASFPLPLVLGLFSVAVTTDWDNGINFKEKRIYRWGWVGLMVSKSQX

SEQ ID NO: 1459 - protein, 100 aa, Homo sapiens
  MISC_FEATURE (86): Xaa equals any of the twenty naturally occurring L-amino acids
  MISC_FEATURE (99): Xaa equals any of the twenty naturally occurring L-amino acids
MLRALSPSLFSTVLQPCQRCTCEFKTALRHIGYIGTRKPKQYFHDQILSEFNTKGGKGNVLCSLYRFLFCLLGFYKVLLIFMCDWXNAVLVKLLKTLTXL

SEQ ID NO: 1460 - protein, 118 aa, Homo sapiens
  MISC_FEATURE (8): Xaa equals any of the twenty naturally occurring L-amino acids
  MISC_FEATURE (67): Xaa equals any of the twenty naturally occurring L-amino acids
  MISC_FEATURE (108): Xaa equals any of the twenty naturally occurring L-amino acids
MCVRKKEXGALYSKGKSYWSLFENKSVVTCVICKWHVLIHIFFLINSGSALSHACFCYALICSIPVXTYIVLVTSLRYHLFIWSVFSPKLLYEGMHLLITAAVCVFFXAMGQTRLTQS

SEQ ID NO: 1461 - protein, 138 aa, Homo sapiens
  MISC_FEATURE (133): Xaa equals any of the twenty naturally occurring L-amino acids
MLRVRGDLTQHLTDTTQGMREVLGFGYGDRRLAETDRISEEVGNAAFANRLTSGIRRSLCEGLRLFAVVTTVLVGADAVRRGDLSIPHLAICATVALGVFTPARGTEDFADDLERSFAAAERMSVIKYREPPXARGIH

SEQ ID NO: 1462 - protein, 106 aa, Homo sapiens
MKMTRSKMPSLRTSPLSLTQKGKSLVRRVKAKKPRSLKNQEFGRSRDPSPDGRRSFVVRGDACNARLALPVGAGAPCMLFIAGRSFPPSTSVLTRAARPCTEALTA

SEQ ID NO: 1463 - protein, 110 aa, Homo sapiens [sequence omitted]

SEQ ID NO: 1464 - protein, 118 aa, Homo sapiens
MCLFLACDFALGLMINYFQIQSALVLPQSNQKYVGGNQPDPGPFFFSIFIRNPPQQIFTSSFLIAHVSLGLCLPSTVQNTLWFLFSLTFCGAVKRAQRHNQLKRKNPPMDLYQLNTNN

SEQ ID NO: 1465 - protein, 148 aa, Homo sapiens
  MISC_FEATURE (50): Xaa equals any of the twenty naturally occurring L-amino acids
  MISC_FEATURE (63): Xaa equals any of the twenty naturally occurring L-amino acids
  MISC_FEATURE (105): Xaa equals any of the twenty naturally occurring L-amino acids
  MISC_FEATURE (136): Xaa equals any of the twenty naturally occurring L-amino acids
MTIWLGIVYAYKGLLMLFGCFLAWETRNVSIPALNDSKYIGMSVYNVGIXCIIGAAVSFLTRXPAQCAVLHRGSGHHLLQHHHPLPGIRAEAHHPEEQTQMQQRXNRRFQFHFRIQKERRFLKRPPSGSPCETQAXTSRLGGPYIQKT

SEQ ID NO: 1466 - protein, 116 aa, Homo sapiens
  MISC_FEATURE (52): Xaa equals any of the twenty naturally occurring L-amino acids
  MISC_FEATURE (69): Xaa equals any of the twenty naturally occurring L-amino acids
  MISC_FEATURE (74): Xaa equals any of the twenty naturally occurring L-amino acids
  MISC_FEATURE (99): Xaa equals any of the twenty naturally occurring L-amino acids
  MISC_FEATURE (116): Xaa equals any of the twenty naturally occurring L-amino acids
MCKLIVAIDQYNTFSSLYFLTVMSADRYLVVLATAESRRVAGRTYSAARAVXAWAVWGIVTLVVLPFRXLSPGXDEEQGRRQCVLIFSGNPKAFWLARXRFLKGSAGVCNPRCSNX

SEQ ID NO: 1467 - protein, 155 aa, Homo sapiens
MVSVPLRMVPEVLRSSYTQQGHHPLLVCPWLCAEGPGQHQVCAWAPSHWSDPPPICRAASLDGFYNSRSLDVAKAPAASSTLDAAHIAAAIFLPLVAMVLLVGGVYFYFSRLQGKSSLQLPRPRPRPYNRITIESAFDNPTYETGSLSFAGDERI

SEQ ID NO: 1468 - protein, 115 aa, Homo sapiens
  MISC_FEATURE (5): Xaa equals any of the twenty naturally occurring L-amino acids
MMTLXSTALIPGLTHGAGRWVMEQGPSQPSHLLGNSRLTMQRVHACDFCFLVWNRTKEHEDIWIFFLPLLHVYIGVCPKSLLLQDGVEINTHAELCPLQPHSTCASSCVLTGECR

SEQ ID NO: 1469 - protein, 117 aa, Homo sapiens
MSAEVKVTGQNQEQFLLLAKSAKGAALATLIHQVLEAPGVYVFGELLDMPNVRELAESDFASTFRLLTVFAYGTYADYLAEARNLPPLTEAQKNKLRHLSVVTLAAKVKCIPYAVLL

SEQ ID NO: 1470 - protein, 144 aa, Homo sapiens [sequence omitted]

SEQ ID NO: 1471 - protein, 158 aa, Homo sapiens
  MISC_FEATURE (128): Xaa equals any of the twenty naturally occurring L-amino acids
MQAPAFRDKKQGVSAKNQGAHDPDYENITLAFKNQDHAKGGHSRPTSQVPAQCRPPSDSTQVPCWLYRAILSLYILLALAFVLCIILSAFIMVKNAEMSKELLGFKRELWNVSNSVQACEERQKRGWXSVQQSITMVRSKIDRLETTLAGIKNIDTKV

SEQ ID NO: 1472 - protein, 102 aa, Homo sapiens
MLEHLSSLPTQMDYKGQKLAEQMFQGIIIFSAIVGFIYGYVAEQFGWTVYIVMAGFAFSCLLTLPPWPIYRRHPLKWLPVQDSGSEDKKPGERKIKRHAKNN

SEQ ID NO: 1473 - protein, 170 aa, Homo sapiens
  MISC_FEATURE (46): Xaa equals any of the twenty naturally occurring L-amino acids
  MISC_FEATURE (126): Xaa equals any of the twenty naturally occurring L-amino acids
MGPPRAPVWRMPRGTLVCGTGSKSLGIRGIRAFQLQLPDERAVFTXPTLRPSPSKAGPSAWPALTTSSKALRSWQGSSEALDEDVESSVLPLPLTSARGSPGCCLAQDLGQWPCLCPPHPPALGTXQAVLGVDTMKHRLHKTPFGEVVVHILFFFDLCEFKVNTTTVDNS

SEQ ID NO: 1474 - protein, 120 aa, Homo sapiens
  MISC_FEATURE (119): Xaa equals any of the twenty naturally occurring L-amino acids
MQNSNLTSGACQISNGSLSPERPVGETSFSVPLHPTKRPASNPPPISNQATKGKRPKKGMATAKQRLGKILKLNRNGHARFFVLTELAVAAILPFGDQSRGAGAWELPLSPCLEQFVCXS

SEQ ID NO: 1475 - protein, 111 aa, Homo sapiens
  MISC_FEATURE (73): Xaa equals any of the twenty naturally occurring L-amino acids
MIPLCWVLGDGGMDCMTSQKSLGTRTPSLSCGLPHPSLSHGSGRGISKVLCSLGTVSRILLCSPQPSAGIVRXGGKRRRRQDWKRPGGKELSVHPSLLLFLLAMWPSFILP

SEQ ID NO: 1476 - protein, 112 aa, Homo sapiens
  MISC_FEATURE (18): Xaa equals any of the twenty naturally occurring L-amino acids
  MISC_FEATURE (21): Xaa equals any of the twenty naturally occurring L-amino acids
  MISC_FEATURE (57): Xaa equals any of the twenty naturally occurring L-amino acids
  MISC_FEATURE (75): Xaa equals any of the twenty naturally occurring L-amino acids
  MISC_FEATURE (88): Xaa equals any of the twenty naturally occurring L-amino acids
MVVERRSQSEMLNSVNKXKFXEQIQHLQSMFERICVIVEKDREKTGDTSRMFRRTKXYDSLLTTLIGAGIRILFXSCQEETADLLKEXSLVEQRKNLTSRNLHVCTSNSSEG

SEQ ID NO: 1477 - protein, 213 aa, Homo sapiens
  MISC_FEATURE (197): Xaa equals any of the twenty naturally occurring L-amino acids
  MISC_FEATURE (203): Xaa equals any of the twenty naturally occurring L-amino acids
  MISC_FEATURE (206): Xaa equals any of the twenty naturally occurring L-amino acids
MLYFVLGALSYILKWPALNEDPITKTIAALIILWALALTQFGGTKYTARIAKVGFFAGILLPAFILIALAAIYLHSGAPVAIEMDSKTFFPDFSKVGTLVVFVAFILSYMGVEASATHVNEMSNPGRDYPLAMLLLMVAAICLSSVGGLSIAMVIPGNEINLSAGVMQTFTVLMSHVAPEIEWTVRVISALLLRVVXRKIPSXIVXVPPPREC

SEQ ID NO: 1478 - protein, 117 aa, Homo sapiens
  MISC_FEATURE (109): Xaa equals any of the twenty naturally occurring L-amino acids
MQSVIALLSNLVACKDSNMELLYEQGLVSHICNLLTETATLCLDVDNKNNNEMAAPLLFSLLDILHSMLTYTSGIVRLALQAQKSGSGEDPQAAEDLLLLNRPLDRPDXACSFPLLS

SEQ ID NO: 1479 - protein, 173 aa, Homo sapiens
  MISC_FEATURE (122): Xaa equals any of the twenty naturally occurring L-amino acids
  MISC_FEATURE (127): Xaa equals any of the twenty naturally occurring L-amino acids
  MISC_FEATURE (158): Xaa equals any of the twenty naturally occurring L-amino acids
  MISC_FEATURE (168): Xaa equals any of the twenty naturally occurring L-amino acids
MVHCPHELLQMPLSLFSQRSWVTQCLDTWKTCTLITQRHLASDHLPSEFLLVQLVTLLFHLFLRDHLHLFQPLLPHQRWANQKESVPVKIERYLPQLEQRDWPEFGKEGLLHKPRRGTSFVXPVGHXGIWFIWCQCCVRRLIRLVAICDGEHPMHQHXRTQQILPNQXWRKMI

SEQ ID NO: 1480 - protein, 150 aa, Homo sapiens
  MISC_FEATURE (22): Xaa equals any of the twenty naturally occurring L-amino acids
  MISC_FEATURE (80): Xaa equals any of the twenty naturally occurring L-amino acids
  MISC_FEATURE (82): Xaa equals any of the twenty naturally occurring L-amino acids
  MISC_FEATURE (118): Xaa equals any of the twenty naturally occurring L-amino acids
  MISC_FEATURE (130): Xaa equals any of the twenty naturally occurring L-amino acids
  MISC_FEATURE (136): Xaa equals any of the twenty naturally occurring L-amino acids
MGQIIQYDKFYIHEVQELIDIXNDYINWVQQQAYGMLADIPVTICTYPFVFDAQAKTTLLQTDAVLQMQMAIDQAHRQNXSXLFLPVIESVNPCLILVVRRENIVGDAMEVLRKQRHXLQEATQGYIFLXGALVQXGAQEFSCSSWGIIG

SEQ ID NO: 1481 - protein, 258 aa, Homo sapiens
  MISC_FEATURE (112): Xaa equals any of the twenty naturally occurring L-amino acids
  MISC_FEATURE (127): Xaa equals any of the twenty naturally occurring L-amino acids
  MISC_FEATURE (135): Xaa equals any of the twenty naturally occurring L-amino acids
  MISC_FEATURE (193): Xaa equals any of the twenty naturally occurring L-amino acids
  MISC_FEATURE (222): Xaa equals any of the twenty naturally occurring L-amino acids
MPGLDPNLRSAVSIARRVQDPLAELVKIEPKHIGVGMYQHDVSQTLLKATLDSVVEECVSFVGVDINICSEVLLRHIAGLNANRAKNIIEWREKNGPFINREQLKKVKGLGXKSFQQCAGFIRINQXYIRTFCSXQTETSGQIQGVAVTSSADVEVTNEKQGKKKSKTAVNVLLKPNPLDQTCIHPESYDIAXRFLSSIGGTLYEVGKPEMQQKINSFLEKXGMEKIAERLQTTVHTLQVHHRWVFSQPEGFDFRTDF

SEQ ID NO: 1482 - protein, 100 aa, Homo sapiens
  MISC_FEATURE (57): Xaa equals any of the twenty naturally occurring L-amino acids
  MISC_FEATURE (79): Xaa equals any of the twenty naturally occurring L-amino acids
  MISC_FEATURE (93): Xaa equals any of the twenty naturally occurring L-amino acids
MKGTTWLQKSPLASASPGVSLSAQAGQRRHHNHRHPSNHSERPFAHAWSLLRPQYFXLRPARLARRGAFSLSAYFKTTXFCMLGVPVCLLAAXRGLEMKQ

SEQ ID NO: 1483 - protein, 131 aa, Homo sapiens
  MISC_FEATURE (106): Xaa equals any of the twenty naturally occurring L-amino acids
  MISC_FEATURE (126): Xaa equals any of the twenty naturally occurring L-amino acids
MIWLDCLFGVALKPESSDLFFCVSYVPQKWFFILLPGSAVHKMIVDRQYMGVSKRKCIVWGVAFLSDGTIISVDSAGKVQFWDSATGTLVKSHLIANADVQSIAVXDQEDSFVVGTAEGTSLPFSXGPCDI

SEQ ID NO: 1484 - protein, 142 aa, Homo sapiens
  MISC_FEATURE (88): Xaa equals any of the twenty naturally occurring L-amino acids
  MISC_FEATURE (108): Xaa equals any of the twenty naturally occurring L-amino acids
  MISC_FEATURE (122): Xaa equals any of the twenty naturally occurring L-amino acids
  MISC_FEATURE (139): Xaa equals any of the twenty naturally occurring L-amino acids
MVGMRPAFALAQPRLQPHHPHSRERVKAAPRDRAKTQAQTAHSSPQPLCPLVHTVFILFPLAGPLHWEKMKRLLRSSSKDSQGKSCLXHTGSCVKTWDQLSCCLGQKXGCDWQVPTGASVGXGGWPRPQERQTGLGRGXRNP

SEQ ID NO: 1485 - protein, 106 aa, Homo sapiens
  MISC_FEATURE (81): Xaa equals any of the twenty naturally occurring L-amino acids
MVCIVIGARKLGVNPDNIATPIAASLGDLITLSILALVSSFFYRHKDSRYLTPLVCLSFAALTPVWVLIAKQSPPIVKILXVWLVPNHPGHGHQQFRRTHLEQNRF

SEQ ID NO: 1486 - protein, 145 aa, Homo sapiens [sequence omitted]

SEQ ID NO: 1487 - protein, 123 aa, Homo sapiens
MIPPLSPAPNQELVLGLCYMSYLAFLYMTFDFCCLYFSTVYAPSFKYICVHTDTHICVCVCIYLSSVVSKSSAEADGVLQPRRHPASLLIVFATSISESSLLIFSFQKTEAKLIVFAVSLAAK

SEQ ID NO: 1488 - protein, 156 aa, Homo sapiens
MSLEFYQKKKSRWPFSDECIPWEVWTVKVHVVALATEQERQICREKVGEKLCEKIINIVEVMNRHEYLPKMPTQSEVDNVFDTGLRDVQPYLYKISFQITDALGTSVTTTMRRLIKDTLPSERRWISGSSLMAPRPWLLGIALLGLWALEPALGHW

SEQ ID NO: 1489 - protein, 240 aa, Homo sapiens
MQCFSFIKTMMILFNLLIFLCGAALLAVGIWVSIDGASFLKIFGPLSSSAMQFVNVGYLIAAGVVVFALGFLGCYGAKTESKCALVTFFFILLLIFIAEVAAAVVALVYTTMAEHFLTLLVVPAIKKDYGSQEDFTQVWNTTMKGLKCCGFTNYTDFEDSPYFKENSAFPPFCCNDNVTNTANETCTKQKAHDQKVEGCFNQLLYDIRTNAVTVGGVAAGIGGLELAAMIVSMYLYCNLQ

SEQ ID NO: 1490 - protein, 246 aa, Homo sapiens
  MISC_FEATURE (190): Xaa equals any of the twenty naturally occurring L-amino acids
  MISC_FEATURE (231): Xaa equals any of the twenty naturally occurring L-amino acids
  MISC_FEATURE (237): Xaa equals any of the twenty naturally occurring L-amino acids
  MISC_FEATURE (239): Xaa equals any of the twenty naturally occurring L-amino acids
MLADKHAKEIEEESETTVEADLTDKQKHQLKHRELFLSRQYESLPATHIRGKCSVALLNETESVLSYLDKEDTFFYSLVYDPSLKTLLADKGEIRVGPRYQADIPEMLLEGESDEREQSKLEVKVWDPNSPLTDRQIDQFLVVARAVGTFARALDCSSSVRQPSLHMSAAAASRDITLFHAMDTLYRHSXDLSSAISVLVPLGGPVLCRDEMEEWSASEASLFEEAWKIGXDFNDIXQXFFLGIID

SEQ ID NO: 1491 - protein, 382 aa, Homo sapiens
MAVGQIMTFGSPVIGCGFISGWNLVSMCVEYVLLWKVYQKTPALAVKAGLKEEETELKQLNLHKDTEPKPLEGTHLMGVKDSNIHELEHEQEPTCASQMAEPFRTFRDGWVSYYNQPVFLAGMGLAFLYMTVLGFDCITTGYAYTQGLSGFHPQYFDGSISYNWNNGNCSFYLATSKMWFGSAGLISGLAQLSCLILCVISVFMPGSPLDLSVSPFEDIRSRFIQGESITPTKIPEITTEIYMSNGSNSANIVPETSPESVPIISVSLLFAGVIAARIGLWSFDLTVTQLLQENVIESERGIINGVQNSMNYLLDLLHFIMVILAPNPEAFGLLVLISVSFVAMGHIMYFRFAQNTLGNKLFACGPDAKEVRKENQANTSVV

SEQ ID NO: 1492 - protein, 153 aa, Homo sapiens
MNVGVAHSEVNPNTRVMNSRGIWLAYIILVGLLHMVLLSIPFFSIPVVWTLTNVIHNLATYVFLHTVKGTPFETPDQGKARLLTHWEQMDYGLQFTSSRKFLSISPIVLYLLASFYTKYDAAHFLINTASLLSVLLPKLPQFHGVRVFGINKY

SEQ ID NO: 1493 - protein, 163 aa, Homo sapiens
  MISC_FEATURE (61): Xaa equals any of the twenty naturally occurring L-amino acids
  MISC_FEATURE (122): Xaa equals any of the twenty naturally occurring L-amino acids
  MISC_FEATURE (152): Xaa equals any of the twenty naturally occurring L-amino acids
  MISC_FEATURE (158): Xaa equals any of the twenty naturally occurring L-amino acids
  MISC_FEATURE (160): Xaa equals any of the twenty naturally occurring L-amino acids
MGKGRFDEKENVSNCIQLKTSVIKGIKNQLIEQFPGIEPWLNQIMPKKDPVKIVRCHEHIXILTVNGELLFFRQREGPFYPTLRLLHKYPFILPHQQFDKGSHQICTQLEQISCFPGLLLLXLNFTPAAVNTIVCYHWPKRKTACLFFGNPXNFLQKXLXNFP

SEQ ID NO: 1494 - protein, 104 aa, Homo sapiens
  MISC_FEATURE (23): Xaa equals any of the twenty naturally occurring L-amino acids
  MISC_FEATURE (38): Xaa equals any of the twenty naturally occurring L-amino acids
  MISC_FEATURE (55): Xaa equals any of the twenty naturally occurring L-amino acids
  MISC_FEATURE (102): Xaa equals any of the twenty naturally occurring L-amino acids
MAQIVLFSLFPVSIDPVREGKLXQSPSLGKSSWVLSRXLLSGWDYRHEPPCPADXCLLKLGIFLPNLGFSQRPYIAYCCLVSSLLQNSYLCIFFVFNDVLKXPG

SEQ ID NO: 1495 - protein, 109 aa, Homo sapiens
MPLCERVKMNKRKRTQLMKSQNMLKSVQMKIMIVMKLLNPLGNDIKKMMIKLGNMKSVTEEALGIIGEVATLMKEEGVQVVVVIETEVRQILTWKIILLLPALVRLLGK

SEQ ID NO: 1496 - protein, 115 aa, Homo sapiens
  MISC_FEATURE (95): Xaa equals any of the twenty naturally occurring L-amino acids
  MISC_FEATURE (105): Xaa equals any of the twenty naturally occurring L-amino acids
  MISC_FEATURE (109): Xaa equals any of the twenty naturally occurring L-amino acids
MADVPGAQRAVPGDGPEPRDPLDCWACAVLVTAQNLLVAAFNLLLLVLVLGTILLPAVTMLGFGFLCHSQFLRSQGTPLHRAPAEPRFSRALLVXRISWFLRGRXFVVXFWAKLT

SEQ ID NO: 1497 - protein, 165 aa, Homo sapiens
  MISC_FEATURE (111): Xaa equals any of the twenty naturally occurring L-amino acids
MLEDTGFWLESKILSFIQDQEEDYLKLHRVIYQQIIQTYLTVCKDVVMVGLGDHQFQMQLLQRSLGIMQTVKGFFYVSLLLDILKEITGSSLIQKTDSDEEVAMLLDTVQXVFQKMLECIARSFRKQPEEGLRCFILFRGLFMSSLLLFSLGTQTPLCTGVYFLL

SEQ ID NO: 1498 - protein, 147 aa, Homo sapiens
  MISC_FEATURE (37): Xaa equals any of the twenty naturally occurring L-amino acids
  MISC_FEATURE (54): Xaa equals any of the twenty naturally occurring L-amino acids
  MISC_FEATURE (92): Xaa equals any of the twenty naturally occurring L-amino acids
  MISC_FEATURE (119): Xaa equals any of the twenty naturally occurring L-amino acids
MAEGEGYFAMSEDELACSPYIPLGGDFGGGDFGGGDXRRRRLRRRRLSAVAAVXVGIAWTIAKPYGALQCAELGASAAAGRHPERDHSDSRXRQLPHARAAAEPDREGGAAAPGREAHXRPRLRLNGSAASHVLHQDSGLGYKDWTS

SEQ ID NO: 1499 - protein, 100 aa, Homo sapiens
MHVLFQLLYHYPKDGLLIQQHRFILPVFQLQINEIICTLVSGFFDSTVCLYNSSVLLHVVVRSFILLYTVLNCINYSFCYYAFGLFPVLAIMNKAAMNIL

SEQ ID NO: 1500 - protein, 141 aa, Homo sapiens
  MISC_FEATURE (136): Xaa equals any of the twenty naturally occurring L-amino acids
MDFGKCPRLRLFTQEYILALNELNAGMEVVKKFIQSMHGPTGHCPHPRVLPNLVAVCLAAIYSCYEEFINSRDNSPSLKEIRNGCQQRATGSPLYLCAFCTPARTWCLRKPRCLRPGSSRWSWPPVRSTWRWNAPXLPSRR

SEQ ID NO: 1501 - protein, 276 aa, Homo sapiens
  MISC_FEATURE (260): Xaa equals any of the twenty naturally occurring L-amino acids
  MISC_FEATURE (273): Xaa equals any of the twenty naturally occurring L-amino acids
MSRSVLQPSQQKLAEKLTILNDRGVGMLTRLYNIKKACGDPKAKPSYLIDKNLESAVKFIVRKFPAVETRNNNQQLAQLQKEKSEILKNLALYYFTFVDVMEFKDHVCELLNTIDVCQVFFDITVNFDLTKNYLDLIITYTTLMILLSRIEERKAIIGLYNYAHEMTHGASDREYPRLGQMIVDYENPLKKMMEEFVPHSKSLSDALISLQMVYPRRNLSADQWRNAQLLSLISAPSTMLNPAQSDTMPCEYLSLGCNGXIGLSLALFVPWGXLNT

SEQ ID NO: 1502 - protein, 167 aa, Homo sapiens
  MISC_FEATURE (151): Xaa equals any of the twenty naturally occurring L-amino acids
  MISC_FEATURE (153): Xaa equals any of the twenty naturally occurring L-amino acids
  MISC_FEATURE (158): Xaa equals any of the twenty naturally occurring L-amino acids
  MISC_FEATURE (161): Xaa equals any of the twenty naturally occurring L-amino acids
MHPDNSKAPGFRPPSQRVSTSPVGLPSIDPSGSSPSSSSAPLASFSGIPGTRVFLQGQLLLGLLVSTDNIFLPILGQAPQTHPLLPHQRWANQKESVPVKIERYLPQLEQRDWPEFGKEGLLHKPRRGTSFVAPVGTQWESGSFGVQCCVXGXIGWGXLWXGEPSNG

SEQ ID NO: 1503 - protein, 114 aa, Homo sapiens
MQMYSRQLASTEWLTIQGGLLGSGLFVFSLTAFNNLENLVFGKGFQAKIFPEILLCLLLALFASGLIHRVCVTTCFIFSMVGLYYINKISSTLYQAAAPVLTPAKVTGKSKKRN

SEQ ID NO: 1504 - protein, 270 aa, Homo sapiens
  MISC_FEATURE (102): Xaa equals any of the twenty naturally occurring L-amino acids
  MISC_FEATURE (104): Xaa equals any of the twenty naturally occurring L-amino acids
  MISC_FEATURE (114): Xaa equals any of the twenty naturally occurring L-amino acids
  MISC_FEATURE (131): Xaa equals any of the twenty naturally occurring L-amino acids
MQFLENYEKEDITVAELEGNSNSLWTISPPSKQKMIHELLDPNSSFSVVFSWSIQRNLSLGAKSEIATDKLSFPLKNITRKNIAKMIAGNSTESSKTPVTIXKXYPYYVKAPSXSNSKPIKQLLSENNFMXITIILSRDNTTKYNSEWWVLNLTGNRIYNPNSQALELVVFNDKVSPPSLGFLAGYGIMGLYASVVLVIGKFVREFFSGISHSIMFEELPNVDRILKLCTDIFLVRETGELELEEDLYAKLIFLYRSPETMIKWTREKTN

SEQ ID NO: 1505 - protein, 132 aa, Homo sapiens
  MISC_FEATURE (89): Xaa equals any of the twenty naturally occurring L-amino acids
  MISC_FEATURE (122): Xaa equals any of the twenty naturally occurring L-amino acids
  MISC_FEATURE (131): Xaa equals any of the twenty naturally occurring L-amino acids
MSSVEEDDYDTLTDIDSDKNVIRTKQYLYVADLARKDKRVLRKKYQIYFWNIATIAVFYALPVVQLVITYQTVVNVTGNQDICYYNFLXAHPLGQSQRLTTTSSATWGTSCWGCFSAHQPCXGEINQKPGXW

SEQ ID NO: 1506 - protein, 108 aa, Homo sapiens
MGFTGMLQSRTVVFYVPCMVILVAICCKILEAKCLQYRFLATVYAVISLCLSWAVLENTLVFTIWFTNTIIILPGLKCRIWHIDACNGKKKNLLKFVNVQLNLRYTVG

SEQ ID NO: 1507 - protein, 137 aa, Homo sapiens
  MISC_FEATURE (112): Xaa equals any of the twenty naturally occurring L-amino acids
  MISC_FEATURE (117): Xaa equals any of the twenty naturally occurring L-amino acids
MTHSGLWRTCCLEGAFRGVCKKIDHFPEDADYEQDTAEYLLRAVRASSVFPILSVTLLFFGGLCVAASEFHRSRHNVILSAGIFFVSAGLSNIIGIIVYISANAGDPGAAWXPKKVXPMVGPFIFGSLLFHHRQEIC

SEQ ID NO: 1508 - protein, 144 aa, Homo sapiens
  MISC_FEATURE (124): Xaa equals any of the twenty naturally occurring L-amino acids
MAREAVYTMGLNGGQLGCLLDPNGEKCVTAPRQVSALHHKDIALSLVAASDGATVCVTTRGDIYLLADYQCKKMASKQLNLKKVLVSGGHMEYKVDPEHLKENGGQKICILAMDGAGRVFCWRXVNSSLKQCRWAYHVRSSFLI

SEQ ID NO: 1509 - protein, 110 aa, Homo sapiens [sequence omitted]

SEQ ID NO: 1510 - protein, 151 aa, Homo sapiens
  MISC_FEATURE (150): Xaa equals any of the twenty naturally occurring L-amino acids
EQWMSITTGQKLLKSRILFHPRSLRGLQMILNSDRYAPSLHELGHFNIPTLCDPANLQWFILTKAQQARENMKRKEELKVIENELIQASTKKFSLEKLYKEPSILVYKWWIVVRALEQHCLPTWDALCIYIFLCYARWRLCILGIGRMEXH

SEQ ID NO: 1511 - protein, 198 aa, Homo sapiens
  MISC_FEATURE (188): Xaa equals any of the twenty naturally occurring L-amino acids
MFAVHSVNLLLKSIGATLTDVDDLIFKLAYYEIRYQFYKRDQLIWSVVRHYSEQFLKQMYVLVLGLDVLGNPFGLIRGLSEGVEALFYEPFQGAVQGPEEFAEGLVIGVRSLFGHTVGGAAGVVSRITGSVGKGLAAITMDKEYQQKRREELSRQPRDFGDSLARGGKGFLRGVVGGVTGIITKPVGXCQKGRSCWIL

SEQ ID NO: 1512 - protein, 545 aa, Homo sapiens
MAGAIIENMSTKKLCIVGGILLVFQIIAFLVGGLIAPGPTTAVSYMSVKCVDARKNHHKTKWFVPWGPNHCDKIRDIEEAIPREIEANDIVFSVHIPLPHMEMSPWFQFMLFILQLDIAFKLNNQIRENAEVSMDVSLAYRDDAFAEWTEMAHERVPRKLKCTFTSPKTPEHEGRYYECDVLPFMEIGSVAHKFYLLNIRLPVNEKKKINVGIGEIKDIRLVGIHQNGGFTKVWFAMKTFLTPSIFIIMVWYWRRITMMSRPPVLLEKVIFALGISMTFINIPVEWFSIGFDWTWMLLFGDIRQGIFYAMLLSFWIIFCGEHMMDQHERNHIAGYWKQVGPIAVGSFCLFIFDMCERGVQLTNPFYSIWTTDIGTELAMAFIIVAGICLCLYFLFLCFMVFQVFRNISGKQSSLPAMSKVRRLHYEGLIFRFKFLMLITLACAAMTVIFFIVSQVTEGHWKWGGVTVQVNSAFFTGIYGMWNLYVFALMFLYAPSHKNYGEDQSNGMQLPCKSREDCALFVSELYQELFSASKYSFINDNAASGI

SEQ ID NO: 1513 - protein, 203 aa, Homo sapiens
  MISC_FEATURE (3): Xaa equals any of the twenty naturally occurring L-amino acids
  MISC_FEATURE (192): Xaa equals any of the twenty naturally occurring L-amino acids
  MISC_FEATURE (196): Xaa equals any of the twenty naturally occurring L-amino acids
MYXLKPECAKQFNLYFYHFSRAEQSKAEEAQRKLKRQNREDTALPPPVLPPFCPLFASLVNILQSDVMLCIMGTILQWAVEHNGYAWSESMLQRVLHLIGMALQEEKQHLENVTEEHVVTFTFTQKISKPGEAPKNSPSILAMLETLQNAPYLEVHKDMIRWILKTFNAVKKMKESSPTSPVAETEGTIMEXHNSXFKGQRQA

SEQ ID NO: 1514 - protein, 130 aa, Homo sapiens
MTSNLKWSSATMKIDNPHITYTARVPVDVHEYNLTHLQPSTDYEVCLTVSNIHQQTQKSCVNVTTKNAAFAVDISDQETSTALAAVMGSMFAVISLASIAVYFAKRFKRKNYHHFIKKVLWQKTSFNPTK

SEQ ID NO: 1515 - protein, 112 aa, Homo sapiens
  MISC_FEATURE (98): Xaa equals any of the twenty naturally occurring L-amino acids
  MISC_FEATURE (104): Xaa equals any of the twenty naturally occurring L-amino acids
  MISC_FEATURE (108): Xaa equals any of the twenty naturally occurring L-amino acids
VQFYILMAMFFSSSLHEIPSPSPPEKKKRIIPLLECSLEIINSKLCTSLKFIFTGTLELSLQLLHAIPLVYLSSVGFTVCLPPQTNLLHQMFSLTCLXGCHFFXIFFXHFYH

SEQ ID NO: 1516 - protein, 492 aa, Homo sapiens
MKAFHTFCVVLLVFGSVSEAKFDDFEDEEDIVEYDDNDFAEFEDVMEDSVTESPQRVIITEDDEDETTVELEGQDENQEGDFEDADTQEGDTESEPYDDEEFEGYEDKPDTSSSKNKDPITIVDVPAHLQNSWESYYLEILMVTGLLAYIMNYIIGKNKNSRLAQAWFNTHRELLESNFTLVGDDGTNKEATSTGKLNQENEHIYNLWCSGRVCCEGMLIQLRFLKRQDLLNVLARMMRPVSDQVQIKVTMNDEDMDTYVFAVGTRKALVRLQKEMQDLSEFCSDKPKSGAKYGLPDSLAILSEMGEVTDGMMDTKMVHFLTHYADKIESVHFSDQFSGPKIMQEEGQPLKLPDTKRTLLFTFNVPGSGNTYPKDMEALLPLMNMVIYSIDKAKKFRLNREGKQKADKNRARVEENFLKLTHVQRQEAAQSRREEKKRAEKERIMNEEDPEKQRRLEEAALRREQKKLEKKQMKMKQIKVKAHVKPSQRFEF

SEQ ID NO: 1517 - protein, 123 aa, Homo sapiens
  MISC_FEATURE (22): Xaa equals any of the twenty naturally occurring L-amino acids
  MISC_FEATURE (73): Xaa equals any of the twenty naturally occurring L-amino acids
  MISC_FEATURE (74): Xaa equals any of the twenty naturally occurring L-amino acids
MKGEIQQSLGAWVLLTVDIQPXCLGLYCGKTLLFKNGSTEIYGECGVCPRGQRTNAQKYCQPCTESPELYDWXXLGFMAMLPLVLHWFFIEWYSGKKSSSALFQHITALFECRHGSYYHLTCE

SEQ ID NO: 1518 - protein, 116 aa, Homo sapiens
  MISC_FEATURE (3): Xaa equals any of the twenty naturally occurring L-amino acids
  MISC_FEATURE (15): Xaa equals any of the twenty naturally occurring L-amino acids
  MISC_FEATURE (68): Xaa equals any of the twenty naturally occurring L-amino acids
MFXMRAEETVQRLPXLGHCATLIPPELDPWTFALTLSRPKSCLLVAVFPQRGSWDHASHFLPQAPCQXLDAPYSSGDCPGRPVVVRESVSVLLLSLLGPLCLRMLNDSSLSLCLMH

SEQ ID NO: 1519 - protein, 162 aa, Homo sapiens
MRIANRTRFSSPFLARGAGWTHGRGMMVVGTGTSLALSSLLSLLLFAGMQMYSRQLASTEWLTIQGGLLGSGLFVFSLTAFNNLENLVFGKGFQAKIFPEILLCLLLALFASGLIHRVCVTTCFIFSMVGLYYINKISSTLYQAAAPVLTPAKVTGKSKKRN

SEQ ID NO: 1520 - protein, 416 aa, Homo sapiens
MKVQYEEVAEKDDLMGVEDTAKKGFFSKPSLRSRNTIFTLGTRGSVISPTELEAPILVPHTAHAEEQRYPFEALFRSQHYALLDNSCREYLFICEFFVVSGPAAHDLFHAVMGRTLSMTLKHLDSYLADCYDAIAVFLCIHIVLRFRNIAAKRDVPALDRYWEQVLALLWPRFELILEMNVQSVRSTDPQRLGGLDTRPHYITRRYAEFSSALVSINQTIPNERTMQLLGQLQVEVENFVLRVAAEFSSRKEQLVFLINNYDMMLGVLMERAADDSKEVESFQQLLNARTQEFIEELLSPPFGGLVAFVKEAEALIERGQAERLRGEEARVTQLIRGFGSSWKSSVESLSQDVMRSFTNFRNGTSIIQGALTQLIQLYHRFHRVLSQPQLRALPARAELINIHHLMVELKKHKPNF

SEQ ID NO: 1521 - protein, 148 aa, Homo sapiens
MTAEEKRRAHQKELAAQLNEEAKRRLTEQKGEQQIQKARKSNVSYKNPSLMPKEPHIREMKIYIDKKYETVIMPVFGIATPFHIATIKNISMSVEGDYTYLRINFYCQAVLWAGMKATSFLTLKRLLSRKLHTEHQILRHPENRQYQP

SEQ ID NO: 1522 - protein, 297 aa, Homo sapiens
  MISC_FEATURE (50): Xaa equals any of the twenty naturally occurring L-amino acids
  MISC_FEATURE (104): Xaa equals any of the twenty naturally occurring L-amino acids
  MISC_FEATURE (234): Xaa equals any of the twenty naturally occurring L-amino acids
  MISC_FEATURE (269): Xaa equals any of the twenty naturally occurring L-amino acids
  MISC_FEATURE (275): Xaa equals any of the twenty naturally occurring L-amino acids
  MISC_FEATURE (285): Xaa equals any of the twenty naturally occurring L-amino acids
  MISC_FEATURE (287): Xaa equals any of the twenty naturally occurring L-amino acids
MVLSPCHVKEINIKFGPNSGSKVPLATVTVIDQSETKKKVFLWRTAAFWXFTVFLGDIILLTDVVIHEDQWIGETVLQSTFSSQLLNLGSYSSIQPEEYSSVVXEVVLQDLLAYVSSKHSYLRDLPPRQPQRVNSIDFVELEHLQPDVLVHAVLRVVDFTILTEAVYSYRGQKQKKVMLTVEQAQDQHYALVLWGPGAAWYPQLQRKKGYIWEFKYLFVQCNYTLENLELHTTXWSSCECLFDDDIRAITFKAKFQKSAPSFVKVSDLXTHLEGXCSGVVLIKPXFXVAFLFRFRVA

SEQ ID NO: 1523 - protein, 130 aa, Homo sapiens
  MISC_FEATURE (5): Xaa equals any of the twenty naturally occurring L-amino acids
MSCQXNARVLAFLEWCESEDPFFSHGNSFHGTGGRGNKFAQMRYSLRLLRAMVYLEDETVNKDLCEKGTIQQMIGIFKNIISKPNEKEEAIVLEIQSDILLILSGLCENHIQRKVCMPVKVLFRSPSHLT

SEQ ID NO: 1524 - protein, 348 aa, Homo sapiens
MAATLGPLGSWQQWRRCLSARDGSRMLLLLLLLGSGQGPQQVGAGQTFEYLKREHSLSKPYQGVGTGSSSLWNLMGNAMVMTQYIRLTPDMQSKQGALWNRVPCFLRDWELQVHFKIHGQGKKNLHGDGLAIWYTRNRMQPGPVFGNMDKFVGLGVFVDTYPNEEKQQERVFPYISAMVNNGSLSYDHERDGRPTELGGCTAIVRNLHYDTFLVIRYVKRHLTIMMDIDGKHEWRDCIEVPGVRLPRGYYFGTSSITGDLSDNHDVISLKLFELTVERTPEEEKLHRDVFLPSVDNMKLPEMTAPLPPLSGLALFLIVFFSLVFSVFAIVIGIILYNKWQEQSRKRFY

SEQ ID NO: 1525 - protein, 160 aa, Homo sapiens
  MISC_FEATURE (52): Xaa equals any of the twenty naturally occurring L-amino acids
  MISC_FEATURE (145): Xaa equals any of the twenty naturally occurring L-amino acids
MCWQLRGKWQCGVGDFALGLVPFRPPGLPLPHSSQFLWSLSILPLSVHPCTXHTPFSYAFGVLDGNLGGERKDRSGLPQPLLLLSPRVRIAGAPPPSWFLRTRPFSFCLYLLRILSLLMWLTPLPPLPAGGWPGGQVPAGAVNRXLRFCAGLCVCCISVF

SEQ ID NO: 1526 - protein, 142 aa, Homo sapiens [sequence omitted]

SEQ ID NO: 1527 - protein, 135 aa, Homo sapiens
  MISC_FEATURE (58): Xaa equals any of the twenty naturally occurring L-amino acids
  MISC_FEATURE (122): Xaa equals any of the twenty naturally occurring L-amino acids
  MISC_FEATURE (131): Xaa equals any of the twenty naturally occurring L-amino acids
  MISC_FEATURE (133): Xaa equals any of the twenty naturally occurring L-amino acids
MGIQTVRPSFSILHWGTPPHLVLATQLRTRGCRCRPRPAGSGPTVDAGVPIPHIRARXSARLPLCPWHASALELGIATPGTVTTQAPGSYPAWRSRCLLYPQSPVLLASLGVGLVNLLGWLXAPNWFGSPXGXSH

SEQ ID NO: 1528 - protein, 101 aa, Homo sapiens
MGKFLGKTKTQPQGQVVIFSEKGKAIIYLSLPRTVPIYTCIFSQSVGCLFILLIISFNFLLFIYFIETDLIMLPRVILDLLASSDPPTLVSQSAGITDVNY

SEQ ID NO: 1529 - protein, 106 aa, Homo sapiens
  MISC_FEATURE (72): Xaa equals any of the twenty naturally occurring L-amino acids
  MISC_FEATURE (74): Xaa equals any of the twenty naturally occurring L-amino acids
  MISC_FEATURE (78): Xaa equals any of the twenty naturally occurring L-amino acids
  MISC_FEATURE (79): Xaa equals any of the twenty naturally occurring L-amino acids
MNPISATCQYLLFKAPFETQFCAKSSGSNYLKQADLAIFKQTFPVILVLVLLLHVMKDLGFTENSSRGLGFXTXKVSXXGPIVDHPRALSSVLVKVETAVPHPPSF

SEQ ID NO: 1530 - protein, 350 aa, Homo sapiens
MAVFVVLLALVAGVLGNEFSILKSPGSVVFRNGNWPIPGERIPDVAALSMGFSVKEDLSWPGLAVGNLFHRPRATVMVMVKGVNKLALPPGSVISYPLENAVPFSLDSVANSIHSLFSEETPVVLQLAPSEERVYMVGKANSVFEDLSVTLRQLRNRLFQENSVLSSLPLNSLSRNNEVDLLFLSELQVLHDISSLLSRHKHLAKDHSPDLYSLELAGLDEIGKRYGEDSEQFRDASKILVDALQKFADDMYSLYGGNAVVELVTVKSFDTSLIRKTRTILEAKQAKNPASPYNLAYKYNFEYSVVFNMVLWIMIALALAVIITSYNIWNMDPGYDSIIYRMTNQKIRMD

SEQ ID NO: 1531 - protein, 158 aa, Homo sapiens
MVVFGYEAGTKPRDSGVVPVGTEEAPKVFKMAASMHGQPSPSLEDAKLRRPMVIEIIEKNFDYLRKEMTQNIYQMATFGTTAGFSGIFSNFLFRRCFKVKHDALKTYASLATLPFLSTVVTDKLFVIDALYSDNISKENCVFRSSLIGIVCGVSIPVL

SEQ ID NO: 1532 - protein, 106 aa, Homo sapiens
MDKNQKLSVVRELMLRYQHGLEFGKTCLKTELQFSDYYCLLAVHALIDVWRETGDETTVWQALTLLEEGLTHSPSNAQFKLLLVRIYCMLGAFEPVVDLYSSLDAK

SEQ ID NO: 1533 - protein, 115 aa, Homo sapiens
  MISC_FEATURE (22): Xaa equals any of the twenty naturally occurring L-amino acids
MTFETVGKKTINPIICPAFMGXMIIHLAFVLLCFKDCQNKNNVFIAFYFLICQLKTTQKNTTEEFIQNLYYLSFQNFFLLNFKRAVKVSVRNFPPETSLGSLLFGGCLVVCNLKI

SEQ ID NO: 1534 - protein, 204 aa, Homo sapiens
MAKVQVNNVVVLDNPSPFYNPFQFEITFECIEDLSEDLEWKIIYVGSAESEEYDQVLDSVLVGPVPAGRHMFVFQADAPNPGLIPDADAVGVTVVLITCTYRGQEFIRVGYYVNNEYTETELRENPPVKPDFSKLQRNILASNPRVTRFHINWEDNTEKLEDAESSNPNLQSLLSTDALPSASKGWSTSENSLNVMLESHMDCM

SEQ ID NO: 1535 - protein, 135 aa, Homo sapiens
  MISC_FEATURE (8): Xaa equals any of the twenty naturally occurring L-amino acids
  MISC_FEATURE (96): Xaa equals any of the twenty naturally occurring L-amino acids
  MISC_FEATURE (111): Xaa equals any of the twenty naturally occurring L-amino acids
MPRARTHXQRLSWSVFMQMGTSNHWSHLSFVSESLGGVCGHERGREWRVRLPHEASPELLPAACSEHPGSTVQSAQDSGSRHGRLQLPQRTVDREXQPRIPLSMPGMTLIXKSFIFEFVAVVHFLPTHSINLTEL

SEQ ID NO: 1536 - protein, 121 aa, Homo sapiens
MKNEKLLSKASEPKYQLFVPQLVTGRCATRAFHRKSHSLDLNISEKLTLLPTLYEIHSKTTAYSRLNETQPIDLSGLLYNLVKIAIPFRIHPVLILVCCCKDFQWPPMRPRHKEEENFSVV

SEQ ID NO: 1537 - protein, 102 aa, Homo sapiens
  MISC_FEATURE (77): Xaa equals any of the twenty naturally occurring L-amino acids
  MISC_FEATURE (100): Xaa equals any of the twenty naturally occurring L-amino acids
MRTYHVGVLGKSGKYDSVLHWALILSCYICTIEYFRNYMKHETVFAIFFKLGIWFLKIYLKQSRIFLVQSVSCGISXYFYHILRTLRRLIVNNLFDWCSXNP

SEQ ID NO: 1538 - protein, 109 aa, Homo sapiens
  MISC_FEATURE (75): Xaa equals any of the twenty naturally occurring L-amino acids
  MISC_FEATURE (109): Xaa equals any of the twenty naturally occurring L-amino acids
MLLELSEEHKEHLAFLPQVDSAGQRAWGRCSVGWGGGQRQRLALNSLLTFIAVVAEFGRIAVEFLRRGANPKIYXGAASKKGKGKAPQASRAVASHSLSPGRETDYCEX

SEQ ID NO: 1539 - protein, 135 aa, Homo sapiens
  MISC_FEATURE (47): Xaa equals any of the twenty naturally occurring L-amino acids
MFSFETPVLVLCWNTVLQTVFTWDAIYLLHCSLCKTVARGWQTPPTXWCQNPQDQRSIRSPADLQWLTAGRPCAQPGHVAVTVCSVAPVACPCLAARQGRVWVWGCQVGRSCCCPDFGICQPVPATGQSLPPTLK

SEQ ID NO: 1540 - protein, 168 aa, Homo sapiens
MLPPAHHQAFVRHRLEEAFRVALVGHRHPLPVLAYVRLTHRRSGRFLSQDDLVQSIGVSAALGAAGVVLWGDLSLSSSEEECWHLHDYLVDTLGPYVINVTRAAMACSHQRCHGHGRCARRDPGQMEAFLHLWPDGSLGDWKSFSCHCYWGWAGPTCQEPRPGPKEAV

SEQ ID NO: 1541 - protein, 213 aa, Homo sapiens
MKLNRQLIFCTLAALAEERKPLECLDAFGATGIMGLQWAKHLGNAVKVTINDLNENSVTLIQENCHLNKLKVVVDSKEKEKSDDILEEGEKNLGNIKVTKMDANVLMHLRSFDFIHLDPFGTSVNYLDSAFRNIRNLGIVSVTSTDISSLYAKAQHVARRHYGCNIVRTEYYKELAARIVVAAVARAAARCNKGIEVLFAVALEHFVLVVVRV

SEQ ID NO: 1542 - protein, 218 aa, Homo sapiens
  MISC_FEATURE (155): Xaa equals any of the twenty naturally occurring L-amino acids
  MISC_FEATURE (168): Xaa equals any of the twenty naturally occurring L-amino acids
  MISC_FEATURE (177): Xaa equals any of the twenty naturally occurring L-amino acids
  MISC_FEATURE (199): Xaa equals any of the twenty naturally occurring L-amino acids
  MISC_FEATURE (204): Xaa equals any of the twenty naturally occurring L-amino acids
  MISC_FEATURE (210): Xaa equals any of the twenty naturally occurring L-amino acids
  MISC_FEATURE (213): Xaa equals any of the twenty naturally occurring L-amino acids
MAATFFGEVVKAPCRAGTEDEEEEEEGRRETPEDREVRLQLARKREVRLLRRQTKTSLEVSLLEKYPCSKFIIAIGNNAVAFLSSFVMNSGVWEEVGCAKLWNEWCRTTDTTHLSSTEAFCVFYHLKSNPSVFLCQCSCYVAEDQQYQWLEKVFXLLSKEEHADNYSXHVDMFTGLXKPQNPPGQPFLSPFPWRRPLKXRIPKXRAWFGXIGXGTTGL

SEQ ID NO: 1543 - protein, 183 aa, Homo sapiens
  MISC_FEATURE (99): Xaa equals any of the twenty naturally occurring L-amino acids
  MISC_FEATURE (122): Xaa equals any of the twenty naturally occurring L-amino acids
  MISC_FEATURE (139): Xaa equals any of the twenty naturally occurring L-amino acids
  MISC_FEATURE (150): Xaa equals any of the twenty naturally occurring L-amino acids
  MISC_FEATURE (151): Xaa equals any of the twenty naturally occurring L-amino acids
MALTGASDPSAEAEANGEKPFLLRALQIALVVSLYWVTSISMVFLNKYLLDSPSLRLDTPIFVTFYQCLVTTLLCKGLSALAACCPGAVDFPSLRLDLXVARSVLPLSVVFIGMITFNNLCXSTSVWPSTMWAAHSPPXSTCCSPTCCSXXPPPSMPCFTCGIHHRGLLAWCGTRRGQKAPCR

SEQ ID NO: 1544 - protein, 119 aa, Homo sapiens
  MISC_FEATURE (35): Xaa equals any of the twenty naturally occurring L-amino acids
MELLMFILVRHMPHLSTKVSDSPSHIATKTRLSEXSARLVAATVTILSDLPSLCSPAGCMTILPTILFLIARILKDTAIKSADNQVPPPVSAALQGIKSIVTLSMAKTEAGVQKQWTAL

SEQ ID NO: 1545 - protein, 273 aa, Homo sapiens
  MISC_FEATURE (152): Xaa equals any of the twenty naturally occurring L-amino acids
MQNLGRVLKAWVVSHPDLVYWQGLDSLCAPFLYLNFNNEALAYACMSAFIPKYLYNFFLKDNSHVIQEYLTVFSQMIAFHDPELSNHLNEIGFIPDLYAIPWFLTMFTHVFPLHKIFHLWDTLLLGNSSFPFCIGVAILQQLRDRLLANGFXECILLFSDLPEIDIERCVRESINLFCWTPKSATYRQHAQPPKPSSDSSGGRSSAPYFSAECPDPPKTDLSRESIPLNDLKSEVSPRISAEDLIDLCELTVTGHFKTPSKKTKSSKPKLLVV

SEQ ID NO: 1546 - protein, 144 aa, Homo sapiens
  MISC_FEATURE (53): Xaa equals any of the twenty naturally occurring L-amino acids
  MISC_FEATURE (73): Xaa equals any of the twenty naturally occurring L-amino acids
  MISC_FEATURE (76): Xaa equals any of the twenty naturally occurring L-amino acids
  MISC_FEATURE (78): Xaa equals any of the twenty naturally occurring L-amino acids
  MISC_FEATURE (80): Xaa equals any of the twenty naturally occurring L-amino acids
  MISC_FEATURE (86): Xaa equals any of the twenty naturally occurring L-amino acids
  MISC_FEATURE (93): Xaa equals any of the twenty naturally occurring L-amino acids
MAKALTTMQEQIDSLAAVVLQNRRGLDMLTAAQGGICLALDEKCCFWVNQSGXVQDNIRQLLNQASSLRERAXQGXLXWXGTWKWXSWVLPLXGPLVSLLLLLLFGPCLLNLITQFVSSRLQAIKLQTNLSAGRHPRNIQESPF

SEQ ID NO: 1547 - protein, 110 aa, Homo sapiens
MVGIIYKPKTKETRETYEVLLSFIQAALGDQPRDILCGAADEVLAVLKNEKLRDKERRKEIDLLLGQTDDTRYHVLVNLGKKITDYGGDKEIQNMGKCALYVLIMFIGCC

SEQ ID NO: 1548 - protein, 110 aa, Homo sapiens
MQKAGRHHPLRAPPASSQYWIGLAWLVAVWEKQPKRLVYFNTKLDHGPFPTGLFKGLYGIHCLVSFFAVHHSKECHLHPKPPFSHEGKSKKGLQFLLKGVPFVGRVINTI

SEQ ID NO: 1549 - protein, 110 aa, Homo sapiens
  MISC_FEATURE (14): Xaa equals any of the twenty naturally occurring L-amino acids
  MISC_FEATURE (28): Xaa equals any of the twenty naturally occurring L-amino acids
MTNVYFKKENDIIXNGTLWKEGRIKLCXVHHLADHQKHSAARDRRWVCPRSRRPAHLKPRSVPPSGLFIVESVFICFIMKNTICKGILICIFIQAHKNSTWPGSRMHCIV

SEQ ID NO: 1550 - protein, 193 aa, Homo sapiens
  MISC_FEATURE (14): Xaa equals any of the twenty naturally occurring L-amino acids
  MISC_FEATURE (54): Xaa equals any of the twenty naturally occurring L-amino acids
  MISC_FEATURE (171): Xaa equals any of the twenty naturally occurring L-amino acids
  MISC_FEATURE (178): Xaa equals any of the twenty naturally occurring L-amino acids
  MISC_FEATURE (184): Xaa equals any of the twenty naturally occurring L-amino acids
MFTCFPKCLGFSPXVNVTVSPRSEESHTTTVSGGNGSVFQAGPQLQALANLEAXRGSIGAALSSRDVSGLPVYAQSGEPRRLTQAQVAAFPGENALEHSSDQDTWDSLRSPGFCSPLSSGGGAESLPPGGPGHAEAGHLGKVCDFHLNHQQPSPTSVLPNRGGQPLRFEKXLFCWISXALGLLXTGIVAPSQG

SEQ ID NO: 1551 - protein, 147 aa, Homo sapiens
  MISC_FEATURE (142): Xaa equals any of the twenty naturally occurring L-amino acids
MVSVTMATSEWIQFFKEAGIPPGPAVNYAVMFVDNRIQKSMLLDLNKEIMNELGVTVVGDIIAILKHAKVVHRQDMCKAATESVPCSPSPLAGEIRRGTSAASRMITNSLNHDSPPSTPPRRPDTSTSKISGHCVQQDSSKXCQGHC

SEQ ID NO: 1552 - protein, 127 aa, Homo sapiens
MKQITQLLPEDLRKELYELWEEYETQSSAEAKFVKQLDQCEMILQASEYEDLEHKPGRLQDFYDSTAGKFNHPEIVQLVSELEAERSTNIAAVPVSHTPETLSKLLHSCNKHYFSISLYCVLPLLVC

SEQ ID NO: 1553 - protein, 121 aa, Homo sapiens
  MISC_FEATURE (77): Xaa equals any of the twenty naturally occurring L-amino acids
  MISC_FEATURE (107): Xaa equals any of the twenty naturally occurring L-amino acids
  MISC_FEATURE (108): Xaa equals any of the twenty naturally occurring L-amino acids
  MISC_FEATURE (109): Xaa equals any of the twenty naturally occurring L-amino acids
  MISC_FEATURE (115): Xaa equals any of the twenty naturally occurring L-amino acids
  MISC_FEATURE (116): Xaa equals any of the twenty naturally occurring L-amino acids
  MISC_FEATURE (117): Xaa equals any of the twenty naturally occurring L-amino acids
MLHTTQLYQHVPETRWPIVYSPRYNITFMGLEKLHPFDAGKWGKVINFLKEEKLLSDSMLVEAREASEEDLLVVHTXRYLNELKWSFAVATITEIPPVIFLPNFLVXXXVLRPFXXXQEEP

SEQ ID NO: 1554 - protein, 109 aa, Homo sapiens [sequence omitted]

SEQ ID NO: 1555 - protein, 141 aa, Homo sapiens
  MISC_FEATURE (113): Xaa equals any of the twenty naturally occurring L-amino acids
  MISC_FEATURE (117): Xaa equals any of the twenty naturally occurring L-amino acids
  MISC_FEATURE (128): Xaa equals any of the twenty naturally occurring L-amino acids
MAMSVSAEDDDYESEPDQNRAVGRPKGKLGPASAVKLAANRTTAGARRRRTRCRKCEACLRTECGECHFCKDMKKFGGPGRMKQSCIMRQCIAPVLPHTAVCLVCCEAGKEDXVEEXESKFNLMLMEXSICNESSTLDALR

SEQ ID NO: 1556 - protein, 100 aa, Homo sapiens
MAAAAAAGSGTPREEEVPAGEAAASQPQAPTSVPGARLSRLPLARVKALVKADPDVTLAGQEAIFILARAAELFVETIAKDAYCCAQQGKKENPSEERLG

SEQ ID NO: 1557 - protein, 143 aa, Homo sapiens
  MISC_FEATURE (88): Xaa equals any of the twenty naturally occurring L-amino acids
  MISC_FEATURE (129): Xaa equals any of the twenty naturally occurring L-amino acids
MLPCARGYFARVHGVSQLIKAFLRKTECHCQIVNLGAGMDTTFWRLKDEDLLPSKYFEVDFPMIVTRKLHSIKLPTLLIAECVLVYMXPEQSANLLKWAANSFERAMFINYEQVNMGDRLGQIMIENLXRRQCDLAGVETASH

SEQ ID NO: 1558 - protein, 120 aa, Homo sapiens
MTGWNPVRLYEQLLQKEEELPDERWMSYEERHLLDELYITKRRLKEIEERLHGLKASSMTQTPALKFKVENFFCMGSPLAVFLALRGIRPGNTGSQDHILPREICNRLLNIFHPTDPVGL

SEQ ID NO: 1559 - protein, 127 aa, Homo sapiens
  MISC_FEATURE (21): Xaa equals any of the twenty naturally occurring L-amino acids
  MISC_FEATURE (22): Xaa equals any of the twenty naturally occurring L-amino acids
  MISC_FEATURE (45): Xaa equals any of the twenty naturally occurring L-amino acids
  MISC_FEATURE (126): Xaa equals any of the twenty naturally occurring L-amino acids
MEEKYGGDVLAGPGGGGGLGXXDVPSARTAFFMVLFQKPFSSGKXITKHQWIKIFKHAVAGCIISLLWFFGLTLCGPLRTLLLFEHSDIVVISLLSVLFTSSGGGPAKTRGAAFFIIAVICLLLFXN

SEQ ID NO: 1560 - protein, 159 aa, Homo sapiens
  MISC_FEATURE (61): Xaa equals any of the twenty naturally occurring L-amino acids
  MISC_FEATURE (118): Xaa equals any of the twenty naturally occurring L-amino acids
  MISC_FEATURE (142): Xaa equals any of the twenty naturally occurring L-amino acids
  MISC_FEATURE (152): Xaa equals any of the twenty naturally occurring L-amino acids
  MISC_FEATURE (153): Xaa equals any of the twenty naturally occurring L-amino acids
MWRNGTSSCRRLRSQGSCHIGGNVATNAGGLRFLRYGSLHGTVLGLEVVLADGTVLDCLTXLRKDNTGYDLKQLFIGSEGTLGIITTVSILCPPKPRAVNVAFLRHLCAARLWSWEPXATPACRILLFPLPSLPSFAESSCXTFHTCKGNAXXRSCLAF

SEQ ID NO: 1561 - protein, 186 aa, Homo sapiens
  MISC_FEATURE (36): Xaa equals any of the twenty naturally occurring L-amino acids
  MISC_FEATURE (174): Xaa equals any of the twenty naturally occurring L-amino acids
  MISC_FEATURE (186): Xaa equals any of the twenty naturally occurring L-amino acids
MDAAEGWLWTVVSWLLKVMVRLVDVLGATCVMKGVXLWFTVSYIFTRRLQISMFWKHDLTCVLWGKSSKCVMVTKGWFRVSIGVILLSASMVSIFFNRSMNSRRSAFSTNMSLPSKSVVMFTWAISSKQLKMYFLASFDLIPVSASWSSGVFSLHKGYGESVSRLKNLVVFVPXLNKYSAGKPCVX

SEQ ID NO: 1562 - protein, 231 aa, Homo sapiens
  MISC_FEATURE (204): Xaa equals any of the twenty naturally occurring L-amino acids
MIDMLYFVVIMLVVLMSFGVARQAILHPEEKPSWKLARNIFYMPYWMIYGEVFADQIDLYAMEINPPCGENLYDEEGKRLPPCIPGAWLTPALMACYLLVANILLVNLLIAVFNNTFFEVKSISNQVWKFQRYQLIMTFHDRPVLPPPMIILSHIYIIIMRLSGRCRKKREGDQEERDRGLKLFLSDEELKRLHEFEEQCVQEXSGRRRMSSSRPATSASGSLLKELKICQ

SEQ ID NO: 1563 - protein, 116 aa, Homo sapiens
  MISC_FEATURE (106): Xaa equals any of the twenty naturally occurring L-amino acids
MNSGGGFGLGLGFGLTPTSVIQVTNLSSAVTSEQMRTLFSFLGEIEELRLYPPDNAPLAFSSKVCYVKFRDPSSVGVAQHLTNTVFIDRALIVVPCAEGWISLFFXLLNSVLSVMP

SEQ ID NO: 1564 - protein, 115 aa, Homo sapiens
  MISC_FEATURE (82): Xaa equals any of the twenty naturally occurring L-amino acids
  MISC_FEATURE (84): Xaa equals any of the twenty naturally occurring L-amino acids
  MISC_FEATURE (87): Xaa equals any of the twenty naturally occurring L-amino acids
  MISC_FEATURE (95): Xaa equals any of the twenty naturally occurring L-amino acids
  MISC_FEATURE (100): Xaa equals any of the twenty naturally occurring L-amino acids
  MISC_FEATURE (114): Xaa equals any of the twenty naturally occurring L-amino acids
MTQESRACSSVWKEFGSVGRCNVHRHFQGNSKQSPFPFAFPQILSVYIKPWVHIVVVIEGNWLNSTLVYGTFCGHLRKTSYXLXGGXCCPARGRXILTTXPPWPLSTFHGGHAXH

SEQ ID NO: 1565 - protein, 137 aa, Homo sapiens
  MISC_FEATURE (129): Xaa equals any of the twenty naturally occurring L-amino acids
  MISC_FEATURE (137): Xaa equals any of the twenty naturally occurring L-amino acids
MEELLLLAKESSRSNHTIWFGHFTTSTILSPSPGIRSIMSSAIAYLCGHLHTLGGLMPVLHTRHFQGTLELEVGDWKDNRRYRIFAFDHDLFSFADLIFGKWPVVLITNPKSLLYSCGEHEPLRKTSSXQHTSESWX

SEQ ID NO: 1566 - protein, 120 aa, Homo sapiens
  MISC_FEATURE (49): Xaa equals any of the twenty naturally occurring L-amino acids
  MISC_FEATURE (90): Xaa equals any of the twenty naturally occurring L-amino acids
  MISC_FEATURE (101): Xaa equals any of the twenty naturally occurring L-amino acids
  MISC_FEATURE (105): Xaa equals any of the twenty naturally occurring L-amino acids
MTSNQSSTLYVTDQGGVYFEVHTPGVYRDLFGTLQAFDPLDQQMPLALXLPAKILFCALGYNHLGLVDEFGRIFMQGNNRYGQLGTGDKXDRGGTHTGLFXCSGXITLWVRGLQTNSLVA

SEQ ID NO: 1567 - protein, 254 aa, Homo sapiens
MGSGCRIECIFFSEFHPTLGPKITYQVPEDFISRELFDTVQVYIITKPELQNKLITVTAMEKKLIGCPVCIEHKKYSRNALLFNLGFVCDAQAKTCALEPIVKKLAGYLTTLELESSFVSMEESKQKLVPIMTILLEELNASGRCTLPIDESNTIHLKVIEQRPDPPVAQEYDVPVFTKDKEDFFNSQWDLTTQQILPYIDGFRHIQKISAEADVELNLVRIAIQNLLYYGVVTLVSILQYSNVYCPTPKVQDW

SEQ ID NO: 1568 - protein, 118 aa, Homo sapiens
  MISC_FEATURE (118): Xaa equals any of the twenty naturally occurring L-amino acids
MDGQKKNWKDKVVDLLYWRDIKKTGVVFGASLFLLLSLTVFSIVSVTAYIALALLSVTISFRIYKGVIQAIQKSDEGHPFRAYLESEVAISEELVQKYSNSALGHVNCTIKGTQAPLX

SEQ ID NO: 1569 - protein, 131 aa, Homo sapiens
MGEPGEGGLGAWGRKAGRSPSWVVLAQLVGPLSTPTLFISVVSLLCRPTLPRVLLPPAPASHLLLTASSCVFDKVIGIFLLTGFSLHFTCSFPELTARAPAQCAWLGFPSPWLGAGVGLTHSNLFCLLASQ

SEQ ID NO: 1570 - protein, 146 aa, Homo sapiens [sequence omitted]

SEQ ID NO: 1571 - protein, 111 aa, Homo sapiens
  MISC_FEATURE (71): Xaa equals any of the twenty naturally occurring L-amino acids
MDLCCSRIKRTNFYLNYSLFYVYILASEVKYYLSHMCFILFDFHINLFIVLLDISSCLRIITESQWACKFXLTKIFLTVHYSPNSIYATIVLIKEVLLLFLRKIHKLQNII

SEQ ID NO: 1572 - protein, 244 aa, Homo sapiens
  MISC_FEATURE (209): Xaa equals any of the twenty naturally occurring L-amino acids
  MISC_FEATURE (213): Xaa equals any of the twenty naturally occurring L-amino acids
MAMNYNAKDEVDGGPPCAPGGTAKTRRPDNTAFKQQRLPAWQPILTAGTVLPIFFIIGLIFIPIGIGIFVTSNNIREIEIDYTGTEPSSPCNKCLSPDVTPCFCTINFTLEKSFEGNVFMYYGLSNFYQNHRRYVKSRDDSQLNGDSSALLNPSKECEPYRRNEDKPIAPCGAIANSMFNDTLELFLIGNDSYPIPIALKKKGIAWWTXKNVXFRNPPGGDNLEERFKGTTKPVNWLKPVYMLD

SEQ ID NO: 1573 - protein, 186 aa, Homo sapiens
MLLLETLKVKQTILEPIPTSLKLPIAVSCYWLQHTETKAKLHHLQSLLLTMLVGPLIAIINSPGKEELQEDGAKMLYAEFQRVKAQTRLGTRLDLDTAHIFCQWQSCLQMGMYLNQLLSTPLPEPDLTRLYSGSLVHGLCQQLLASTSVESLLSICPEAKQLYEYLFNATRSYAPAEIFLPKGRSN

SEQ ID NO: 1574 - protein, 272 aa, Homo sapiens
  MISC_FEATURE (236): Xaa equals any of the twenty naturally occurring L-amino acids
  MISC_FEATURE (237): Xaa equals any of the twenty naturally occurring L-amino acids
MRLSFIVFSSQATIILPLTGDRGKISKGLEDLKRVSPVGETYIHEGLKLANEQIQKAGGLKTSSIIIALTDGKLDGLVPSYAEKEAKISRSLGASVYCVGVLDFEQAQLERIADSKEQVFPVKGGFQALKGIINSILAQSCTEILELQPSSVCVGEEFQIVLSGRGFMLGSRNGSVLCTYTVNETYTTSVKPVSVQLNSMLCPAPILNKAGETLDVSVSFNGGKSVISGSLIVTAXXCSNGIAAIIVILVLLLLLGIGLMWWFWTPLLQSGY

SEQ ID NO: 1575 - protein, 117 aa, Homo sapiens
  MISC_FEATURE (18): Xaa equals any of the twenty naturally occurring L-amino acids
  MISC_FEATURE (80): Xaa equals any of the twenty naturally occurring L-amino acids
MLHSSLCLRGHMVSSPCXPAASCGLLIRTPVTGFRTHPKSRRTSSMRMAYTKSLFPNEVHILRFWVGQVFVKTLFSLVHXHSSTSKMEFPKLLIAIFITADFITLTKKKKKGGPLKG

SEQ ID NO: 1576 - protein, 121 aa, Homo sapiens [sequence omitted]

SEQ ID NO: 1577 - protein, 109 aa, Homo sapiens
  MISC_FEATURE (87): Xaa equals any of the twenty naturally occurring L-amino acids
MLIMLGIFFNVHSAVLIEDVPFTEKDFENGPQNIYNLYEQVSYNCFIAAGLYLLLGGFSFCQFGSISARNNMGSGEIFSAAGALSRXRGATMQCIPWPILSAGANGRRG

SEQ ID NO: 1578 - protein, 216 aa, Homo sapiens
MTVMSLLVLVLSWGSMGLEAATAVGLSDFCSNPDPYVLNLTQEETGLSSDILSYYLLCNRAVSNPFQQRLTLSQRALANIHSQLLGLEREAVPQFPSAQKPLLSLEETLNVDRKEISTSWWHCYTAAALHKDYGAALRGLCEYALEGLLFLLLFSLLSAGALATALCSLPRAWALFPPRNPSALCSGSRLSEPLLPAGLEPGSPLRSFPGCRRRPH

SEQ ID NO: 1579 - protein, 170 aa, Homo sapiens
  MISC_FEATURE (68): Xaa equals any of the twenty naturally occurring L-amino acids
  MISC_FEATURE (72): Xaa equals any of the twenty naturally occurring L-amino acids
  MISC_FEATURE (77): Xaa equals any of the twenty naturally occurring L-amino acids
  MISC_FEATURE (82): Xaa equals any of the twenty naturally occurring L-amino acids
  MISC_FEATURE (110): Xaa equals any of the twenty naturally occurring L-amino acids
  MISC_FEATURE (120): Xaa equals any of the twenty naturally occurring L-amino acids
  MISC_FEATURE (125): Xaa equals any of the twenty naturally occurring L-amino acids
  MISC_FEATURE (127): Xaa equals any of the twenty naturally occurring L-amino acids
  MISC_FEATURE (130): Xaa equals any of the twenty naturally occurring L-amino acids
  MISC_FEATURE (131): Xaa equals any of the twenty naturally occurring L-amino acids
  MISC_FEATURE (132): Xaa equals any of the twenty naturally occurring L-amino acids
  MISC_FEATURE (163): Xaa equals any of the twenty naturally occurring L-amino acids
  MISC_FEATURE (167): Xaa equals any of the twenty naturally occurring L-amino acids
  MISC_FEATURE (170): Xaa equals any of the twenty naturally occurring L-amino acids
MEINTKLLISVTCISFFTFQLLFYFVSYWFSAKVSPGFNSLSFKKKIEWNSRVVSTCHSLVVGIFGLXIFLXDEATXADPLXGGPSLANVNIAIASGYLISDLSIIILYXKVIGDKFFIXHHCAXLXAYXXXLILVNKSLIWHNFFKIRYIETSLQTTHLDHXINNXKRX

SEQ ID NO: 1580 - protein, 134 aa, Homo sapiens
  MISC_FEATURE (122): Xaa equals any of the twenty naturally occurring L-amino acids
  MISC_FEATURE (126): Xaa equals any of the twenty naturally occurring L-amino acids
MQAHQEKLQLEQLRLEEEVARLAAEKEALEQVAEEGRQQNETRVAWDLWSTLCMILFLMIEVWRQDHQEGPSPECLGGEEDELPGLGGAPLQGLTLPNKATLGHFYERCIRGATADAARTRXFLEXFVDDCWKP

SEQ ID NO: 1581 - protein, 141 aa, Homo sapiens
  MISC_FEATURE (21): Xaa equals any of the twenty naturally occurring L-amino acids
  MISC_FEATURE (137): Xaa equals any of the twenty naturally occurring L-amino acids
MAQRAFPNPYADYNKSLAEGXFDAAGRLTPEFSQRLTNKIRELLQQMERGLKSADPRDGTGYTGWAGIAVLYLHLYDVFGDPAYLQLAHGYVKQSLNCLTKRSITFLCGDAGPLAVAAVLYHKMNNEKQAEDCITRXIHLK

SEQ ID NO: 1582 - protein, 139 aa, Homo sapiens
MQRCTPLFDQASAPLAYHPVLTSVTVRAPPVSADLFVLWGNSLLSSLCQSQAWWICISRPLHTVPLHLPFPPRPPVGGAGVASVRNSLLVTAGLPRVLLVTIASWSSDIIARNGALFRLVVWPSGFLTRYCVTPSKKGL

SEQ ID NO: 1583 - protein, 102 aa, Homo sapiens
  MISC_FEATURE (30): Xaa equals any of the twenty naturally occurring L-amino acids
  MISC_FEATURE (82): Xaa equals any of the twenty naturally occurring L-amino acids
MSFIARHEASVICVLRNRRASLSQESEVCXASQPEKGRGAHLAGRPLGRGVTGVLDFLIRVIVAGPLGRRLLLHLLLLPPLXLAKELLSFQHDPGVEAMSSQ

SEQ ID NO: 1584 - protein, 216 aa, Homo sapiens
MAMKPAKKITKTFLHPNSMTNLKSLKRTRKTKNLSSLSTAALSLWRLLSQMDRGMIVSMRSCQTAQAWGDTGPLMVGPAVLTWQGITNLVPHCLLFSFIPSHQLQEKNTRPYKIYHQPTHLWEQETTFQLDQITALSTAVKPITSTANRCVYIHTLLCLAEFHSNMMLHYAPYCDDLSTPKPAGACPWPWGVSQSLLVPLVVHFIFESFSFSYTEK

SEQ ID NO: 1585 - protein, 213 aa, Homo sapiens
  MISC_FEATURE (46): Xaa equals any of the twenty naturally occurring L-amino acids
  MISC_FEATURE (54): Xaa equals any of the twenty naturally occurring L-amino acids
  MISC_FEATURE (106): Xaa equals any of the twenty naturally occurring L-amino acids
  MISC_FEATURE (189): Xaa equals any of the twenty naturally occurring L-amino acids
  MISC_FEATURE (209): Xaa equals any of the twenty naturally occurring L-amino acids
MMRSCPATPLTSSTGCPREHMCVLVYLVTVMHSMQAGYLEKAQKYXDKALMQLXKLKMLDCSPILSSFQVILLEHIIMCRLVTGHKATALQEISQVCQLCQQSPRXFSNHAAQLHTLLGLYCVSVNCMDNAEPSSPRPCGSPTTRSCGPSSSPTWRVCIYGKEIDTKRYSTVCWRGSTRTTASLSARLXRQPLLCAWLFSLQGRQRGKXSAET

SEQ ID NO: 1586 - protein, 156 aa, Homo sapiens
  MISC_FEATURE (45): Xaa equals any of the twenty naturally occurring L-amino acids
MYRTLCCVQWRNLPGPGESSDSASRLCFASSNVELTSGPQSPAGXSVRHARVVEMGPPGPPAVHWAETSGKPAAGALPGQLPPAQCSQTSPSGKQSVQQMLCEILGFSLFLFCFVFERKKKIQLTSLFCKWVSFLCIKSWWSLVFTCSCCVILRCY

SEQ ID NO: 1587 - protein, 105 aa, Homo sapiens
  MISC_FEATURE (28): Xaa equals any of the twenty naturally occurring L-amino acids
  MISC_FEATURE (103): Xaa equals any of the twenty naturally occurring L-amino acids
MLYTIYLAQQIIALIEFKSALFSSTVAXHAWGLRLFGRFQPDSSVPLLPSLPLPALRSPLGLESDLGWGRGRGFLGVSSSAVSVPLAFRFFLPFLLGMGLLAXGG

SEQ ID NO: 1588 - protein, 176 aa, Homo sapiens
  MISC_FEATURE (109): Xaa equals any of the twenty naturally occurring L-amino acids
  MISC_FEATURE (167): Xaa equals any of the twenty naturally occurring L-amino acids
  MISC_FEATURE (169): Xaa equals any of the twenty naturally occurring L-amino acids
MLYPEYHKVHQMMREQSILSPSPYEGYRSLPRHQLLCFKEDCQAVFQDLEGVEKVFGVSLVLVLIGSHPDLSFLPGAGADFAVDPDQPLSAKRNPIDVDPFTYQSTRQXGLYAMGPLAGDNFVRFVQGGALAVASSLLRKEQNHLHRQPWSSLRGIHPLIDLKSGVXPXLVKLTAQ

SEQ ID NO: 1589 - protein, 126 aa, Homo sapiens
  MISC_FEATURE (17): Xaa equals any of the twenty naturally occurring L-amino acids
  MISC_FEATURE (69): Xaa equals any of the twenty naturally occurring L-amino acids
MTLALRSTAARTQRELXRRRNPSTSTSPQAGGRQEKKRPGLGTEGGAQMHILAGIMGVLKGVVIEVEVXAEINPIGIKGPDAPGSGSLRIPVTVGVTEDFSCTVDLEIIMFFKCSQIQLGGYYFCI

SEQ ID NO: 1590 - protein, 108 aa, Homo sapiens
  MISC_FEATURE (3): Xaa equals any of the twenty naturally occurring L-amino acids
  MISC_FEATURE (7): Xaa equals any of the twenty naturally occurring L-amino acids
  MISC_FEATURE (12): Xaa equals any of the twenty naturally occurring L-amino acids
  MISC_FEATURE (14): Xaa equals any of the twenty naturally occurring L-amino acids
MPXLLSXSPLAXGXGGAAPWVFGDSVLLCLREETALGREGEAFILYCCPCFPLGEFTQLAAPPHHSPQEGHVPVFCPPLLFLCTMSLIFPAREANPEHAPVLMSVSAG

SEQ ID NO: 1591 - protein, 113 aa, Homo sapiens
  MISC_FEATURE (38): Xaa equals any of the twenty naturally occurring L-amino acids
  MISC_FEATURE (52): Xaa equals any of the twenty naturally occurring L-amino acids
  MISC_FEATURE (53): Xaa equals any of the twenty naturally occurring L-amino acids
  MISC_FEATURE (105): Xaa equals any of the twenty naturally occurring L-amino acids
MGQLKFNTSEEHHADMYRSDLPNPDTLSAELHCWRIKXKHRGKDIELPSTIXXALHLPDIKFFPNVYALLKVLCILPVMKVENERYENGRKRLKAYLRNTLTDQXQVTWLCLT

SEQ ID NO: 1592 - protein, 123 aa, Homo sapiens
MDFFSVQNILVHIPIGAGGYDLSWIEAVGTIAGLLCIGLASLEKISNYFFGLINVTLFGIIFFQIQLYASLLLQVFFFAANIYGWYAWSRQTSQNEAELKIRWLPLPKATQLVGGLRCFDWSE

SEQ ID NO: 1593 - protein, 122 aa, Homo sapiens
  MISC_FEATURE (92): Xaa equals any of the twenty naturally occurring L-amino acids
  MISC_FEATURE (95): Xaa equals any of the twenty naturally occurring L-amino acids
  MISC_FEATURE (99): Xaa equals any of the twenty naturally occurring L-amino acids
  MISC_FEATURE (114): Xaa equals any of the twenty naturally occurring L-amino acids
MGLGLSCVSILIRKGYAQTLACSDSKTEGFTRPTPGKWASLLPMLSFNLCNLPVSIGGHLTPPKEPSLSLSLYPCNSLLCAFPQAGPSSTLXFLXALIXGIPTLCVSGQTRAKXGSCLRYII

SEQ ID NO: 1594 - protein, 139 aa, Homo sapiens
MGQLKFNTSEEHHADMYRSDLPNPDTLSAELHCWRIKWKHRGKDIELPSTIYEALHLPDIKFFPNVYALLKVLCILPVMKVENERYENGRKRLKAYLRNTLTNRSFKYVKNLYWTVTRNYRRKACELTKQGFQCRFCLS

SEQ ID NO: 1595 - protein, 155 aa, Homo sapiens
  MISC_FEATURE (122): Xaa equals any of the twenty naturally occurring L-amino acids
  MISC_FEATURE (124): Xaa equals any of the twenty naturally occurring L-amino acids
  MISC_FEATURE (129): Xaa equals any of the twenty naturally occurring L-amino acids
  MISC_FEATURE (141): Xaa equals any of the twenty naturally occurring L-amino acids
  MISC_FEATURE (143): Xaa equals any of the twenty naturally occurring L-amino acids
MSSFGAGKTKEVIFSVEDGSVKMFLRGRPVPMMIPDELAPTYSLDTRSELPSCRLKLEWVYGYRGRDCRANLYLLPTGEIVYFVASVAVLYSVEEQRQRHYLGHNDDIKCLAIHPDMVTIAXGXVAGTXKGGEPLRPKWDXGXIFLSLKSLGLGF

SEQ ID NO: 1596 - protein, 127 aa, Homo sapiens
  MISC_FEATURE (107): Xaa equals any of the twenty naturally occurring L-amino acids
  MISC_FEATURE (113): Xaa equals any of the twenty naturally occurring L-amino acids
MMAFAPPKNTDGPKMQTKMSTWTPLNHQLLNDRVFEERRALLGKWFDKWTDSQRRRILTGLLERCSLSQQKFCCRKLSRENSQQKPWDFYNPSFPRVLSFIHLFLFXGTLGSXLFVVAQVKGPREGG

SEQ ID NO: 1597 - protein, 109 aa, Homo sapiens
MGDESGGAAEVGRHQADTTPQGTLLPCNPDLKSLSYNKELGTTEGKRKYSANCFPITVQRTHFAMCNLCSMTCIWVCLVRYIMWCPCYAFCRLTLCLTSPSVLCCFVSS

SEQ ID NO: 1598 - protein, 265 aa, Homo sapiens
  MISC_FEATURE (170): Xaa equals any of the twenty naturally occurring L-amino acids
  MISC_FEATURE (173): Xaa equals any of the twenty naturally occurring L-amino acids
  MISC_FEATURE (243): Xaa equals any of the twenty naturally occurring L-amino acids
  MISC_FEATURE (257): Xaa equals any of the twenty naturally occurring L-amino acids
  MISC_FEATURE (262): Xaa equals any of the twenty naturally occurring L-amino acids
MAEEGGGGQGDGGSSLASGSTQRQPPPPAPQHPQPGSQALPAPALAPDQLPQNNTLVALPIVAIENILSFMSYDEISQLRLVCKRMDLVCQRMLNQGFLKVERYHNLCQKQVKAQLPRRESERRNHSLARHADILAAVETRLSLLNMTFMKYVDSNLCCFIPGKVIDEIXRVXRYVNSTRAPQRAHEVLQELRDISSMAMEYFDEKIVPILKRKLPGSDVSGRLMGSPPVPGPSGSPNNNAAXSSKQNPSRQEVYQXPAAGXKQW

SEQ ID NO: 1599 - protein, 114 aa, Homo sapiens
  MISC_FEATURE (87): Xaa equals any of the twenty naturally occurring L-amino acids
  MISC_FEATURE (112): Xaa equals any of the twenty naturally occurring L-amino acids
  MISC_FEATURE (113): Xaa equals any of the twenty naturally occurring L-amino acids
MLLTAVQLLYSPESSVRTKLIQLPVVYVMLMQHSLFLPTLLTSDGEESPDSQVKEALVDLMLTVVEMCPSVCESSHFAVLLGGYGAXLSVLDQKIYFCFERMSRKVSLINSXXC

SEQ ID NO: 1600 - protein, 103 aa, Homo sapiens
  MISC_FEATURE (3): Xaa equals any of the twenty naturally occurring L-amino acids
MAXLQQLRVQEAVESMVKSLERENIRKMQVSGPRPSRGAANVKDQKGEDFRPPRWPGHACFSCAQPRFTQRGFLHCSSLSPAMPLCVSVLLLSRSMRFPDSAP

SEQ ID NO: 1601 - protein, 173 aa, Homo sapiens
  MISC_FEATURE (2): Xaa equals any of the twenty naturally occurring L-amino acids
  MISC_FEATURE (132): Xaa equals any of the twenty naturally occurring L-amino acids
MXKLTLLCDAKTDGSFLVHHFLSFYLKANCKVCFVALIQSFSHYSIVGQKLGVSLTMARELGQLVFLEGLKSAVDVVFQAQKEPHPLQFLREANAGNLKPLFEFVREALKPVDSGEARWTYPVLLVDDLSVXLSLGMGAVAVLDFIHYCRATVCWELKGNMVVLVHDSGRCGG

SEQ ID NO: 1602 - protein, 137 aa, Homo sapiens
  MISC_FEATURE (24): Xaa equals any of the twenty naturally occurring L-amino acids
MVKMTKLRVVQYYGNFSRSAKRGXLRLLEEQRGALYRLSVLTLQPSDQGHYVCRVQEISRHRNKWTAWSNGSSATEMRVISLKASEESSFEKTKETWAFFEDLYVYAVLVCCVGILTFCSSCWSSSGSLCLTSGNPE

SEQ ID NO: 1603 - protein, 155 aa, Homo sapiens
MAGTVTGSYASKDDNLLNKYLSEHLLCTRHCCRCLGYSHVSEGLQPGRIPPIFTSSRFFKRDPWLYFPSSQFKHPKPALSPLQTGRWDWLPGHFLSLSFSQAFLPPQETDFSGPSMPATLSVSFFFFKVIFFRNTCKIPRNNVCASATSLSSLIS

SEQ ID NO: 1604 - protein, 117 aa, Homo sapiens
  MISC_FEATURE (63): Xaa equals any of the twenty naturally occurring L-amino acids
MKMVAPWTRFYSNSCCLCCHVRTGTILLGVWYLIINAVVLLILLSALADPDQYNFSSSELGGXFEFMDDAKILFNLSADMCIAIAISLLMILICARLLKERTSNAHLGSSHLLLPDL

SEQ ID NO: 1605 - protein, 104 aa, Homo sapiens
  MISC_FEATURE (3): Xaa equals any of the twenty naturally occurring L-amino acids
  MISC_FEATURE (14): Xaa equals any of the twenty naturally occurring L-amino acids
  MISC_FEATURE (20): Xaa equals any of the twenty naturally occurring L-amino acids
  MISC_FEATURE (60): Xaa equals any of the twenty naturally occurring L-amino acids
  MISC_FEATURE (81): Xaa equals any of the twenty naturally occurring L-amino acids
MPXECAAPASVTLXRPEPAXAQMRTSSLSTWTADSRSLVRLGPRTPSPPQPGPLRTPWPXLGAAGVGMWNCSLSPSGRIPXTRKLAQLLCLPMPCVVMSLTQAP

SEQ ID NO: 1606 - protein, 131 aa, Homo sapiens
MFILALSCCYFPTLTCASSLSPEEELRWSYPQIGHEKLEFGKQGLQHPLVSKARSLQRSLAGRSQENVEWKRALTPNFREVSALLLIFSLLVLLECMLVICIHYYDCVYHKSYKIKMDLKVLSAEAVSFVL

SEQ ID NO: 1607 - protein, 135 aa, Homo sapiens
MAFKLLILLIGTWALFFRKRRADMPRVFVFRALLLVLIFLFVVSYWLFYGVRILDSRDRNYQGIVQYAVSLVDALLFIHYLAIVLLELRQLQPMFTLQVVPLHRWRVPLLQPGTPEYPASSIGGPRKLLQRFHHL

SEQ ID NO: 1608 - protein, 255 aa, Homo sapiens
  MISC_FEATURE (227): Xaa equals any of the twenty naturally occurring L-amino acids
  MISC_FEATURE (228): Xaa equals any of the twenty naturally occurring L-amino acids
  MISC_FEATURE (233): Xaa equals any of the twenty naturally occurring L-amino acids
  MISC_FEATURE (235): Xaa equals any of the twenty naturally occurring L-amino acids
  MISC_FEATURE (238): Xaa equals any of the twenty naturally occurring L-amino acids
  MISC_FEATURE (240): Xaa equals any of the twenty naturally occurring L-amino acids
  MISC_FEATURE (245): Xaa equals any of the twenty naturally occurring L-amino acids
MAEAQSGTGQLQEQKKGLLIAVSVSVDKIISHFGAARNLVQKAQLGDSRLSPDVGHLVLTTLCPALHALVADGLKPFRKDLITGQRRSSPWSVVEASVKPGSSTRSLGTLYSQVSRLAPLSSSRSRFHAFILGLLNTKQLELWFSSLQEDAGLLSLLYLPTGFFSLARGGCPSLSTELLLLLQPLSVLTFHLDLLFEHHHHLPLGPPQAPAPPGPPPALQQTMQAMXXFGGRXGXSLXGXSKEVXSDPLIFKTSH

SEQ ID NO: 1609 - protein, 261 aa, Homo sapiens
  MISC_FEATURE (209): Xaa equals any of the twenty naturally occurring L-amino acids
  MISC_FEATURE (218): Xaa equals any of the twenty naturally occurring L-amino acids
  MISC_FEATURE (227): Xaa equals any of the twenty naturally occurring L-amino acids
  MISC_FEATURE (257): Xaa equals any of the twenty naturally occurring L-amino acids
MKLRKILEKVEAASGFTSEEKDPEEFLNILFHHILRVEPLLKIRSAGQKVQDCYFYQIFMEKNEKVGVPTIQQLLEWSFINSNLKFAEAPSCLIIQMPRFGKDFKLFKKIFPSLELNITDLLEDTPRQCRICGGLAMYECRECYDDPDISAGKIKQFCKTCNTQVHLHPKRLNHKYNPVSLPKDLPDWDWRHGCIPCQNMELFAVLCIXTSHYVAFVXYGKDDSAWXFFDSMADRDGTEKRLSSACWHKGSGGQKWXPHSL

SEQ ID NO: 1610 - protein, 238 aa, Homo sapiens
  MISC_FEATURE (38): Xaa equals any of the twenty naturally occurring L-amino acids
  MISC_FEATURE (187): Xaa equals any of the twenty naturally occurring L-amino acids
  MISC_FEATURE (227): Xaa equals any of the twenty naturally occurring L-amino acids
MPNTNGSIGHSPLSLSAQSVMEELNTAPVQESPPLAMXPGNSHGLEVGSLAEVKENPPFYGVIRWIGQPPGLNEVLAGLELEDECAGCTDGTFRGTRYFTCALKKALFVKLKSCRPDSRFASLQPVSNQIERCNSLAFGGYLSEVVEENTPPKMEKEGLEIMIGKKKGIQGHYNSCYLDSTLFCLFXFSSVLDTVLLRPKEKNDVEYYSETQELLRTEIVNPLRINXYWEQDRSNPKL

SEQ ID NO: 1611 - protein, 168 aa, Homo sapiens
  MISC_FEATURE (92): Xaa equals any of the twenty naturally occurring L-amino acids
  MISC_FEATURE (154): Xaa equals any of the twenty naturally occurring L-amino acids
  MISC_FEATURE (159): Xaa equals any of the twenty naturally occurring L-amino acids
  MISC_FEATURE (161): Xaa equals any of the twenty naturally occurring L-amino acids
MLLYIADNLACFPYQTQEEPLFIMHHIDITLSVSGSNLLQSFKESMVKDKRKERKSSPSKENESSDSEEEVSRPRKSRKRVDSDSDSDSEDXINSVMKCLPENSAPLIEFANVSQGILLLLMLKQHLKNLCGFSDSKIQKYSPSESAKVYDKAXTENQXSXFIPNQTL

SEQ ID NO: 1612 - protein, 138 aa, Homo sapiens
  MISC_FEATURE (31): Xaa equals any of the twenty naturally occurring L-amino acids
  MISC_FEATURE (107): Xaa equals any of the twenty naturally occurring L-amino acids
  MISC_FEATURE (133): Xaa equals any of the twenty naturally occurring L-amino acids
THSCRMTSSTSTAMITIYMPASLRFITANPXSSLELQMCGYLSLYIPDPQNSAKMSYVPFQTCSFSHIAYLGKWNPHPTGVLASFLIPPAPASHSHSQILPGIPCRXLANLSTSLLPLLPVPSFGLLSTLIQXITKVS

SEQ ID NO: 1613 - protein, 106 aa, Homo sapiens
  MISC_FEATURE (50): Xaa equals any of the twenty naturally occurring L-amino acids
  MISC_FEATURE (98): Xaa equals any of the twenty naturally occurring L-amino acids
  MISC_FEATURE (100): Xaa equals any of the twenty naturally occurring L-amino acids
  MISC_FEATURE (103): Xaa equals any of the twenty naturally occurring L-amino acids
MEIGIGSEAEFYARVPYPVLGWRIVASIVWSVLFLPICTTVFIIFSRIDXFHPIQWLSDSFSDLYSSYVIFYFLLLSVVIIIISIFNVEFYAVVPSIXCXRLXLIG

SEQ ID NO: 1614 - protein, 250 aa, Homo sapiens
MMVENIMNKEAFMNQEITKAFHVRKANRIKECLSKGTFSDVTFKLDDGAISAHKPLLICSCEWMAAMFGGSFVESANSEVYLPNINKISMQAVLDYLYTKQLSPNLDLDPLELIALANRFCLPHLVALAEQHAVQELTKAATSGVGIDGEVLSYLELAQFHNAHQLAAWCLHHICTNYNSVCSKFRKEIKSKSADNQEYFERHRWPPVWYLKEEDHYQRVKREREKEDIALNKHRSRRKWCFWNSSPAVA

SEQ ID NO: 1615 - protein, 218 aa, Homo sapiens
  MISC_FEATURE (72): Xaa equals any of the twenty naturally occurring L-amino acids
  MISC_FEATURE (86): Xaa equals any of the twenty naturally occurring L-amino acids
  MISC_FEATURE (89): Xaa equals any of the twenty naturally occurring L-amino acids
  MISC_FEATURE (91): Xaa equals any of the twenty naturally occurring L-amino acids
  MISC_FEATURE (216): Xaa equals any of the twenty naturally occurring L-amino acids
  MISC_FEATURE (217): Xaa equals any of the twenty naturally occurring L-amino acids
MDEASAQLLAYKEKGHSQSSQFSSDQEIAHLLPENVSALPATVAVASPHTTSATPKPATLLPTNASVTPSGXSQPQLATTAPPVTXVTXQXPTTLISTVFTRGCGYTPSNGYNRVLTTTFQAPTDSKGSLETIPFTEISNLTLNTGNVYNPTALSMSNVESSTMNKTASWEGREASPGSSSQGSVPENQYGLPFEKWLLIGSLLFGVLFLVIGLVXXG

SEQ ID NO: 1616 - protein, 253 aa, Homo sapiens
MAAARATTPADGEEPAPEAEALAAARERSSRFLSGLELVKQGAEARVFRGRFQGRAAVIKHRFPKGYRHPALEARLGRRRTVQEARALLRCRRAGISAPVVFFVDYASNCLYMEEIEGSVTVRDYIQSTMETEKTPQGLSNLAKTIGQVLARMHDEDLIHGDLTTSNMLLKPPLEQLNIVLIDFGLSFISALPEDKGVDLYVLEKAFLSTHPNTETVFEAFLKSYSTSSKKARPVLKKLDEVRLRGRKRSMVG

SEQ ID NO: 1617 - protein, 149 aa, Homo sapiens
MALDMILAKKGGVCVMIKTQCCTFIPNNTAPSGSITRALQGLTALSNELAKNSGVNDPFSGWLERWFGKWKGIIASILTSLAAVIGVVILFGCCVTPCIRGLVQRLIETVLTKTSLSSPPPYSDKLFLLEDQVEQQSQDLLKRFEEEGP

SEQ ID NO: 1618 - protein, 131 aa, Homo sapiens
  MISC_FEATURE (9): Xaa equals any of the twenty naturally occurring L-amino acids
  MISC_FEATURE (131): Xaa equals any of the twenty naturally occurring L-amino acids
MAQFDTEYXRLEASYSDSPPGEEDLLVHVAEGSKSPWHHIENLDLFFSRVYNLHQKNGFTCMLIGEIFATFLVSCVDYDILFANKMVNHSLHPTEPVKVTLPDAFLPAQVCSARIQENGSLITILVIAGVX

SEQ ID NO: 1619 - protein, 144 aa, Homo sapiens
  MISC_FEATURE (98): Xaa equals any of the twenty naturally occurring L-amino acids
  MISC_FEATURE (105): Xaa equals any of the twenty naturally occurring L-amino acids
MSAARPQFSIDDAFELSLEDGGPGPESSGVARFGPLHFERRARFEVADEDKQSRLRYQNLENDEDGAQASPEPDGGVGTSSQWSFSTISSSTQRSYNXCCSWTQXPLIQKNRRVVLASFLLLLLGLVLIWSALDLKRPPLQVSP

SEQ ID NO: 1620 - protein, 202 aa, Homo sapiens
MAAAGGTVSGPSSACKPVRSTTGAPSTTADSKLSNQVSTIVSLLSTLCRGSPVVTHDLLRSELPDSIESALQGDERCVLDTMRLVDFLLVLLFEGRKALPKSSAGSTGRIPGLRRLDSSGERSHRQLIDCIRSKDTDALIDAIDTGAFEVNFMDDVGQTLLNWASAFGTQEMVEFLCERGADVNRGQSHHHYIMLHVLEDLK

SEQ ID NO: 1621 - protein, 168 aa, Homo sapiens
MQQYNLCVYRWLSEPQITVNFESSGEGACSMSLVCSVEKAGMDMTYSWLSRGDSTYTFHEGPVLSTSWRPGDSALSYTCRANNPISNVSSCPIPDGPFYADPNYASEKPSTAFCLLAKGLLIFLLLVILAMGLWVIRVQKRHKMPRMKKLMRNRMKLRKEAKPGSSPA

SEQ ID NO: 1622 - protein, 103 aa, Homo sapiens
  MISC_FEATURE (62): Xaa equals any of the twenty naturally occurring L-amino acids
  MISC_FEATURE (67): Xaa equals any of the twenty naturally occurring L-amino acids
  MISC_FEATURE (71): Xaa equals any of the twenty naturally occurring L-amino acids
  MISC_FEATURE (102): Xaa equals any of the twenty naturally occurring L-amino acids
MPRALDLQAQLLDSGCQQTSPLDPDNHNAWILGPPSLDPRSPHSTHWIPALVFGFLFFFNLXTGSQXPSAXCQDPCISSTTPSNPKALESRFPKPLPTRFWXL

SEQ ID NO: 1623 - protein, 111 aa, Homo sapiens
  MISC_FEATURE (43): Xaa equals any of the twenty naturally occurring L-amino acids
MQHKVLLLGSKSANQSLPQEDSSTDDPGEQVQAVRSSTQDFLXHVILKNTWFRVYYGVLGLFPALASVVKLAVPFYLGDSAPSHFTHQLLIISPALLNHLFLDTLPASCIT

SEQ ID NO: 1624 - protein, 391 aa, Homo sapiens
  MISC_FEATURE (168): Xaa equals any of the twenty naturally occurring L-amino acids
  MISC_FEATURE (193): Xaa equals any of the twenty naturally occurring L-amino acids
  MISC_FEATURE (389): Xaa equals any of the twenty naturally occurring L-amino acids
MPGRIINGLKTVGVNNPVFLLDEVDKLGKSLQGDPAAALLEVLDPEQNHNFTDHYLNVAFDLSQVLFIATANTTATIPAALLDRMEIIQVPGYTQEEKIEIAHRHLIPKQLEQHGLTPQQIQIPQVTTLDIITRYTREAGVRSLDRKLGAICRAVAVKVAEGQHKEAXLDRSDVTEREGCREHILEDEKPESXSDTTDLALPPEMPILIDFHALKDILGPPMYEMEVSQRLSQPGVAIGLAWTPLGGEIMFVEASRMDGEGQLTLTGQLGDVMKESAHLAISWLRSNAKKYQLTNAFGSFDLLDNTDIHLHFPAGAVTKDGPSAGVTIVTCLASLFSGRLVRSDVAMTGEITLRGLVLPVGGIKDKVLAAHRAGLKQVIIPRRNEKDLXGI

SEQ ID NO: 1625 - protein, 248 aa, Homo sapiens
  MISC_FEATURE (18): Xaa equals any of the twenty naturally occurring L-amino acids
  MISC_FEATURE (128): Xaa equals any of the twenty naturally occurring L-amino acids
  MISC_FEATURE (201): Xaa equals any of the twenty naturally occurring L-amino acids
  MISC_FEATURE (223): Xaa equals any of the twenty naturally occurring L-amino acids
  MISC_FEATURE (228): Xaa equals any of the twenty naturally occurring L-amino acids
  MISC_FEATURE (229): Xaa equals any of the twenty naturally occurring L-amino acids
  MISC_FEATURE (231): Xaa equals any of the twenty naturally occurring L-amino acids
  MISC_FEATURE (235): Xaa equals any of the twenty naturally occurring L-amino acids
  MISC_FEATURE (245): Xaa equals any of the twenty naturally occurring L-amino acids
MYKLLLFDLLTVLAVALXIQFPRKLLCGLCPGALGRLAGTQEFQVPDEVLGLIYAQTVVWVGSFFCPLLPLLNTVKFLLLFYLKKLTLFSTCSPAARTFRASAANFFFPLVLLLGLAISSVPLLYSIXLIPPSKLCGPFRGQSSIWAQIPESISSLPETTQNFLFFLGTQAFAVPLLLISSILMAYTVALANSYGRLISEXKRQRQTEAQNKVFLARRAVALXLHQTXXFXPPQXHVPGFSRTPXAHW

SEQ ID NO: 1626 - protein, 129 aa, Homo sapiens
MNPATTLPGLMPLPAGLPNLPNLNLNLPAPHIMPGVGLPELVNPGLPPLPSMPPRNLPGIAPPLRTESATPPQSARSLFLRLWMPMLLSHLNFEPFFGIGVVYLTTGACLETQTIINFILVCTVSVGIL

SEQ ID NO: 1627 - protein, 142 aa, Homo sapiens
  MISC_FEATURE (70): Xaa equals any of the twenty naturally occurring L-amino acids
  MISC_FEATURE (139): Xaa equals any of the twenty naturally occurring L-amino acids
  MISC_FEATURE (140): Xaa equals any of the twenty naturally occurring L-amino acids
MNEQMMNIGNEEQGPDSSSWGDNYLGYSLGLGSRRAWSPYGLCLSQPSLSFLQETSHVLWALWRALALHXGAGRHCLPCPLPAAPALVCRLGPGCLLLGVWPRAPVKPWRHCVCVMGSEGLVGVSTGAAHCQSSYFLWXXWC

SEQ ID NO: 1628 - protein, 107 aa, Homo sapiens
  MISC_FEATURE (12): Xaa equals any of the twenty naturally occurring L-amino acids
MAAPSQQRLVVXSVSPQSRASLAARFQLNPTDTARKLTSFFKKIGVHFVFDTAFSRHFSLLESQREFVRRFRGQADCRQALPLLASACPGVLMVRVVGESSSSAVET

SEQ ID NO: 1629 - protein, 248 aa, Homo sapiens
  MISC_FEATURE (222): Xaa equals any of the twenty naturally occurring L-amino acids
MEAGVKLGMRSIPIATACTIYHKFFCETNLDAYDPYLIAMSSIYLAGKVEEQHLRTRDIINVSNRYFNPSGEPLELDSRFWELRDSIVQCELLMLRVLRFQVSFQHPHKYLLHYLVSLQNWLNRHSWQRTPVAVTAWALLRDSYHGALCLRFQAQHIAVAVLYLALQVYGVEVPAEVEAEKPLGGRCLMTTLPSQSLIILCLISFRFIPWTQRSPKVLAQGXPKRSPGWSAAWGHCQHVGMTGWSPQD

SEQ ID NO: 1630 - protein, 117 aa, Homo sapiens
  MISC_FEATURE (11): Xaa equals any of the twenty naturally occurring L-amino acids
  MISC_FEATURE (94): Xaa equals any of the twenty naturally occurring L-amino acids
  MISC_FEATURE (112): Xaa equals any of the twenty naturally occurring L-amino acids
MNSYFYKFMIXLLKRFSSERKLLEVRGPFIIRSALAARFLLFLPRPRLFTFTPFKCQSSHLLFPFSLLLFLTFGSVKRMEEGCPFHDWVGWMLXGHGNRTGSVLNVFCRTTXIQFFA

SEQ ID NO: 1631 - protein, 259 aa, Homo sapiens
  MISC_FEATURE (81): Xaa equals any of the twenty naturally occurring L-amino acids
  MISC_FEATURE (88): Xaa equals any of the twenty naturally occurring L-amino acids
  MISC_FEATURE (91): Xaa equals any of the twenty naturally occurring L-amino acids
MKQLIGSSNLFVMQVEMDIYTALKKWMFLQLVPSWNGSLKQLLTETDVWFSKQRKDFEGMAFLETEQGKPFVSVFRHLRLXYIISDLXSAXIIEQDAVVPSEWLSSVYKQQWFAMLRAEQDSEVGPQEINKEELEGNSMRCGRKLAKDGEYCWRWTGFNFGFDLLVTYTNRYIIFKRNTLNQPCSGSVSLQPRRSIAFRLRLASFDSSGKLICSRTTGYQILTLEKDQEQVVMNLDSRLLIFPLYICCNFLYISPEKKN

SEQ ID NO: 1632 - protein, 376 aa, Homo sapiens
  MISC_FEATURE (15): Xaa equals any of the twenty naturally occurring L-amino acids
  MISC_FEATURE (59): Xaa equals any of the twenty naturally occurring L-amino acids
  MISC_FEATURE (149): Xaa equals any of the twenty naturally occurring L-amino acids
  MISC_FEATURE (364): Xaa equals any of the twenty naturally occurring L-amino acids
MLPLSIKDDEYKPPXFNLFGKISGWFRSILSDKTSRNLFFFLCLNLSFAFVELLYGIWXNCLGLISDSFHMFFDSTAILAGLAASVISKWRDNDAFSYGYVRAEVLAGFVNGLFLIFTAFFIFSEGVERALAPPDVHHERLLLVSILGXVVNLIGIFVFKHGGHGHSHGSGHGHSHSLFNGALDQAHGHVDHCHSHEVKHGAAHSHDHAHGHGHFHSHDGPSLKETTGPSRQILQGVFLHILADTLGSIGVIASAIMMQNFGLMIADPICSILIAILIVVSVIPLLRESVGILMQRTPPLLENSLPQCYQRVQQLQGVYSLQEQHFWTLCSDVYVGTLKLIVAPDADARWILSQTHNIFTQAGXRQLYVQIDFAAM

SEQ ID NO: 1633 - protein, 132 aa, Homo sapiens
MISITEWQKIGVGITGFGIFFILFGTLLYFDSVLLAFGNLLFLTGLSLIIGLRKTFWFFFQRHKLKGTSFLLGGVVIVLLRWPLLGMFLETYGFFSLFKGFFPVAFGFLGNVCNIPFLGALFRRLQGTSSMV

SEQ ID NO: 1634 - protein, 101 aa, Homo sapiens
  MISC_FEATURE (4): Xaa equals any of the twenty naturally occurring L-amino acids
MAAXQQPSSLSYRTTGSTYLHPLSELLGIPLDQVNFVVCQLVALFAAFWFRIYLRPGTTSSDVRHAVATIFGIYFVIFCFGWYSVHLFVLVLMCYAIMGHC

SEQ ID NO: 1635 - protein, 104 aa, Homo sapiens
  MISC_FEATURE (38): Xaa equals any of the twenty naturally occurring L-amino acids
  MISC_FEATURE (41): Xaa equals any of the twenty naturally occurring L-amino acids
  MISC_FEATURE (51): Xaa equals any of the twenty naturally occurring L-amino acids
  MISC_FEATURE (62): Xaa equals any of the twenty naturally occurring L-amino acids
  MISC_FEATURE (64): Xaa equals any of the twenty naturally occurring L-amino acids
MQTSTLFFQIKIASLISIIYFKLEPQSFFNFSNCFNYXAHXIAKITKFKFXVKFILQLVKLXIXIFFPLPPLVINTLRPTEVIVLKVCDCDLHQRFEPRTKTAL

SEQ ID NO: 1636 - protein, 147 aa, Homo sapiens
  MISC_FEATURE (28): Xaa equals any of the twenty naturally occurring L-amino acids
  MISC_FEATURE (132): Xaa equals any of the twenty naturally occurring L-amino acids
  MISC_FEATURE (143): Xaa equals any of the twenty naturally occurring L-amino acids
  MISC_FEATURE (146): Xaa equals any of the twenty naturally occurring L-amino acids
MRRRRRIPESPGVSGVASRQPGGRNISXMAHSKTRTNDGKITYPPGVKEISDKISKEEMVRRLKMVVKTFMDMDQDSEEEKELYLNLALHLASDFFLKHPDKDVRLLVACCLADIFRIYAPEAPYTSPDKLXDIFMFITRQLXGLXD

SEQ ID NO: 1637 - protein, 166 aa, Homo sapiens
  MISC_FEATURE (24): Xaa equals any of the twenty naturally occurring L-amino acids
  MISC_FEATURE (73): Xaa equals any of the twenty naturally occurring L-amino acids
  MISC_FEATURE (78): Xaa equals any of the twenty naturally occurring L-amino acids
  MISC_FEATURE (159): Xaa equals any of the twenty naturally occurring L-amino acids
MVKLGCSFSGKPGKDPGDQDGAAXDSVPLISPLDISQLQPPLPDQVVIKTQTEYQLSSPDQQNFPDLEGQRLXLQPPXGRAQLPTARMIAFAMALLGCVLIMYKAIWYDQFTCPDGFLLRHKICTPLTLGDVLHGDGPRAPPQHPGGHRGYPLSRKHGXEEARRPG

SEQ ID NO: 1638 - protein, 111 aa, Homo sapiens
  MISC_FEATURE (9): Xaa equals any of the twenty naturally occurring L-amino acids
MLVQNTITXKCQYRCISSAVSRSLASPHGVRRLISPADNPGGVTVSNCCGTIASVGLHRRASAECRRHDWSSLPSMYRISAHNGLRIRFFIRSSLIVLRVVFLVKLNRIMS

SEQ ID NO: 1639 - protein, 146 aa, Homo sapiens
  MISC_FEATURE (132): Xaa equals any of the twenty naturally occurring L-amino acids
  MISC_FEATURE (136): Xaa equals any of the twenty naturally occurring L-amino acids
MTRVYYREAMGAFIVFDVTRPATFEAVAKWKNDLDSKLSLPNGKPVSVVLLANKCDQGKDVLMNNGLKMDQFCKEHGFVGWFETSAKENINIDEASRCLVKHILANECDLMESIEPDVVKPHLTSTKVASCXWLCXILVGTFAGVW

SEQ ID NO: 1640 - protein, 131 aa, Homo sapiens
  MISC_FEATURE (26): Xaa equals any of the twenty naturally occurring L-amino acids
  MISC_FEATURE (111): Xaa equals any of the twenty naturally occurring L-amino acids
  MISC_FEATURE (112): Xaa equals any of the twenty naturally occurring L-amino acids
  MISC_FEATURE (115): Xaa equals any of the twenty naturally occurring L-amino acids
MPAFIQMGRDKNFSSLHTVFCATGGXAYKFEQDFLTIGDLQLCKLDELDCLIKGILYIDSVGFNGRSQCYYFENPADSEKCQKLPFDLKNPYPLLLVNIGSGVSILAVYSXXNYXRVTGTSLGGGLFLVLL

SEQ ID NO: 1641 - protein, 291 aa, Homo sapiens
  MISC_FEATURE (121): Xaa equals any of the twenty naturally occurring L-amino acids
  MISC_FEATURE (132): Xaa equals any of the twenty naturally occurring L-amino acids
MAFLDTTGCLIPPAYEPWREHNVPEEKDEKEKLKKRRPVSVSPSSSQEISENQYAVICSEKQAKVISLPTQNCAYKQNITETSFVLRGDIVALSNSICLACFCANGHIMTFSLPSLRPLLXVYYLPLTNMRXARTFCFTNNGQALYLVSPTEIQRLTYSQETCENLQEMLGELFTPVETPEAPNRGFFKGLFGGGAQSLDREELFGESSSGKASRSLAQHIPGPGGIEGVKGAASGVVGELARARLALDERGQKLGDLEERTAAMLSSAESFSKHAHEIMLKYKDKKWYQF

SEQ ID NO: 1642 - protein, 134 aa, Homo sapiens [sequence omitted]

SEQ ID NO: 1643 - protein, 205 aa, Homo sapiens
MLTAIALFLWSASNEIIGVQSLQNGCMNRFKNALNSCDPWVQAKCYQLLLSVFQHSNRALSTPYIHSLAPIVVEKLKAVERNRPASNIELLAVQEGIKVLETLVALGEEQNRVQLLALLVPTLISYLLDENSFASASSASKDLHEFALQNLMHIGPLYPHAFKTVMGAAPELKVRLETAVRASQASKAKAAARQPAPAIHSAPTI

SEQ ID NO: 1644 - protein, 119 aa, Homo sapiens
  MISC_FEATURE (100): Xaa equals any of the twenty naturally occurring L-amino acids
MVLESVARIVKVQLPAYLKRLPVPESITGFARLTVSEWLRLLPFLGVLALLGYLAVRPFLPKKKQQKDSLINLKIQKENPKVVNEINIEDLCLTKAAYCXCWRSKTFPACDGSHNKHMN

SEQ ID NO: 1645 - protein, 318 aa, Homo sapiens
  MISC_FEATURE (110): Xaa equals any of the twenty naturally occurring L-amino acids
MFLDLDETRNLSAHKISGNFLMEFQVKNVPSERIATQKILSVLGECLDHFGPGCVGVQKILNARCPLVRFSHQASGFQCDLTTNNRIALTSSELLYIYGALDSRVRALVXSVRCWARAHSLTSSIPGAWITNFSLTMMVIFFLQRRSPPILPTLDSLKTLADAEDKCVIEGNNCTFVRDLSRIKPSQNTETLELLLKEFFEYFGNFAFDKNSINIRQGREQNKPDSSPLYIQNPFETSLNISKNVSQSQLQKFVDLARESAWILQQEDTDRPSISSNRPWGLVSLLLPSAPNRKSFTKKKSNKFAIETVKNLLGIFKR

SEQ ID NO: 1646 - protein, 446 aa, Homo sapiens
  MISC_FEATURE (326): Xaa equals any of the twenty naturally occurring L-amino acids
  MISC_FEATURE (439): Xaa equals any of the twenty naturally occurring L-amino acids
MADRGRPRTAGLAEKSPLQTIGEEQTQNPYTELLVLKAHHDIVRFLVQLDDYRFASAGDDGIVVVWNAQTGEKLLELNGHTQKITAIITFPSLESCEEKNQLILTASADRTVIVWDGDTTRQVQRISCFQSTVKCLTVLQRLDVWLSGGNDLCVWNRKLDLLCKTSHLSDTGISALVEIPKNCVVAAVGKELIIFRLVAPTEGSLEWDILEVKRLLDHQDNILSLINVNDLSFVTGSHVGELIIWDALDWTMQAYERNFWDPSPQLDTQQEIKLCQKSNDISIHHFTCDEENVFAAVGRGLYVYSLQMKRVIACQKTAHDSNVLHXARLPNRQLISCSEDGSVRIWELREKQQLAAEPVPTGFFNMWGFGRVSKQASQPVKKQQENATSCSLELIGDLIGHSSSVEMFLYFEDHGLVTCSADHLIILWKNGERESGLPXFKIISKI

SEQ ID NO: 1647 - protein, 120 aa, Homo sapiens
  MISC_FEATURE (12): Xaa equals any of the twenty naturally occurring L-amino acids
  MISC_FEATURE (13): Xaa equals any of the twenty naturally occurring L-amino acids
MGKKSRAVPGPXXILQLSPPGPRGSTPGRDPEPEPDTEPDSTAAVPSQPAPSAATTTAVTAAAASDDSPSEGKDEQEAVQEVPRVVQNPPKPVMTTRPTAVKATGMLLFCFLHFFSHVFH

SEQ ID NO: 1648 - protein, 161 aa, Homo sapiens [sequence omitted]

SEQ ID NO: 1649 - protein, 178 aa, Homo sapiens
MRNPAIQNDFSYYRRTISRNRINNMHLDIENEVNNEMANRMSLFYAEATPMLKTLSNATMHFVSENKTLPIENTTDCLSTMTSVCKVMLETPEYRSRFTSEETLMFCMRVMVGVIILYDHVHPVGAFCKTSKIDMKGCIKVLKEQAPDSVEGLLNALRFTTKHLNDESTSKQIRAMLQ

SEQ ID NO: 1650 - protein, 137 aa, Homo sapiens
  MISC_FEATURE (42): Xaa equals any of the twenty naturally occurring L-amino acids
  MISC_FEATURE (51): Xaa equals any of the twenty naturally occurring L-amino acids
  MISC_FEATURE (58): Xaa equals any of the twenty naturally occurring L-amino acids
  MISC_FEATURE (62): Xaa equals any of the twenty naturally occurring L-amino acids
  MISC_FEATURE (116): Xaa equals any of the twenty naturally occurring L-amino acids
  MISC_FEATURE (119): Xaa equals any of the twenty naturally occurring L-amino acids
  MISC_FEATURE (122): Xaa equals any of the twenty naturally occurring L-amino acids
  MISC_FEATURE (125): Xaa equals any of the twenty naturally occurring L-amino acids
MASYSGFSGLLEIRYGPGHRSCLPQFAFFPQPPLPRPRICMXVLAELLELXCPEQSLXDAIXLDLFCHALIFCRQQGFSLEQTSAACALLQDLHKACIGHIHVLRAYIKTQVNKEXEQXQGXVEXRLKASEERFSSN

SEQ ID NO: 1651 - protein, 117 aa, Homo sapiens
MLLIFETDLPFHLLIKKKKNPKGKKPTRCGSACHAAVCVTVVLLFPKEVLLSFSFFNFVNFQVLFCWKTVQRTETNGQCHHSAYWAEASVERWHRGCRGRLGFRRVGCHFTFCLAAR

SEQ ID NO: 1652 - protein, 112 aa, Homo sapiens
  MISC_FEATURE (24): Xaa equals any of the twenty naturally occurring L-amino acids
  MISC_FEATURE (40): Xaa equals any of the twenty naturally occurring L-amino acids
MCVHIYMYILCVHIYILYACIYTXYTYTLCVYIYTHCVVXYVYTLCVYTYIHCVCIYIHILCVCVYIYIYSVCVCICIYCVCIYIAGYIYTCIHIYVCVVYIYTHTHTMHTQ

SEQ ID NO: 1653 - protein, 149 aa, Homo sapiens [sequence omitted]

SEQ ID NO: 1654 - protein, 336 aa, Homo sapiens
  MISC_FEATURE (246): Xaa equals any of the twenty naturally occurring L-amino acids
  MISC_FEATURE (253): Xaa equals any of the twenty naturally occurring L-amino acids
MLQRGLWPWRTRLLPTPGTWRPARPWPLPPPPQVLRVKLCGNVKYYQSHHYSTVVPPDEITVIYRHGLPLVTLTLPSRKERCQFVVKPMLSTVGSFLQDLQNEDKGIKTAAIFTADGNMISASTLMDILLMNDFKLVINKIAYDVQCPKREKPSNEHTAEMEHMKSLVHRLFTILHLEESQKKREHHLLEKIDHLKEQLQPLEQVKAGIEAHSEAKTSGLLWAGLALLSIQGGALAWLTWWVYSWXIMEPVTXFITFANSMVFFAYFIVTRQDYTYSAVKSRQFLQFFHKKSKQQHFDVQQYNKLKEDLAKAKESLKQARHSLCLQMQVEELNEKN

SEQ ID NO: 1655 - protein, 247 aa, Homo sapiens
  MISC_FEATURE (111): Xaa equals any of the twenty naturally occurring L-amino acids
  MISC_FEATURE (122): Xaa equals any of the twenty naturally occurring L-amino acids
  MISC_FEATURE (222): Xaa equals any of the twenty naturally occurring L-amino acids
MPEEIARYYKHYVKVMGLQKNFRENTYITSVSRLYRDQDDDDIQDRDISTKHLQIEKSNFIKRNWEIRGYQRIADGSHVPFCLFAENVALATGTLDSPAHLEIEGEDFPFXFHSMPEFGAAXNKGKLRGKVDPVLIVGSGLTAADAVLCAYNSNIPVIHVFRRRVTDPSLIFKQLPKKLYPEYHKVYHMMCTQSYSVDSNLLSDYTSFPEHRVLSFKSDMKXVLQSVSGLKKIFKLSAAVSIDRFSS

SEQ ID NO: 1656 - protein, 118 aa, Homo sapiens
  MISC_FEATURE (93): Xaa equals any of the twenty naturally occurring L-amino acids
  MISC_FEATURE (99): Xaa equals any of the twenty naturally occurring L-amino acids
  MISC_FEATURE (102): Xaa equals any of the twenty naturally occurring L-amino acids
  MISC_FEATURE (104): Xaa equals any of the twenty naturally occurring L-amino acids
  MISC_FEATURE (105): Xaa equals any of the twenty naturally occurring L-amino acids
MGGNGSTCKPDTERQGTLSTAAPTTSPAPCLSNHHNKKHLILAFCAGVLLTLLLIAFIFLIIKSYRKYHSKPQAPDPHSDPPAKLSSIPGESXTYASTXFKXSXXKSNHLAENHSGRL

SEQ ID NO: 1657 - protein, 444 aa, Homo sapiens
  MISC_FEATURE (3): Xaa equals any of the twenty naturally occurring L-amino acids
  MISC_FEATURE (86): Xaa equals any of the twenty naturally occurring L-amino acids
  MISC_FEATURE (95): Xaa equals any of the twenty naturally occurring L-amino acids
  MISC_FEATURE (96): Xaa equals any of the twenty naturally occurring L-amino acids
MCXEIRAVFSRRYLLQNTALEVFMANRTSVMFNFPDQATVKKVVYSLPRVGVGTSYGLPQARRISLATPRQLYKSSNMTQRWQRRXISNFEYLMXXNTIAGRTYNDLNQYPVFPWVLTNYESEELDLTLPGNFRDLSKPIGALNPKRAVFYAERYETWEDDQSPPYHYNTHYSTATSTLSWLVRIEPFTTFFLNANDGKFDHPDRTFSSVARSWRTSQRDTSDVKELIPEFYYLPEMFVNSNGYNLGVREDEVVVNDVDLPPWAKKPEDFVRINRMALESEFVSCQLHQWIDLIFGYKQRGPEAVRALNVFHYLTYEGSVNLDSITDPVLREAMEAQIQNFGQTPSQLLIEPHPPRSSAMHLCFLPQSPLMFKDQMQQDVIMVLKFPSNSPVTHVAANTLPHLTIPAVVTVTCSRLFAVNRWHNTVGLRGAPGILLGSSPPSSH

SEQ ID NO: 1658 - protein, 104 aa, Homo sapiens
  MISC_FEATURE (31): Xaa equals any of the twenty naturally occurring L-amino acids
  MISC_FEATURE (97): Xaa equals any of the twenty naturally occurring L-amino acids
MHAGRPDLSFPLAVAASAPLSVRLIHLVACXCGLFILKCSVCQVLHCVKIPQHVHSIINGHLGSFHSLAVRNSAVMNMLAPVFCFFFIFRDRVLLCXPGWSAVV

SEQ ID NO: 1659 - protein, 107 aa, Homo sapiens
  MISC_FEATURE (102): Xaa equals any of the twenty naturally occurring L-amino acids
  MISC_FEATURE (103): Xaa equals any of the twenty naturally occurring L-amino acids
MGFVPTPEILWETNSFNSLSSRHQESLNNHGLLCLGFFFFLALFLVFVCVCVCCMHMRPRLTGGLGESASNSVNVIVNYISYLRSHCFQINSVFHEKKKKKXXCGRQ

SEQ ID NO: 1660 - protein, 155 aa, Homo sapiens
  MISC_FEATURE (91): Xaa equals any of the twenty naturally occurring L-amino acids
  MISC_FEATURE (106): Xaa equals any of the twenty naturally occurring L-amino acids
  MISC_FEATURE (131): Xaa equals any of the twenty naturally occurring L-amino acids
  MISC_FEATURE (155): Xaa equals any of the twenty naturally occurring L-amino acids
MGERTLHAAVPTPGYPESESIMMAPICLVENQEEQLTVNSKALEILDKISQPVVVVAIVGLYRTGKSYLMNRLAGKRNGFPLGSTVQSETXGHLDVVCAPLSKPNXTLVLLDTEGLGDVEKSNPKNDSWIXALAVLLSSSFVYNSVGPLTTRPGX

SEQ ID NO: 1661 - protein, 109 aa, Homo sapiens
MQSSGDLENDEQAASAISELVSTACGFRLHRGMNVPFKRLSGEPLPLPLVVVLGAGGYFQGLLGFPLLGRGKCVSPPVVFGEHTLLVTVSGQRVFVVKKQNRGREPINF

SEQ ID NO: 1662 - protein, 100 aa, Homo sapiens
MYGHIETMARASLRVQAKWMALKLSLSVYRKPCRRNYLKKQAVKRKLHRLQPRKNWPITTPLFLVHLPALATCPVKCVPSSTRRAACGLPAHYTENWRRL

SEQ ID NO: 1663 - protein, 203 aa, Homo sapiens
  MISC_FEATURE (6): Xaa equals any of the twenty naturally occurring L-amino acids
  MISC_FEATURE (29): Xaa equals any of the twenty naturally occurring L-amino acids
  MISC_FEATURE (48): Xaa equals any of the twenty naturally occurring L-amino acids
  MISC_FEATURE (60): Xaa equals any of the twenty naturally occurring L-amino acids
MHARAXASVMDICRIRLFERPPGQVHGAXGVFIADEVQVGFGRVGKHXWSFQMYGEDFVXDIVTMGKPMGNGHPVACVVTTKEIAEAFSSSGMEYFNTYGGNPVSCAVGLAVLDIIENEDLQGNAKRVGNYLTELLKKQKAKHTLIGDIRGIGLFIGIDLVKDHLKRTPATAEAQHIIYKMKEKRVLLSADGPHRNVPRPRPR

SEQ ID NO: 1664 - protein, 188 aa, Homo sapiens
MFFPLEPSAPSKLHSVTGIDTKDKSLKTVSSGAKKSFELLSESDGALMEHPEVSQVRRKTVEFNLTDMPEIPENHLKEPLEQSPTNIHTTLKDHMDPYWALENRSVLHLNQGHCIALCPTPASLALSLPFLHNFLGFHHCQSTLDLRPALAWGIYLATFTGILGKCPGPFLTSPWYHPEDFLGPGEGR

SEQ ID NO: 1665 - protein, 100 aa, Homo sapiens
  MISC_FEATURE (32): Xaa equals any of the twenty naturally occurring L-amino acids
  MISC_FEATURE (94): Xaa equals any of the twenty naturally occurring L-amino acids
MLTLSYPFCAKMDSIGKMIPQLLILWLYIALXTLKHQMELNTYLKFRLGNIGEEASKRGKHLLSGRIFSILWISLIFFYHPEGCWGNYHFATFXEVIQDF

SEQ ID NO: 1666 - protein, 154 aa, Homo sapiens
  MISC_FEATURE (103): Xaa equals any of the twenty naturally occurring L-amino acids
  MISC_FEATURE (116): Xaa equals any of the twenty naturally occurring L-amino acids
  MISC_FEATURE (130): Xaa equals any of the twenty naturally occurring L-amino acids
  MISC_FEATURE (133): Xaa equals any of the twenty naturally occurring L-amino acids
  MISC_FEATURE (137): Xaa equals any of the twenty naturally occurring L-amino acids
  MISC_FEATURE (149): Xaa equals any of the twenty naturally occurring L-amino acids
MWRQRGRVISLWERLEFVNGWYILLVTSDVLTISGTIMKIGIEAKNLASYDVCSILLGTSTLLVWVGVIRYLTFFHNYNILIATLRVALPSVMRFCCCVAVIXLGYCFCGWIVLGXYHVKPLHLHGAQPXHRXHHRXLRHHQASRRRRXRGERA

SEQ ID NO: 1667 - protein, 147 aa, Homo sapiens
  MISC_FEATURE (47): Xaa equals any of the twenty naturally occurring L-amino acids
  MISC_FEATURE (55): Xaa equals any of the twenty naturally occurring L-amino acids
  MISC_FEATURE (56): Xaa equals any of the twenty naturally occurring L-amino acids
  MISC_FEATURE (140): Xaa equals any of the twenty naturally occurring L-amino acids
  MISC_FEATURE (141): Xaa equals any of the twenty naturally occurring L-amino acids
  MISC_FEATURE (145): Xaa equals any of the twenty naturally occurring L-amino acids
MIFYANDTGAQQFEKWWDKSRTVPFYLVGLLLPLLNFKSPSFFSKFXILGTVSVXXLIFLVTFKAVRLGFHLEFHWFIPTEFFVPEIRFQFPQLTGVLTLAFFIHNCIITLLEEQQETRKTMWRGLVALAYMLVDINLTXXWESXVL

SEQ ID NO: 1668 - protein, 131 aa, Homo sapiens
MSFAESGWRSALRRRGPGTPGPVARPSYSSFTQGDSWGEGEVDEEEGCDQVARDLRAEFSAGAWSEPRKRSVLPPDGNGSPVLPDKRNGIFPAAAGSRAQPRRWPVQVLSILCSLLFAILLAFLLASLLDR

SEQ ID NO: 1669 - protein, 511 aa, Homo sapiens
MAVVSKQVNMELAKIKQKCPLYEANGQAVPKEKDEMVEQEFNRLLEATSYLSHQLDFNVLNNKPVSLGQALEVVIQLQEKHVKDEQIEHWKKIVKTQEELKELLNKMVNLKEKIKELHQQYKEASEVKPPRDITAEFLVKSKHRDLTALCKEYDELAETQGKLEEKLQELEANPPSDVYLSSRDRQILDWHFANLEFANATPLSTLSLKHWDQDDDFEFTGSHLTVRNGYSCVPVALAEGLDIKLNTAVRQVRYTASGCEVIAVNTRSTSQTFIYKCDAVLCTLPLGVLKQQPPAVQFVPPLPEWKTSAVQRMGFGNLNKVVLCFDRVFWDPSVNLFGHVGSTTASRGELFLFWNLYKAPILLALVAGEAAGIMENISDDVIVGRCLAILKGIFGSSAVPQPKETVVSRWRADPWARGSYSYVAAGSSGNDYDLMAQPITPGPSIPGAPQPIPRLFFAGEHTIRNYPATVHGALLSGLREAGRIADQFLGAMYTLPRQATPGVPAQQSPSM

SEQ ID NO: 1670 - protein, 146 aa, Homo sapiens [sequence omitted]

SEQ ID NO: 1671 - protein, 100 aa, Homo sapiens
  MISC_FEATURE (51): Xaa equals any of the twenty naturally occurring L-amino acids
  MISC_FEATURE (54): Xaa equals any of the twenty naturally occurring L-amino acids
MFCQVKEIFYISSFLYTVNYIWYLYTELRMKHTQSGQSTSPLVIDYTCRVXQMXFVFSSLIPLLLMTPVFCLGNTSECFQNFSQSHKSYLSEPRHCIRSL

SEQ ID NO: 1672 - protein, 150 aa, Homo sapiens
MKRVRTEQIQMAVSCYLKRRQYVDSDGPLKQGLRLSQTAEEMAANLTVQSESGCANIVSAAPCQAEPQQYEVQFGRLRNFLTDSDSQHSHEVMPLLYPLFVYLHLNLVQNSPKSTVESFYSRFHGMFLQNASQKDVIEQLQTLKHPDIYL

SEQ ID NO: 1673 - protein, 193 aa, Homo sapiens
  MISC_FEATURE (159): Xaa equals any of the twenty naturally occurring L-amino acids
  MISC_FEATURE (166): Xaa equals any of the twenty naturally occurring L-amino acids
  MISC_FEATURE (179): Xaa equals any of the twenty naturally occurring L-amino acids
  MISC_FEATURE (185): Xaa equals any of the twenty naturally occurring L-amino acids
  MISC_FEATURE (187): Xaa equals any of the twenty naturally occurring L-amino acids
MLESIIRGLYHLARTEVVCESLKALKKILELLTDRDVSFYFKEIVLQTRTFFEDEQDDVRLTAIFLFEDLAPLTGRRWKIFFAEEIKKSLISFLLHLWDPNPKIGVACRDVLMVCIPFLGLQELYGVLDRLLDQDLPRARDFYRQFCVKLAKKNQEILXIFTHTSXPSSPSTLGRGSGXASCQNXRXPLFLNL

SEQ ID NO: 1674 - protein, 127 aa, Homo sapiens
MDWGTLHTFIGGVNKHSTSIGKVWITVIFIFRVMILVVAAQEVWGDEQEDFVCNTLQPGCKNVCYDHFFPVSHIRLWALQLIFVSTPALLVAMHVAYYRHETTRKFRRGEKRNDFKDIEDIKSRRFG

SEQ ID NO: 1675 - protein, 162 aa, Homo sapiens
  MISC_FEATURE (112): Xaa equals any of the twenty naturally occurring L-amino acids
  MISC_FEATURE (114): Xaa equals any of the twenty naturally occurring L-amino acids
  MISC_FEATURE (128): Xaa equals any of the twenty naturally occurring L-amino acids
  MISC_FEATURE (136): Xaa equals any of the twenty naturally occurring L-amino acids
  MISC_FEATURE (141): Xaa equals any of the twenty naturally occurring L-amino acids
  MISC_FEATURE (150): Xaa equals any of the twenty naturally occurring L-amino acids
MCNVMMQLRKMANHPLLHRQYYTAEKLKEMSQLMLKEPTHCEANPDLIFEDMEVMTDFELHVLCKQYRHINNFQLDMDLILDSGKFRVLGCILSELKQKGDRVVLFSQFTMXLXILEVLLKHHQHRYXRLDGKTQXSEGIXLIDEFNTDXYLWFLLSQKLVD

SEQ ID NO: 1676 - protein, 131 aa, Homo sapiens
  MISC_FEATURE (40): Xaa equals any of the twenty naturally occurring L-amino acids
  MISC_FEATURE (76): Xaa equals any of the twenty naturally occurring L-amino acids
  MISC_FEATURE (81): Xaa equals any of the twenty naturally occurring L-amino acids
  MISC_FEATURE (87): Xaa equals any of the twenty naturally occurring L-amino acids
  MISC_FEATURE (89): Xaa equals any of the twenty naturally occurring L-amino acids
MPNNIEKNFSRVGTLVVLISVTILYAGINFSCWSALQLRXADRDLVDKGQNWGHMGLHYSVKLVENVIMVLVFKFXGVKVXLNYCHXLXALQLIIAYLISIGFMLLFFQYLHPLRSLFTHNVVDYLHCVCC

SEQ ID NO: 1677 - protein, 143 aa, Homo sapiens
  MISC_FEATURE (26): Xaa equals any of the twenty naturally occurring L-amino acids
  MISC_FEATURE (82): Xaa equals any of the twenty naturally occurring L-amino acids
MMNRTTPDQELVPASEPVWERPWSVXEIRRSSQSWSLAADAGLLQFLQEFSQQTISRTHEIKKQVDGLIRETKATDCRLHNXFNDFLMLSNTQFIENVSYLSYIIIPFLGVGDIVILNNLLLGSLLNFGGSVVLGNCSFFLWD

SEQ ID NO: 1678 - protein, 107 aa, Homo sapiens
MKRETIFIFLDSLFHNFSFHASIYITLNFLSPQIKILFCPANKKTIPYCLNVIQSSLYYSTLCFFLFHFVKNSMLVLLDDCLFMCNINPTYSNDNFFNPSGSYIIFP

SEQ ID NO: 1679 - protein, 205 aa, Homo sapiens
  MISC_FEATURE (54): Xaa equals any of the twenty naturally occurring L-amino acids
  MISC_FEATURE (101): Xaa equals any of the twenty naturally occurring L-amino acids
  MISC_FEATURE (163): Xaa equals any of the twenty naturally occurring L-amino acids
MLLPWQTVRLIHMMRVLLIKLVAPFIIFRAPRRIAVFADKRQRQSPVVAVIKMXFSRRCVFRLHLSGQLLHRQPALRKPRPAFTAHAVCPDFFLQPVQQPXQFSREHHAVAVLTPFLLERLCQAAPLRFFPLAVLCLDRMNGVNFPARIPSGYCGVSLHRLQXVSVHPYHVTPVYRKRNPPRQVTLPPPKPFCHSPPNRVLKGSG

SEQ ID NO: 1680 - protein, 104 aa, Homo sapiens
MVVSHYARPDLPLLMVISCESFFLPLHSFYSVYSPMPHPKSCTVNWPVKGTPTFKQGRQDTTGRRLIAQTLDCSGWDQILAPLLASCVALGKLLNLSGPQFLPL

SEQ ID NO: 1681 - protein, 126 aa, Homo sapiens
  MISC_FEATURE (55): Xaa equals any of the twenty naturally occurring L-amino acids
MILLLIVLHTSYMIYSLAPQYVMYGSQNYLIETNITSDNHKGNSTLSVPKRCDAXAPEDQCTVTRTYLFLHKFWFFSAAYYFGNWAFLGVFLIGLIVSCCKGKKSVIEGVDEDSDISDDEPSVYSA

SEQ ID NO: 1682 - protein, 118 aa, Homo sapiens
  MISC_FEATURE (105): Xaa equals any of the twenty naturally occurring L-amino acids
MEEKYGGDVLAGPGGGGGLGPVDVPSARLTKYIVLLCFTKFLKAVGLFESYDLLKAVHIVQFIFILKLGTAFFMVLFQKPFSSGKTITKHQIIGSLKIPGRKEFXDKKLNDPRKLVGN

SEQ ID NO: 1683 - protein, 261 aa, Homo sapiens
  MISC_FEATURE (110): Xaa equals any of the twenty naturally occurring L-amino acids
  MISC_FEATURE (241): Xaa equals any of the twenty naturally occurring L-amino acids
MLTPYVARKLAVASVTEILKMLNSNTESPYLIWNNSTRAELLEFLESQQENMIKKGDCDKTYGSEFVYSDHAKELIVGEIFVRVYNEVPTFQLEVPKAFAASLLDYIGSXAQYLHTFMAITHAAKVESEQHGDRLPRVEMALEALRNVIKYNPGSESECIGHFKLIFSLLRVHGAGQVQQLALEVVNIVTSNQDCVNNIAESMGFVQFIGSSTFIAIKSVSLVLGNSLCFGHPSTKINQRXNGKGCFDSIYWICSAIQHIH

SEQ ID NO: 1684 - protein, 103 aa, Homo sapiens
MPPPQPMELLWLSSLSRTVEKGRWGPSPNSTASSAVCPQPRRAGKASGLLHLVLVTPGVCVQITTSLFGSLLRSRFPDGSITALSYQAAVFHSWWSQPGKLLS

SEQ ID NO: 1685 - protein, 270 aa, Homo sapiens
  MISC_FEATURE (64): Xaa equals any of the twenty naturally occurring L-amino acids
  MISC_FEATURE (219): Xaa equals any of the twenty naturally occurring L-amino acids
  MISC_FEATURE (261): Xaa equals any of the twenty naturally occurring L-amino acids
  MISC_FEATURE (263): Xaa equals any of the twenty naturally occurring L-amino acids
  MISC_FEATURE (266): Xaa equals any of the twenty naturally occurring L-amino acids
MWRKSYRLPDYNPRYKIDGSLEVPLERAKDQLEKHTRYWPMIISQTTIFNMQAVVPLASVIVKXSLTEEDVLNCQKTIYNLVDMERKNDPLPISTVGTRGKGPKRDEQYRIMWNELETLVRAHINNSEKHQRVLECLMACRSKPPEEEERKKRGRKREDKEDKSEKAVKDYEQEKSWQDSERLKGILERGKEELAEAEIIKDSPDSPEPPNKKPLVEMXETPQVEKSKGPVSLLSLWSNRSILPIPENIRDLLDVLNSVNXQXLNXIQHL

SEQ ID NO: 1686 - protein, 197 aa, Homo sapiens
MESVFDYSINSVHDEKMEEQTEILQNGFNPEEDKCNNCDQELNKKPQDETKESTSCPVVQKRAALLNAILHSAYSETFLLPHLKDIPAQHITLFLKYLYFLYLKCSENATMTLPGIHPPTLNQIMDWICLLLDANFTVVVMMPEAKRLLINLYKLVKSQISVYSELNKIEVSFRELQKLNQEKNNRGLYSIEVLELF

SEQ ID NO: 1687 - protein, 339 aa, Homo sapiens
  MISC_FEATURE (142): Xaa equals any of the twenty naturally occurring L-amino acids
MLHGKSLTVIPYKCEVSSLAGALGKLKHSQDPGTHVVSHFVNWETPQGCGLGFQNSEQSRRILRRRKIEVSLQPEVPPSKQLLSTIMKDSEKHIEVEVRKFLALKQTPDFHTVIGDTVTGLLERCKAEPSFYPRNCLMQLIXTHVLSYSLCPDLMEIALKKKDVQLLQLCLQQFPDIPESVTCACLKIFLSIGDDSLQETDVNMESVFDYSINSVHDEKMEEQTEILQNGFNPEEDKCNNCDQELNKKPQDETKESTSCPVVQKRAALLNAILHSAYSETFLLPHLKDIPAQHITLFLKYLYFLYLKSSLILLLAPISNPLANLVDPTFTIYLKLTTSF

SEQ ID NO: 1688 - protein, 121 aa, Homo sapiens
MKTISVVGIELCPPGKRFMITMVASFVAMAGQFLMPGLAALCRDWQVLQALIICPFLLMLLYWSIFPESLRWLMATQQFESAKRLILHFTQKNRMNPEGDIKGVIPELEKELSRRPKKSAS

SEQ ID NO: 1689 - protein, 241 aa, Homo sapiens
  MISC_FEATURE (144): Xaa equals any of the twenty naturally occurring L-amino acids
MFYSGLLTEGGRKETDMREAASLRQQRRMKQAVQFIHKDSADLLPLDGLKKLGSSKDMQPHNILQRRLMETNLSKLRSGPRVPWASKTNKLNQAKSEGLKKSEEDDMILVSCQCAGKDVKALVDTGCLYNLISLACVDRLGLKXHVKSHKHEGEKLSLPRHLKVVGQIEHLVITLGSLRLDCPAAVVDDNEKNLSLGLQTLRSLKCIINLDKHRLIMGKTDKEEIPFVETVSLNEDNTSEA

SEQ ID NO: 1690 - protein, 118 aa, Homo sapiens
  MISC_FEATURE (83): Xaa equals any of the twenty naturally occurring L-amino acids
  MISC_FEATURE (103): Xaa equals any of the twenty naturally occurring L-amino acids
  MISC_FEATURE (104): Xaa equals any of the twenty naturally occurring L-amino acids
MRLSTRTVPRVSIIYRHLSSICTPKVSFLGWHAGKFICRSRRVVKCACGHANTSFCFTGSLLPPNGGFDTVTIYLVSCCIYVXVCHISLTKVFDITSLVILSXXMGTLKECTYDYKSC

SEQ ID NO: 1691 - protein, 102 aa, Homo sapiens
MWTEIFIFCLRIYEVYHIRGLKQGVYFVILKLFCIWTNTKYPSGLFFFFLNLCIHLILLRIPSKQKNLLCHLHYSNYRLKKYGQFLKKFRLCFPWKDKSDCS

SEQ ID NO: 1692 - protein, 557 aa, Homo sapiens
  MISC_FEATURE (472): Xaa equals any of the twenty naturally occurring L-amino acids
MERLEKVNSFQEFVQIFSQFGNEMVEFAHLSGDRQNDLKDEKKKAKMAAARAVLEKCTMMLLTASKTCLRHPNCESAHKNKEGVFDRMKVALDKVIEIVTDCKPNGETDISSISIFTGIKEFKMNIEALRENLYFQSKENLSVTLEVILERMEDFTDSAYTSHEHRERILELSTQARMELQQLISVWIQAQSKKTKSIAEELELSILKISHSLNELKKELHSTATQLAADLLKYHADHVVLKALKLTGVEGNLEALAEYACKLSEQKEQLVETCRLLRHISGTEPLEITCIHAEETFQVTGQQIISAAETLTLHPSSKIAKENLDVFCEAWESQISDMSTLLREINDVFEGRRGEKYGYLSLPKPMKNNANLKSLKPDKPDSEEQAKIAKLGLKLGLLTSDADCEIEKWEDQENEIVQYGRNMSSMAYSLYLFTRGEGPLKTSQDLIHQLEVFAAEGLKLTSSVQAFSKQLXDDDKLMLLLEINKLIPLCHQLQTVTKTSLQNKVFLKVDKCITKTRSMMALLVQLLSLCYKLLKKLQMENNGWVSVTNKDTMDSKT

SEQ ID NO: 1693 - protein, 141 aa, Homo sapiens
  MISC_FEATURE (131): Xaa equals any of the twenty naturally occurring L-amino acids
  MISC_FEATURE (137): Xaa equals any of the twenty naturally occurring L-amino acids
  MISC_FEATURE (139): Xaa equals any of the twenty naturally occurring L-amino acids
MTEQEKTSAVVEETREAVDTTSQPVATEKKSKNNTALILSAVAIAIALAAGIGLYGWGKQQAVNQTATSDALANQLTALQKAQESQKAELEGIIKQQAAQLKQANRQQETLAKQLDEVQQKVATIFRSDAXTCCWLXPXFW

SEQ ID NO: 1694 - protein, 140 aa, Homo sapiens
  MISC_FEATURE (22): Xaa equals any of the twenty naturally occurring L-amino acids
  MISC_FEATURE (115): Xaa equals any of the twenty naturally occurring L-amino acids
  MISC_FEATURE (129): Xaa equals any of the twenty naturally occurring L-amino acids
MREERWSCRGSGPPRAWADERXREPRPRVLRVRGDGASEEMEQKLVEEILQAITMSTDTGVSLPSYEEDQGSKLIRKAKEAPFVPVGIAGFAAIVAYGLYKLKSRGNTKMSIHLXHMRVAAQGFVVGAXLWYGLFQYSGF

SEQ ID NO: 1695 - protein, 140 aa, Homo sapiens
  MISC_FEATURE (66): Xaa equals any of the twenty naturally occurring L-amino acids
MNGGEAGDVETVSQGSDLDDSVDDCMGCRYPSWAFLFLLGLYISSLASCMGGLYGAPRILQCIAQXKVIPALACLGQGKGPNKTPVAAICLTSLVTMAFVFVGQVNVLAPIVTINFMLTYVAVDYSYFSLSMCSCSLTPV

SEQ ID NO: 1696 - protein, 311 aa, Homo sapiens [sequence omitted]

SEQ ID NO: 1697 - protein, 224 aa, Homo sapiens
  MISC_FEATURE (59): Xaa equals any of the twenty naturally occurring L-amino acids
MDMYAWTQEQAVLYNGIILAALGVEAVVIFLGVKLLSKKIGERAILLGGLIVVWVGFFXLLPWGNQFPKIQWEDLHNNSIPNTTFGEIIIGLWKSPMEDDNERPTGCSIEQAWCLYTPVIHLAQFLTSAVLIGLGYPVCNLMSYTLYSKILGPKPQGVYMGWLTASGSGARILGPMFISQVYAHWGPRWAFSLVCGIIVLTITLLGVVYKRLIALSVRYGRIQE

SEQ ID NO: 1698 - protein, 104 aa, Homo sapiens
MVKIAFNTPTAVQKEEARQDVEALLSRTVRTQILTGKSTIYRGEMCFFDSEDPANSLRGGEPNFLPVTEEADIREDDNIAIIDVPVPISLIVTLQQLFMTLKRE

SEQ ID NO: 1699 - protein, 108 aa, Homo sapiens
MAEMVDFFILFFIKATIVLSIMHLSGIKDISKFAMHYIIEEIDEDTSMEDLQKMMVVALIYRLLVCFYEIICIWGAGGATPGKFLLGLRVVTCDTSVLIAPSRVFSDS

SEQ ID NO: 1700 - protein, 176 aa, Homo sapiens
  MISC_FEATURE (97): Xaa equals any of the twenty naturally occurring L-amino acids
  MISC_FEATURE (127): Xaa equals any of the twenty naturally occurring L-amino acids
MELPVLLLHQLSKFDPSYQMTTDEQQIINSFYTVFREEYTAIEDLFSAINKTEAVRCEYEDTHKAFAKAFWRMDRLLGLGRKEVSRVQWSGCSAVTXILEGKPKSPYAHKNWKRKNTHDGLAESSPXQEMPKIISGILHVANTDVILGVICHICKMSILSHNPSQLCQHFPSKLQT

SEQ ID NO: 1701 - protein, 147 aa, Homo sapiens
MNSLLHFGILLELGVSWKQFKSVYVPGNHTHQASYKPLLKQVVEEIFHPERPDSVDIEHMSSGLTDLLKTGFSMFMKVSRPHPSDYPLLILFVVGGVTVSEVKMVKDLVASLKPGTQVIVLSTRLLKPLNIPELLFATDRLHPDLGF

SEQ ID NO: 1702 - protein, 100 aa, Homo sapiens
  MISC_FEATURE (48): Xaa equals any of the twenty naturally occurring L-amino acids
MGSITCIAWKGDTLVLGDMDGNLNFWDLKGRVSRYKPRMNLVISLKKXNEIFLFCFVLFCFVEMVSCSVAQAGVQWCNLGSLQALTPGFMPFSCFSYLGN

SEQ ID NO: 1703 - protein, 116 aa, Homo sapiens
  MISC_FEATURE (56): Xaa equals any of the twenty naturally occurring L-amino acids
MNQTDKNQQEIPSYLNDEPPEGSMKDHPQQQPGMLSRVTGGIFSVTKGAVGATIGXVAWIGGKSLEVTKTAVTTVPSMGIGLVKGGVSAVAGGVTAVGSAVVNKVPLTGKKKDKSD

SEQ ID NO: 1704 - protein, 308 aa, Homo sapiens
  MISC_FEATURE (81): Xaa equals any of the twenty naturally occurring L-amino acids
  MISC_FEATURE (178): Xaa equals any of the twenty naturally occurring L-amino acids
  MISC_FEATURE (195): Xaa equals any of the twenty naturally occurring L-amino acids
  MISC_FEATURE (241): Xaa equals any of the twenty naturally occurring L-amino acids
  MISC_FEATURE (291): Xaa equals any of the twenty naturally occurring L-amino acids
MAKREILSAAEHFSMIRASRNKNGPALGGLSCSPNLPGQTTVQVRVPYRVVGLVVGPKGATIKRIQQQTHTYIVTPSRDKXPVFEVTGMPENVDRAREEIEMHIAMRTGNYIELNEENDFHYNGTDVSFEGGTLGSAWLSSNPVPPSRARMISNYRNDSSSSLGSGSTDSYFGSNRLXDFSPTSPFSTGNFWFGXTLPSVGSEDLAVDSPAFDSLPTSAQTIWTPFEPVNPLSGFGSDPSXNMKTQRRGSQPSTPRLSPTFPESIEHPLARRVRSDPPSTGNHVGLPIYIXAFLMVPIVTPLPMVVPL

SEQ ID NO: 1705 - protein, 132 aa, Homo sapiens
  MISC_FEATURE (105): Xaa equals any of the twenty naturally occurring L-amino acids
  MISC_FEATURE (119): Xaa equals any of the twenty naturally occurring L-amino acids
  MISC_FEATURE (122): Xaa equals any of the twenty naturally occurring L-amino acids
MSEVRLPPLRALDDFVLGSARLAAPDPCDPQRWCHRVINNLLYYQTNYLLCFGIGLALAGYVRPLHTLLSALVVAVALGVLVWAAETRALCAAAAAATLQPAWPXCLPSASWCSGSRAXLAXSCSASPGRCF

SEQ ID NO: 1706 - protein, 177 aa, Homo sapiens
  MISC_FEATURE (140): Xaa equals any of the twenty naturally occurring L-amino acids
  MISC_FEATURE (141): Xaa equals any of the twenty naturally occurring L-amino acids
  MISC_FEATURE (155): Xaa equals any of the twenty naturally occurring L-amino acids
MASKVTDAIVWYQKKIGAYDQQIWEKSVEQREIKGLRNKPKKTAHVKPDLIDVDLVRGSAFAKAKPESPWTSLTRKGIVRVVFFPFFFRWWLQVTSKVIFFWLLVLYLLQVAAIVLFCSTSSPHSIPLTEVIGPDMAGCXXWGTGALARIGFHKXHPKTLLLSTRGGLKKERKGKIK

SEQ ID NO: 1707 - protein, 168 aa, Homo sapiens
  MISC_FEATURE (12): Xaa equals any of the twenty naturally occurring L-amino acids
  MISC_FEATURE (13): Xaa equals any of the twenty naturally occurring L-amino acids
  MISC_FEATURE (31): Xaa equals any of the twenty naturally occurring L-amino acids
MFPLISSHHLWXXWASEDSLSEPASADPAAXQHMHIKVGDRAELRRAFTQTDVATFSELTGDVNPLHLNEDFAKHTKFGNTIVHGVLINGLISALLGTKMPGPGCVFLSQEISFPAPLYIGEVVLASAEVKKLKRFIAIIAVSCSVIESKKTVMEGWVKVMVPEASKS

SEQ ID NO: 1708 - protein, 372 aa, Homo sapiens
MRYAVYWDELASEVRRCTWFYKGDKDNKYVPYSESFSQVLEETYMLAVTLDEWKKKLESPNREIIILHNPKLMVHYQPVAGSDDWGSTPTEQGRPRTVKRGVENISVDIHCGEPLQIDHLVFVVHGIGPACDLRFRSIVQCVNDFRSVSLNLLQTHFKKAQENQQIGRVEFLPVNWHSPLHSTGVDVDLQRITLPSINRLRHFTNDTILDVFFYNSPTYCQTIVDTVASEMNRIYTLFLQRNPDFKGGVSIAGHSLGSLILFDILTNQKDSLGDIDSEKDSLNIVMDQGDTPTLEEDLKKLQLSEFFDIFEKEKVDKEALALCTDRDLQEIGIPLGPRKKILNYFQHPEKTPMGIKRPARSLLPGATIPKES

SEQ ID NO: 1709 - protein, 362 aa, Homo sapiens
  MISC_FEATURE (54): Xaa equals any of the twenty naturally occurring L-amino acids
  MISC_FEATURE (193): Xaa equals any of the twenty naturally occurring L-amino acids
MDLLKQEAEHGALKVLYLSKYVLNMMALLCAPVRDEAVQKLENITDPVWLLRGXFQVLGRMKMDMVNYTIQSLQPHLQEHSIQYERAKFQELLNKQPSLLNHTTKWLTQAAGDLTMSPPTCPDTSDSSSVAGPSPNEAANNPEPLSPTMVLCQGFLNLLLWDLENEEFPETLLMDRTRLQELKSQLHQLTVMXSVLLVASSFSGSVLFGSPQFVDKLKRITKSLLEDFHSRPEEAILTVSEQVSQEIHQSLKNMGLVALSSDNTASLMGQLQNIAKKENCVCSVIDQRIHLFLKCCLVLGVQRSLLDLPGGLTLIEAELAELGQKFVNLTHHNQQVFGPYYTEILKTLISPAQALETKVESV

SEQ ID NO: 1710 - protein, 338 aa, Homo sapiens
  MISC_FEATURE (309): Xaa equals any of the twenty naturally occurring L-amino acids
MELWGRMLWALLSGPGRRGSTRGWAFSSWQPQPPLAGLSSAIELVSHWTGVFEKRGIPEARESSEYIVAHVLGAKTFQSLRPALWTQPLTSQQLQCIRELSSRRLQRMPVQYILGEWDFQGLSLRMVPPVFIPRPETEELVEWVLEEVAQRSHAVGSPGSPLILEVGCGSGAISLSLLSQLPQSRVIAVDKREAAISLTHENAQRLRLQDRIWIIHLDMTSERSWTHLPWGPMDLIVSNPPYVFHQDMEQLAPEIRSYEDPAALDGGEEGMDIITHILALAPRLLKDSGSIFLEVDPRHPELVSSWLQXRPDLYLNLVAVRRDFCGRPRFLHIRRSGP

SEQ ID NO: 1711 - protein, 110 aa, Homo sapiens
  MISC_FEATURE (60): Xaa equals any of the twenty naturally occurring L-amino acids
MMCAVLSRNTFIIIIKYCVLYRMMCAVLSRNTFIIIIKYCVLYRMVCAVLSRNTFIIIIXYCVLYRMVCAVLSRNTFIIIIKYCVLYRMVCAVLLCKWQHSSFTRASLDT

SEQ ID NO: 1712 - protein, 563 aa, Homo sapiens
MKSVKIAFAVTLETVLAGHENWVNAVHWQPVFYKDGVLQQPVRLLSASMDKTMILWAPDEESGVWLEQVRVGEVGGNTLGFYDCQFNEDGSMIIAHAFHGALHLWKQNTVNPREWTPEIVISGHFDGVQDLVWDPEGEFIITVGTDQTTRLFAPWKRKDQSQVTWHEIARPQIHGYDLKCLAMINRFQFVSGADEKVLRVFSAPRNFVENFCAITGQSLNHVLCNQDSDLPEGATVPALGLSNKAVFQGDIASQPSDEEELLTSTGFEYQQVAFQPSILTEPPTEDHLLQNTLWPEVQKLYGHGYEIFCVTCNSSKTLLASACKAAKKEHAAIILWNTTSWKQVQNLVFHSLTVTQMAFSPNEKFLLAVSRDRTWSLWKKQDTISPEFEPVFSLFAFTNKITSVHSRIIWSCDWSPDSKYFFTGSRDKKVVVWGECDSTDDCIEHNIGPCSSVLDVGGAVTAVSVCPVLHPSQRYVVAVGLECGKICLYTWKKTDQVPEINDWTHCVETSQSQSHTLAIRKLCWKNCSGKTEQKEAEGAEWLHFASCGEDHTVKIHRVNKCAL

SEQ ID NO: 1713 - protein, 373 aa, Homo sapiens
  MISC_FEATURE (62): Xaa equals any of the twenty naturally occurring L-amino acids
  MISC_FEATURE (72): Xaa equals any of the twenty naturally occurring L-amino acids
  MISC_FEATURE (74): Xaa equals any of the twenty naturally occurring L-amino acids
MASELCKTISVARLEKHKNLFLNYRNLHHFPLELLKDEGLQYLERLYMKRNSLTSLPENLAXEASKPCGTVXLXLRYLHSNNIVVVPEAIGSLVKLQCLDLSDNALEIVCPEIGRLRALRHLRLANNQLQFLPPEVGDLKELQTLDISTNRLLTLPERLHMCLSLQYLTVDRNRLWYVPRHLCQLPSLNELSMAGNRLAFLPLDLGRSRELQYVYVDNNIHLKGLPSYLYNKVIGCSGCGAPIQVSEVKLLSFSSGQRTVFLPAEVKAIGTEHDHVLPLQELAMRGLYHTYHSLLKDLNFLSPISLPRSLLELLHCPLGHCHRCSEPMFTIVYPKLFPLRETPMAGLHQWKTTVSFVAYCCSTQCLQTFDLLS

SEQ ID NO: 1714 - protein, 152 aa, Homo sapiens
  MISC_FEATURE (2): Xaa equals any of the twenty naturally occurring L-amino acids
  MISC_FEATURE (22): Xaa equals any of the twenty naturally occurring L-amino acids
  MISC_FEATURE (25): Xaa equals any of the twenty naturally occurring L-amino acids
  MISC_FEATURE (90): Xaa equals any of the twenty naturally occurring L-amino acids
  MISC_FEATURE (125): Xaa equals any of the twenty naturally occurring L-amino acids
  MISC_FEATURE (151): Xaa equals any of the twenty naturally occurring L-amino acids
MXGQTGHGGSTEPAPHVHPGTXGPXLHGKTPLSSPLGSATTRRISRKHQRPGSSDPYSGGLSPWEGTPEAASAPSPVPRTACRCLVAGLXSERDCSGWLDLQGTLHPSCQALGQQHPLVAILCLXPGGLPIGLLGGAGRASIAQNCPKALXR

SEQ ID NO: 1715 - protein, 170 aa, Homo sapiens
  MISC_FEATURE (122): Xaa equals any of the twenty naturally occurring L-amino acids
  MISC_FEATURE (144): Xaa equals any of the twenty naturally occurring L-amino acids
  MISC_FEATURE (164): Xaa equals any of the twenty naturally occurring L-amino acids
MFKNTMALMDLDVKKMPLGKLSKQQIARGFEALEALEEALKGPTDGGQSLEELSSHFYTVIPHNFGHSQPPPINSPELLQAKKDMLLVLADIELAQALQAVSEQEKTVEEVPHPLDRDYQLXKCQLQLLDSGAPEYKVIQDLLXTDWQQPQVPYTSTHLESKPXRGGRQI

SEQ ID NO: 1716 - protein, 168 aa, Homo sapiens
  MISC_FEATURE (124): Xaa equals any of the twenty naturally occurring L-amino acids
  MISC_FEATURE (153): Xaa equals any of the twenty naturally occurring L-amino acids
  MISC_FEATURE (166): Xaa equals any of the twenty naturally occurring L-amino acids
MALDPYTELRKQPLRKYVTPSDFDQLKQFLTFDKQVLRFYAIWDDTDSMYGECRTYIIHYYLMDDTVEIREVHERNDGRDPFPLLMNRQRVPKVLVENAKELPSVCARNLWTKEVLGMGILLKXFIVGEVTHYSLGELSSIYGLWIPFYSDGXLPKGKVWDSLDFXPG

SEQ ID NO: 1717 - protein, 334 aa, Homo sapiens
  MISC_FEATURE (264): Xaa equals any of the twenty naturally occurring L-amino acids
  MISC_FEATURE (277): Xaa equals any of the twenty naturally occurring L-amino acids
  MISC_FEATURE (309): Xaa equals any of the twenty naturally occurring L-amino acids
MAAVGRVGSFGSSPPGLSSTYTGGPLGNEIASGNGGAAAGDDEDGQNLWSCILSEVSTRSRSKLPAGKNVLLLGEDGAGKTSLIRKIQGIEEYKKGRGLEYLYLNVHDEDRDDQTRCNVWILDGDLYHKGLLKFSLDAVSLKDTLVMLVVDMSKPWTALDSLQKWASVVREHVDKLKIPPEEMKQMEQKLIRDFQEYVEPGEDFPASPQRRNTASQEDKDDSVVLPLGADTLTHNLGIPVLVVCTKCDAISVLEKEHDYRDEHXDFIQSHIRKFCLXYGAALIYTSVKENKNIDLVYKYIVQKLYGFPXKIPAVVVEKDAVFIPAGWDNGKKIG

SEQ ID NO: 1718 - protein, 255 aa, Homo sapiens
  MISC_FEATURE (7): Xaa equals any of the twenty naturally occurring L-amino acids
  MISC_FEATURE (17): Xaa equals any of the twenty naturally occurring L-amino acids
  MISC_FEATURE (165): Xaa equals any of the twenty naturally occurring L-amino acids
  MISC_FEATURE (246): Xaa equals any of the twenty naturally occurring L-amino acids
MVPSLAXFDDATLGFLXPSGPGSLKDRVLQMQRDIRGARPEPRFGSVVRRAANVSLGVLLAWLSVPVVLNLLSSRQVMNTHFNSLHIVNTYGAFGSITKERAEVILQGTASSNASAPDAMWEDYEFKCKPGDPSRRPCLISPYHYRLDWLMWFAAFQTYEHNDWXIHLAGKLLASDAEALSLLAHNPFAGRPPPRWVRGGALQVQVQPSWGQARRRGQVVGAEEGSEPYFPPFSLGGAEGPYFKDXGWAFCPGPF

SEQ ID NO: 1719 - protein, 102 aa, Homo sapiens
  MISC_FEATURE (100): Xaa equals any of the twenty naturally occurring L-amino acids
MGNASFGSKEQKLLKRLRLLPALLILRAFKPHRKIRDYRVVVVGTAGVGKSTLLHKWASGNFRHEYLPTIENTYCQLLGLAATVLLFPGTFTEQARVGRXAN

SEQ ID NO: 1720 - protein, 313 aa, Homo sapiens
  MISC_FEATURE (251): Xaa equals any of the twenty naturally occurring L-amino acids
  MISC_FEATURE (268): Xaa equals any of the twenty naturally occurring L-amino acids
  MISC_FEATURE (288): Xaa equals any of the twenty naturally occurring L-amino acids
  MISC_FEATURE (304): Xaa equals any of the twenty naturally occurring L-amino acids
  MISC_FEATURE (312): Xaa equals any of the twenty naturally occurring L-amino acids
MALYSIIQYFSVTLLYSILSNLGDFQFLFIDLAIILVVVFTMSLNPAWKELVAQRPPSGLISGALLFSVLSQIIICIGFQSLGFFWVKQQPWYEVWHPKSDACNTTGSGFWNSSHVDNETELDEHNIQNYENTTVFFISSFQYLIVAIAFSKGKPFRQPCYKNYFFVFSVIFLYIFILFIMLYPVASVDQVLQIVCVPYQWRVTMLIIVLVNAFVSITVENFFLDMVLWKVVFNRDKQGEYRFSTTQPPQXSVDRWGKCCLPWALGCXKKTPKAKYMYLAQELLVDPXWPPKPQTTTEAKALVXENGSCQIXP

SEQ ID NO: 1721 - protein, 119 aa, Homo sapiens
  MISC_FEATURE (108): Xaa equals any of the twenty naturally occurring L-amino acids
  MISC_FEATURE (116): Xaa equals any of the twenty naturally occurring L-amino acids
MVSVGGRLWCGCQNRVLVLSPDTLQLEHMFYVGQDSSRCVACMVDSSLGVWVTLKGSAHVCLYHPDTFEQLAEVDVTPPVHRMLASSDAIIRQHKAACLRITALLVCXELLWVGTXAGV

SEQ ID NO: 1722 - protein, 116 aa, Homo sapiens
  MISC_FEATURE (48): Xaa equals any of the twenty naturally occurring L-amino acids
  MISC_FEATURE (113): Xaa equals any of the twenty naturally occurring L-amino acids
MGGLERIYHSWCEGYSTCRNGGHRSGPRIGVVKVARVPLKYLNTLCCXVTVEPCIMCATALRLMKIPLVVYGCQNERFGGCGSVLNIASADLPNTGRPFQCIPGYRAEEAVEXLKT

SEQ ID NO: 1723 - protein, 242 aa, Homo sapiens [sequence omitted]

SEQ ID NO: 1724 - protein, 169 aa, Homo sapiens
  MISC_FEATURE (134): Xaa equals any of the twenty naturally occurring L-amino acids
  MISC_FEATURE (141): Xaa equals any of the twenty naturally occurring L-amino acids
  MISC_FEATURE (144): Xaa equals any of the twenty naturally occurring L-amino acids
MWENLITPPCSNLNGNGSGKQMPPCHRVTEGPRVMLSHSINNIFRVVTTGSLLARRGKRLWRSRAQCPKPQAGIGHPIVPRLASPLLTSYWENSVAPKCKGRWEVQSTWGPRKKGRVNGPHTAVFATSCLFLSXPVHLGIXPLXLGFLNFLAGIFSSWVTFHLPCFMPS

SEQ ID NO: 1725 - protein, 463 aa, Homo sapiens
MADGEEPEKKRRRIEELLAEKMAVDGGCGDTGDWEGRWNHVKKFLERSGPFTHPDFEPSTESLQFLLDTCKVLVIGAGGLGCELLKNLALSGFRQIHVIDMDTIDVSNLNRQFLFRPKDIGRPKAEVAAEFLNDRVPNCNVVPHFNKIQDFNDTFYRQFHIIVCGLDSIIARRWINGMLISLLNYEDGVLDPSSIVPLIDGGTEGFKGNARVILPGMTACIECTLELYPPQVNFPMCTIASMPRLPEHCIEYVRMLQWPKEQPFGEGVPLDGDDPEHIQWIFQKSLERASQYNIRGVTYRLTQGVVKRIIPAVASTNAVIAAVCATEVFKIATSAYIPLNNYLVFNDVDGLYTYTFEAERKENCPACSQLPQNIQFSPSAKLQEVLDYLTNSASLQMKSPAITATLEGKNRTLYLQSVTSIEERTRPNLSKTLKELGLVDGQELAVADVTTPQTVLFKLHFTS

SEQ ID NO: 1726 - protein, 171 aa, Homo sapiens
  MISC_FEATURE (114): Xaa equals any of the twenty naturally occurring L-amino acids
  MISC_FEATURE (161): Xaa equals any of the twenty naturally occurring L-amino acids
  MISC_FEATURE (165): Xaa equals any of the twenty naturally occurring L-amino acids
  MISC_FEATURE (169): Xaa equals any of the twenty naturally occurring L-amino acids
MFKQLFQKWSVKDQTMGLGKTFSIGKIAKVFQDKFDVTLLHTKPEVAAQERMVDDGNGKVEVWRIENLELVPVEYQWYGFFYGGDCYLVLYTYEVNGKPHHILYIWQVGLAQLXLWILMCPLATGLGRGAWVLHGLSPLQGRHASQDELAASAYQAVEVDXQFDXAAVXVR

SEQ ID NO: 1727 - protein, 222 aa, Homo sapiens
  MISC_FEATURE (43): Xaa equals any of the twenty naturally occurring L-amino acids
MMGNMELAEQLKVQLEKANKFKETITQIPKKSGVENEDQQEVXLVRTDQSGRVWPVNTPGKSLESQGGRRKRQMVSTHEERERVRYFHDDDNLSLNDLVKNEKMGTAENQNKLFMRMASKFMGKTDGDYYTLDDMFVSKAAERERLGEEEENQRKKAIAEHRSLAAQMEKCLYCFDSSQFPKHLIVAIGVKVYLCLPNVRSLTEGHCLIVPLQHHRAATLLG

SEQ ID NO: 1728 - protein, 101 aa, Homo sapiens
MAIALWNNMLEPVGRKTTSNNFTHSRAKLKCPSPESPYLYTLRNSRLLPDQAEEAPEVLYWAVPVAAGVGLVVGIIGTVVWRCRRGGRREDPPMSLRTGAL

SEQ ID NO: 1729 - protein, 190 aa, Homo sapiens
  MISC_FEATURE (33): Xaa equals any of the twenty naturally occurring L-amino acids
  MISC_FEATURE (170): Xaa equals any of the twenty naturally occurring L-amino acids
MASAGGEDCESPAPEADRPHQRPFLIGVSGGTXSGKSTVCEKIMELLGQNEVEQRQRKVVILSQDRFYKVLTAEQKAKALKGQYNFDHPDAFDNDLMHRTLKNIVEGKTVEVPTYDFVTHSRLPETTVVYPADVVLFEGILVFYSQEIRDMFHLRLFVDTDSDVRLSRRXLRDVRRGRDLEQILTHTPPS

SEQ ID NO: 1730 - protein, 166 aa, Homo sapiens
  MISC_FEATURE (155): Xaa equals any of the twenty naturally occurring L-amino acids
  MISC_FEATURE (156): Xaa equals any of the twenty naturally occurring L-amino acids
MSEPQPRGAERDLYRDTWVRYLGYANEVGEAFRSLVPAAVVWLSYGVASSYVLADAIDKGKKAGEVPSPEAGRSARVTVAVVDTFVWQALASVAIPGFTINRVCAASLYVLGTATRWPLAVRKWTTTALGLLTIPIIIHPIDRSVDFLLDSSLRXXYPTVGKPSSS

SEQ ID NO: 1731 - protein, 121 aa, Homo sapiens
  MISC_FEATURE (49): Xaa equals any of the twenty naturally occurring L-amino acids
  MISC_FEATURE (93): Xaa equals any of the twenty naturally occurring L-amino acids
  MISC_FEATURE (107): Xaa equals any of the twenty naturally occurring L-amino acids
  MISC_FEATURE (114): Xaa equals any of the twenty naturally occurring L-amino acids
  MISC_FEATURE (120): Xaa equals any of the twenty naturally occurring L-amino acids
MLKDIIKEYTDVYPEIIERAGYSLEKVFGIQLKEIDKNDHLYILLSTLXPTDAGILGTTKDSPKLGLLMVLLNIIFMNGNRSSEAVIWEVLRXLGLAPWVMIGALSXLGVRVVXLGKKRXS

SEQ ID NO: 1732 - protein, 167 aa, Homo sapiens
  MISC_FEATURE (75): Xaa equals any of the twenty naturally occurring L-amino acids
  MISC_FEATURE (114): Xaa equals any of the twenty naturally occurring L-amino acids
MWPPHRTLVTWALRLKRPLPRRSWPAGASPATTLNTCCVWQTSCSSVGLRRRTSTWQPSWTLWAPCCPASAPPSXLWRWCEGLSPCGECSCGHQGQTPTPVHKTDCDRLSPLSXYGGWLEASLSQSLPVCQPAALLLDTDLLLETLFIAPCWCGGQVEGLPWTQGPC

SEQ ID NO: 1733 - protein, 137 aa, Homo sapiens
MRPQQAPVSGKVFIQRDYSSGTRCQFQTKFPAELENRIDRQQFEETVRTLNNLYAEAEKLGGQSYLEGCLACLTAYTIFLCMETHYEKVLKKVSKYIQEQNEKIYAPQGLLLTDPIERGLRVIEITIYEDRGMSSGR

SEQ ID NO: 1734 - protein, 119 aa, Homo sapiens
  MISC_FEATURE (105): Xaa equals any of the twenty naturally occurring L-amino acids
  MISC_FEATURE (113): Xaa equals any of the twenty naturally occurring L-amino acids
  MISC_FEATURE (116): Xaa equals any of the twenty naturally occurring L-amino acids
MFLSSVLIVLLSCPKMKPFHVFSLKIIFSEMECCRVAQAGLNLLGTSNLPPSASQVAGTIGTCYPASSFCMVIFFCPLWRVFFFLRQSRSVTQAGEQWHNLSSLXPLPLGFKXFLXLSY

SEQ ID NO: 1735 - protein, 126 aa, Homo sapiens
MEVQAPPGTTIGHVLQTWHPFLPKFSIQDADRQTVLRVVGPCWTCGCGTDTNFEVKTRDESRSVGRISKQWGGLVREALTDADDFGLQFPLDLDVRVKAVLLGATFLIDYMFFEKRGGAGPSAITS

SEQ ID NO: 1736 - protein, 129 aa, Homo sapiens
  MISC_FEATURE (66): Xaa equals any of the twenty naturally occurring L-amino acids
  MISC_FEATURE (117): Xaa equals any of the twenty naturally occurring L-amino acids
MVTPAGCLEGENQGPRKIPDTAFPPSSRAGQTRQVVSGAQVSSWRECQPCSGSPSCILGTDANVGXAVSWVWYPFLASERSQTRSFLQNETSFPSRSTADCLVVAVRAVSLLSILRXGWFLLLGLAYRP

SEQ ID NO: 1737 - protein, 306 aa, Homo sapiens
  MISC_FEATURE (2): Xaa equals any of the twenty naturally occurring L-amino acids
  MISC_FEATURE (148): Xaa equals any of the twenty naturally occurring L-amino acids
  MISC_FEATURE (186): Xaa equals any of the twenty naturally occurring L-amino acids
MXAVDDLQFEEFGNAATSLTANPDATTVNIEDPGETPKHQPGSPRGSGREEDDELLGNDDSDKTELLAGQKKSSPFWTFEYYQTFFDVDTYQVFDRIKGSLLPIPGKNFVRLYIRSNPDLYGPFWICATLVFAIAISGNLSNFLIHLXEKTYHYVPEFRKVSIAATIIYAYAWLVPLALWGFLMWXNSKVMNIVSYSFLEIVCVYGYSLFIYIPTAILWIIPQKAVRWILVMIALGISGSLLAMTFWPAVREDNRRVALATIVTIVLLHMLLSVGCLAYFFDAPEMDHLPTTTATPNQTVAAAKSS

SEQ ID NO: 1738 - protein, 100 aa, Homo sapiens
MEKLELHRGGGRSRTSGSPGLIAVAGARIWVQNRVDLSQNGNLIMVAVTLVLGAGDFALTLGGFTLGGIGTATFGAILLNALLSRKLVDVPPPEVVHQEP

SEQ ID NO: 1739 - protein, 102 aa, Homo sapiens
  MISC_FEATURE (49): Xaa equals any of the twenty naturally occurring L-amino acids
  MISC_FEATURE (60): Xaa equals any of the twenty naturally occurring L-amino acids
MFEQENQRLIGEMNSLFDEVRQIEGRVVEISRLQEIFTEKVLQQEAEIXSIHQLVVGATXNIKEGNEDIREAIKNNAGFRVWILFFLVMCSFSLLFLDWYDS

SEQ ID NO: 1740 - protein, 147 aa, Homo sapiens
  MISC_FEATURE (4): Xaa equals any of the twenty naturally occurring L-amino acids
  MISC_FEATURE (25): Xaa equals any of the twenty naturally occurring L-amino acids
MRNXGDFHQRVRFYQSALNAESRRXITRKKLGVDFVNRGVIFPVGNKDAVEGHIRHRATRRLDHLADSFQNVAGLRLWVIGKQHVIMLIKSQRTGDIHHAISQRAGNEGGQRCLLPAGIITDFGIVKLLKRYEQRTWEKSASQNVST

SEQ ID NO: 1741 - protein, 197 aa, Homo sapiens
MQLVQSWPGPPRNTPGPPWSGDLRIGRRFREQPLLFELLKLVAAAPPALCYCSVLLRGLLAALLGHWEASRHPDTTHSPWHLEASCTLVAVMAEGSLLPPALGNMHEVFSQLAPFEVRLLLLSVWGFLREHGPLPQKFIFQSERGRFIRDFSREGGGEGGPHLAVLHSVLHRNIDRLGLFSGRFQAPSPSTLLRQGT

SEQ ID NO: 1742 - protein, 157 aa, Homo sapiens
MQAEGDPPWPTPRSPAEAPTRRKRLTTARSAESESWDHLVLQGDPRLPRTGERDRPHSDSSWGLCTGFSLGGVACYIAVPQRKGPAFSGMFSVLTPLCAPPLLLYKQLGDSKEQLRLGAVTHTRNPGTLGGRGGQGQEFKTSLANMVKPCLYKKYKN

SEQ ID NO: 1743 - protein, 119 aa, Homo sapiens
MDSPISFKFPKIKKIPTMYGLLCQFLPLHSQLWLLKSSQQIAQLCLMPESLRFRPGGILETNSPPAGIRKLVCSPMPGVSSPKDYISFKLSFLSLTTLPLLPSAFLFHSSELPALLGPL

SEQ ID NO: 1744 - protein, 259 aa, Homo sapiens
MSSTSSKRAPTTATQRLKQDYLRIKKDPVPYICAEPLPSNILEWHYVVRGPEMTPYEGGYYHGKLIFPREFPFKPPSIYMITPNGRFKCNTRLCLSITDFHPDTWNPAWSVSTILTGLLSFMVEKGPTLGSIETSDFTKRQLAVQSLAFNLKDKVFCELFPEVVEEIKQKQKAQDELSSRPQTLPLPDVVPDGETHLVQNGIQLLNGHAPGAVPNLAGLQQANRHHGLLGGALANLFVIVGFAAFAYTVKYVLRSIAQE

SEQ ID NO: 1745 - protein, 173 aa, Homo sapiens
MAPKGKAGTRGKKQIFEENRETLKFYLRIILGANAIYCLVTLVFFYSSASFWAWLALGFSLAVYGASYHSMSSMARAAFSEDGALMDGGMDLNMEQGMAEHLKDVILLTAIVQVLSCFSLYVWSFWLLAPGRALYLLWVNVLGPWFTADSGTPAPEHNEKRQRRQERRQMKRL

SEQ ID NO: 1746 - protein, 334 aa, Homo sapiens
  MISC_FEATURE (42): Xaa equals any of the twenty naturally occurring L-amino acids
  MISC_FEATURE (60): Xaa equals any of the twenty naturally occurring L-amino acids
  MISC_FEATURE (65): Xaa equals any of the twenty naturally occurring L-amino acids
  MISC_FEATURE (69): Xaa equals any of the twenty naturally occurring L-amino acids
MHPGTRKRGRPPKYNAVLGFGALTPTSPQSSHPDSPENEKTXTTFTFPAPVQPVSLPSPXSTDGXIHEXFCSVCRKSGQLLMCDTCSRVYHLDCLDPPLKTIPKGMWICPRCQDQMLKKEEAIPWPGTLAIVHSYIAYKAAKEEEKQKLLKWSSDLKQEREQLEQKVKQLSNSISKCMEMKNTILARQKEMHSSLEKVKQLIRLIHGIDLSKPVDSEATVGPSPMARTAPPLPMPPPPRRPLPPPPRAAQRTVTRGKRLNNRAPLGEATGSRRQGEQNTEDSRKAKPDFWKVQNSFGSLVPEREKMLVPGGTRVCQLILLILCVHAKIGPCYMK

SEQ ID NO: 1747 - protein, 136 aa, Homo sapiens
  MISC_FEATURE (113): Xaa equals any of the twenty naturally occurring L-amino acids
  MISC_FEATURE (115): Xaa equals any of the twenty naturally occurring L-amino acids
  MISC_FEATURE (125): Xaa equals any of the twenty naturally occurring L-amino acids
  MISC_FEATURE (132): Xaa equals any of the twenty naturally occurring L-amino acids
MAWSLFPPLPRPLVSMSPPHALFQIMLGIFFNVHSAVLIEDVPFTEKDFENGPQNIYNLYEQVSYNCFIAAGLYLLLGGFSFCQVRLNKRKGIHGCARGPGGVFPAPAPPLFXRXPWHRVHPGSXSHPLPGXFVGI

SEQ ID NO: 1748 - protein, 139 aa, Homo sapiens
MEEEAYSKGFQEGLKKTKELQDLKEEEEEQKSESPEEPEEVEETEEEEKGPRSSKLEELVHFLQVMYPKLCQHWQVIWMMAAVMLVLTVVLGLYNSYNSCAEQADGPLGRSTCSAAPGTPGGAQDSSMSSLQSSRKPHT

SEQ ID NO: 1749 - protein, 106 aa, Homo sapiens
  MISC_FEATURE (105): Xaa equals any of the twenty naturally occurring L-amino acids
MQKVIKFTSELLAFEPAATSLSRPGLNIVLSEVLKMLQSWISGNVAAPLLTTSSLIVLKLALGMAAFSNHFQLEWVLLKKSNIIPAVEKGSLREKVLAKFCLCAXV

SEQ ID NO: 1750 - protein, 118 aa, Homo sapiens
  MISC_FEATURE (117): Xaa equals any of the twenty naturally occurring L-amino acids
MLEGVSNEFDHFGISLPLKICLHLGWDEGLVEGKVVRLGQGIGKSICSSCQLFEEAPTQMSTVPSGLPLPILMHLCLLPVCMAHLCPASPCYFGATPGSGKFCRLITYSHSSPQLAXS

SEQ ID NO: 1751 - protein, 163 aa, Homo sapiens [sequence omitted]

SEQ ID NO: 1752 - protein, 180 aa, Homo sapiens
  MISC_FEATURE (111): Xaa equals any of the twenty naturally occurring L-amino acids
  MISC_FEATURE (150): Xaa equals any of the twenty naturally occurring L-amino acids
  MISC_FEATURE (154): Xaa equals any of the twenty naturally occurring L-amino acids
  MISC_FEATURE (163): Xaa equals any of the twenty naturally occurring L-amino acids
  MISC_FEATURE (175): Xaa equals any of the twenty naturally occurring L-amino acids
  MISC_FEATURE (177): Xaa equals any of the twenty naturally occurring L-amino acids
MAGQFRSYVWDPLLILSQIVLMQTVYYGSLGLWLALVDGLVRSSPSLDQMFDAEILGFSTPPGRLSMMSFILNALTCALGLLYFIRRGKQCLDFTVTVHFFHLLGCWFYSXRFPSALTWWLVQAVCIDSWLASGSTCACGRSSRRYPLTXALNXMSRISPLDXLLTLGPLNTLGXLXPSD

SEQ ID NO: 1753 - protein, 124 aa, Homo sapiens
  MISC_FEATURE (85): Xaa equals any of the twenty naturally occurring L-amino acids
  MISC_FEATURE (97): Xaa equals any of the twenty naturally occurring L-amino acids
MWNSSDANFSCYHESVLGYRYVAVSWGVVVAVTGTVGNVLTLLALAIQPKLRTRFNLLIANLTLADLLYCTLLQPFSVDTYLHLXWRTGATFCRVFXLLLFASNSVSILTLCSSHWDANSSLPN

SEQ ID NO: 1754 - protein, 285 aa, Homo sapiens
  MISC_FEATURE (106): Xaa equals any of the twenty naturally occurring L-amino acids
  MISC_FEATURE (155): Xaa equals any of the twenty naturally occurring L-amino acids
  MISC_FEATURE (191): Xaa equals any of the twenty naturally occurring L-amino acids
  MISC_FEATURE (235): Xaa equals any of the twenty naturally occurring L-amino acids
MPGLDVYFAADVCYAEKVAQEKGFLYRLTSRYRHYAAFERATFEQGKSTKLMMLTDKQIADFQKHYQTEPERFQILPPGIYPDRKYSEQIPNSREIYRQKNGIKEXQNLLLQVGSDFGRKGVDRSIEALASLPESLRHNTLLFVVGQDKPRKFEXLAEKLGVRSNVHFFSGRNDVSELMAAADLLLHPAYXEAAGIVLLEAITAGLPVLTTAVCGYAHYIADANCGTVIAEPFSXEQLNEVLRKALTQSPLRMAWAENARHYADTQDLYSLPEKAADIITGGLDG

SEQ ID NO: 1755 - protein, 106 aa, Homo sapiens
  MISC_FEATURE (93): Xaa equals any of the twenty naturally occurring L-amino acids
  MISC_FEATURE (98): Xaa equals any of the twenty naturally occurring L-amino acids
  MISC_FEATURE (102): Xaa equals any of the twenty naturally occurring L-amino acids
MLRVVLPGRVGGGPPGTALSSLSLPHSESLGGLHQCRQGLQSPGPGLVPLLRWSTLAALGFGPAFCLPLGSVSSRDQLLGFAGGASCGGALPXALSSXQSCXPSLL

SEQ ID NO: 1756 - protein, 366 aa, Homo sapiens
  MISC_FEATURE (7): Xaa equals any of the twenty naturally occurring L-amino acids
MSPGDPXWLDVIERDLHRQFPFHEMFVSRGGHGQQDLFRVLKAYTLYRPEEGYCQAQAPIAAVLLMHMPAEQAFWCLVQICEKYLPGYYSEKLEAIQLDGEILFSLLQKVSPVAHKHLSRQKIDPLLYMTEWFMCAFSRTLPWSSVLRVWDMFFCEGVKIIFRVGLVLLKHALGSPEKVKACQGQYETIERLRSLSPKIMQEAFLVQEVVELPVTERQIEREHLIQLRRWQETRGELQCRSPPRLHGAKAILDAEPGPRPALQPSPSIRLPLDAPLPGSKAKPKPPKQAQKEQRKQMKGRGQLEKPPAPNQAMVVAAAGDACPPQHVPPKDSAPKDSAPQDLAPQVSAHHRSQESLTSQESEDTYL

SEQ ID NO: 1757 - protein, 199 aa, Homo sapiens
  MISC_FEATURE (75): Xaa equals any of the twenty naturally occurring L-amino acids
  MISC_FEATURE (167): Xaa equals any of the twenty naturally occurring L-amino acids
  MISC_FEATURE (174): Xaa equals any of the twenty naturally occurring L-amino acids
  MISC_FEATURE (177): Xaa equals any of the twenty naturally occurring L-amino acids
  MISC_FEATURE (182): Xaa equals any of the twenty naturally occurring L-amino acids
  MISC_FEATURE (189): Xaa equals any of the twenty naturally occurring L-amino acids
MQKEMKMIKDEDVHFDLAVKKTPSFPHCLQPVASRGKAPQRHPFPEALRGPFSQFRYEPPPGDLDGFPGVFEGAXSRKRKSMPTKMPYNHPAEEVTLALHSEENKNHGLPNLPLLFPQPPRPKYDSQMIDLCKWASNSTAAWEHFGGKPVKQEPIKPSAVWPQPTPXPFLPTPXPYXPKFHXGFMFPLXCGLVLGLSLS

SEQ ID NO: 1758 - protein, 167 aa, Homo sapiens
  MISC_FEATURE (104): Xaa equals any of the twenty naturally occurring L-amino acids
  MISC_FEATURE (106): Xaa equals any of the twenty naturally occurring L-amino acids
  MISC_FEATURE (116): Xaa equals any of the twenty naturally occurring L-amino acids
  MISC_FEATURE (118): Xaa equals any of the twenty naturally occurring L-amino acids
  MISC_FEATURE (119): Xaa equals any of the twenty naturally occurring L-amino acids
  MISC_FEATURE (130): Xaa equals any of the twenty naturally occurring L-amino acids
MKLYHSWLLVGSRTEVTQVNTTNCGRLQSCSECILAQDPVCAWSFRLDECVAHAGEHRGLVQDIESADVSSLCPKEPGERPVVFEVPVATAAHVVLPCSPSSAXAXCVWHQPSGVXAXXPRRDGLEVVVXPGAMGAYACECQEGGAAHVVAAYSLVWGSQRDAPSRA

SEQ ID NO: 1759 - protein, 174 aa, Homo sapiens
  MISC_FEATURE (119): Xaa equals any of the twenty naturally occurring L-amino acids
MAPLPGAELVRRPLQLYRYLLRCCQQLPTKGIQQHYKHAVRQSFRVHSDEDNPERIQQIIKRAIEDADWIMNKYKKQTESSEGEPSWPLEVERPLFWSSAAAAGLEDPLALLAETRESXGEADLAPEAPLAAAMLLSILYVCTSSHFTDVKFGENCKLFFCFFLCVFYWVCFLF

SEQ ID NO: 1760 - protein, 141 aa, Homo sapiens
MDTAYPREDTRAPTPSKAGAHTALTLGAPHPPPRDHLIWSVFSTLYLNLCCLGFLALAYSIKARDQKVVGDLEAARRFGSKAKCYNILAAMWTLVPPLLLLGLVVTGALHCARLPRTLPPSSAPSLMTRTMTDRLGPDLGH

SEQ ID NO: 1761 - protein, 162 aa, Homo sapiens
MHLLPLDSSSTLTCTVPSACTKPPSRWRPTVDIFFVVTLLLTVFGEDDQSQDVLRLHQDINDYNRRFSGQPRSIMERIMDLPTLLRHAFREMFSVGGLFWMFRIRIILCLMGAFFYLISPLDFVPEALFGILGFLDDFFVIFLLLIYISIMYREVITQRLTR

SEQ ID NO: 1762 - protein, 246 aa, Homo sapiens
MAQHGAMGAFRALCGLALLCALSLGQRPTGGPGCGPGRLLLGTGTDARCCRVHTTRCCRDYPAQLLGGWPVSCPGEECCSEWDCMCVQPEFHCGDPCCTTCRHHPCPPGQGVQSQGKFSFGFQCIDCASGTFSGGHEGHCKPWTDCTQFGFLTVFPGNKTHNAVCVPGSPPAEPLGWLTVVLLAVAACVLLLTSAQLGLHIWQLRKTQLLLEVPPSTEDARSCQFPEEERGERSAEEKGRLGDLWV

SEQ ID NO: 1763 - protein, 152 aa, Homo sapiens
  MISC_FEATURE (13): Xaa equals any of the twenty naturally occurring L-amino acids
  MISC_FEATURE (46): Xaa equals any of the twenty naturally occurring L-amino acids
  MISC_FEATURE (50): Xaa equals any of the twenty naturally occurring L-amino acids
MSRRRFDCRSISXLLTTTPQIPIKMENFNNFYILTSKELGRGKFAXVRQXISKSTGQEYAAKFLKKRRRGQDCRAEILHEIAVLELAKSCPRVINLHEVYENTSEIILILEYAAGGEIFSLCLPELAEMVSENDVIRLIKQILEGVYYLHPE

SEQ ID NO: 1764 - protein, 614 aa, Homo sapiens
  MISC_FEATURE (105): Xaa equals any of the twenty naturally occurring L-amino acids
MMNTIIFHTKMVDSLVEMLVETSDLSIFCFYSRAFEKMFQQCLELPSQSRYSIAFPLLCTHFMSCTHELCPEERHHIGDRSLSLCNMFLDEMAKQARNLITDICXEQCTLSDQLLPKHCAKTISQAVNKKSKKQTGKKGEPEREKPGVESMRKNRLVVTNLDKLHTALSELCFSINYVPNMVVWEHTFTPREYLTSHLEIRFTKSIVGMTMYNQATQEIAKPSELLTSVRAYMTVLQSIENYVQIDITRVFNNVLLQQTQHLDSHGEPTITSLYTNWYLETLLRQVSNGHIAYFPAMKAFVNLPTENELTFNAEEYSDISEMRSLSELLGPYGMKFLSESLMWHISSQVAELKKLVVENVDVLTQMRTSFDKPDQMAALFKRLSSVDSVLKRMTIIGVILSFRSLAQEALRDVLSYHIPFLVSSIEDFKDHIPRETDMKVAMNVYELSSAAGLPCEIDPALVVALSSQKSENISPEEEYKIACLLMVFVAVSLPTLASNVMSQYSPAIEGHCNNIHCLAKAINQIAAALFTIHKGSIEDRLKEFLALASSSLLKIGQETDKTTTRNRESVYLLLDMIVQESPFLTMDLLESCFPYVLLRNAYHAVYKQSVTSSA

SEQ ID NO: 1765 - protein, 323 aa, Homo sapiens
MGNSASRNDFEWVYTDQPHTQRRARPPAKYPAIKALMRPDPRLKWAVLVLVLVQMLACWLVRGLAWRWLLFWAYAFGGCVNHSLTLAIHDISHNAAFGTGRAARNRWLAVFANLPVGVPYAASFKKYHVDHHRYLGGDGLDVDVPTRLEGWFFCTPARKLLWLVLQPFFYSLRPLCVHPKAVTRMEVLNTLVQLAADLAIFALWGLKPVVYLLASSFLGLGLHPISGHFVAEHYMFLKGHETYSYYGPLNWITFNVGYHVEHHDFPSIPGYNLPLVRKIAPEYYDHLPQHHSWVKVLWDFVFEDSLGPYARVKRVYRLAKDGL

SEQ ID NO: 1766 - protein, 106 aa, Homo sapiens
MTSGQMWNHIRGPPYAHKNPHTGHVNYIHGSSQAQFVAETHIVLLFNGGVTLGMVLLCEAATSDMDIGKRKIMCVAGIGLVVLFFSWMLSIFRSKYHGYPYSFLMS

SEQ ID NO: 1767 - protein, 113 aa, Homo sapiens
  MISC_FEATURE (108): Xaa equals any of the twenty naturally occurring L-amino acids
  MISC_FEATURE (112): Xaa equals any of the twenty naturally occurring L-amino acids
MLFHSFNLRWNWLERRNRTLFKTREMVYPPLAENTGKTLPLVLDGRTSFFFFLSFLFVCLFGTKSHSVAQAGGCSELRSHHCNSSLSNKARLHLLKKKKKNSKGGPVXQLAXK

SEQ ID NO: 1768 - protein, 123 aa, Homo sapiens
  MISC_FEATURE (91): Xaa equals any of the twenty naturally occurring L-amino acids
  MISC_FEATURE (108): Xaa equals any of the twenty naturally occurring L-amino acids
  MISC_FEATURE (111): Xaa equals any of the twenty naturally occurring L-amino acids
MLSARDRRDRHPEEGVVAELQGFAVDKAFLTSHKGILLETELALTLIIFICFTASISAYMAAALLEFFITLAFLFLYATQYYQRFDRINWXCLDFLRCVSAIIIFLVXSFXSCDLPGWSCHCC

SEQ ID NO: 1769 - protein, 156 aa, Homo sapiens
  MISC_FEATURE (137): Xaa equals any of the twenty naturally occurring L-amino acids
  MISC_FEATURE (140): Xaa equals any of the twenty naturally occurring L-amino acids
MNDQGEIYSTLRFLQSPSESQNRLRPDDTQRPGKTDDKEFSVPWHLIAVTLGILCLLLLMIVTVLVTNIFQCIQEKHQRQEILRNCSEKYIMQNDNYLKEQILTNKTLKYDVLKNSFQQKKELDSRLIQKNRCHREXEIXFKVLQNTGNSLKTTGP

SEQ ID NO: 1770 - protein, 131 aa, Homo sapiens
  MISC_FEATURE (100): Xaa equals any of the twenty naturally occurring L-amino acids
  MISC_FEATURE (112): Xaa equals any of the twenty naturally occurring L-amino acids
  MISC_FEATURE (127): Xaa equals any of the twenty naturally occurring L-amino acids
  MISC_FEATURE (128): Xaa equals any of the twenty naturally occurring L-amino acids
MEVLDKNLFFFFFLRWSLGLSPRLECSGTISAHCNLHLLGSSDSPASASRVAGIAGARHCAWLIFFFFCIFGRDGVSPSLARLVSELLTLRSTPPRPSKXLGIKGLSHRAQXAIIYFLPFPFLRGYXXGSW

SEQ ID NO: 1771 - protein, 112 aa, Homo sapiens [sequence omitted]

SEQ ID NO: 1772 - protein, 125 aa, Homo sapiens [sequence omitted]

SEQ ID NO: 1773 - protein, 110 aa, Homo sapiens
MAAVVAKREGPPFISEAAVRGNAAVLDYCRTSVSALSGATAGILGLTGLYGFIFYLLASVLLSLLLILKAGRRWNKYFKSRRPLFTGGLIGGLFTYVLFWTFLYGMVHVY

SEQ ID NO: 1774 - protein, 268 aa, Homo sapiens [sequence omitted]

SEQ ID NO: 1775 - protein, 147 aa, Homo sapiens
  MISC_FEATURE (70): Xaa equals any of the twenty naturally occurring L-amino acids
  MISC_FEATURE (147): Xaa equals any of the twenty naturally occurring L-amino acids
MAVECAEIRRHHRVGIKDIAGIHLPTNVKFQSPAYSSVDTEETIEPYTTEKMSRVPGGYLALTECFEIMXVDFNNLQELKSLATKKPGKIGIPVIKEGILDAVVVWFVLQLDDEHSLSTSPNEETCWEQAVYPVHDLADYRIKRGDX

SEQ ID NO: 1776 - protein, 259 aa, Homo sapiens
  MISC_FEATURE (15): Xaa equals any of the twenty naturally occurring L-amino acids
MAASRLELNLVRLLXRCEAMAAEKRDPDEWRLEKYVGALEDMLQALKVHASKPASEVINEYSWKVDFLKGMLQAEKLTSSSEKALANQFLAPGRVPTTARERVPATKTVHLQSRARYTSEMRSELLGTDSAEPEMDVRKRTGVAGSQPVSEKQSAAELDLVLQRHQNLQEKLAEEMLGLARSLKTNTLAAQSVIKKDNQTLSHSLKMADQNLEKLKTESERLEQHTQKSVNWLLWAMLIIVCFIFISMILFIRIMPKLK

SEQ ID NO: 1777 - protein, 111 aa, Homo sapiens
  MISC_FEATURE (108): Xaa equals any of the twenty naturally occurring L-amino acids
MAAEMEQSSGTGPAELTQFWKEVPRNKVMEHRLRCHTVESSKPNTLTLKDNAFNMSDKTSEDICLQLSRLLESNRKLEDQVQRCIWFQQLLLSLTMLLLAFVTSFFYXLYS

SEQ ID NO: 1778 - protein, 410 aa, Homo sapiens
  MISC_FEATURE (14): Xaa equals any of the twenty naturally occurring L-amino acids
  MISC_FEATURE (15): Xaa equals any of the twenty naturally occurring L-amino acids
  MISC_FEATURE (21): Xaa equals any of the twenty naturally occurring L-amino acids
  MISC_FEATURE (22): Xaa equals any of the twenty naturally occurring L-amino acids
  MISC_FEATURE (41): Xaa equals any of the twenty naturally occurring L-amino acids
  MISC_FEATURE (45): Xaa equals any of the twenty naturally occurring L-amino acids
  MISC_FEATURE (117): Xaa equals any of the twenty naturally occurring L-amino acids
  MISC_FEATURE (236): Xaa equals any of the twenty naturally occurring L-amino acids
MPDRRHSKSAQIIXXPVPYQXXSHTSYLYTQYAPVPFGIPXPMPXPMLIPSSMDSEDKVTESIEDIKEKLPTHPFEADLLEMAEMIAEDEEKKTLSQGESQTSEHELFLDTKIFEKXQGSTYSGDLESEAVSTPHSWEEELNHYALKSNAVQEADSELKQFSKGETERTWKQIFHQTPLTHLIKDGNPGTFPNRRRHRDGFPQPRRRGRKKSIVAVEPRSLIQGAFQGCSVSGMTXKYMYGVNAWKNWVQWKNAKEEQGDLKCGGVEQASSSPRSDPLGSTQDHALSQESSEPGCRVRSIKLKEDILSCTFAELSLGLCQFIQEVRRPNGEKYDPDSILYLCLGIQQYLFENGRIDNIFTEPYSRFMIELTKLLKIWEPTILPNGYMFSRIEEEHLWECKQLGAYSPIAF

SEQ ID NO: 1779 - protein, 158 aa, Homo sapiens
  MISC_FEATURE (151): Xaa equals any of the twenty naturally occurring L-amino acids
MSTLCPPPSPAVAKTEIALSGKSPLLAATFAYWDNILGPRVRHIWAPKTEQVLLSDGEITFLANHTLNGEILRNAESGAIDVKFFVLSEKGVIIVSLIFDGNWNGDRSTYGLSIILPQTELSFYLPLHRVCVDRLTHIIRKGRIWMHKERXEMSRRLS

SEQ ID NO: 1780 - protein, 361 aa, Homo sapiens
  MISC_FEATURE (114): Xaa equals any of the twenty naturally occurring L-amino acids
  MISC_FEATURE (237): Xaa equals any of the twenty naturally occurring L-amino acids
MVHAEAFSRPLSRNEVVGLIFRLTIFGAVTYFTIKWMVDAIDPTRKQKVEAQKQAEKLMKQIGVKNVKLSEYEMSIAAHLVDPLNMHVTWSDIAGLDDVITDLKDTVILPIKKXHLFENSRLLQPPKGVLLYGPPGCGKTLIAKATAKEAGCRFINLQPSTLTDKWYGESQKLAAAVFSLAIKLQPSIIFIDEIDSFLRNRSSSDHEATAMMKAQFMSLWDGLDTDHSCQVIVMGAXNRPQDLDSAIMRRMPTRFHINQPALKQREAILKLILKNENVDRHVDLLEVAQETDGFSGSDLKEMCRDAALLCVREYVNSTSEESHDEDEIRPVQQQDLHRAIEKMKKSKDAAFQNVLTHVCLD

SEQ ID NO: 1781 - protein, 260 aa, Homo sapiens
  MISC_FEATURE (15): Xaa equals any of the twenty naturally occurring L-amino acids
  MISC_FEATURE (250): Xaa equals any of the twenty naturally occurring L-amino acids
  MISC_FEATURE (259): Xaa equals any of the twenty naturally occurring L-amino acids
MLFLALGSPWAVELXLCGRRTALCAAAALRGPRASVSRASSSSGPSGPVAGWSTGPSGAARLLRRPGRAQIPVYWEGYVRFLNTPSDKSEDGRLIYTGNMARAVFGVKCFSYSTSLIGLTFLPYIFTQNNAISESVPLPIQIIFYGIMGSFTVITPVLLHFITKGYVIRLYHEATTDTYKAITYNAMLAETSTVFHQNDVKIPDAKHVFTTFYAKTKSLLVNPVLFPNREDYIHLMGYDKEEFILYMEEXSEEKRHKDXK

SEQ ID NO: 1782 - protein, 219 aa, Homo sapiens
MPRGRKSRRRRNARAAEENRNNRKIQASEASETPMAASVVASTPEDDLSGPEEDPSTPEEASTTPEEASSTAQAQKPSVPRSNFQGTKKSLLMSILALIFIMGNSAKEALVWKVLGKLGMQPGRQHSIFGDPKKIVTEEFVRRGYLIYKPVPRSSPVEYEFFWGPRAHVESSKLKVMHFVARVRNRCSKDWPCNYDWDSDDDAEVEAILNSGARGYSAP

SEQ ID NO: 1783 - protein, 148 aa, Homo sapiens
  MISC_FEATURE (124): Xaa equals any of the twenty naturally occurring L-amino acids
  MISC_FEATURE (127): Xaa equals any of the twenty naturally occurring L-amino acids
MTAVADIFDRDGDGYIDYYEFVAALHPNKDAYRPTTDADKIEERLQDKWLSANVQKGFRWSRSERINTGLGILSSCGWSVFCATVMVRVGGGWMALDEFLVKNDPCRARGRTNIELREKFILPXGAXQGMTPFRSRGRSPNHLPGQLP

SEQ ID NO: 1784 - protein, 184 aa, Homo sapiens
MMPSSCPWRTGALGESSGVARFGPLHFERRARFEVADEDKQSRLRYQNLENDEDGAQASPEPDGGVGTRDSSRTSIRSSQWSFSTISSSTQRSYNTCCSWTQHPLIQKNRRVVLASFLLLLLGLVLILVGVGLEATPSPGVSSAIFFVPGFLLLVPGVYHVIFIYCAVKGHRGFQFFYLPYFEK

SEQ ID NO: 1785 - protein, 333 aa, Homo sapiens
MGLRRSGKSSIQKVVFHKMSPNETLFLESTNKIYKDDISNSSFVNFQIWDFPGQMDFFDPTFDYEMIFRGTGALIYVIDAQDDYMEALTRLHITVSKAYKVNPDMNFEVFIHKVDGLSDDHKIETQRDIHQRANDDLADAGLEKLHLSFYLTSIYDHSIFEAFSKVVQKLIPQLPTLENLLNIFISNSGIEKAFLFDVVSKIYIATDSSPVDMQSYELCCDMIDVVIDVSCIYGLKEDGSGSAYDKESMAIIKLNNTTVLYLKEVTKFLALVCILREESFERKGLIDYNFHCFRKAIHEVFEVGVTSHRSCGHQTSASSLKALTHNGTPRNAI

SEQ ID NO: 1786 - protein, 170 aa, Homo sapiens
MSVAGGEIRGDTGGEDTAAPGRFSFSPEPTLEDIRRLHAEFAAERDWEQFHQPRNLLLALVGEVGELAELFQWKTDGEPGPQGWSPRERAALQEELSDVLIYLVALAARCRVDLPLAVLSKMDINRRRYPAHLARSSSRKYTELPHGAISEDQAVGPADIPCDSTGQTST

SEQ ID NO: 1787 - protein, 207 aa, Homo sapiens
  MISC_FEATURE (19): Xaa equals any of the twenty naturally occurring L-amino acids
  MISC_FEATURE (121): Xaa equals any of the twenty naturally occurring L-amino acids
MNNQKVVAVLLQECKQVLXQLLLEAPDVSEEDKSEDQRCRALLPSELRTLIQEAKEMKWPFVPEKWQYKQAVGPEDKTNLKDVIGAGLQQLLASLRASILARDCAAAAAIVFLVDRFLYGXDVSGKLLQVAKGLHKLQPATPIAPQVVIRQARISVNSGKLLKAEYILSSLISNNGATGTWLYRNESDKVLVQSVCIQIRGQILQKL

SEQ ID NO: 1788 - protein, 209 aa, Homo sapiens
  MISC_FEATURE (19): Xaa equals any of the twenty naturally occurring L-amino acids
  MISC_FEATURE (178): Xaa equals any of the twenty naturally occurring L-amino acids
  MISC_FEATURE (190): Xaa equals any of the twenty naturally occurring L-amino acids
  MISC_FEATURE (192): Xaa equals any of the twenty naturally occurring L-amino acids
MGGKQLDEDDEAYGKPVKXDPSFRGPIKNRSCTDVICCVLFLLFILGYIVVGIVAWLYGDPRQVLYPRNSTGAYCGMGENKDKPYLLYFNIFSCILSSNIISVAENGLQCPTPQVCVSSCPEDPWTVGKNEFSQTVGEVFYTKNRNFCLPGVPWNMTVITSLQQELCPVSSSLCSALXRCFHGPTLLHRXLXGITNDHPPYSRGISGLY

SEQ ID NO: 1789 - protein, 106 aa, Homo sapiens
  MISC_FEATURE (25): Xaa equals any of the twenty naturally occurring L-amino acids
  MISC_FEATURE (43): Xaa equals any of the twenty naturally occurring L-amino acids
  MISC_FEATURE (62): Xaa equals any of the twenty naturally occurring L-amino acids
  MISC_FEATURE (80): Xaa equals any of the twenty naturally occurring L-amino acids
  MISC_FEATURE (101): Xaa equals any of the twenty naturally occurring L-amino acids
MEMIAFARIFCKGQVSTATFLESCXVADLITTCYGGRNRRVAXAFARTGKGSPSLLSAPPLXHLRLLLGVNWNPWRFMPXLLLGWSVACCFYLTLWSYLWXLTSWF

SEQ ID NO: 1790 - protein, 279 aa, Homo sapiens
  MISC_FEATURE (109): Xaa equals any of the twenty naturally occurring L-amino acids
  MISC_FEATURE (231): Xaa equals any of the twenty naturally occurring L-amino acids
MSFNLQSSKKLFIFLGKSLFSLLEAMIFALLPKPRKNVAGEIVLITGAGSGLGRLLALQFARLGSVLVLWDINKEGNEETCKMAREAGATRVHAYTCDCSQKEGVYRVXDQVKKEVGDVSILINNAGIVTGKKFLDCPDELMEKSFDVNFKAHLWTYKAFLPAMIANDHGHLVCISSSAGLSGVNGLADYCASKFAAFGFAESVFVETFVQKQKGIKTTIVCPFFIKTGMXEGCTTGCPSLLPILEPKYAVEKIVEAILQEKMYLYMPKLLYFMMFLKR

SEQ ID NO: 1791 - protein, 397 aa, Homo sapiens
MALLRGVFVVAAKRTPFGAYGGLLKDFTATDLSEFAAKAALSAGKVSPETVDSVIMGNVLQSSSDAIYLARHVGLRVGIPKETPALTINRLCGSGFQSIVNGCQEICVKEAEVVLCGGTESMSQAPYCVRNVRFGTKLGSDIKLEDSLWVSLTDQHVQLPMAMTAENLAVKHKISREECDKYALQSQQRWKAANDAGYFNDEMAPIEVKTKKGKQTMQVDEHARPQTTLEQLQKLPPVFKKDGTVTAGNASGVADGAGAVIIASEDAVKKHNFTPLARIVGYFVSGCDPSIMGIGPVPAISGALKKAGLSLKDMDLVEVNEAFAPQYLAVERSLDLDISKTNVNGGAIALGHPLGGSGSRITAHLVHELRRRGGKYAVGSACIGGGQGIAVIIQSTA

SEQ ID NO: 1792 - protein, 111 aa, Homo sapiens
MFRPPRTSHCSVCDNCVERFDHHCPWVGNCVGRRNYRFFYAFILSLSFLTAFIFACVVTHLTLRAQGSNFLSTLKETPASVLGVGDLLLLHLVHSGPLRVSHVPRRLQPDY

SEQ ID NO: 1793 - protein, 113 aa, Homo sapiens [sequence omitted]

SEQ ID NO: 1794 - protein, 389 aa, Homo sapiens
  MISC_FEATURE (8): Xaa equals any of the twenty naturally occurring L-amino acids
MSKYSAGXIYYYPSFHYTHNPSQAEKLQKDLKRYLTRKIGFEAVMRIRCTKGLSMHTFHGNFFVRSTDLLSLANINPDAGFAVQLSIEESLTDTSLVCFQTALLYTSSKGERRIRVHTLCLPVVSSLADVYAGVDVQAAICLLANMAVDRSVSSSLSDARDALVNAVVDSLSAYGSTVSNLQHSALMAPSSLKLFPLYVLALLKQKAFRTGTSTRLDDRVYAMCQIKSQPLVHLMKMIHPNLYRIDRLTDEGAVHVNDRIVPQPPLQKLSAEKLTREGAFLMDCGSVFYIWVGKGCDNNFIEDVLGYTNFASIPQKMTHLPELDTLSSERARSFITWLRDSRPLSPILHIVKDESPAKAEFFQHLIEDRTEAAFSYYEFLLHVQQQICK

SEQ ID NO: 1795 - protein, 194 aa, Homo sapiens
  MISC_FEATURE (158): Xaa equals any of the twenty naturally occurring L-amino acids
  MISC_FEATURE (164): Xaa equals any of the twenty naturally occurring L-amino acids
MLKCSSCQAFLCASLQPAFDFDRYKQRCAELKKALCTAHEKFCFWPDSPSPDRFGMLPLDEPAILVSEFLDRFQSLCHLDLQLPSLRPEDLKTMCLTEDKISLLLHLLEDELDHRTDERKTTIKLGSDIQVHVTACILSVCGWACSSSLESMQLSLIXCSQCMXKVGLWGFQQIESSMTDLDASLPDQLPNPRP

SEQ ID NO: 1796 - protein, 113 aa, Homo sapiens [sequence omitted]

SEQ ID NO: 1797 - protein, 292 aa, Homo sapiens
  MISC_FEATURE (223): Xaa equals any of the twenty naturally occurring L-amino acids
MSSLYPSLEDLKVDQAIQAQVRASPKMPALPVQATAISPPPVLYPNLAELENYMGLSLSSQEVQESLLQIPEGDSTAVSGPGPGQMVAPVTGYSLGVRRAEIKPGVREIHLCKDERGKTGLRLRKVDQGLFVQLVQANTPASLVGLRFGDQLLQIDGRDCAGWSSHKAHQVVKKASGDKIVVVVRDRPFQRTVTMHKDSMGHVGFVIKKGKIVSLVKGSSAAXNGLLTNHYVCEVDGQNVIGLKDKKIMEILATAGNVVTLTIIPSVIYEHMVKKLPPVLLHHTMDHSIPDA

SEQ ID NO: 1798 - protein, 138 aa, Homo sapiens [sequence omitted]

SEQ ID NO: 1799 - protein, 173 aa, Homo sapiens
MNTGNEGLPTSGSFTLDDDVFAETEEPSSPTGVLVNSNLPIASISDYRLLCDINKYVCNKISLLPNDEDSLPPLLVASGEKGSVPVVEEHPSHEQIILLLEGEGFHPVTFVLNANLLVNVKFIFYSSDKYGTFQPMDCRLGQGRIIIYCYVCQMKILFLRTSSDYLSPYIRML

SEQ ID NO: 1800 - protein, 456 aa, Homo sapiens
  MISC_FEATURE (147): Xaa equals any of the twenty naturally occurring L-amino acids
  MISC_FEATURE (172): Xaa equals any of the twenty naturally occurring L-amino acids
  MISC_FEATURE (222): Xaa equals any of the twenty naturally occurring L-amino acids
MVFGIFLCLDAFLYVFTLLPLRVFLALFRLLTLPCYGLRDRRLLQPAQVCDILKGVILVICYFMMHYVDYSMMYHLIRGQSVIKLYIIYNMLEVADRLFSSFGQDILDALYWTATEPKERKRAHIGVIPHFFMAVLYVFLHAILIMXQATTLNVAFNSHNKSLSTIMMSNNXVEIKGSVFKKFEKNNLFQMSNSDIKERFTNYVLLLIVCLRNMEQFSWNPXHLWVLFPDVCMVIASEIAVDIVKHAFITKFNDITADVYSEYRASLAFDLVSSRQKNAYTDYSDSVARRMGFIPLPLAVLLIRVVTSSIKVQGILSYACVILFYFGLISLKVLNSIVLLGKSCQYVKEAKMEEKLSNPPATCTPGKPSSKSQNKCKPSQGLSTEENLSASITKQPIHQKENIIPLLVTSNSDQFLTTPDGDEKDITQDNSELKHRSSKKDLLEIDRFTICGNRID

SEQ ID NO: 1801 - protein, 356 aa, Homo sapiens
  MISC_FEATURE (104): Xaa equals any of the twenty naturally occurring L-amino acids
  MISC_FEATURE (344): Xaa equals any of the twenty naturally occurring L-amino acids
MFHGREVKPVGPDLELSEAENGVEEKKKACRSPTAQSPTPSVEADSPDQKKIISLWSKSSFDGASLASDKNDCKTESKNDPKTERKKSSSSSQYKANMHFHKLXLSVPTEEPLKQSFTCALQKEILYQGKLFVSENWICFHSKVFGKDTKISIPAFSVTLIKKTKTALLVPNALIIATVTDRYIFVSLLSRDSTYKLLKSVCGHLENTSVGNSPNPSSAENSFRADRPSSLPLDFNDEFSDLDGVVQQRRQDMEGYSSSGSQTPESENSRDFHATESQTVLNVSKGEAKPTRADAHVNRVPEGKAKSLPVQGLSETVGILHKVKSQKCPMLHHILIFYAIVVCXTNHLDLLHEIQN

SEQ ID NO: 1802 - protein, 262 aa, Homo sapiens [sequence omitted]

SEQ ID NO: 1803 - protein, 130 aa, Homo sapiens [sequence omitted]

SEQ ID NO: 1804 - protein, 112 aa, Homo sapiens
  MISC_FEATURE (3): Xaa equals any of the twenty naturally occurring L-amino acids
MFXCAKLACTPSLIRAGSRVAYRPISASVLSRPEASRTGEGSTVFNGAQNGVSQLIQREFQTSAISRDIDTAAKFIGAGAATVGVAGSGAGIGTVFGSLIIGYARVIISIPK

SEQ ID NO: 1805 - protein, 150 aa, Homo sapiens
  MISC_FEATURE (44): Xaa equals any of the twenty naturally occurring L-amino acids
  MISC_FEATURE (72): Xaa equals any of the twenty naturally occurring L-amino acids
  MISC_FEATURE (121): Xaa equals any of the twenty naturally occurring L-amino acids
  MISC_FEATURE (132): Xaa equals any of the twenty naturally occurring L-amino acids
  MISC_FEATURE (135): Xaa equals any of the twenty naturally occurring L-amino acids
  MISC_FEATURE (136): Xaa equals any of the twenty naturally occurring L-amino acids
MHHYNAGVKQSALLGLKDLLSQYPFIIDAHLSNILSEVTAVFTXKDANVRLAAVQLLQFLAPKIRAEQISPXFPLVSGGGLSGVDERLASTENLKGFIEIIIPLLIECWVEAVPPQLATPXGNGIEREPLQXMQXXLNIISLLWKLSNTG

SEQ ID NO: 1806 - protein, 427 aa, Homo sapiens
MGLFPPWVPVPPSVSQERDLIAEFAQVTNWSSCCLRVFAWHPHTNKFAVALLDDSVRVYNASSTIVPSLKHRLQRNVASLAWKPLSASVLAVACQSCILIWTLDPTSLSTRPSSGCAQVLSHPGHTPVTSLAWAPSGGRLLSASPVDAAIRVWDVSTETCVPLPWFRGGGVTNLLWSPDGSKILATTPSAVFRVWEAQMWTCERWPTLSGRCQTGCWSPDGSRLLFTVLGEPLIYSLSFPERCGEGKGCVGGAKSATIVADLSETTIQTPDGEERLGGEAHSMVWDPSGERLAVLMKGKPRVQDGKPVILLFRTRNSPVFELLPCGIIQGEPGAQPQLITFHPSFNKGALLSVGWSTGRIAHIPLYFVNAQFPRFSPVLGRAQEPPAGGGGSIHDLPLFTETSPTSAPWDPLPGPPPVLPHSPHSHL

SEQ ID NO: 1807 - protein, 164 aa, Homo sapiens
MAKAARVLTPQDHSPALSSGGTALQGVLAVGPANFRQNREAQRLQIPSCKWPGILSLPSLASGVILTSLASPIPSTPHLSSCLLLLGTPKTLLVRRKMEGKFCRSFPNPQEWTRSQLRKKGLTWLAWLLRRPLFFSTSAHPCMSSQTFALKLQETTSTQGLGFK

SEQ ID NO: 1808 - protein, 116 aa, Homo sapiens
MAGIELERCQQQANEVTEIMRNNFGKVLERGVKLAELQQRSDQLLDMSSTFNKTTQNLAQKKCWENIRYRICVGLVVVGVLLIILIVLLVVFLPQSSDSSSAPRTQDAGIASGPGN

SEQ ID NO: 1809 - protein, 195 aa, Homo sapiens
MSVLSVSSWTLPHSRPGKSTSHQPTPLKSWPGSPARRTLTTCQTSGRRSAAVRYESQLFGWLLIGVVAILVFLTKCLKHYCSPLSYRQEAYWAQYRANEDQLFQRTAEVHSRVLAANNVRRFFGFVALNKDDEELIANFPVEGTQPRPQWNAITGVYLYRENQGLPLYSRLHKWAQGLAGNGAAPDNVEMALLPS

SEQ ID NO: 1810 - protein, 161 aa, Homo sapiens [sequence omitted]

SEQ ID NO: 1811 - protein, 175 aa, Homo sapiens [sequence omitted]

SEQ ID NO: 1812 - protein, 146 aa, Homo sapiens
  MISC_FEATURE (30): Xaa equals any of the twenty naturally occurring L-amino acids
  MISC_FEATURE (41): Xaa equals any of the twenty naturally occurring L-amino acids
MCSTTGVSALPKSKFHLSAKCRGICFLLSXHRIVGHLFAGXLRDFLAIYLQAFFPSPKFLGWLCLLKEPVFTKLHSGASVRCLRSYCRPFRTPSQERTLQPLARDSTFFLILFLTLLLLLLPTNSISFFFLFLSFSYSSFPPSLSC

SEQ ID NO: 1813 - protein, 258 aa, Homo sapiens
  MISC_FEATURE (22): Xaa equals any of the twenty naturally occurring L-amino acids
  MISC_FEATURE (37): Xaa equals any of the twenty naturally occurring L-amino acids
MPVEKNITLERPSNVNLTCQFXTSGDLNAVNVTWKKXGEQLENNYLVSATGSTLYTQYRFTIINSKQMGSYSCFFREEKEQRGTFNFKVPELHGKNKPLISYVGDSTVLTCKCQNCFPLNWTWYSSNGSVKVPVGVQMNKYVINGTYANETKLKITQLLEEDGESYWCRALFQLGESEEHIELVVLSYLVPLKPFLVIVAEVILLVATILLCEKYTQKKKKHSDEGKEFEQIEQLKSDDSNGIENNVPRHRKNESLGQ

SEQ ID NO: 1814 - protein, 214 aa, Homo sapiens [sequence omitted]

SEQ ID NO: 1815 - protein, 147 aa, Homo sapiens
MTPGGLFLPYHSLPQPDFLASCPTRHLKLCQCPGILAENPHQFSPTFPPGKGSCQHGALPGQVSLKEAAHTEMSLSGQDLFPSPAHPPLQPFWLPFSLCLSTPFLVADNELRLPKGQICPLHVFVLANRVVLKLCANSVWEHSKGIT

SEQ ID NO: 1816 - protein, 201 aa, Homo sapiens
  MISC_FEATURE (19): Xaa equals any of the twenty naturally occurring L-amino acids
  MISC_FEATURE (29): Xaa equals any of the twenty naturally occurring L-amino acids
  MISC_FEATURE (35): Xaa equals any of the twenty naturally occurring L-amino acids
MVLSNSNQLLLNSLTQADXGTYTCRAILXRIGVAXREVPLYVNGPPIISSEAVQYAVRGDGGKVECFIGSTPPPDRIAWAWKENFLEVGTLERYTVERTNSGSGVLSTLTINNVMEADFQTHYNCTAWNSFGPGTAIIQLEEREVLPVGIIAGATIGASILLIFFFIALVFFLYRRRKGSRKDVTLRKLDIKVETVNREPL

SEQ ID NO: 1817 - protein, 301 aa, Homo sapiens
  MISC_FEATURE (295): Xaa equals any of the twenty naturally occurring L-amino acids
MITAGLIHWILNTLNITVHIRDVCVFLAPTFSGLTSISTFLLTRELWNQGAGLLAACFIAIVPGYISRSVAGSFDNEGIAIFALQFTYYLWVKSVKTGSVFWTMCCCLSYFYMVSAWGGYVFIINLIPLHVFVLLLMQRYSKRVYIAYSTFYIVGLILSMQIPFVGFQPIRTSEHMAAAGVFALLQAYAFLQYLRDRLTKQEFQTLFFLGVSLAAGAVFLSVIYLTYTGYIAPWSGRFYSLWDTGYAKIHIPIIASVSEHQPTTWVSFFFDLHILVCTFPAGLWFCIKNINDERXFGKRGF

SEQ ID NO: 1818 - protein, 379 aa, Homo sapiens [sequence omitted]

SEQ ID NO: 1819 - protein, 106 aa, Homo sapiens
MASSDEDGTNGGASEAGEDREAPGKRRRLGFLATAWLTFYDIAMTAGWLVLAIAMVRFYMEKGTHRGLYKSIQKTLKFFQTFALLEIVHCLIGIVPTSVNCELGSK

SEQ ID NO: 1820 - protein, 191 aa, Homo sapiens
  MISC_FEATURE (71): Xaa equals any of the twenty naturally occurring L-amino acids
MVNEDLLSDGTSENESGFWDSFKWGFTGQKTEEVKQDKDDIINIFSVASGHLYERFLRIMMLSVLKNTKTXVKFWFLKNYLSPTFKEFIPYMANEYNFQYELVQYKWPRWLHQQTEKQRIIWGYKILFLDVLFPLVVDKFLFVDADQIVRTDLKELRDFNLDGAPYGYTPFCDSREKWTVQVWKSGTGAII

SEQ ID NO: 1821 - protein, 158 aa, Homo sapiens
  MISC_FEATURE (121): Xaa equals any of the twenty naturally occurring L-amino acids
  MISC_FEATURE (152): Xaa equals any of the twenty naturally occurring L-amino acids
  MISC_FEATURE (156): Xaa equals any of the twenty naturally occurring L-amino acids
MKVDALLSAQPKGDPRIEYQFFEDRHSAIKLRPKEGETYFDVVAVVDPVTREAQRLAPLLLVLAQLINMNLRVFMNCQSKLSDMPLKSFYRYVLEPEISFTSDNSFAKGPIAKFLDMPQSXLFTLNLNTPESWMVESVRTPYDLDNIYLERXGQCXGC

SEQ ID NO: 1822 - protein, 170 aa, Homo sapiens
MTVNGFINTVITSLERRYDLHSYQSGLIASSYDIAACLCLTFVSYFGGSGHKPRWLGWGVLLMGTGSLVFALPHFTAGRYEVELDAGVRTCPANPGAVCADSTSGLSRYQLVFMLGQFLHGVGATPLYTLGVTYLDENVKSSCSPVYIAIFYTAAILGPAAGYLNWEVPC

SEQ ID NO: 1823 - protein, 128 aa, Homo sapiens
MLKLGASVNMYMFHGGTNFGYWNGADKKGRFLPITTSYDYDAPISEAGDPTPKLFALRDVISKFQEVPLGPLPPPSPKMMLGPVTLHLVGHLLAFLDLLCPRGPIHSILPMTFEAVNRTMASCCTEPI

SEQ ID NO: 1824 - protein, 329 aa, Homo sapiens
  MISC_FEATURE (185): Xaa equals any of the twenty naturally occurring L-amino acids
  MISC_FEATURE (223): Xaa equals any of the twenty naturally occurring L-amino acids
MKGMKVEVLNSDAVLPSRVYWIASVIQTAGYRVLLRYEGFENDASHDFWCNWGTVDVHPIGWCAINSKILVPPRTIHAKFTDWKGYLMKRLVGSRTLPVDFHIKMVESMKYPFRQGMRLEVVDKSQVSRTRMAVVDTVIGGRLRLLYEDGDSDDDFWCHMWSPLIHPVGWSRRVGHGIKMSERRXDMAHHPTFRKIYCDAVPYLFKKVRAVYTEGGWFEEGMXLEAIDPLNLGNICVATVCKVLLDGYLMICVDGGPSTDGLDWFCYHASSHAIFPATFCQKNDIELTPPKGYEAQTFNWENYLEKTKSKAVHRDSLTWIAQTMASRWA

SEQ ID NO: 1825 - protein, 139 aa, Homo sapiens
  MISC_FEATURE (135): Xaa equals any of the twenty naturally occurring L-amino acids
MAILLSYCSILCNYKAIEMPSHQTYGGSWKFLTFIDLVIQAVFFGICVLTDLSSLLTRGSGNQEQERQLKKLISLRDWMLAVLAFPVGVFVVAVFWDHYAYDREMIYPKLLDNLSQGAESRMHSKLKVSWHAFQXPLTF

SEQ ID NO: 1826 - protein, 110 aa, Homo sapiens
  MISC_FEATURE (41): Xaa equals any of the twenty naturally occurring L-amino acids
  MISC_FEATURE (54): Xaa equals any of the twenty naturally occurring L-amino acids
  MISC_FEATURE (58): Xaa equals any of the twenty naturally occurring L-amino acids
  MISC_FEATURE (60): Xaa equals any of the twenty naturally occurring L-amino acids
  MISC_FEATURE (98): Xaa equals any of the twenty naturally occurring L-amino acids
  MISC_FEATURE (102): Xaa equals any of the twenty naturally occurring L-amino acids
MEGSGDHGIKRKPRKRSQAKIRLRKSKRKAKKRRRNSRKQXQVNQQIWLDNIAXLSVXLXFMLCHSRDFCHLAATLKTVLLSAKVLLLQATLRESGDXYFSXSFRKRGES

SEQ ID NO: 1827 - protein, 202 aa, Homo sapiens
  MISC_FEATURE (146): Xaa equals any of the twenty naturally occurring L-amino acids
MCEIMNHMTALLSVWFFIGVHLYPFMINKLVYIVITVIIFSKMFLKIIIVITSVIAQRELGIDFIQLTLYVIRVFFISSSVGSSASSSATRRESLSTSSDLYKRSSSSLAPIGQPFYNSLGFSSSPSPIGMPLPSQTPGHSLTPPXSLSSHGSSSSLHLGKKKPKPFLFVCIHVCVFVCVFIIYVKYLMLVKTCQIAFAFRY

SEQ ID NO: 1828 - protein, 291 aa, Homo sapiens
MTNDSEGKMGFKHPKIMGNFRGHALPGTFFFIIGLWWCTKSILKYICKKQKRTCYLGSKTLFYRLEILEGITIVGMALTGMAGEQFIPGGPHLMLYDYKQGHWNQLLGWHHFTMYFFFGLLGVADILCFTISSLPVSLTKLMLSNALFVEAFIFYNHTHGREMLDIFVHQLLVLVVFLTGLVAFLEFLVRNNVLLELLRSSLILLQGSWFFQIGFVLYPPSGGPAWDLMDHENILFLTICFCWHYAVTIVIVGMNYAFITWLVKSRLKRLCSSEVGLLKNAEREQESEEEM

SEQ ID NO: 1829 - protein, 423 aa, Homo sapiens
MLDSQTYYSNFWCGITPQGYYRRTAEYFPTKNRQRRGCFRVPMVHSTFLASLRAEGADQLAFYPPHPNYTWPFDDIIVFAYACQAAGVSVHVCNEHRYGYMNVPVKSHQGLEDERVNFIHLILEALVDGPRMQASAHVTRPSKRPSKIGFDEVFVISLARRPDRRERMLASLWEMEISGRVVDAVDGWMLNSSAIRNLGVDLLPGYQDPYSGRTLTKGEVGCFLSHYSIWEEVVARGLARVLVFEDDVRFESNFRGRLERLMEDVEAEKLSWDLIYLGRKQVNPEKETAVEGLPGLVVAGYSYWTLAYALRLAGARKLLASQPLRRMLPVDEFLPIMFDQHPNEQYKAHFWPRDLVAFSAQPLLAAPTHYAGDAEWLSDTETSSPWDDDSGRLISWSGSQKTLRTPPGPDWQQRAQPPTPAPR

SEQ ID NO: 1830 - protein, 112 aa, Homo sapiens
MQDTGSVVPLHWFGFGYAALVASGGIIGYVKAGSVPSLAAGLLFGSLAGLGAYQLSQDPRNVWVFLATSGTLAGIMGMRFYHSGKFMPAGLIAGASLLMVAKVGVSMFNRPH

SEQ ID NO: 1831 - protein, 118 aa, Homo sapiens
  MISC_FEATURE (117): Xaa equals any of the twenty naturally occurring L-amino acids
MYVCVHIYIYIFIITIFVKFISINGELGKLRKFDRNLSSVIVLHNLFPFCFANLSSVMVLHNLFPFCFALCLVSLNIYVTGYILVILLKSRQLMSTIFFTNWITREIIKEFCLYSPXP

SEQ ID NO: 1832 - protein, 274 aa, Homo sapiens
  MISC_FEATURE (158): Xaa equals any of the twenty naturally occurring L-amino acids
  MISC_FEATURE (197): Xaa equals any of the twenty naturally occurring L-amino acids
  MISC_FEATURE (203): Xaa equals any of the twenty naturally occurring L-amino acids
  MISC_FEATURE (224): Xaa equals any of the twenty naturally occurring L-amino acids
MDPETRGQEIIKVTPLQQMLASCTGAILTSVIVTPLDVVKIRLQAQNNPLPKGKCFVYSNGLMDHLCVCEEGGNKLWYKKPGNFQGTLDAFFKIIRNEGIKSLWSGLPPTLVMAVPATVIYFTCYDQLSALLRSKLGENETCIPIVAGIVARFGAVTXISPLELIRTKMQSKKFSYVELHRFVSKKVSEDGWISLWXGWAPTXLRDVPFSVSMPLHMSTWIIMXNIVAKNGFSGLFSGLIPRLIKIAPACAIMISTYEFGKAFFQKQNVRRQQY

SEQ ID NO: 1833 - protein, 226 aa, Homo sapiens
MTVGLAVCALIVGLALAMFFAVWESAKWRPVAWAGSALVTILRGLPEILVVLFIYFGSSQLLLTLSDGFTINLGFVQIPVQMDIENFDVSPFLCGVIALSLLYAAYASQTLRGALKAVPVGQWESGQALGLSKSAIFFRLVMPQMWRHALPGLGNQWLVLLKDTALVSLISVNDLMLQTKSIATRTQEPFTWYIVAAAIYLVITLLSQYILKRIDLRATRFERRPS

SEQ ID NO: 1834 - protein, 112 aa, Homo sapiens
MATRRCTSTTTRRASLCKVAYEELLDNRKLEVTQTTDPSRQLEGGNLALAILLPLGLVIVLGSGVYIYYTKLQGKSLFGFSGSHSYSPITVESDFSNPLYEAGDTREYEVSI

SEQ ID NO: 1835 - protein, 408 aa, Homo sapiens
  MISC_FEATURE (368): Xaa equals any of the twenty naturally occurring L-amino acids
  MISC_FEATURE (372): Xaa equals any of the twenty naturally occurring L-amino acids
  MISC_FEATURE (375): Xaa equals any of the twenty naturally occurring L-amino acids
  MISC_FEATURE (383): Xaa equals any of the twenty naturally occurring L-amino acids
  MISC_FEATURE (393): Xaa equals any of the twenty naturally occurring L-amino acids
  MISC_FEATURE (397): Xaa equals any of the twenty naturally occurring L-amino acids
  MISC_FEATURE (403): Xaa equals any of the twenty naturally occurring L-amino acids
MAEAEEDCHSDTVRADDDEENESPAETDLQAQLQMFRAQWMFELAPGVSSSNLENRPCRAARGSLQKTSADTKGKQEQAKEEKARELFLKAVEEEQNGALYEAIKFYRRAMQLVPDIEFKITYTRSPDGDGVGNSYIEDNDDDSKMADLLSYFQQQLTFQESVLKLCQPELESSQIHISVLPMEVLMYIFRWVVSSDLDLRSLEQLSLVCRGFYICARDPEIWRLACLKVWGRSCIKLVPYTSWREMFLERPRVRFDGVYISKTTYIRQGEQSLDGFYRAWHQVEYYRYIRFFPDGHVMMLTTPEEPQSIVPRLRTRNTRTDAILLGHYRLSQDTDNQTKVFAVITKKKEEKPLDYKYRYFRRVPVQXGRSXVFXWGLQLCSXWSPEVSTNSXWGTXISLFNXYFTQF

SEQ ID NO: 1836 - protein, 307 aa, Homo sapiens
MTKAGSKGGNLRDKLDGNELDLSLSDLNEVPVKELAALPKATILDLSCNKLTTLPSDFCGLTHLVKLDLSKNKLQQLPADFGRLVNLQHLDLLNNKLVTLPVSFAQLKNLKWLDLKDNPLDPVLAKVAGDCLDEKQCKQCANKVLQHMKAVQADQERERQRRLEVEREAEKKREAKQRAKEAQERELRKREKAEEKERRRKEYDALKAAKREQEKKPKKEANQAPKSKSGSRPRKPPPRKHTRSWAVLKLLLLLLLFGVAGGLVACRVTELQQQPLCTSVNTIYDNAVQGLRRHEILQWVLQTDSQQ

SEQ ID NO: 1837 - protein, 103 aa, Homo sapiens
  MISC_FEATURE (88): Xaa equals any of the twenty naturally occurring L-amino acids
  MISC_FEATURE (99): Xaa equals any of the twenty naturally occurring L-amino acids
MGPPGMPGVPGPMGIPGEPGEEGRYKQKFQSVFTVTRQTHQPPAPNSLIRFNAVLNNPQEIMTRALASSTAKSPALIICLTSVAYSQXCVCCTAAASKXSLLW

SEQ ID NO: 1838 - protein, 366 aa, Homo sapiens [sequence omitted]

SEQ ID NO: 1839 - protein, 363 aa, Homo sapiens
MKRSLNENSARSTAGCLPVPLFNQKKRNRQPLTSNPLKDDSGISTPSDNYDFPPLPTDWAWEAVNPELAPVMKTVDTGQIPHSVSRPLRSQDSVFNSIQSNTGRSQGGWSYRDGNKNTSLKTWNKNDFKPQCKRTNLVANDGKNSCPMSSGAQQQKQLRTPEPPNLSRNKETELLRQTHSSKISGCTMRGLDKNSALQTLKPNFQQNQYKKQMLDDIPEDNTLKETSLYQLQFKEKASSLRIISAVIESMKYWREHAQKTVLLFEVLAVLDSAVTPGPYYSKTFLMRDGKNTLPCVFYEIDRELPRLIRGRVHRCVGNYDQKKNIFQCVSVRPASVSEQKTFQAFVKIADVEMQYYINVMNET

SEQ ID NO: 1840 - protein, 222 aa, Homo sapiens
  MISC_FEATURE (53): Xaa equals any of the twenty naturally occurring L-amino acids
MEIPPTNYPASRAALVAQNYINYQQGTPHRVFEVQKVKQASMEDIPGRGHKYXLKFAVEEIIQKQVKVNCTAEVLYPSTGQETAPEVNFTFEGETGKNPDEEDNTFYQRLKSMKEPLEAQNIPDNFGNVSPEMTLVLHLAWVACGYIIWQNSTEDTWYKMVKIQTVKQVQRNDDFIELDYTILLHNIASQEIIPWQMQVLWHPQYGTKVKHNSRLPKEVQLE

SEQ ID NO: 1841 - protein, 279 aa, Homo sapiens
MADDLGDEWWENQPTGAGSSPEASDGEGEGDTEVMQQETVPVPVPSEKTKQPKECFLIQPKERKENTTKTRKRRKKKITDVLAKSEPKPGLPEDLQKLMKDYYSSRRLVIELEELNLPDSCFLKANDLTHSLSSYLKEICPKWVKLRKNHSEKKSVLMLIICSSAVRALELIRSMTAFRGDGKVIKLFAKHIKVQAQVKLLEKRVVHLGVGTPGRIKELVKQGGLNLSPLKFLVFDWNWRDQKLRRMMDIPEIRKEVFELLEMGVLSLCKSESLKLGLF

SEQ ID NO: 1842 - protein, 368 aa, Homo sapiens
MRVNVDPEDLIPKLPRPRDLQPFPTCQALVYRGHSDLVRCLSVSPGGQWLVSGSDDGSLRLWEVATARCVRTVPVGGVVKSVAWNPSPAVCLVAAAVEDSVLLLNPALGDRLVAGSTDQLLSAFVPPEEPPLQPARWLEASEEERQVGLRLRICHGKPVTQVTWHGRGDYLAVVLATQGHTQVLIHQLSRRRSQSPFRRSHGQVQRVAFHPARPFLLVASQRSVRLYHLLRQELTKKLMPNCKWVSSLAVHPAGDNVICGSYDSKLVWFDLDLSTKPYRMLRHHKKALRAVAFHPRYPLFASGSDDGSVIVCHGMVYNDLLQNPLLVPVKVLKGHVLTRDLGVLDVIFHPTQPWVFSSGADGTVRLFT

SEQ ID NO: 1843 - protein, 104 aa, Homo sapiens
MAQGLGVSQQVLCNFCKTSSLLAPTCPMLGPNVQSWDLSSQNWGAETFVLLDLTLSVPCASVAGLLPATGHASTKDTWPFPVRADGGSFLSHYPLGAWEPCGWI

SEQ ID NO: 1844 - protein, 100 aa, Homo sapiens
MVEGLVLEHKGAHYSNEVYELAQVLRWAGPEERLRRVAERVAARVQRRPWGAWLSARLWKWLKSPRSWRLGLALLLGGALLFWVLLHRRWSEAVAEVGPD

SEQ ID NO: 1845 - protein, 278 aa, Homo sapiens
  MISC_FEATURE (234): Xaa equals any of the twenty naturally occurring L-amino acids
  MISC_FEATURE (244): Xaa equals any of the twenty naturally occurring L-amino acids
  MISC_FEATURE (247): Xaa equals any of the twenty naturally occurring L-amino acids
  MISC_FEATURE (262): Xaa equals any of the twenty naturally occurring L-amino acids
MGQSGRSRHQKRARAQAQLRNLEAYAANPHSFVFTRGCTGRNIRQLSLDVRRVMEPLTASRLQVRKKNSLKDCVAVAGPLGVTHFLILSKTETNVYFKLMRLPGGPTLTFQVKKYSLVRDVVSSLRRHRMHEQQFAHPPLLVLNSFGPHGMHVKLMATMFQNLFPSINVHKVNLNTIKRCLLIDYNPDSQELDFRHYSIKVVPVGASRGMKKLLQEKFPNMSRCRTSASCWPRXRGCRRARQSXRRXTTSQSCLRLSLAVAXCGPSRVQCGSPRSARG

SEQ ID NO: 1846 - protein, 204 aa, Homo sapiens
  MISC_FEATURE (41): Xaa equals any of the twenty naturally occurring L-amino acids
  MISC_FEATURE (159): Xaa equals any of the twenty naturally occurring L-amino acids
MMPSCNRSCSCSRGPSVEDGKWYGVRSYLHLFYEDCAGTAXSDDPEGPPVLCPRRPWPSLCWKISLSSGTLLLLLGVAALTTGYAVPPKLEGIGEGEFLVLDQRAADYNQALGTCRLAGTALCVAAGVLLAICLFWAMIGWLSQDTKAEPLDPEADSHXEVFGDEPEQQLSPIFRNASGQSWFSPPASPFGQSSVQTIQPKRDS

SEQ ID NO: 1847 - protein, 445 aa, Homo sapiens
MSELTKELMELVWGTKSSPGLSDTIFCRWTQGFVFSESEGSALEQFEGGPCAVIAPVQAFLLKKLLFSSEKSSWRDCSEEEQKELLCHTLCDILESACCDHSGSYCLVSWLRGKTTEETASISGSPAESSCQVEHSSALAVEELGFERFHALIQKRSFRSLPELKDAVLDQYSMWGNKFGVLLFLYSVLLTKGIENIKNEIEDASEPLIDPVYGHGSQSLINLLLTGHAVSNVWDGDRECSGMKLLGIHEQAAVGFLTLMEALRYCKVGSYLKSPKFPIWIVGSETHLTVFFAKDMALVAPEAPSEQARRVFQTYDPEDNGFIPDSLLEDVMKALDLVSDPEYINLMKNKLDPEGLGIILLGPFLQEFFPDQGSSGPESFTVYHYNGLKQSNYNEKVMYVEGTAVVMGFEDPMLQTDDTPIKRCLQTKWPYIELLWTTDRSPSLN

SEQ ID NO: 1848 - protein, 224 aa, Homo sapiens
  MISC_FEATURE (6): Xaa equals any of the twenty naturally occurring L-amino acids
  MISC_FEATURE (45): Xaa equals any of the twenty naturally occurring L-amino acids
  MISC_FEATURE (67): Xaa equals any of the twenty naturally occurring L-amino acids
  MISC_FEATURE (133): Xaa equals any of the twenty naturally occurring L-amino acids
MSAVGXATPYLHHPGDSHSGRVSFLGAQLPPEVAAMARLLGDLDXSTFRKLLKFVVSSLQGEDCREXLQRLGVSANLPEEQLGALLAGMHTLLQQALRLPPTSLKPDTFRDQLQELCIPQDLVGDLASVVFGXPAALLDSVAQQQGAWLPHVADFRWRVDVAISTSALARSLQPSVLMQLKLSDGSAYRFEVPTAKFQELRYSVALVLKEMADLEKRCERRLQD

SEQ ID NO: 1849 - protein, 274 aa, Homo sapiens
  MISC_FEATURE (84): Xaa equals any of the twenty naturally occurring L-amino acids
  MISC_FEATURE (136): Xaa equals any of the twenty naturally occurring L-amino acids
MCARRLGRTREAVKMMRDLMKEFPLLSMFNIHENLLEALLELQAYADVQAVLAKYDDISLPKSATICYTAALLKARAVSDKFSXEAASRRGLSTAEMNAVEAIHRAVEFNPHVPKYLLEMKSLILPPEHILKRGDXEAIAYAFFHLAHWKRVEGALNLLHCTWEGTFRMIPYPLEKGHLFYPYPICTETADRELLPSFHEVSVYPKKELPFFILFTAGLCSFTAMLALLTHQFPELMGVFAKAFLSTLFAPLNFVMEKVESILPSSLWHQLTRI

SEQ ID NO: 1850 - protein, 197 aa, Homo sapiens
  MISC_FEATURE (117): Xaa equals any of the twenty naturally occurring L-amino acids
  MISC_FEATURE (119): Xaa equals any of the twenty naturally occurring L-amino acids
MAAGGRMEDGSLDITQSIEDDPLLDAQLLPHHSLQAHFRPRFHPLPTVIIVNLLWFIHLVFVVLAFLTGVLCSYPNPNEDKCPGNYTNPLKVQTVIILGKVILWILHLLLECYIQYXHXKIRNRGYNLIYRSTRHLKRLALMIQSSGNTVLLLILCMQHSFPEPGRLYLDLILAILALELICSLICLLIYTVKIPEI

SEQ ID NO: 1851 - protein, 260 aa, Homo sapiens
  MISC_FEATURE (50): Xaa equals any of the twenty naturally occurring L-amino acids
MQHLWIPLCAPNSLSQLPITDTIRKDSKEKKKRKASKLTLWGTYHGMTLXSVTEGASARKTQTPAAQPVPRPVSQARPPPNQKKGSRTPIIIIPAATTSLITMLNAKDLLQDLKFVPSDEKKKQGCQRENETLIQRRKDQMQPGGTAISVTVPYRVVDQPLKLMPQDWDRVVAVFVQGPAWQFKGWPWLLPDGSPVDIFAKIKAFHLKYDEVRLDPNVQKWDVTVLELSYHKRHLDRPVFLRFWETLDRYMVKHKSHLRF

SEQ ID NO: 1852 - protein, 149 aa, Homo sapiens
  MISC_FEATURE (82): Xaa equals any of the twenty naturally occurring L-amino acids
  MISC_FEATURE (99): Xaa equals any of the twenty naturally occurring L-amino acids
  MISC_FEATURE (125): Xaa equals any of the twenty naturally occurring L-amino acids
MSTNICSFKDRCVSILCCKFCKQVLSSRGMKAVLLADTEIDLFSTDIPPTNAVDFTGRCYFTKICKCKLKDIACLKCGNIVXYHVIVPCSSCLLSCNNXHFWMFHSQAVYDINRLDSTGVNVLLXGNLPEIEESTDEDVLNISAEECIR

SEQ ID NO: 1853 - protein, 118 aa, Homo sapiens
  MISC_FEATURE (39): Xaa equals any of the twenty naturally occurring L-amino acids
  MISC_FEATURE (90): Xaa equals any of the twenty naturally occurring L-amino acids
  MISC_FEATURE (103): Xaa equals any of the twenty naturally occurring L-amino acids
MAEMNHHVCPVENWSYNESCPPDPAEQGGPKTCCTLDDXPLISKCGSYPPESCLFSLIGNMGAFMEALICLLRYGQLLEQSRHSWVNTTXLITGCTNAAGLLXVGNFQPRFRWSLLCP

SEQ ID NO: 1854 - protein, 294 aa, Homo sapiens
MDPLIANNSGVNKRQITDLVDQSIQINAHCFVVTADNRYILICGFWDKSFRVYSTETGKLTQIVFGHWDVVTCLARSESYIGGDCYIVSGSRDATLLLWYWSGRHHIIGDNPNSSDYPAPRAVLTGHDHEVVCVSVCAELGLVISGAKEGPCLVHTITGDLLRALEGPENCLFPRLISVSSEGHCIIYYERGRFSNFSINGKLLAQMEINDSTRAILLSSDGQNLVTGGDNGVVEVWQACDFKQLYIYPGCDAGIRAMDLSHDQRTLITGMASGSIVAFNIDFNRWHYEHQNRY

SEQ ID NO: 1855 - protein, 146 aa, Homo sapiens
  MISC_FEATURE (124): Xaa equals any of the twenty naturally occurring L-amino acids
MKHSLSVGEVIEVLEVLLIFVYLNMILLYLLPRCFTPGEALLVLGGISFVLNQLIKRSLTLVESQGDPVDFFLLVVVVGMVLMGIFFSTLFVFMDSGTWASSIFFHLMTCVLSLGVVLPWLHRXIRRIPCSGFFSFSSRQTPASTS

SEQ ID NO: 1856 - protein, 198 aa, Homo sapiens
MGPWGEPELLVWRPEAVASEPPVPVGLEVKLGALVLLLVLTLLCSLVPICVLRRPGANHEGSASRQKALSLVSCFAGGVFLATCLLDLLPDYLAAIDEALAALHVTLQFPLQEFILAMGFFLVLVMEQITLAYKEQSGPSPLEETRALLGTVNGGPQHWHDWARGPTGEWSPSNPLSLACPVYWCSPWPSTPCSRGWR

SEQ ID NO: 1857 - protein, 108 aa, Homo sapiens
  MISC_FEATURE (64): Xaa equals any of the twenty naturally occurring L-amino acids
MTFKIIFFKYIFLSSMTKIKMNQQKVSLHICKCIYPYRITCQSVATFFHAHSSLANWLLFVCKXLFLSHPILLACVKCKSQVFPAGSNVFLSLNQGPTGCLLLQIKFY

SEQ ID NO: 1858 - protein, 158 aa, Homo sapiens
MPLAHLLEHIYSLSDYPTPISISTILFLALHLLSNILPSSFLLLMFKYFLKFSCLFCQCETRVVISKSLLGCSYFFDLCYSLSKYFPASLLSVVLFTSLSASNVFCLKSKAHWYHIQSSIMYSANLTYYHAHVQFCCFQSSVLIYLSRKLHSHPLPLE

SEQ ID NO: 1859 - protein, 133 aa, Homo sapiens
MGSVTVRYFCYGCLFTSATWTVLLFVYFNFSEVTQPLKNVPVKGSGPHGPSPKKFYPRFTRGPSRVLEPQFKANKIDDVIDSRVEDPEEGHLKFSSELDVKKSSTHLTCQLLVLLSVSIMKRFLPCFGQCTVS

SEQ ID NO: 1860 - protein, 145 aa, Homo sapiens
MDSNGLSDPYVKFRLGHQKYKSKIMPKTLNPQWREQFDFHLYEERGGVIDITAWDKDAGKRDDFIGRCQVDLSALSREQTHKLELQLEEGEGHLVLLVTLTASATVSISDLSVNSLEDQKEREEILKRYSPLRIFHNLKDVGFLQ

SEQ ID NO: 1861 - protein, 189 aa, Homo sapiens
  MISC_FEATURE (170): Xaa equals any of the twenty naturally occurring L-amino acids
  MISC_FEATURE (178): Xaa equals any of the twenty naturally occurring L-amino acids
MAAAKVALTKRADPAELRTIFLKYASIEKNGEFFMSPNDFVTRYLNIFGESQPNPKTVELLSGVVDQTKDGLISFQEFVAFESVLCAPDALFMVAFQLFDKAGKGEVTFEDVKQVFGQTTIHQHIPFNWDSEFVQLHFGKERKRHLTYAEFTQFLFGNPLEHAKQAFVHXAMLGLGGXSHRFRASGTSA

SEQ ID NO: 1862 - protein, 115 aa, Homo sapiens [sequence omitted]

SEQ ID NO: 1863 - protein, 322 aa, Homo sapiens [sequence omitted]

SEQ ID NO: 1864 - protein, 229 aa, Homo sapiens
MVWNSEEIQQQIWIPSVFIGERSSEYLRALFVYEKGARVLLVPDNTFPLGYYLIPFTGIVGLLVLAMGAVMIARCIQHRKRLQRNRLTKEQLKQIPTHDYQKGDQYDVCAICLDEYEDGDKLRVLPCAHAYHSRCVDPWLTQTRKTCPICKQPVHRGPGDEDQEEETQGQEEGDEGEPRDHPASERTPLLGSSPTLPTSFGSLAPAPLVFPGPSTDPPLSPPSSPVILV

SEQ ID NO: 1865 - protein, 201 aa, Homo sapiens
MTLRPSLLPLHLLLLLLLSAAVCRAEAGLETESPVRTLQVETLVEPPEPCAEPAAFGDTLHIHYTGSLVDGRIIDTSLTRDPLVIELGQKQVIPGLEQSLLDMCVGEKRRAIIPSHLAYGKRGFPPSVPADAVVQYDVELIALIRANYWLKLVKGILPLVGMAMVPALLGLIGYHLYRKANRPKVSKKKLKEEKRNKSKKK

SEQ ID NO: 1866 - protein, 117 aa, Homo sapiens
  MISC_FEATURE (71): Xaa equals any of the twenty naturally occurring L-amino acids
  MISC_FEATURE (75): Xaa equals any of the twenty naturally occurring L-amino acids
  MISC_FEATURE (107): Xaa equals any of the twenty naturally occurring L-amino acids
  MISC_FEATURE (112): Xaa equals any of the twenty naturally occurring L-amino acids
MVNESSLTGESIPVLKTALPEGLGPYCAETHRRHTLFCGTLILQARAYVGPHVLAVVTRTGFCTAKGGLVXSILXPRPINFKFYKHSMKFVAALSVLALLGTIYSIXILYRXRVPLK

SEQ ID NO: 1867 - protein, 134 aa, Homo sapiens [sequence omitted]

SEQ ID NO: 1868 - protein, 111 aa, Homo sapiens
  MISC_FEATURE (74): Xaa equals any of the twenty naturally occurring L-amino acids
  MISC_FEATURE (92): Xaa equals any of the twenty naturally occurring L-amino acids
  MISC_FEATURE (102): Xaa equals any of the twenty naturally occurring L-amino acids
  MISC_FEATURE (107): Xaa equals any of the twenty naturally occurring L-amino acids
MQWPMCTFMPHSCLGSTQSPIPSCAHAICALLSASKGRWQSPPFRATGALCVGGSLGCCLWCLQKPFRMPSGAXPSTRRVLSTAVAQEPSLXSHEMTPLLFXAEGVXVFSK

SEQ ID NO: 1869 - protein, 102 aa, Homo sapiens
  MISC_FEATURE (18): Xaa equals any of the twenty naturally occurring L-amino acids
  MISC_FEATURE (29): Xaa equals any of the twenty naturally occurring L-amino acids
  MISC_FEATURE (47): Xaa equals any of the twenty naturally occurring L-amino acids
MHPCRNKEWVACPAQHHXLSPARERPPKXQGSSCFLGSVTLESEPAXQELPQKRKTKKSPPSQGLLLQGLAPSLAFGSCLFPHSWSLIFGATSGESPGPQSL

SEQ ID NO: 1870 - protein, 247 aa, Homo sapiens
MLRFIQKFSQASSKILKYSFPVGLRTSRTDILSLKMSLQQNFSPCPRPWLSSSFPAYMSKTQCYHTSPCSFKKQQKQALLARPSSTITYLTDSPKPALCVTLAGLIPFVAPPLVMLMTKTYIPILAFTQMAYGASFLSFLGGIRWGFALPEGSPAKPDYLNLASSAAPLFFSWFAFLISERLSEAIVTVIMGMGVAFHLELFLLPHYPNWFKALRIVVTLLATFSFIITLVVKSSFPEKGHKRPGQV

SEQ ID NO: 1871 - protein, 167 aa, Homo sapiens
  MISC_FEATURE (161): Xaa equals any of the twenty naturally occurring L-amino acids
MAMGGSAPSFMAKMSRQHVPYAGILATLVVYVVGVFLNYLVPSRVFEIVLNFASLGIIASWAFIIVCQMRLRKAIKEGKAADVSFKLPGAPFTSWLTLLVLLSVLVLMAFDYPNGTYTIAALPIIGILLVIGWFGVRKRVAEIHSTAPVVEEDEEKQEIVXKPETAS

SEQ ID NO: 1872 - protein, 114 aa, Homo sapiens
  MISC_FEATURE (78): Xaa equals any of the twenty naturally occurring L-amino acids
  MISC_FEATURE (101): Xaa equals any of the twenty naturally occurring L-amino acids
  MISC_FEATURE (106): Xaa equals any of the twenty naturally occurring L-amino acids
MHKKMTCVGQKSEKGYQALNRRERRVCFQRLSYSFKGLIMKLNFKGFFKAAGLFPLALMLSGCISYALVSHTAKGSSXKYQSQSDTITGLSQAKDSNGTKXYGFCXGIAGLPYH

SEQ ID NO: 1873 - protein, 134 aa, Homo sapiens
  MISC_FEATURE (22): Xaa equals any of the twenty naturally occurring L-amino acids
MWQSCLLKLNTRMKSVVLVKNXYNILFLLMYPELLHSPLTAAYYFILLSQLLSCSIPEYLPTEGELLPFLFLTVWLWLYKLLFGESPRYPNVIGKTYFFFWTDQISRESRFLERLAFIVSENCLIFLIHAITGQ

SEQ ID NO: 1874 - protein, 131 aa, Homo sapiens
  MISC_FEATURE (35): Xaa equals any of the twenty naturally occurring L-amino acids
MSTTNVRKLMNCGGFGMEATLLLVVGYSHSKGVAXSFLVLAVASAASHLWVQREPPGHSPALRQHPHGHLQRRGHTVGHGVPIIVGAMTKHKTREEWQYVFLIASLVHYGGVIFYGVFASGEKQPWAELRR

SEQ ID NO: 1875 - protein, 165 aa, Homo sapiens
  MISC_FEATURE (37): Xaa equals any of the twenty naturally occurring L-amino acids
MADFDEIYEEEEDEERALEEQLLKYSPDPVVVRGSGXVTVFGLSNKFESEFPSSLTGKVAPEEFKASINRVNSCLKKNLPVNVRWLLCGCLCCCCTLGCSMWPVICLSKRTRRSIEKLLEWENNRLYHKLCLHWRLSKRKCETNNMMEYVILIEFLPKTPIFRPD

SEQ ID NO: 1876 - protein, 103 aa, Homo sapiens
  MISC_FEATURE (88): Xaa equals any of the twenty naturally occurring L-amino acids
  MISC_FEATURE (97): Xaa equals any of the twenty naturally occurring L-amino acids
  MISC_FEATURE (103): Xaa equals any of the twenty naturally occurring L-amino acids
MYCAEVAAVHIHSVCQHRISSFLTQLSVIKISYWMFPLGTGSSLAPWQENRIANHKSRALTPALMLLCFVTLCRQLYIPISGHSPPYXGGEGHLALXMSAWLX

SEQ ID NO: 1877 - protein, 144 aa, Homo sapiens
  MISC_FEATURE (2): Xaa equals any of the twenty naturally occurring L-amino acids
  MISC_FEATURE (134): Xaa equals any of the twenty naturally occurring L-amino acids
GXAMVSGPGGGGRGVRPGWGRPWCQARVGAAVLPGPGGGGLGVRPGWGRPWCQARVGARARGQRWESPCGLDQLKARICILKVAKPGLRARAFTLDKKHFLELQKMLPRTLFPLSLSLYFFFFGYGVSLLLPSXEVAVSRDRAI

SEQ ID NO: 1878 - protein, 158 aa, Homo sapiens
  MISC_FEATURE (73): Xaa equals any of the twenty naturally occurring L-amino acids
MRPALAVGLVFAGCCSNVIFLELLARKHPGCGNIVTFAQFLFIAVEGFLFEADLGRKRPAIPIRYYAVMVTMXFTVSVVNNYALNLNIAMPLHMIFRSGSLIANMILGIIILKKRYSIFKYTSIALVSVGIFICTFMSAKQVTFPVQLGVRMMDSRHF

SEQ ID NO: 1879 - protein, 830 aa, Homo sapiens
MVEEENIRVVRCGGSELNFRRAVFSADSKYIFCVSGDFVKVYSTVTEECVHILHGHRNLVTGIQLNPNNHLQLYSCSLDGTIKLWDYIDGILIKTFIVGCKLHALFTLAQAEDSVFVIVNKEKPDIFQLVSVKLPKSSSQEVEAKELSFVLDYINQSPKCIAFGNEGVYVAAVREFYLSVYFFKKKTTSRFTLSSSRNKKHAKNNFTCVACHPTEDCIASGHMDGKIRLWRNFYDDKKYTYTCLHWHHDMVMDLAFSVTGTSLLSGGRESVLVEWRDATEKNKEFLPRLGATIEHISVSPAGDLFCTSHSDNKIIIIHRNLEASAVIQGLVKDRSIFTGLMIDPRTKALVLNGKPGHLQFYSLQSDKQLYNLDIIQQEYINDYGLIQIELTKAAFGCFGNWLATVEQRQEKETELELQMKLWMYNKKTQGFILNTKINMPHEDCITALCFCNAEKSEQPTLVTASKDGYFKVWILTDDSDIYKKAVGWTCDFVGSYHKYQATNCCFSEDGSLLAVSFEEIVTIWDSVTWELKCTFCQRAGKIRHLCFGRLTCSKYLLGATENGILCCWNLLSCALEWNAKLNVRVMEPDPNSENIAAISQSSVGSDLFVFKPSEPRPLYIQKGISREKVQWGVFVPRDVPESFTSEAYQWLNRSQFYFLTKSQSLLTFSTKSPEEKLTPTSKQLLAEESLPTTPFYFILGKHRQQQDEKLNETLENELVQLPLTENIPAISELLHTPAHVLPSAAFLCSMFVNSLLLSKETKSAKEIPEDVDMEEEKESEDSDEENDFTEKVQDTSNTGLGEDIIHQLSKSEEKELRKFRKIDYSWIAAL

SEQ ID NO: 1880 - protein, 195 aa, Homo sapiens
  MISC_FEATURE (50): Xaa equals any of the twenty naturally occurring L-amino acids
MAPAASRLRAEAGLGALPRRALAQYLLFLRLYPVLTKAATSGILSALGNXLAQMIEKKRKKENSRSLDVGGPLRYAVYGFFFTGPLSHFFYFFMEHWIPPEVPLAGLRRLLLDRLVFAPAFLMLFFLIMNFLEGKDASAFAAKMRGGFWPALRMNWRVWTPLQFININYVPLKFRVLFANLAALFWYAYLASLGK

SEQ ID NO: 1881 - protein, 268 aa, Homo sapiens
  MISC_FEATURE (142): Xaa equals any of the twenty naturally occurring L-amino acids
MPNVAETERSNDSGNGEHKSERKSPEENLQGAVKSFCTSASGAPLGPKGDGHYPWSCPVTHTREKIYAICSDYAFLNQATSIYKTPNPSRSPCLPDSTSLSAGNNSSRYIGIPTSTSEIIYNEENSLENLSNSLGKLPLAWXIDKSEFDGVTTNSKHKSGNAKKQVSKRKTSDKKGRYQKECPQHSPLEDIKQRKVLDLRRWYCISRPQYKTSCGISSLISCWNFLYSTMGSWETFHLLPKKKLYIFWAFNLHLKILGLVLSRGIQHL

SEQ ID NO: 1882 - protein, 409 aa, Homo sapiens [sequence omitted]

SEQ ID NO: 1883 - protein, 180 aa, Homo sapiens
MRPLTEEETRVMFEKIAKYIGENLQLLVDRPDGTYCFRLHNDRVYYVSEKIMKLAANISGDKLVSLGTCFGKFTKTHKFRLHVTALDYLAPYAKYKVWIKPGAEQSFLYGNHVLKSGLGRITENTSQYQGVVVYSMADIPLGFGVAAKSTQDCRKVDPMAIVVFHQADIGEYVRHEETLT

SEQ ID NO: 1884 - protein, 211 aa, Homo sapiens
  MISC_FEATURE (143): Xaa equals any of the twenty naturally occurring L-amino acids
  MISC_FEATURE (172): Xaa equals any of the twenty naturally occurring L-amino acids
  MISC_FEATURE (176): Xaa equals any of the twenty naturally occurring L-amino acids
  MISC_FEATURE (182): Xaa equals any of the twenty naturally occurring L-amino acids
  MISC_FEATURE (204): Xaa equals any of the twenty naturally occurring L-amino acids
MAAGGGGSCDPLAPAGVPCAFSPHSQAYFALASTDGHLRVWETANNRLHQEYVPSAHLSGTCTCLAWAPARLQAKESPQRKKRKSEAVGMSNQTDLLALGTAVGSILLYSTVKGELHSKLISGGHDNRVNCIQWHQDSGCLYXCSDDKHIVEWNVQTCKVKCKWKGDNSKCXFLCXTQMERXCFQLVEQSTMGLETKKLQAFTXHCNASSY

SEQ ID NO: 1885 - protein, 198 aa, Homo sapiens
MGRHEVGHIDNSMKIPLNNGAGCRFEGQFSINKVPGNFHVSTHSATAQPQNPDMTHVIHKLSFGDTLQVQNIHGAFNALGGADRLTSNPLASHDYILKIVPTVYEDKSGKQRYSYQYTVANKEYVAYSHTGRIIPAIWFRYDLSPITVKYTERRQPLYRFITTICAIIGGTFTVAGILDSCIFTASEAWKKIQLGKMH

SEQ ID NO: 1886 - protein, 600 aa, Homo sapiens
MPEIRVTPLGAGQDVGRSCILVSIAGKNVMLDCGMHMGFNDDRRFPDFSYITQNGRLTDFLDCVIISHFHLDHCGALPYFSEMVGYDGPIYMTHPTQAICPILLEDYRKIAVDKKGEANFFTSQMIKDCMKKVVAVHLHQTVQVDDELEIKAYYAGHVLGAAMFQIKVGSESVVYTGDYNMTPDRHLGAAWIDKCRPNLLITESTYATTIRDSKRCRERDFLKKVHETVERGGKVLIPVFALGRAQELCILLETFWERMNLKVPIYFSTGLTEKANHYYKLFIPWTNQKIRKTFVQRNMFEFKHIKAFDRAFADNPGPMVVFATPGMLHAGQSLQIFRKWAGNEKNMVIMPGYCVQGTVGHKILSGQRKLEMEGRQVLEVKMQVEYMSFSAHADAKGIMQLVGQAEPESVLLVHGEAKKMEFLKQKIEQELRVNCYMPANGETVTLPTSPSIPVGISLGLLKREMAQGLLPEAKKPRLLHGTLIMKDSNFRLVSSEQALKELGLAEHQLRFTCRVHLHDTRKEQETALRVYSHLKSVLKDHCVQHLPDGSVTVESVLLQAAAPSEDPGTKVLLVSWTYQDEELGSFLTSLLKKGLPQAPS

SEQ ID NO: 1887 - protein, 118 aa, Homo sapiens
  MISC_FEATURE (108): Xaa equals any of the twenty naturally occurring L-amino acids
MVFIGIAFNFILDRKVPVYVENFLDGLGNSFSGSALFYLGLTMVGKIKRLKKSAFVVLILLITAKLLVLPLLCREMVELLDKGDSVVNHTSLSNYAFLYGVFPVAPGXATLQHNSTWK

SEQ ID NO: 1888 - protein, 176 aa, Homo sapiens
  MISC_FEATURE (156): Xaa equals any of the twenty naturally occurring L-amino acids
  MISC_FEATURE (163): Xaa equals any of the twenty naturally occurring L-amino acids
  MISC_FEATURE (166): Xaa equals any of the twenty naturally occurring L-amino acids
  MISC_FEATURE (167): Xaa equals any of the twenty naturally occurring L-amino acids
  MISC_FEATURE (170): Xaa equals any of the twenty naturally occurring L-amino acids
  MISC_FEATURE (176): Xaa equals any of the twenty naturally occurring L-amino acids
MAAPRQIPSHIVRLKPSCSTDSSFTRTPVPTVSLASRELPVSSWQVTEPSSKNLWEQICKEYEAEQPPFPEGYKVKQEPVITVAPVEEMLFHGFSAEHYFPVSHFTMISRTPCPQDKSETINPKTCSPKEYLETFIFPVLLPGMASLLHQAKKEKXFERKRTXFIXXDFXLNGLYX

SEQ ID NO: 1889 - protein, 135 aa, Homo sapiens
  MISC_FEATURE (94): Xaa equals any of the twenty naturally occurring L-amino acids
  MISC_FEATURE (101): Xaa equals any of the twenty naturally occurring L-amino acids
  MISC_FEATURE (105): Xaa equals any of the twenty naturally occurring L-amino acids
  MISC_FEATURE (111): Xaa equals any of the twenty naturally occurring L-amino acids
MFLADVVDFIIIIFGFWAFGKHSAATDITSSLSDDQVPEAFLVMLLIQFSTMVVDRALYLRKTVLGKLAFQVALVLAIHLWMFFILPAVTERMXNQNVVAXLWYXVKCIYXACPPTDPLRVPHRILGNFLTKKSI

SEQ ID NO: 1890 - protein, 154 aa, Homo sapiens
MVLGIQLEEGYRTYHMDEYDEDKNPSGIINLGTSENKLCFDLLSWRLSQRDMQRVEPSLLQYADWRGHLFLREKVAKFLSFYCKSPVPLRPENVVVLNGGASLFSALATVLCEAGEAFLIPTPYYGAITQHVCLYGNIRLAYVYLDSEVRVLTS

SEQ ID NO: 1891 - protein, 181 aa, Homo sapiens
  MISC_FEATURE (103): Xaa equals any of the twenty naturally occurring L-amino acids
  MISC_FEATURE (134): Xaa equals any of the twenty naturally occurring L-amino acids
  MISC_FEATURE (161): Xaa equals any of the twenty naturally occurring L-amino acids
MAPALLLIPAALASFILAFGTGVEFVRFTSLRPLLGGIPESGGPDARQGWLAALQDRSILAPLAWDLGLLLLFVGQHSLMAAERVKAWTSRYFGVLQRSLYVXCTALALQLVMRYWEPIPKGPVLWEARAEHGXLGAAPLLCAPCHLLLLIFSILLALTMXSSWASNRYTTMCWGWASLWP

SEQ ID NO: 1892 - protein, 134 aa, Homo sapiens [sequence omitted]

SEQ ID NO: 1893 - protein, 124 aa, Homo sapiens
  MISC_FEATURE (82): Xaa equals any of the twenty naturally occurring L-amino acids
  MISC_FEATURE (85): Xaa equals any of the twenty naturally occurring L-amino acids
  MISC_FEATURE (92): Xaa equals any of the twenty naturally occurring L-amino acids
MSRRLSQMLLMFLLATCLLAIIFVPQEMQTLRVVLATLGVGAASLGITCSTAQENELIPSIIRGRATGNHWETLLILGEPWXPSXMILSIYXRPLALGSSMGVFAILSGLVVLLLPETREPASS

SEQ ID NO: 1894 - protein, 153 aa, Homo sapiens
MPECQHVWHWSGLQLAKGCLLNHSSIVPVLQDIIKDCYGITKCDRHVGKIYSKCSSFLDYVRRSLKKLGLDESKLPEKIIMNYYEKYKPRMNELEAFNMLKVVLAPCIETLILLDRLCYLKEQEDIAWSALVKLFDPVKSPRCYAVIALKKQQ

SEQ ID NO: 1895 - protein, 165 aa, Homo sapiens [sequence omitted]

SEQ ID NO: 1896 - protein, 113 aa, Homo sapiens
  MISC_FEATURE (74): Xaa equals any of the twenty naturally occurring L-amino acids
MLHILNFSCAVWLGICLAFCMFLYKRELSYLTENRYMEVDSLPVEPACFFVFFCCCCFFLSYICFYFLKKKRKXSPLLETTSVILGALSLQIGKPSYTKLFTFFIYDSTNRRD

SEQ ID NO: 1897 - protein, 111 aa, Homo sapiens
  MISC_FEATURE (4): Xaa equals any of the twenty naturally occurring L-amino acids
  MISC_FEATURE (6): Xaa equals any of the twenty naturally occurring L-amino acids
  MISC_FEATURE (10): Xaa equals any of the twenty naturally occurring L-amino acids
  MISC_FEATURE (16): Xaa equals any of the twenty naturally occurring L-amino acids
  MISC_FEATURE (22): Xaa equals any of the twenty naturally occurring L-amino acids
  MISC_FEATURE (48): Xaa equals any of the twenty naturally occurring L-amino acids
MLLXLXHYRXEIVKHXGHLVEXLCRRVIRSVTLQVLLRFVDQRIGNFXVSIFSSPLRIASFNASTRSRLISLLPGCISFACASLNVTLVLVEAVVFAARLFVTGASVVSRG

SEQ ID NO: 1898 - protein, 286 aa, Homo sapiens
  MISC_FEATURE (116): Xaa equals any of the twenty naturally occurring L-amino acids
  MISC_FEATURE (124): Xaa equals any of the twenty naturally occurring L-amino acids
  MISC_FEATURE (131): Xaa equals any of the twenty naturally occurring L-amino acids
EGPADEYYIIYRNVFDKVIEHITAYKSILTSIKKEYDAFIETIKKDRRTTFCLHGKLKGLAAEPTALVYYRKRTIQLEAKMRIIESNSSKIQSQIDHIKQCRAEYDTKEVKYWTFXKDPSKPIXGMTLQEXMNLDALTKYMKHLEDKYAEIKQAMLIKYVPAQRKADLDEEMIVLLKRRDVAENLNKKLQFWFNELISLGEYEKAACYAANSPRRILRNIGTMNTFKAVGKIRGKPLPLLLFFEALFITSHAFPCPVDAALTLEGIKCGLSEKRLDLVTNWVTQER

SEQ ID NO: 1899 - protein, 122 aa, Homo sapiens
MTSHEPPVYMDEDDDRSCFHSHMNTAVEDASDDESIPIMYRNLPEYKELLQFKKLKKQKLQQMQAESGFVQHVGFKCDNCGIEPIQGVRWHCRIVLQKCLWISVILVQTVYMKQIFTRKITN

SEQ ID NO: 1900 - protein, 105 aa, Homo sapiens
  MISC_FEATURE (91): Xaa equals any of the twenty naturally occurring L-amino acids
MDDFLFSVSILSGILCSILAVLKFMLGKVLTSRALITDGFNSLVGGVMGFSILLSAEVFKHDSAVWYLDGSIGVLIGLTIFAYGVKLLIDXVPRVRQTRHYEMFE

SEQ ID NO: 1901 - protein, 132 aa, Homo sapiens [sequence omitted]

SEQ ID NO: 1902 - protein, 272 aa, Homo sapiens
  MISC_FEATURE (90): Xaa equals any of the twenty naturally occurring L-amino acids
  MISC_FEATURE (130): Xaa equals any of the twenty naturally occurring L-amino acids
  MISC_FEATURE (243): Xaa equals any of the twenty naturally occurring L-amino acids
  MISC_FEATURE (249): Xaa equals any of the twenty naturally occurring L-amino acids
  MISC_FEATURE (256): Xaa equals any of the twenty naturally occurring L-amino acids
MQAARVDYIAPWWVVWLHSVPHVGLRLQPVNSTFSPGDESYQESLLFLGLVAAVCLGLNLIFLVAYLVCACHCRRDDAVQTKQHHSCCIXWTAVVAGLICCAAVGVGFYGNSETNDGAYQLMYSLDDANXTFSGIDALVSGTTQKMKVDLEQHLARLSEIFAARGDYLQTLKFIQQMAGSVVVQLSGLPVWREVTMELTKLSDQTGYVEYYRWLSYLLLFILDLVICLIACLGLAKRSKCLLXSMLCCXALSLLLXWASLAADGAAAVGTSD

SEQ ID NO: 1903 - protein, 199 aa, Homo sapiens
  MISC_FEATURE (187): Xaa equals any of the twenty naturally occurring L-amino acids
MGGFFNSGCSQCQISSFYLVNDIYELDTSGLEDTMEIQERIENSFKSLLDQLKDVFSKCKGDLLEVKDGNLKTHPTLLENLVFFVETISVILWVSSYCESVLRPYKLNLQKKKKKKKETSIIMPPVFTSFQDYVTGLQTLISNVVDHIKGLETHLIALKLEELILEDTSLSPEERKFSKTVQGKVQXVICTHFWKWGSC

SEQ ID NO: 1904 - protein, 202 aa, Homo sapiens
  MISC_FEATURE (2): Xaa equals any of the twenty naturally occurring L-amino acids
  MISC_FEATURE (3): Xaa equals any of the twenty naturally occurring L-amino acids
  MISC_FEATURE (4): Xaa equals any of the twenty naturally occurring L-amino acids
  MISC_FEATURE (8): Xaa equals any of the twenty naturally occurring L-amino acids
  MISC_FEATURE (196): Xaa equals any of the twenty naturally occurring L-amino acids
EXXXSIIXYKGQDLPHPKSMLQATAEANNLAAAASAKDIYYNNMEEVCGGEKPYLSPDILEEKHCEFKQLALDHFKKTKKMGGKDFSFRYQQELEEEIKELYENFCKHNGSKNVFSTFRTPAVLFTGIVALYIASGLTGFIGLEVVAQLFNCMVGLLLIALLTWGYIRYSGQYRELGGLLILVPHMCWSRLLLISXIPLRPL

SEQ ID NO: 1905 - protein, 262 aa, Homo sapiens
MVTLVPYWMVYFQMQSTYVLQGLHLHIPNIFPANPANISVALRAQGSSYTIPEAWLLLANVVVVLILVPLKDRLIDPLLLRCKLLPSALQKMALGMFFGFTSVIVAGVLEMERLHYIHHNETVSQQIGEVLYNAAPLSIWWQIPQYLLIGISEIFASIPGLEFAYSEAPRSMQGAIMGIFFCLSGVGSLLGSSLVALLSLPGGWLHCPKDFGNINNCRMDLYFFLLAGIQAVTALLFVWIAGRYERASQGPASHSRFSRDRG

SEQ ID NO: 1906 - protein, 151 aa, Homo sapiens
  MISC_FEATURE (149): Xaa equals any of the twenty naturally occurring L-amino acids
  MISC_FEATURE (150): Xaa equals any of the twenty naturally occurring L-amino acids
WNKDLRLLFDQFMKKCEDGSWKRLPSYKRTPTEWIQDFKTHFLDPKLMKEEQMSQAQLFTRSFDDGLGFEYVMFYNDIEKRMVCLFQGGPYLEGPPGFIHGGAIATMIDATVGMCAMMAGGIVMTANLNINYKRPIPLCSVVMINSQLXXS

SEQ ID NO: 1907 - protein, 421 aa, Homo sapiens
  MISC_FEATURE (45): Xaa equals any of the twenty naturally occurring L-amino acids
  MISC_FEATURE (248): Xaa equals any of the twenty naturally occurring L-amino acids
MPVSCSLSRGLQVLLTPVLANILEADQEKCWGFDQFFAETSDILXRMVIHVFSLQQMTAHKIYIHSYNTATIFHELVYKQTKIISSNQELIYEGRRLVLEPGRLAQHFPKTTEENPIFVVSREPLNTIGLIYEKISLPKVHPRYDLDGDASMAKAITGVVCYACRIASTLLLYQELMRKGIRWLIELIKDDYNETVHKKTEVVITLDFCIRNIEKTVKVYEKLMKINLEAAELGEISDIHTKLLRLSXSQGTIETSLQDIDSRLSPGGSLADAWAHQEGTHPKDRNVEKLQVLLNCMTEIYYQFKKDKAERRLAYNEEQIHKFDKQKLYYHATKAMTHFTDECVKKYEAFLNKSEEWIRKMLHLRKQLLSLTNQCFDIEEEVSKYQEYTNELQETLPQKMFTASSGNQTYHGPQFIQVLTH

SEQ ID NO: 1908 - protein, 127 aa, Homo sapiens [sequence omitted]

SEQ ID NO: 1909 - protein, 289 aa, Homo sapiens
  MISC_FEATURE (14): Xaa equals any of the twenty naturally occurring L-amino acids
MMDRIVTGLSESSXKVRLAAVRCLHSLSRSVQQLRTSFQDHAVWKPLMKVLQNAPDEILVVASSMLCNLLLEFSPSKEPILESGAVELLCGLTQSENPALRVNGIWALMNMAFQAEQKIKADILRSLSTEQLFRLLSDSDLNVLMKTLGLLRNLLSTRPHIDKIMSTHGKQIMQAVTLILEGEHNIEVKEQTLCILANIADGTTAKDLIMTNDDILQKIKYYMGHSHVKLQLAAMFCISNLIWNEEEGSQERQDKLRDMGIVDILHKLSQSPDSNLCDKAKMALQQYLA

SEQ ID NO: 1910 - protein, 159 aa, Homo sapiens
  MISC_FEATURE (107): Xaa equals any of the twenty naturally occurring L-amino acids
MADTVLFEFLHTEMVAELWAHDPDPGPGGQKMSLSVLEGMGFRVGQALGERLPRETLAFREELDVLKFLCKDLWVAVFQKQMDSLRTNHQGTYVLQDNSFPLLLPMXSGLQYLEEAPKFLAFTCGLLRGALYTLGIESVVTASVAALPVCKFQVVIPKS

SEQ ID NO: 1911 - protein, 168 aa, Homo sapiens
  MISC_FEATURE (166): Xaa equals any of the twenty naturally occurring L-amino acids
  MISC_FEATURE (167): Xaa equals any of the twenty naturally occurring L-amino acids
  MISC_FEATURE (168): Xaa equals any of the twenty naturally occurring L-amino acids
MYPQGTFVIPLLVTAHRDPTQFKDPDCFNPTNFLDKGKFQGNDAFMPFASGAGRGGRGPAWTGSGVPGAHCAPVYPAKQMCLGTGLAHSGIFLFLTATLQRFCLLPVVRPGTINLTCSALAWAVSPQTSSSSQWPAEVRLHYGGLTGPQTSIPSSVNKGPKLQKKXXX

SEQ ID NO: 1912 - protein, 178 aa, Homo sapiens
MTNPAIQNDFSYYRRTLSRMRINNVPAEGENEVNNELANRMSLFYAEATPMLKTLSDATTKFVSENKNLPIENTTDCLSTMASVCRVMLETPEYRSRFTNEETVSFCLRVMVGVIILYDHVHPVGAFAKTSKIDMKGCIKVLKDQPPNSVEGLLNALRYTTKHLNDETTSKQIKSMLQ

SEQ ID NO: 1913 - protein, 120 aa, Homo sapiens
MIEARKNHGLVFVKDKIFAVGGQNGLGGLDNVEYYDIKLNEWKMVSPMPWKGVTVKCAAVGSIVYVLAGFQGVGRLGHILEYNTETDKWVANSKVRAFPVTSCLICVVDTCGANEETLET

SEQ ID NO: 1914 - protein, 106 aa, Homo sapiens
MDVFDMEQGGWLKMERSFFLKKRRADFVAGSLSGRVIVAGGLGNQPTVLETAEAFHPGKNKWEILPAMPTPRCACSSIVVKNCLLAVGGVNQGLSDAVEALCVSDS

SEQ ID NO: 1915 - protein, 111 aa, Homo sapiens [sequence omitted]

SEQ ID NO: 1916 - protein, 169 aa, Homo sapiens
MESKLTIQETQLGDSANLTCRAFFGYSGDVSPLIYWMKGEKFIEDLDENRVWESDIRILKEHLGEQEVSISLIVDSVEEGDLGNYSCYVENGNGRRHASVLLHKRELMYTVELAGGLGAILLLLVCLVTIYKCYKIEIMLFYRNHFGAEELDGDNKDYDAYLSYTKSGS

SEQ ID NO: 1917 - protein, 319 aa, Homo sapiens
MQLYLLLQKKHGEKFVNSWLMQLHNQLTDMEKCILKYMKGTSIVVPEPLHFLLPGKKNLVTISYPSGIPDGQLQAYRKELHDLFNLPHDRPYFKRSNAYHFPDEPYKDGYIRNPHTYLNPPNMETGMIYVVQGIYGYHHYMQDRIDDNGWGCAYRSLQTICSWFKHQGYTERSIPTHREIQQALVDAGDKPATFVGSRQWIGSIEVQLVLNQLIGITSKILFVSQGSEIASQGRELANHFQSEGTPVMIGGGVLAHTILGVAWNEITGQIKFLILDPHYTGAEDLQVILEKGWCGWKGPDFWNKDAYYNLCLPQRPNMI

SEQ ID NO: 1918 - protein, 327 aa, Homo sapiens
  MISC_FEATURE (111): Xaa equals any of the twenty naturally occurring L-amino acids
  MISC_FEATURE (307): Xaa equals any of the twenty naturally occurring L-amino acids
MSYLESKGLLATASEDRSVRIWKVGDLRVPGGRVQNIGHCFGHSARVWQVKLLENYLISAGEDCVCLVWSHEGEILQAFRGHQGRGIRAIAAHERQAWVITGGDDSRHRLXHLVGRGYRGLGVSALCFKSRSRPGTLKAVTLAGSWRLLAVTDTGALYLYDVEVKCWEQLLEDKHFQSYCLLEAAPGPEGFGLCAMANGEGRVKVVPINTPTAAVDQTLFPGKVHSLSWALRGYEELLLLASGPGGVVACLEISAAPSGKAIFVKERCRYLLPPSKQRWHTCSAFLPPGDFLVCGDRRGSVLLFPSXPGLLKDPGVGGKARAGAGAL

SEQ ID NO: 1919 - protein, 125 aa, Homo sapiens
  MISC_FEATURE (118): Xaa equals any of the twenty naturally occurring L-amino acids
  MISC_FEATURE (121): Xaa equals any of the twenty naturally occurring L-amino acids
MSQGRGKYDFYIGLGLAMSSSIFIGGSFILKKKGLLRLARKGSMRAGQGGHAYLKEWLWWAGLLSMGAGEVANFAAYAFAPATLVTPLGALSVLVSAILSSYFLNERLNLHGKIGCCXVFXDLQL

SEQ ID NO: 1920 - protein, 136 aa, Homo sapiens
  MISC_FEATURE (128): Xaa equals any of the twenty naturally occurring L-amino acids
  MISC_FEATURE (129): Xaa equals any of the twenty naturally occurring L-amino acids
MVTGLMTKAEKSPKGFLESYEEMLSYALRPETWATTRLELEGRGVVCMSFFDIVLDFILMDAFEDLENPPASVLAVLRNRWLSDSFKETALATACWSVLKAKRRLLMVPDGFISHFYSVSEHVSPVLXXGFLGPKP

SEQ ID NO: 1921 - protein, 318 aa, Homo sapiens
  MISC_FEATURE (54): Xaa equals any of the twenty naturally occurring L-amino acids
  MISC_FEATURE (74): Xaa equals any of the twenty naturally occurring L-amino acids
  MISC_FEATURE (112): Xaa equals any of the twenty naturally occurring L-amino acids
  MISC_FEATURE (113): Xaa equals any of the twenty naturally occurring L-amino acids
  MISC_FEATURE (308): Xaa equals any of the twenty naturally occurring L-amino acids
MAVDMRRALFSSLLRQDITFFDANKTGQLVSRLTTDVQEFKSSFKLVISQGLRXCTQVAGCLVSLSMLSTRLTXLLMVATPALMGVGTLMGSGLRKLSRQCQEQIARAMGVXXEALGNVRTVRAFAMEQREEERYGAELEACRCRAEELGRGIALFQGLSNIAFNCMVFGYPIYWGLPCGRTAADRGDLMSFLVASQTVQRSMANLSVLFGQVVRGLSAGARVFEYMALNPCIPLSGGCCVPKEQLRGSVTFQNVCFSYPCRPGFEVLKDFTLTLPPGKIVALVGHLAEERPPWLPCWSASTTHGRRXDAGWAGPAHP

SEQ ID NO: 1922 - protein, 112 aa, Homo sapiens
MGNRTQDPKLQGDCPPMNTQSGHHLPSTLCPRTAVPIHEHRVNICRVRTSGSLGHGTAAGLTTDSTWPSSRPPWRPGASSPPLPLTLSPPRSCLSGIIWGFFFWGIILLHDP

SEQ ID NO: 1923 - protein, 244 aa, Homo sapiens
MQPPGPPPAYAPTNGDFTFVSSADAEDLSGSIASPDVKLNLGGDFIKESTATTFLRQRGYGWLLEVEDDDPEDNKPLLEELDIDLKDIYYKIRCVLMPMPSLGFNRQVVRDNPDFWGPLAVVLFFSMISLYGQFRVVSWIITIWIFGSLTIFLLARVLGGEVAYGQVLGVIGYSLLPLIVIAPVLLVVGSFEVVSTLIKLFGVFWAAYSAASLLVGEEFKTKKPLLIYPIFLLYIYFLSLYTGV

SEQ ID NO: 1924 - protein, 103 aa, Homo sapiens
  MISC_FEATURE (8): Xaa equals any of the twenty naturally occurring L-amino acids
  MISC_FEATURE (65): Xaa equals any of the twenty naturally occurring L-amino acids
MQILESSXPIVKCEHFLILHFQVDISTQKQALGKISKFIAYVCVCVRVETEVCVCVHVWRVLPHXVQFSVFVCLKACEDLTVGFPLYSVYAFFLAHWSNGCYY

SEQ ID NO: 1925 - protein, 247 aa, Homo sapiens
  MISC_FEATURE (44): Xaa equals any of the twenty naturally occurring L-amino acids
  MISC_FEATURE (52): Xaa equals any of the twenty naturally occurring L-amino acids
  MISC_FEATURE (131): Xaa equals any of the twenty naturally occurring L-amino acids
  MISC_FEATURE (196): Xaa equals any of the twenty naturally occurring L-amino acids
  MISC_FEATURE (210): Xaa equals any of the twenty naturally occurring L-amino acids
  MISC_FEATURE (247): Xaa equals any of the twenty naturally occurring L-amino acids
MNSNIWQICIQLEGIGQFAYALGKDFCLLLMSALYPVLEKAGDXTLLISQVXTSTMMDVCRACGYDSLQHLINQNSDYLVNGISLNLRHLALHPHTPKVLEVMLRNSDANLLPLVADVVQDVLATLDQFYXKRAASFVSVLHALMAALAQWFPDTGNLGHLQEQSLGEEGSHLNQRPAALEKSTTTAGRHRTVFAXTTSKRRMWADGKCXRILINEEEEQFSPSQSGMRMDTRSRLWRPPMAIADSX

SEQ ID NO: 1926 - protein, 120 aa, Homo sapiens
  MISC_FEATURE (49): Xaa equals any of the twenty naturally occurring L-amino acids
  MISC_FEATURE (59): Xaa equals any of the twenty naturally occurring L-amino acids
  MISC_FEATURE (86): Xaa equals any of the twenty naturally occurring L-amino acids
  MISC_FEATURE (90): Xaa equals any of the twenty naturally occurring L-amino acids
  MISC_FEATURE (103): Xaa equals any of the twenty naturally occurring L-amino acids
MLLLPTPNLWAGQAHSSPTVIARTAFDLTQRKHLPPVGREPGRGFPWQXYCSLVIEFFXFCYMVLWQRTGCRCSLGYFWKHFSFSXILPXLAHQSPSSQKGDXGSSAQTIKHFWRCHKLP

SEQ ID NO: 1927 - protein, 176 aa, Homo sapiens
  MISC_FEATURE (14): Xaa equals any of the twenty naturally occurring L-amino acids
  MISC_FEATURE (110): Xaa equals any of the twenty naturally occurring L-amino acids
  MISC_FEATURE (161): Xaa equals any of the twenty naturally occurring L-amino acids
  MISC_FEATURE (166): Xaa equals any of the twenty naturally occurring L-amino acids
MWQSWGSSSCSHCXTAATSGTQFRTPREAQAPGVAGDPRGKWQGRTLEQSQWNVTIAQVGIFVCFVHCCTPSPQHSACPGQVPSKHLGSNASVLPAAPANRPPTQALPSXSTATTAAHLCWHRSLFPGLPEIPSPHSARGKLLKLRASPHSVHSKVLSKGXLLLGXINPRILSLAL

SEQ ID NO: 1928 - protein, 175 aa, Homo sapiens
  MISC_FEATURE (63): Xaa equals any of the twenty naturally occurring L-amino acids
  MISC_FEATURE (105): Xaa equals any of the twenty naturally occurring L-amino acids
  MISC_FEATURE (143): Xaa equals any of the twenty naturally occurring L-amino acids
  MISC_FEATURE (144): Xaa equals any of the twenty naturally occurring L-amino acids
KQHAAAAFYDVGGDRPWDSGNTQLPPRNPVKANAMFGAGDEDDTDFLSPSGGARLASLFGLDXAAAGHGNEFFQYTAPKQPKKGQGTAATGNQATPKTAPATMSXPTILVATAVHAYRYTNGQYVKQGKFGAAVLGNHTAREXXVLPHLMYIQMSQIIPMSWLLSGLPDVLFIRR

SEQ ID NO: 1929 - protein, 237 aa, Homo sapiens
  MISC_FEATURE (18): Xaa equals any of the twenty naturally occurring L-amino acids
  MISC_FEATURE (33): Xaa equals any of the twenty naturally occurring L-amino acids
  MISC_FEATURE (34): Xaa equals any of the twenty naturally occurring L-amino acids
  MISC_FEATURE (35): Xaa equals any of the twenty naturally occurring L-amino acids
  MISC_FEATURE (232): Xaa equals any of the twenty naturally occurring L-amino acids
  MISC_FEATURE (235): Xaa equals any of the twenty naturally occurring L-amino acids
MAVVSEDDFQHSSNSTYXTTSSSLRADQEALLXXXLDRPPPGLQRPEDRFCGTYIIFFSLGIGSLLPWNFFITAKEYWMFKLRNSSSPATGEDPEGSDILNYFESYLAVASTVPSMLCLVANFLLVNRVAVHIRVLASLTVILAIFMVITALVKVDTFSWTRGFFAVTIVCMVILSGASTVFSSSIYGMTGSFPMRNSQALISGGAMGGTVSAVASLVDLAASSDVRNSALXLLXDG

SEQ ID NO: 1930 - protein, 101 aa, Homo sapiens
  MISC_FEATURE (21): Xaa equals any of the twenty naturally occurring L-amino acids
  MISC_FEATURE (28): Xaa equals any of the twenty naturally occurring L-amino acids
  MISC_FEATURE (80): Xaa equals any of the twenty naturally occurring L-amino acids
MRGRRDGPQDSCNTTWEHMWXLDVASAXFSTTYLPSTTVLDVGILSPSLEGGWRWRATRDTFPVLHCSMLQSFCEWPGPXPSQFHYLVFYIVIRIILNIAF

SEQ ID NO: 1931 - protein, 113 aa, Homo sapiens
  MISC_FEATURE (54): Xaa equals any of the twenty naturally occurring L-amino acids
  MISC_FEATURE (55): Xaa equals any of the twenty naturally occurring L-amino acids
MSRHAGPVWKSYLKSSKCWKKGLGGGGGSCRSPQAPVSGMNVASHWDSSLARKXXFEDYQYWGVGVKPDLTQGEISGPRHPEHPPHPNILLALSLPLLPTPFVLGLRAPRVLR

SEQ ID NO: 1932 - protein, 172 aa, Homo sapiens
  MISC_FEATURE (131): Xaa equals any of the twenty naturally occurring L-amino acids
  MISC_FEATURE (150): Xaa equals any of the twenty naturally occurring L-amino acids
MHTHVDSYAKIHLWSFFCISRMVFELNVHLVLGTIVFILKLVFLTVACSLKRYQCTFFGSGKKKDRLPQYIFLIWQDNIVQIICMLQKKKKREKQKSVTLQMRSHIMAVWGSLLECHMDGCHRGCTYPFLXLFPAAILYAVLQANNVGLXCSVLFVPFLLSPYIPASYLHMQ

SEQ ID NO: 1933 - protein, 643 aa, Homo sapiens
MCGICCSVNFSAEHFSQDLKEDLLYNLKQRGPNSSKQLLKSDVNYQCLFSAHVLHLRGVLTTQPVEDERGNVFLWNGEIFSGIKVEAEENDTQILFNYLSSCKNESEILSLFSEVQGPWSFIYYQASSHYLWFGRDFFGRRSLLWHFSNLGKSFCLSSVGTQTSGLANQWQEVPASGLFRIDLKSTVISRCIILQLYPWKYISRENIIEENVNSLSQISADLPAFVSVVANEAKLYLEKPVVPLNMMLPQAALETHCSNISNVPPTREILQVFLTDVHMKEVIQQFIDVLSVAVKKRVLCLPRDENLTANEVLKTCDRKANVAILFSGGIDSMVIATLADRHIPLDEPIDLLNVAFIAEEKTMPTTFNREGNKQKNKCEIPSEEFSKDVAAAAADSPNKHVSVPDRITGRAGLKELQAVSPSRIWNFVEINVSMEELQKLRRTRICHLIRPLDTVLDDSIGCAVWFASRGIGWLVAQEGVKSYQSNAKVVLTGIGADEQLAGYSRHRVRFQSHGLEGLNKEIMMELGRISSRNLGRDDRVIGDHGKEARFPFLDENVVSFLNSLPIWEKANLTLPRGIGEKLLLRLAAVELGLTASALLPKRAMQFGSRIAKMEKINEKASDKCGRLQIMSLENLSIEKETKL

SEQ ID NO: 1934 - protein, 121 aa, Homo sapiens
MAFSAEQDLQLCVGGCPPSQRLSRSERNRRGAITIDTARRLCKEGLPVEDAYFHSCVFDVLISGDPNFTVAAQAALEDARAFLPDLEKLHLFPSDAGVPLSSATLLAPLLSGLFVLWLCIQ

SEQ ID NO: 1935 - protein, 290 aa, Homo sapiens
  MISC_FEATURE (35): Xaa equals any of the twenty naturally occurring L-amino acids
MGAYHTIELEPNRQFTLAKKQWDSVVLERIEQACXPAWSADVAAVVMQEGLAHICLVTPSMTLTRAKVEVNIPRKRKGNCSQHDRALERFYEQVVQAIQRHIHFDVVKCILVASPGFVREQFCDYMFQQAVKTDNKLLLENRSKFLQVHASSGHKYSLKEALCDPTVASRLSDTKAAGEVKALDDFYKMLQHEPDRAFYGLKQVEKANEAMAIDTLLISDELFRHQDVATRSRYVRLVDSVKENAGTVRIFSSLHVSGEQLSQLTGVAAILRFPVPELSDQEGDSSSEED

SEQ ID NO: 1936 - protein, 105 aa, Homo sapiens
  MISC_FEATURE (8): Xaa equals any of the twenty naturally occurring L-amino acids
  MISC_FEATURE (12): Xaa equals any of the twenty naturally occurring L-amino acids
  MISC_FEATURE (21): Xaa equals any of the twenty naturally occurring L-amino acids
  MISC_FEATURE (25): Xaa equals any of the twenty naturally occurring L-amino acids
MCWDRAWXQGSXSAPCWLHDXGKSXTDICCNAHTGIHCRISILVVIVNWFFMQTEVISTLKILSELLNSGELLCEWLGKIEEDCSAGQAQFIRPRSKYDFYPHTF

SEQ ID NO: 1937 - protein, 133 aa, Homo sapiens
MFGDYEAQRHWQEITFNLPVKQWYFNSSDNNLQYWGLDYPPLTAYHSLLCAYVAKFINPDWIALHTSRGYESQAHKLFMRTTVLIADLLIYIPAVVLYCCCLKEISTKKKIANALCILLYPGLILIDYGTFSI

SEQ ID NO: 1938 - protein, 203 aa, Homo sapiens
METSASSSQPQDNSQVHRETEDVDYGETDFHKQDGKAGLFSQEQYERNKSSSSSSSSSSSSSSSSSSSSSGPGHGEPDVLKDELQLYGDAPGEVVPSGESGLRRRGSDPASGEVEASQLRRLNIKKDDEFFHFVLLCFAIGALLVCYHYYADWFMSLGVGLLTFASLETVGIYFGLVYRIHSVLQGFIPLFQKFRLTGFRKTD

SEQ ID NO: 1939 - protein, 177 aa, Homo sapiens
MQGRLHLSACPRSWAPLGPWLGSGPWLCTPTIPTHLASPPAAPLTAAAPPPSADAQSGSGQRSSPAPCSPSLKPPNLPTATLHTGQTKPRREGWAGARLILGRREHTSTYLGAQCPFLEFPTCVSHASVGSLPPRLATVCNVFMYVFVNVIEVWGGVGGWRQMLARSALPIQAPSPL

SEQ ID NO: 1940 - protein, 227 aa, Homo sapiens
  MISC_FEATURE (123): Xaa equals any of the twenty naturally occurring L-amino acids
MQSSGFDALLHEIQEIRETQARLEESFETLKEHYQRDYSLIMQTLQEERYRCERLEEQLNDLTELHQNEILNLKQELASMEEKIAYQSYERARDIQEALEACQTRISKMELQQQQQQVVQLEXLENATARNLLGKLINILLAVMAVLLVFVSTVANCVVPLMKTRNRTFSTLFLVVFIAFLWKHWDALFSYVGTVLFIPLDDAGTEGIVPYPLGECMQQRVRQQLTY

SEQ ID NO: 1941 - protein, 262 aa, Homo sapiens
  MISC_FEATURE (59): Xaa equals any of the twenty naturally occurring L-amino acids
MFRWERSIPLRGSAAALCNNLSVLQLPARNLTYFGVVHGPSAQLLSAAPEGVPLAQRQXHAKEGAGVSPPLITQVHWCVLPFRVLLVLTSHRGIQMYESNGYTMVYWHALDSGDASPVQAVFARGIAASGHFICVGTWSGRVLVFDIPAKGPNIVLSEELAGHQMPITDIATEPAQGQDCVADMVTADDSGLLCVWRSGPEFTLLTRIPGFGVPCPSVQLWQGIIAAGYGNGQVHLYEATTGNLHVQINAHARAHLRPGPGF

SEQ ID NO: 1942 - protein, 315 aa, Homo sapiens
  MISC_FEATURE (155): Xaa equals any of the twenty naturally occurring L-amino acids
  MISC_FEATURE (312): Xaa equals any of the twenty naturally occurring L-amino acids
MAAPMEVAVCTDSAAPMWSCIVWELHSGANLLTYRGGQAGPRGLALLNGEYLLAAQLGKNYISAWELQRKDQLQQKIMCPGPVTCLTASPNGLYVLAGVAESIHLWEVSTGNLLVILSRHYQDVSCLQFTGDSSHFISGGKDCLVLVWSLCSVLXADPSRIPAPRHVWSHHTLPITDLHCGFGGPLARVATSSLDQTVKLWEVSSGELLLSVLFDVSIMAVTMDLAEHHMFCGGSEGSIFQVDLFTWPGQRERSFHPEQDAGKVFKGHRNQVTCLSVSTDGSVLLSGSHDETVRLWDVQSKQCIRTVASKAXSPM

SEQ ID NO: 1943 - protein, 242 aa, Homo sapiens
  MISC_FEATURE (152): Xaa equals any of the twenty naturally occurring L-amino acids
MEEQHKCSSKSLEHKTQTPPVEENVTQKISDLEICADEFPGSSATYRILEVGCGVGNTVFPILQTNNDPGLFVYCCDFSSTAIELVQTNSEYDPSRCFAFVHDLCDEEKSYPVPKGSLDIIILIFVLSAIVPDKMQKAINRLSRLLKPGGMXLLRDYGRYDMAQLRFKKGQCLSGNFYVRGDGTRVYFFTQEELDTLFTTAGLEKVQNLVDRRLQVNRGKQLTMYRVWIQCKYCKPLLSSTS

SEQ ID NO: 1944 - protein, 105 aa, Homo sapiens
MAVAESGMGIVEDKVIKNHFASEYIYNAYKDEKTCGVLSEDDTFGTITIAEPIGIICGIVPTTNPTSTAIFKSLISLKTRNAIIFSPHPRAKDATNKAADIVLQA

SEQ ID NO: 1945 - protein, 415 aa, Homo sapiens
  MISC_FEATURE (6): Xaa equals any of the twenty naturally occurring L-amino acids
  MISC_FEATURE (352): Xaa equals any of the twenty naturally occurring L-amino acids
MFVSHXEEVDGCPVILVCGSQDVGKSTFNRYLINHLLNSLPCVDYLECDLGQTEFTPPGCISLLNITEPVLGPPFTHLRTPQKMVYYGKPSCKNNYENYIDIVKYVFSAYKRESPLIVNTMGWVSDQGLLLLIDLIRLLSPSHVVQFRSDHSKYMPDLTPQYVDDMDGLYTKSKTKMRNRRFRLAAFADALEFADEEKESPVEFTGHKLIGVYTDFAFRITPRNRESHNKILRDLSILSYLSQLQPPMPKPLSPLHSLTPYQVPFNAVALRITHSDVAPTHILYAVNASWVGLCKIQDDVRGYTNGPILLAQTPICDCLGFGICRGIDMEKRLYHILTPVPPEELRTVNCLXVGAIAIPHCVLKCQRGIEGTVPYVTTDYNFKLPGASEKIGAREPEEAHKEKPYRRPKFCRKMK

SEQ ID NO: 1946 - protein, 147 aa, Homo sapiens
  MISC_FEATURE (47): Xaa equals any of the twenty naturally occurring L-amino acids
MPDANPSSGHVQPAGQPRGSLSSRAKDSRLPFSLLAFLLCPAVAAGXAAAAGGRRSCLSAPPCPTPAPALEIWSPLELSWTGGQLRACALNAALSRGREQDGEWKESPPGFVNCKKGPFQDDTRNRARALAQSLGACLFFIIVFKSL

SEQ ID NO: 1947 - protein, 193 aa, Homo sapiens
  MISC_FEATURE (183): Xaa equals any of the twenty naturally occurring L-amino acids
  MISC_FEATURE (190): Xaa equals any of the twenty naturally occurring L-amino acids
MSILIIEAFYGGSHKQLVDLLQEELGDCVVYTLPAKKWHWRARTSALYFSQTIPISEHYRTLFASSVLNLTELAALRPDLGKLKKILYFHENQLIYPVKKCQERDFQYGYNQILSCLVADVVVFNSVFNMESFLTSMGKFMKLIPDHRPKDLESIIRPKCQVIYFPIRFPDVSRFMPKHKTTXLRRCSAXKEM

SEQ ID NO: 1948 - protein, 128 aa, Homo sapiens
MFLRGRPITMYIPSGIRSLEELPSGPPPETLSLDWVYGYRGRDSRSNLFVLRSGEVVYFIACVVVLYRPGGGPGGPGGGGQRHYRGHTDCVRCLAVHPDGVRVASGQTAGVDKDGKPLQPVVHIWDSK

SEQ ID NO: 1949 - protein, 108 aa, Homo sapiens
  MISC_FEATURE (50): Xaa equals any of the twenty naturally occurring L-amino acids
  MISC_FEATURE (87): Xaa equals any of the twenty naturally occurring L-amino acids
  MISC_FEATURE (93): Xaa equals any of the twenty naturally occurring L-amino acids
MHEEEIYTSLQWDSPAPDTYQKCLSSNKCSGACCLVMVISCVFCMGLLTXSIFLGVKLLQVSTIAMQQQEKLIQQERALLNFTEWEXKLCPSXEILPSLHAKLIKFSP

SEQ ID NO: 1950 - protein, 117 aa, Homo sapiens
MSRKPELCLQPSFAHCQIFPSILQKCKSPASSPQAVPGVWRAFTLPGQACLGTGLWPGLPALLQWPSPSPPMEEWPRTHILPMLVGAVAGAVAASRTGGYLFTQRTLVPGLHVLLAL

SEQ ID NO: 1951 - protein, 227 aa, Homo sapiens
  MISC_FEATURE (173): Xaa equals any of the twenty naturally occurring L-amino acids
  MISC_FEATURE (178): Xaa equals any of the twenty naturally occurring L-amino acids
MALVRGGWLWRQSSILRRWKRNWFALWLDGTLGYYHDETAQDEEDRVLIHFNVRDIKIGPECHDVQPPEGRSRDGLLTVNLREGGRLHLCAETKDDALAWKTALLEANSTPVRVYSPYQDYYEVVPPNAHEATYVRSYYGPPYAGPGVTHVIVREDPCYSAGAPLAMGMLAGXPLGGXGLAHVVALLVLSPGTRSTDPCAWIARLLFLLDPILYHPSPVPLWPYPLH

SEQ ID NO: 1952 - protein, 170 aa, Homo sapiens
  MISC_FEATURE (96): Xaa equals any of the twenty naturally occurring L-amino acids
  MISC_FEATURE (103): Xaa equals any of the twenty naturally occurring L-amino acids
  MISC_FEATURE (134): Xaa equals any of the twenty naturally occurring L-amino acids
  MISC_FEATURE (135): Xaa equals any of the twenty naturally occurring L-amino acids
  MISC_FEATURE (136): Xaa equals any of the twenty naturally occurring L-amino acids
  MISC_FEATURE (157): Xaa equals any of the twenty naturally occurring L-amino acids
  MISC_FEATURE (170): Xaa equals any of the twenty naturally occurring L-amino acids
MAAAAAAAGAAGSAAPAAAAGAPGSGGAPSGSQGVLIGDRLYSGVLITLENCLLPDDKLRFTPSMSSGLDTDTETDLRVVGCELIQAAGILLRLPXVAMATGXVLFQRFFYTKSFVKHSMEHVSMACVHLASRXXXPQDAYGTSSMVNALTVRDKRXPALIWIRYVIKTX

SEQ ID NO: 1953 - protein, 119 aa, Homo sapiens
MGISLCFPGAAASWVRDVALPHGSGGGVVPRRKPPGCWDQKMGRDARWEHLFPLCWCLDPRLEGFAFPQVLGPRGAPLAHGLLAVALGLSMSDLRILAPILPPWEAFLDLFQLSLWMSL

SEQ ID NO: 1954 - protein, 137 aa, Homo sapiens
  MISC_FEATURE (56): Xaa equals any of the twenty naturally occurring L-amino acids
  MISC_FEATURE (67): Xaa equals any of the twenty naturally occurring L-amino acids
  MISC_FEATURE (78): Xaa equals any of the twenty naturally occurring L-amino acids
  MISC_FEATURE (83): Xaa equals any of the twenty naturally occurring L-amino acids
  MISC_FEATURE (87): Xaa equals any of the twenty naturally occurring L-amino acids
  MISC_FEATURE (90): Xaa equals any of the twenty naturally occurring L-amino acids
  MISC_FEATURE (91): Xaa equals any of the twenty naturally occurring L-amino acids
  MISC_FEATURE (116): Xaa equals any of the twenty naturally occurring L-amino acids
  MISC_FEATURE (117): Xaa equals any of the twenty naturally occurring L-amino acids
  MISC_FEATURE (123): Xaa equals any of the twenty naturally occurring L-amino acids
  MISC_FEATURE (135): Xaa equals any of the twenty naturally occurring L-amino acids
MPNAGVSQSFEWSVCTEFVVLPLWFSPSGIFPSLSSWFGSHEYCLLCVSSTKKTAXFYPEYLLSDWXLSLWGICKCPXGGNGXICWXHFXXPPSLTGFCLLQCCLPKLISIVLKQXXLWFNPXFVVVLSKGDWSXTS

SEQ ID NO: 1955 - protein, 143 aa, Homo sapiens
  MISC_FEATURE (19): Xaa equals any of the twenty naturally occurring L-amino acids
  MISC_FEATURE (77): Xaa equals any of the twenty naturally occurring L-amino acids
  MISC_FEATURE (90): Xaa equals any of the twenty naturally occurring L-amino acids
  MISC_FEATURE (95): Xaa equals any of the twenty naturally occurring L-amino acids
  MISC_FEATURE (128): Xaa equals any of the twenty naturally occurring L-amino acids
MVIPQKHYILGVVTAMVGXFAIGAAFGLIYLYTAELYPTIVRSLAVGSGTMVCRLASILAPFSVDVSSIWIFIPQLXVGTMASLSECYTXLPEPXGTASTTWRSCKLSRDERASNHPHYILLKKTIPXSAGISHTASLDIFPM

SEQ ID NO: 1956 - protein, 176 aa, Homo sapiens
MEQRLAEFRAARKRAGLAAQPPAASQGAQTPGEKAEAAATLKAAPGWLKRFLVWKPRPASARAQPGLVQEAAQPQGSTSETPWNTAIPLPSCWDQSFLTNITFLKVLLWLVLLGLFVELEFGLAYFVLSLFYWMYVGTRGPEEKKEGEKSAYSVFNPGCEAIQGTLTAEHWSASYS

SEQ ID NO: 1957 - protein, 131 aa, Homo sapiens
MAGIKALISLSFGGAIGLMFLMLGCALPIYNKYWPLFVLFFYILSPIPYCIARRLVDDTDAMSNACKELAIFLTTGIVVSAFGLPIVFARAHLIEWGACALVLTGNTVIFATILGFFLVFGSNDDFSWQQW

SEQ ID NO: 1958 - protein, 406 aa, Homo sapiens
  MISC_FEATURE (254): Xaa equals any of the twenty naturally occurring L-amino acids
MGAASRVGVPEPGQLHFNQCLTAEEIFSLHGFSNATQITSSKFSVICPAVLQQLNFHPCEDRPKHKTRPSHSEVWGYGFLSVTIINLASLLGLILTPLIKKSYFPKILTFFVGLAIGTLFSNAIFQLIPEAFGFDPKVDSYVEKAVAVFGGFYLLFFFERMLKMLLKTYGQNGHTHFGNDNFGPQEKTHQPKALPAINGVTCYANPAVTEANGHIHFDNVSVVSLQDGKKEPSSCTCLKGPKLSEIGTIAWMIXLCDALHNFIDGLAIGASCTLSLLQGLSTSIAILCEEFPHELGDFVILLNAGMSTRQALLFNFLSACSCYVGLAFGILVGNNFAPNIIFALAGGMFLYISLADMFPEMNDMLREKVTGRKTDFTFFMIQNAGMLTGFTAILLITLYAGEIELE

SEQ ID NO: 1959 - protein, 230 aa, Homo sapiens
  MISC_FEATURE (24): Xaa equals any of the twenty naturally occurring L-amino acids
  MISC_FEATURE (40): Xaa equals any of the twenty naturally occurring L-amino acids
  MISC_FEATURE (160): Xaa equals any of the twenty naturally occurring L-amino acids
MLRFNGYRENPNLQEDSLMKTQAXCCWSVCRRWGRPKRSXRQVSQQPVGALASEQLPEGDSGGAVCSRLLSRRPQEELEPGIHKSPGEGSQVLVHWLLGNSEVFAAFCRALPAGLLTLVTSRHPALSPVYLGLLTDWGQRLHYDLQKGIWVGTESQDVPXEELHNRFQSLCQAPPPLKDKVLTALETCKAQDGDFEVPGLSIWTDLLLALRSGAFRKRQVLGLSAGLSSV

SEQ ID NO: 1960 - protein, 132 aa, Homo sapiens
MAGSRLPRQLFLQGVAAVFMFAFASLYTQIPGLYGPEGILPARRTLRPQGKGRWQQLWETPTLLWEAPRLGLDTAQGLELLSLLGALVALGALLLSPLRHPVIYLLLWAATCSLPGGQVSFISGGLPAARDW

SEQ ID NO: 1961 - protein, 129 aa, Homo sapiens [sequence omitted]

SEQ ID NO: 1962 - protein, 366 aa, Homo sapiens
  MISC_FEATURE (118): Xaa equals any of the twenty naturally occurring L-amino acids
MEDEEEEELTMEMFGNSSIKFELDIEPKVFKPPSSTEALNDSQEFPFPETPTKVWPQDEYIVEYSLEYGFLRLSQATRQRLSIPVMVVTLGESELLGLGSSMAGPPLLPRVSSCWCGXGGCAGSTGVCPAPGTLPRAGVLDGFPKNGQGRKQARPQQWSQLGQGPGGGLGGAPGSLIHPPADPTRDQCFGDRFSRLLLDEFLGYDDILMSSVKGLAENEENKGFLRNVVSGEHYRFVSMWMARTSYLAAFAIMVIFTLSVSMLLRYSHHQIFVFIAPLLTVILALVGMEAIMSEFFNDTTTAFYIILIVWLADQYDAICCHTSTSKRHWLRFFYLYHFAFYAYHYRFNGQYSSLALAPSGSSSSIP

SEQ ID NO: 1963 - protein, 985 aa, Homo sapiens
  MISC_FEATURE (26): Xaa equals any of the twenty naturally occurring L-amino acids
  MISC_FEATURE (185): Xaa equals any of the twenty naturally occurring L-amino acids
  MISC_FEATURE (334): Xaa equals any of the twenty naturally occurring L-amino acids
  MISC_FEATURE (963): Xaa equals any of the twenty naturally occurring L-amino acids
MTQQDSHAPLRDSRGSSFEMTDDDSXIRALTQFPLPKNLLAKVIQIATSSSTAKNLMQFHTVGTKTKLSTLTLLWPCPMTFVAKGRRKAEAENKAAALACKKLKSLGLVDRNNEPLTHAMYNLASLRELGETQRRPCTIQVPEPILRKIETFLNHYPVESSWIAPELRLQSDDILPLGKDSGPLXDPITGKPYVPLLEAEEVRLSQSLLELWRRRGPVWQEAPQLPVDPHRDTILNAIEQHPVVVISGDTGCGKTTRIPQLLLERYVTEGRGARCNVIITQPRRISAVSVAQRVSHELGPSLRRNVGFQVRLESKPPSRGGALLFCTVGILLRXLQSNPSLEGVSHVIVDEVHERDVNTDFLLILLKGLQRLNPALRLVLMSATGDNERFSRYFGGCPVIKVPGFMYPVKEHYLEDILAKLGKHQYLHRHRHHESEDECALDLDLVTDLVLHIDARGEPGGILCFLPGWQEIKGVQQRLQEALGMHESKYLILPVHSNIPMMDQKAIFQQPPVGVRKIVLATNIAETSITINDIVHVVDSGLHKEERYDLKTKVSCLETVWVSRANVIQRRGRAGRCQSGFAYHLFPRSRLEKMVPFQVPEILRTPLENLVLQAKIHMPEKTAVEFLSKAVDSPNIKAVDEAVILLQEIGVLDQREYLTTLGQRLAHISTDPRLAKAIVLAAIFRCLHPLLVVVSCLTRDPFSSSLQNRAEVDKVKALLSHDSGSDHLAFVRAVAGWEEVLRWQDRSSRENYLEENLLYAPSLRFIHGLIKQFSENIYEAFLVGKPSDCTLASAQCNEYSEEEELVKGVLMAGLYPNLIQVRQGKVTRQGKFKPNSVTYRTKSGNILLHKSTINREATRLRSRWLTYFMAVKSNGSVFVRDSSQVHPLAVLLLTDGDVHIRDDGRRATISLSDSDLLRLEGDSRTVRLLKELRRALGRMVERSLRSELAALPPSVQEEHGQLXALLAELLRGPCGSFDVRKTADD

SEQ ID NO: 1964 - protein, 202 aa, Homo sapiens
  MISC_FEATURE (29): Xaa equals any of the twenty naturally occurring L-amino acids
MKVFCEVLEELYKKVLLGATLENDSHDYXFYLNPAVSDQDCSTATSLEWANTCGIQGRHQPISVGVAPIAVAPVCLKTNSQMSGSREVMLLQLTVIKVMTTRILSVKTEFHAKEQYRDVIKILLESAKVDSKLICMFQNSDKLLSHMAAQCLALLLYFQLREKITLSNSWIAFCQKNLSEYSESNKAIYCLWTLTAIIKGNL

SEQ ID NO: 1965 - protein, 446 aa, Homo sapiens
MEAEAADAPPGGVESALSCFSFNQDCTSLAIGTKAGYKLFSLSSVEQLDQVHGSNEIPDVYIVERLFSSSLVVVVSHTKPRQMNVYHFKKGTEICNYSYSSNILSIRLNRQRLLVCLEESIYIHNIKDMKLLKTLLDIPANPTGLCALSINHSNSYLAYPGSLTSGEIVLYDGNSLKTVCTIAAHEGTLAAITFNASGSKLASASEKGTVIRVFSVPDGQKLYEFRRGMKRYVTISSLVFSMDSQFLCASSNTETVHIFKLEQVTNSRPEEPSTWSGYMGKMFMAATNYLPTQVSDMMHQDRAFATARLNFSGQRNICTLSTIQKLPRLLVASSSGHLYMYNLDPQDGGECVLIKTHSLLGSGTTEENKENDLRPSLPQSYAATVARPSASSASTVPGYSEDGGALRGEVIPEHEFATGPVCLDDENEFPPIILCRGNQKGKTKQS

SEQ ID NO: 1966 - protein, 206 aa, Homo sapiens
  MISC_FEATURE (72): Xaa equals any of the twenty naturally occurring L-amino acids
  MISC_FEATURE (156): Xaa equals any of the twenty naturally occurring L-amino acids
MARGGWRRLRRLLSAGQLLFQGRALLVTNTLGCGALMAAGDGVRQSWEIRARPGQVFDPRRSASMFAVGCSXGPFLHYWYLSLDRLFPASGLRGFPNVLKKVLVDQLVASPLLGVWYFLGLGCLEGQTVGESCQELREKFWEFYKADWCVWPAAHXVNFLFVPPQFRVTYINGLTLGWDTYLSYLKYRSPVPLTPPGCVALDTRAD

SEQ ID NO: 1967 - protein, 185 aa, Homo sapiens
  MISC_FEATURE (125): Xaa equals any of the twenty naturally occurring L-amino acids
  MISC_FEATURE (171): Xaa equals any of the twenty naturally occurring L-amino acids
  MISC_FEATURE (176): Xaa equals any of the twenty naturally occurring L-amino acids
  MISC_FEATURE (177): Xaa equals any of the twenty naturally occurring L-amino acids
  MISC_FEATURE (182): Xaa equals any of the twenty naturally occurring L-amino acids
MGQLKGFSAHWWNFRHFQHHAKPNIFHKDPDVTVAPVFLLGESSVEYGKKKRRYLPYNQQHLYFFLIGPPLLTLVNFEVENLAYMLVCMQWADLLWAASFYARFFLSYLPFYGVPGVLLFFVAVXVLESHWFVWITQMNHIPKEIGHEKHRDWVSSQLAATATWSLTFHQXVQRDXXFPDRXPPL

SEQ ID NO: 1968 - protein, 179 aa, Homo sapiens
  MISC_FEATURE (36): Xaa equals any of the twenty naturally occurring L-amino acids
  MISC_FEATURE (57): Xaa equals any of the twenty naturally occurring L-amino acids
MPEVLLPPTRPPDLRAPGDLSVSLCPPLQDLLWAAXFYARFFLSYLPFYGVPGVLLXFVAVRVLESHWFVWITQMNHIPKEIGHEKHRDWVSSQLAATCNVEPSLFTNWFSGHLNFQIEHHLFPRMPRHNYSRVAPLVKSLCAKHGLSYEVKPFLTALVDIVRSLKKSGDIWLDAYLHQ

SEQ ID NO: 1969 - protein, 137 aa, Homo sapiens
  MISC_FEATURE (49): Xaa equals any of the twenty naturally occurring L-amino acids
  MISC_FEATURE (76): Xaa equals any of the twenty naturally occurring L-amino acids
  MISC_FEATURE (79): Xaa equals any of the twenty naturally occurring L-amino acids
  MISC_FEATURE (92): Xaa equals any of the twenty naturally occurring L-amino acids
  MISC_FEATURE (109): Xaa equals any of the twenty naturally occurring L-amino acids
MSEILLSQVTNMRTELSFNIQALAVCANICLATKDRQNPSLVWLFTGMXCIYSLFFAWRANLDISKPLFMGVVERXWMXSNAVVAASLALVXLQLCLRLNRVLNSNGAXVSGNGLSATLFGSLPKYILITEKEHLFA

SEQ ID NO: 1970 - protein, 136 aa, Homo sapiens
  MISC_FEATURE (107): Xaa equals any of the twenty naturally occurring L-amino acids
MLFSLRELVQWLGFATFEIFVHLLALLVFSVLLALRVDGLVPGLSWWNVFVPFFAADGLSTYFTTIVSVRLFQDGEKRLAVLRLFWVLTVLSLKFVFEMLLCQKLAXQTRELWFGLITSPLFILLQLLMIRACRVN

SEQ ID NO: 1971 - protein, 112 aa, Homo sapiens
  MISC_FEATURE (96): Xaa equals any of the twenty naturally occurring L-amino acids
MGSSMPTGSLPKPKRCQAVSSVLAGSRMPPLLTEPAWALPPTLWSLGLGSAYPVAQTGTPAALGAVSSKISCPRGAHVGPLCPLSSSLFFLILAKXGSLGQAGNNCGDISDS

SEQ ID NO: 1972 - protein, 471 aa, Homo sapiens
  MISC_FEATURE (3): Xaa equals any of the twenty naturally occurring L-amino acids
MYXNCLRKFYKHQNTEVVLYLARALFKCGKLQECKQTLLKARHVAPSDTVLMFNVALVLQRLATSVLKDEKSNLKEVLNAVKELELAHRYFSYLSKVGDKMRFDLALAATEARQCSDLLSQAQYHVARARKQDEEERELRAKQEQEKELLRQKLLKEQEEKRLREKEEQKKLLEQRAQYVEKTKNILMFTGETEATKEKKRGGGGGRRSKKGGEFDEFVNDDTDDDLPISKKKKRRKGSGSEQEGEDEEGGERKKKKRRRHPKGEEGSDDDETENGPKPKKRRPPKAEKKKAPKPERLPPSMKGKIKSKAIISSSDDSSDEDKLKIADEGHPRNSNSNSDSDEDEQRKKCASSESDSDENQNKSGSEAGSPRRPRRQRSDQDSDSDQPSRKRRPSGSEQSDNESVQSGRSHSGVSENDSRPASPSAESDHESERGSDNEGSGQGSGNESEPEGSNNEASDRGSEHGSDDSD

SEQ ID NO: 1973 - protein, 133 aa, Homo sapiens
MRMSLAQRVLLTWLFTLLFLIMLVLKLDEKAPWNWFLIFIPVWIFDTILLVLLIVKMAGRCKSGFDPRHGSHNIKKKAWYLIAMLLKLAFCLALCAKLEQFTTMNLSYVFIPLWALLAGALTELGYNVFFVRD

SEQ ID NO: 1974 - protein, 173 aa, Homo sapiens
  MISC_FEATURE (68): Xaa equals any of the twenty naturally occurring L-amino acids
  MISC_FEATURE (142): Xaa equals any of the twenty naturally occurring L-amino acids
  MISC_FEATURE (158): Xaa equals any of the twenty naturally occurring L-amino acids
  MISC_FEATURE (167): Xaa equals any of the twenty naturally occurring L-amino acids
MFVASERKMRAHQVLTFLLLFVITSVASENASTSRGCGLDLLPQYVSLCDLDAIWGIVVEAVAGAGAXITLLLMLILLVRLPFIKEKEKKSPVGLHFLFLLGTLGLFGLTFAFIIQEDETICSVRRFLWGVLFALCFSCLLXQALAPCRKAWCRHWEXGPAGLQAGXALALVP

SEQ ID NO: 1975 - protein, 123 aa, Homo sapiens
  MISC_FEATURE (19): Xaa equals any of the twenty naturally occurring L-amino acids
  MISC_FEATURE (63): Xaa equals any of the twenty naturally occurring L-amino acids
MLCLSSVVMFLPQPGAASXPLFIWEASCHSLGQNWAQGKGLSPEDGLEGLGHTRAWTFGAGEXGLRLLNVRGLLTRGPSRGSLCPLLWSDQALHLSAGPLWQRSPVLFLLFLFLTKACATSCP

SEQ ID NO: 1976 - protein, 305 aa, Homo sapiens
  MISC_FEATURE (134): Xaa equals any of the twenty naturally occurring L-amino acids
MIYLTSQWFPQRNRASIMGLFYMGAPLALTLGSPLSGALLEMHGFMGHPGWFWMFVIEGLLAVGAGVFTFFWLDDTPEQARFLSKQEKTLLINQLASEEQQKVTSRLSDALRNGRVWQLAIIYLTIQVAVYGLXFFLPTQVAALLGTKVGFTASVVTAIPWVAALFGTWLIPRYSDKTGERRNVAALTLLAAGIGIGLSGLLSPVMAIVALCVAAIGFIAVQPVFWTMPTQLLSGTALAAGIGFVNLFGAVGGFIAPILRVKAETLFASDAAGLLTLAAVAVIGSLIIFTLRVNRTVAQTDVAHH

SEQ ID NO: 1977 - protein, 173 aa, Homo sapiens [sequence omitted]

SEQ ID NO: 1978 - protein, 101 aa, Homo sapiens
  MISC_FEATURE (73): Xaa equals any of the twenty naturally occurring L-amino acids
  MISC_FEATURE (88): Xaa equals any of the twenty naturally occurring L-amino acids
  MISC_FEATURE (89): Xaa equals any of the twenty naturally occurring L-amino acids
  MISC_FEATURE (101): Xaa equals any of the twenty naturally occurring L-amino acids
MRKLGKKSSSVLLLKVWSMDSSISITWDLLGRNVETQASPQNLPFYKTPRSCCEGRAASAEETETSPRGVTGXHQQRTLVLIDSAVLXXINVMAVLPGPLX

SEQ ID NO: 1979 - protein, 166 aa, Homo sapiens
MEYLHQNGHSKYHRRFLPVVGFQAIEEDGVLSTVRIGFSHHLLQKETTVVGKEQEAPVGVLRILLEEITMKVVEARAILTEALFHHYDPLVLQVTAQVLGTVLLEVVGDLDLPGLVQIAAVEAQEESLLVEAVVEVVMYAPLHDKNPFGNILTVYEHFTRTIKIRH

SEQ ID NO: 1980 - protein, 418 aa, Homo sapiens
  MISC_FEATURE (203): Xaa equals any of the twenty naturally occurring L-amino acids
  MISC_FEATURE (204): Xaa equals any of the twenty naturally occurring L-amino acids
  MISC_FEATURE (236): Xaa equals any of the twenty naturally occurring L-amino acids
MDMDLLESSNISEGEIERLINLLEEVFHLMETAPHTMIQQPVKSFPTMARITGPPERDDPYPVLFRYLHSHHFLELVTLLLSIPVTSAHPGVLQATKDVLKFLAQSQKGLLFFMSEYEATNLLIRALCHFYDQDEEEGLQSDGVIDDAFALWLQDSTQTLQCITELFSHFQRCTASEETDHSDLLGTLHNLYLITFNPVGRSXXGHVFSLEKNLQSLITLMEYYSKEALGDSKSKXSVAYNYACILILVVVQSSSDVQMLEQHAASLLKLCKADENNAKLQELGKWLEPLKNLRFEINCIPNLIEYVKQNIDNLMTPEGVGLTTALRVLCNVACPPPPVEGQQKDLKWNLAVIQLFSAEGMDTFIRVLQKLNSILTQPWRLHVNMGTTLHRVTTISMARCTLTLLKTMLTELLRGGSF

SEQ ID NO: 1981 - protein, 368 aa, Homo sapiens
  MISC_FEATURE (350): Xaa equals any of the twenty naturally occurring L-amino acids
  MISC_FEATURE (354): Xaa equals any of the twenty naturally occurring L-amino acids
MRRVVRQSKFRHVFGQAVKNDQCYDDIRVSRVTWDSSFCAVNPRFVAIIIEASGGGAFLVLPLHKTGRIDKSYPTVCGHTGPVLDIDWCPHNDQVIASGSEDCTVMVWQIPENGLTLSLTEPVVILEGHSKRVGIVAWHPTARNVLLSAGCDNAIIIWNVGTGEALINLDDMHSDMIYNVSWNRNGSLICTASKDKKVRVIDPRKQEIVAEKEKAHEGARPMRAIFLADGNVFTTGFSRMSERQLALWNPKNMQEPIALHEMDTSNGVLLPFYDPDTSIIYLCGKGDSSIRYFEITDESPYVHYLNTFSSKEPQRGMGYMPKRGLDVNKCEIARFFKLHERKCEPILNFXWNLXVFSPPPKRGGKKKG

SEQ ID NO: 1982 - protein, 275 aa, Homo sapiens
MIDAVVTSRSEDDETKEKQVRDKRRKTLVIIEKTYSLLLDVEDYERRYLLSLEEERPALMDDRKHKICSMYDNLRGKLPGQERPSDDHFVQIMCIRKGKRMVARILPFLSTEQAADILMTTARNLPFLIKKDAQDEVLPCLLSPFSLLLYHLPSVSITSLLRQLMNLPQSAATPALSNPHLTAVLQNKFGLSLLLILLSRGEDLQSSDPATESTQNNQWTEVMFMATRELLRIPQAALAKPISIPTNLVSLFSRYVDRQKLNLLETKLQLVQGIR

SEQ ID NO: 1983 - protein, 113 aa, Homo sapiens
  MISC_FEATURE (12): Xaa equals any of the twenty naturally occurring L-amino acids
MGHSTGLPGFPXPVWANPSMGEDKQVPLEAGGPESHLQGSLGQVEMRMGNSIGARSLSPPAVNRLWPVPGHQKREEEPRRLFMYLFIYLLYLLIKKVLSRRRGREFRTGTCRR

SEQ ID NO: 1984 - protein, 113 aa, Homo sapiens
MVKKYTTFSKDRAAGSVFRTHTSYSRTSPLSQPRPQRRSRQCIRKSISAACSSAVHSTALLHTHLCTLIGTPSWLFGQAGIALLLLVIISYPFPSTRDFSITAVPRVSMLHSQ

SEQ ID NO: 1985 - protein, 408 aa, Homo sapiens
  MISC_FEATURE (141): Xaa equals any of the twenty naturally occurring L-amino acids
  MISC_FEATURE (148): Xaa equals any of the twenty naturally occurring L-amino acids
  MISC_FEATURE (149): Xaa equals any of the twenty naturally occurring L-amino acids
  MISC_FEATURE (153): Xaa equals any of the twenty naturally occurring L-amino acids
MRTDSGARLEEGHLRPPRALPPVPSQDDIPLSRPKKKKPRTKNTPASASLEGLAQTAGRRPSEGNEPSTKELKEHPEAPVQRRQKKTRLPLELETSSTQKKSSSSSLLRNENGIDAEPAEEAVIQKPRRKTKKTQPAELQXANELGVXXEDIXTDEQTTVEQQSVFTAPTGISQPVGKVFVEKSRRFQAADRSELIKTTENIDVSMDVKPSWTTRDVALTVHRAFRMIGLFSHGFLAGCAVWNIVVIYVLAGDQLSNLSNLLQQYKTLAYPFQSLLYLLLALSTISAFDRIDFAKISVAIRNFLALDPTALASFLYFTALILSLSQQMTSDRIHLYTPSSVNGSLWEAGIEEQILQPWIVVNLVVALLVGLSWLFLSYRPGMDLSEELMFSSEVEEYPDKEKEIKASS

SEQ ID NO: 1986 - protein, 339 aa, Homo sapiens
MNWELLLWLLVLCALLLLLVQLLRFLRADGDLTLLWAEWQGRRPEWELTDMVVWVTGASSGIGEELAYQLSKLGVSLVLSARRVHELERVKRRCLENGNLKEKDILVLPLDLTDTGSHEAATKAVLQEFGRIDILVNNGGMSQRSLCMDTSLDVYRKLIELNYLGTVSLTKCVLPHMIERKQGKIVTVNSILGIISVPLSIGYCASKHALRGFFNGLRTELATYPGIIVSNICPGPVQSNIVENSLAGEVTKTIGNNGDQSHKMTTSRCVRLMLISMANDLKEVWISEQPFLLVTYLWQYMPTWAWWITNKMGKKRIENFKSGVDADSSYFKIFKTKHD

SEQ ID NO: 1987 - protein, 122 aa, Homo sapiens
MFGAMSLYGYTTKRDLSGFGNMLFMALIGIVLASLVNFWLKSEALMWAVTYIGVIVFVGLTAYDTQKLKNMGEQIDTRDTSNLRKYSILGALTLYLDFINLFLMLLRIFGNRRESEERQPGR

SEQ ID NO: 1988 - protein, 281 aa, Homo sapiens
  MISC_FEATURE (218): Xaa equals any of the twenty naturally occurring L-amino acids
MTPRIHLLGGPVMTPRILLPSEGLVMTQTHLLPGGSVMTPQTLHPQGGPVMILQILLPQGGLSIILQVHLLGESVMIHQIPLLLGEPVMVPQISLPPEGSITTPLTHLGGLLALQTHSNSEGPVMTPLIWLLMSLIPCPEPKVVKPQKEPLARLLHIGRSQEPPICHSQRTANMSMTLTSLLHEKSKQNPILETRSSLIPKVTARKQLIQTFLLHGIXKVQGTRILIQICHLHGIDLDTGALILTSLHQGGDRGPNLLILTCPRLEGVSLLERSCTHVFWG

SEQ ID NO: 1989 - protein, 117 aa, Homo sapiens
MGKEWGWQEMENGGAAPAWGAGPPVHPAPPPVEKTLSWGCGFGLHSGFGGSGGGVGLCRLLCLVRLFCCSSILYQRQERGVKSLFYPPNKLSHSEAEKKKKKKKKKKKKKKKKKGGG

SEQ ID NO: 1990 - protein, 435 aa, Homo sapiens
  MISC_FEATURE (249): Xaa equals any of the twenty naturally occurring L-amino acids
  MISC_FEATURE (266): Xaa equals any of the twenty naturally occurring L-amino acids
MPLFLLSLPTPPSASGHERRQRPEAKTSGSEKKYLRAMQANRSQLHSPPGTGSSEDASTPQCVHTRLTGEGSCPHSGDVHIQINSIPKECAENASSRNIRSGVHSCAHGCVHSRLRGHSHSEARLTDDTAAESGDHGSSSFSEFRYLFKWLQKSLPYILILSVKLVMQHITGISLGIGLLTTFMYANKSIVNQVFLRERSSKIQCAWLLVFLAGSSVLLYYTFHSQSLYYSLIFLNPTLDHLSFWEVFXIVGITDFILKFFFMGLXCLILLVPSFIMPFKSKGYWYMLLEELCQYYRTFVPIPVWFRYLISYGEFGNVTRWSLGILLALLYLILKLLEFFGHLRTFRQVLRIFFTQPSYGVAASKRQCSDVDDICSICQAEFQKPILLICQHIFCEECMTLWFNREKTCPLCRTVISDHINKWKDGATSSHLQIY

SEQ ID NO: 1991 - protein, 770 aa, Homo sapiens
MVPQGIRPVVQLTAIEILAWGLRNMKNFQMASITSPSLVVECGGERVESVVIKNLKKTPNFPSSVLFMKVFLPKEELYMPPLVIKVIDHRQFGRKPVVGQCTIERLDRFRCDPYAGKEDIVPQLKASLLSAPPCRDIVIEMEDTKPLLASKLTEKEEEIVDWWSKFYASSGEHEKCGQYIQKGYSKLKIYNCELENVAEFEGLTDFSDTFKLYRGKSDENEDPSVVGEFKGSFRIYPLPDDPSVPAPPRQFRELPDSVPQECTVRIYIVRGLELQPQDNNGLCDPYIKITLGKKVIEDRDHYIPNTLNPVFGRMYELSCYLPQEKDLKISVYDYDTFTRDEKVGETIIDLENRFLSRFGSHCGIPEEYCVSGVNTWRDQLRPTQLLQNVARFKGFPQPILSEDGSRIRYGGRDYSLDEFEANKILHQHLGAPEERLALHILRTQGLVPEHVETRTLHSTFQPNISQGKLQMWVDVFPKSLGPPGPPFNITPRKAKKYYLRVIIWNTKDVILDEKSITGEEMSDIYVKGWIPGNEENKQKTDVHYRSLDGEGNFNWRFVFPFDYLPAEQLCIVAKKEHFWSIDQTEFRIPPRLIIQIWDNDKFSLDDYLGFLELDLRHTIIPAKSPEKCRLDMIPDLKAMNPLKAKTASLFEQKSMKGWWPCYAEKDGARVMAGKVEMTLEILNEKEADERPAGKGRDEPNMNPKLDLPNRPETSFLWFTNPCKTMKFIVWRRFKWVIIGLLFLLILLLFVAVLLYSLPNYLSMKIVKPNV

SEQ ID NO: 1992 - protein, 116 aa, Homo sapiens
MDGWNSMIRYYKNNFSDGFRQDSIDLFLGNYSVDELESHSPLSVPRDWKFLALPIIMVVAFSMCIICLLMAGDTWTETLAYVLFWGVASIGTFFIILYNGKDFVDAPRLVQKEKID

SEQ ID NO: 1993 - protein, 102 aa, Homo sapiens
  MISC_FEATURE (4): Xaa equals any of the twenty naturally occurring L-amino acids
  MISC_FEATURE (98): Xaa equals any of the twenty naturally occurring L-amino acids
  MISC_FEATURE (99): Xaa equals any of the twenty naturally occurring L-amino acids
MIPXKDNRGTQDALNPEDEVDEFLSRAIDARSIDQLRKDHVRRFLLTFQREDLEKKYSRKVDPRFGAYVACALLVFCFICFIQLLIFPHSTLMLGDLXXQSS

SEQ ID NO: 1994 - protein, 226 aa, Homo sapiens
MKMVAPWTRFYSNSCCLCCHVRTGTILLGVWYLIINAVVLLILLSALADPDQYNFSSSELGGDFEFMDDANMCIAIAISLLMILICAMATYGAYKQRAAWIIPFFCYQIFDFALNMLVAITVLIYPNSIQEYIRQLPPNFPYRDDVMSVNPTCLVLIILLFISIILTFKGYLISCVWNCYRYINGRNSSDVLVYVTSNDTTVLLPPYDDATVNGAAKEPPPPYVSA

SEQ ID NO: 1995 - protein, 162 aa, Homo sapiens
MLQTSNYSLVLSLQFLLLSYDLFVNSFSELLQKTPVIQLVLFIIQDIAVLFNIIIIFLMFFNTFVFQAGLVNLLFHKFKGTIILTAVYFALSISLHVWVMNLRWKNSNSFIWTDGLQMLFVFQRLAAVLYCYFYKRTAVRLGDPHFYQDSLWLRKEFMQVRR

SEQ ID NO: 1996 - protein, 176 aa, Homo sapiens
  MISC_FEATURE (107): Xaa equals any of the twenty naturally occurring L-amino acids
  MISC_FEATURE (110): Xaa equals any of the twenty naturally occurring L-amino acids
  MISC_FEATURE (112): Xaa equals any of the twenty naturally occurring L-amino acids
  MISC_FEATURE (122): Xaa equals any of the twenty naturally occurring L-amino acids
  MISC_FEATURE (127): Xaa equals any of the twenty naturally occurring L-amino acids
  MISC_FEATURE (151): Xaa equals any of the twenty naturally occurring L-amino acids
  MISC_FEATURE (152): Xaa equals any of the twenty naturally occurring L-amino acids
  MISC_FEATURE (169): Xaa equals any of the twenty naturally occurring L-amino acids
  MISC_FEATURE (170): Xaa equals any of the twenty naturally occurring L-amino acids
MREYQRELEEREEKLKKRPLLFERVAQKNARMAAEKHYSNTLKALGISDEFVSKKGQSGKVLEYFNNQETKSVTEDKESFNEEEKIEERENGEENYFIDTNSQDSYXEKXEXNEESEEEKSXEESHXIIKVFSLCPCWWLQRQGVSSRIWXXNICGDLLICAGLVIKAXXPEKAES

SEQ ID NO: 1997 - protein, 147 aa, Homo sapiens
  MISC_FEATURE (94): Xaa equals any of the twenty naturally occurring L-amino acids
  MISC_FEATURE (97): Xaa equals any of the twenty naturally occurring L-amino acids
  MISC_FEATURE (124): Xaa equals any of the twenty naturally occurring L-amino acids
  MISC_FEATURE (140): Xaa equals any of the twenty naturally occurring L-amino acids
MNRVLCAPAAGAVRALRLIGWASRSLHPLPGSRDRAHPAAEEEDDPDRPIEFSSSKANPHRWSVGHTMGKGHQRPWWKVLPLSCFLVALIIWCXLRXESEADQWLRQVWGEVPEPMIVLRSLRXQLLQSENLTGCPLGLXEGSPTAA

SEQ ID NO: 1998 - protein, 119 aa, Homo sapiens
  MISC_FEATURE (16): Xaa equals any of the twenty naturally occurring L-amino acids
MRPFLFPAPPPGRSRXALQSLGAGGVAVGEGRPHPRWGLWPCVAVMSMILVFPDPWCCSPLSPALFLVCIYVAPVMHIYTGIKYIALYNIIYVCGIQGITFMRAKDKEFGQKMQPSLCD

SEQ ID NO: 1999 - protein, 159 aa, Homo sapiens
  MISC_FEATURE (88): Xaa equals any of the twenty naturally occurring L-amino acids
  MISC_FEATURE (90): Xaa equals any of the twenty naturally occurring L-amino acids
MCSPSALTPLPKQGSPRMPSSQALPPGPSTMALAQSSGWLALQPAPCSASPTRCGAHPYPAESARCFSASRERACCTTEIVTASEARXAXWVWVESERAGLPGCTLTAPFLLLGVLLEEREFSAERFSALLMCLPWREPGPCCSGGADCPVLWALQLCR

SEQ ID NO: 2000 - protein, 154 aa, Homo sapiens
MASASARGNQDKDAHFPPPSKQSLLFCPKSKLHIHRAEISKIMRECQEESFWKRALPFSLVSMLVTQGLVYQGYLAANSRFGSLPKVALAGLLGFGLGKVSYIGVCQSKFHFFEDQLRGAGFGPQHNRHCLLTCEECKIKHGLSEKGDSQPSAS

SEQ ID NO: 2001 - protein, 414 aa, Homo sapiens
  MISC_FEATURE (103): Xaa equals any of the twenty naturally occurring L-amino acids
MATLTTTQTSPSLLGGVVIIGGTIIGAGMFSLPVVMSGAWFFWSMAALIFTWFCMLHSGLMILEANLNYRIGSSFDTITKDLLGKGWNVVNGISIAFVLYILXYAYISASGSILHHTFAEMSLNVPARAAGFGFALLVAFVVWLSTKAVSRMTAIVLGAKVITFFLTFGSLLGHVQPATLFNVAESNASYAPYLLMTLPFCLASFGYHGNVPSLMKYYGKDPKTIVKCLVYGTLMALALYTIWLLATMGNIPRPEFIGIAEKGGNIDVLVQALSGVLNSRSLDLLLVVFSNFAVASSFLGVTLGLFDYLADLFGFDDSAVGRLKTALLTFAPPVVGGLLFPNGFLYAIGYAGLAATIWAAIVPALLARASRKRFGSPKFRVWGGKPMIALILVFGVGNALVHILSSFNLLPVYQ

SEQ ID NO: 2002 - protein, 613 aa, Homo sapiens
MFRCGGLAAGALKQKLVPLVRTVCVRSPRQRNRLPGNLFQRWHVPLELQMTRQMASSGASGGKIDNSVLVLIVGLSTVGAGAYAYKTMKEDEKRYNERISGLGLTPEQKQKKAALSASEGEEVPQDKAPSHVPFLLIGGGTAAFAAARSIRARDPGARVLIVSEDPELPYMRPPLSKELWFSDDPNVTKTLRFKQWNGKERSIYFQPPSFYVSAQDLPHIENGGVAVLTGKKVVQLDVRDNMVKLNDGSQITYEKCLIATGGTPRSLSAIDRAGAEVKSRTTLFRKIGDFRSLEKISREVKSITIIGGGFLGSELACALGRKARALGTEVIQLFPEKGNMGKILPEYLSNWTMEKVRREGVKVMPNAIVQSVGVSSGKLLIKLKDGRKVETDHIVAAVGLEPNVELAKTGGLEIDSDFGGFRVNAELQARSNIWVAGDAACFYDIKLGRRRVEHHDHAVVSGRLAGENMTGAAKPYWHQSMFWSDLGPDVGYEAIGLVDSSLPTVGVFAKATAQDNPKSATEQSGTGIRSESETESEASEITIPPSTPAVPQAPVQGEDYGKGVIFYLRDKVVVGIVLWNIFNRMPIARKIIKDGEQHEDLNEVAKLFNIHED

SEQ ID NO: 2003 - protein, 294 aa, Homo sapiens
  MISC_FEATURE (291): Xaa equals any of the twenty naturally occurring L-amino acids
MRRAKVLDWGLQEQLWPHMEALRPRPSVYIPEFIAANQSARADNLIPGSRAQQLEQIRRDIRDFRSSAGLDKVIVLWTANTERFCEVIPGLNDTAENLLRTIELGLEVSPSTLFAVASILEGCAFLNGSPQNTLVPGALELAWQHRVFVGGDDFKSGQTKVKSVLVDFLIGSGLKTMSIVSYNHLGNNDGENLSAPLQFRSKEVSKSNVVDDMVQSNPVLYTPGEEPDHCVVIKYVPYVGDSKRALDEYTSELMLGGTNTLVLHNTCEDSLLAAPIMLDLALLTELCQRVXFLH

SEQ ID NO: 2004 - protein, 139 aa, Homo sapiens
MNLNNTPTVGHRHFELVTVDVDSFATRRKMPKCLHHQTTDSVDFFIAKVGAERFVEVFNGSQCAYGPGMTTQLTEVDIIFFVILVFNLTNNQFQDVFNGHQTGNPTEFVNNDRHVVTLRAKLFQHPVYALTFRNDNRLT

SEQ ID NO: 2005 - protein, 103 aa, Homo sapiens
MHKWQLVFLSHCLNFVFIEIFYTDWFIDGQFCTQTEQYSTLPKMSVALFKHCVLTPVLCNWVVVHFALPGVTVFNLSVNKVSFNFKKKKKKKKKKKKKKKKKK

SEQ ID NO: 2006 - protein, 237 aa, Homo sapiens
  MISC_FEATURE (88): Xaa equals any of the twenty naturally occurring L-amino acids
MQRGRRGPQWGQWGWGRQRGPGSTEPREGEMSPPGRTGAHVCKETVVCVLSCICVCTHVLGTRVVRSERAPGCTGVGCTGTDADGPGXVLWPPVGWMRAVCREEPLGPFTRSADTHGTDALSFLLWGFPFSGLCAAPALPRVLLASKEELVGGGCDLQTWVSALLWGWGLLSQRPSFPLTPPLPASPGVLAVGSSEVGEACGVSALHLLLLLSPLPAASSMPKEHPWCSPQARPGRG

SEQ ID NO: 2007 - protein, 104 aa, Homo sapiens
  MISC_FEATURE (18): Xaa equals any of the twenty naturally occurring L-amino acids
  MISC_FEATURE (95): Xaa equals any of the twenty naturally occurring L-amino acids
MAVRLQGQQGAAMTRAPXAGYSAGDFSSWDGWACSSLELRALYVISEGPSASGVVPQEHRYQLHFQDPSEKMIMFQSVFCLLFFAELCCIAGIMXFSKGKFPLH

SEQ ID NO: 2008 - protein, 344 aa, Homo sapiens
  MISC_FEATURE (70): Xaa equals any of the twenty naturally occurring L-amino acids
MAAIYGGVEGGGTRSEVLLVSEDGKILAEADGLSTNHWLIGTDKCVERINEMVNRAKRKAGVDPLVPLRXLGLSLSGGDQEDAGRILIEELRDRFPYLSESYLITTDAAGSIATATPDGGVVLISGTGSNCRLINPDGSESGCGGWGHMMGDEGSAYWIAHQAVKIVFDSIDNLEAAPHDIGYVKQAMFHYFQVPDRLGILTHLYRDFDKCRFAGFCRKIAEGAQQGDPLSRYIFRKAGEMLGRHIVAVLPEIDPVLFQGKIGLPILCVGSVWKSWELLKEGFLLALTQGREIQAQNFFSSFTLMKLRHSSALGGASLGARHIGHLLPMDYSANAIAFYSYTFS

SEQ ID NO: 2009 - protein, 115 aa, Homo sapiens
  MISC_FEATURE (55): Xaa equals any of the twenty naturally occurring L-amino acids
  MISC_FEATURE (92): Xaa equals any of the twenty naturally occurring L-amino acids
  MISC_FEATURE (106): Xaa equals any of the twenty naturally occurring L-amino acids
MQYKGRVGPGHLSHNFIWSLGPSPFHKTRIYFSYPVICPNIPAFCHLHSLYLPWXTFTSTLQLYSVIYAPCPAPPLSYFSSHVLIPLPHMLXSFLSTHVILLSLIXNPQPPCYPA

SEQ ID NO: 2010 - protein, 160 aa, Homo sapiens [sequence omitted]

SEQ ID NO: 2011 - protein, 196 aa, Homo sapiens
  MISC_FEATURE (177): Xaa equals any of the twenty naturally occurring L-amino acids
  MISC_FEATURE (183): Xaa equals any of the twenty naturally occurring L-amino acids
  MISC_FEATURE (189): Xaa equals any of the twenty naturally occurring L-amino acids
  MISC_FEATURE (194): Xaa equals any of the twenty naturally occurring L-amino acids
  MISC_FEATURE (195): Xaa equals any of the twenty naturally occurring L-amino acids
MADAASQVLLGSGLTILSQPLMYVKVLIQVGYEPLPPTIGRNIFGRQVCQLPGLFSYAQHIASIDGRRGLFTGLTPRLCSGVLGTVVHGKVLQHYQESDKGEELGPGNVQKEVSSSFDHVIKETTREMIARSAATLITHPFHVITLRSMVQFIGRESKYCGLCDSIITIYREEGILXFFAGLXPRLLGXILSLXXG

SEQ ID NO: 2012 - protein, 154 aa, Homo sapiens
MAFLGVQAGKILLYYKARTKDILIRFTAWCCILGLISVALTKVSENEGFIPVNKNLWSLSYVTTLSSFAFFILLVLYPVVDVKGLWTGTPFFYPGMNSILVYVGHEVFENYFPFQWKLKDNQSHKEHLTQNIVATALWVLIAYILYRKKIFWKI

SEQ ID NO: 2013 - protein, 101 aa, Homo sapiens
  MISC_FEATURE (34): Xaa equals any of the twenty naturally occurring L-amino acids
MAESVERLQQRVQELERELAQERSLQVPRSGDGXGGRVRIEKMSSEVVDSNPYSRLMALKRMGIVSDYEKIRTFAVAIVGVGGVGSVTAEMLTRCGIVATL

SEQ ID NO: 2014 - protein, 134 aa, Homo sapiens
  MISC_FEATURE (103): Xaa equals any of the twenty naturally occurring L-amino acids
  MISC_FEATURE (126): Xaa equals any of the twenty naturally occurring L-amino acids
  MISC_FEATURE (133): Xaa equals any of the twenty naturally occurring L-amino acids
MHLLAGLAMTRHAVCPNPDDGRCQPRPCTLPLPLCLTLAGQLRGAMQGPLPGQDLCRAQPQLAGVFMAWSPLPAADSDVSWHQGHCACGFRFLPCPVAGVVGXLFAAWQNSAALRKWMSAYCVWGXDGYVLSXT

SEQ ID NO: 2015 - protein, 375 aa, Homo sapiens
  MISC_FEATURE (273): Xaa equals any of the twenty naturally occurring L-amino acids
MVAVFLTFLMLFRGRVTLAWALGYLGLYVFYVVTVILCTWIYQRQRRGSLFCPMPVTPEILSDSEEDRVSSNTNSYDYGDEYRPLFFYQETTAQILVRALNPLDYMKWRRKSAYWKALKVFKLPVEFLLLLTVPVVDPDKDDQNWKRPLNCLHLVISPLVVVLTLQSGTYGVYEIGGLVPVWVVVVIAGTALASVTFFATSDSQPPRLHWLFAFLGFLTSALWINAAATEVVNILRSLGVVFRLSNTVLGLTLLAWGNSIGDAFSDFTLARQXYPRMAFSACFGGIIFNILVGVGLGCLLQISRSHTEVKLEPDGLLVWVLAGALGLSLVFSLVSVPLQCFQLSRVYGFCLLLFYLNFLVVALLTEFGVIHLKSM

SEQ ID NO: 2016 - protein, 473 aa, Homo sapiens
MASCVGSRTLSKDDVNYKMHFRMINEQQVEDITIDFFYRPHTITLLSFTIVSLMYFAFTRDDSVPEDNIWRGILSVIFFFLIISVLAFPNGPFTRPHPALWRMVFGLSVLYFLFLVFLLFLNFEQVKSLMYWLDPNLRYATREADVMEYAVNCHVITWERIISHFDIFAFGHFWGWAMKALLIRSYGLCWTISITWELTELFFMHLLPNFAECWWDQVILDILLCNGGGIWLGMVVCRFLEMRTYHWASFKDIHTTTGKIKRAVLQFTPASWTYVRWFDPKSSFQRVAGVYLFMIIWQLTELNTFFLKHIFVFQASHPLSWGRILFIGGITAPTVRQYYAYLTDTQCKRVGTQCWVFGVIGFLEAIVCIKFGQDLFSKTQILYVVLWLLCVAFTTFLCLYGMIWYAEHYGHREKTYSECEDGTYSPEISWHHRKGTKGSEDSPPKHAGNNESHSSRRRNRHSKSKVTNGVGKK

SEQ ID NO: 2017 - protein, 110 aa, Homo sapiens [sequence omitted]

SEQ ID NO: 2018 - protein, 151 aa, Homo sapiens
  MISC_FEATURE (126): Xaa equals any of the twenty naturally occurring L-amino acids
  MISC_FEATURE (132): Xaa equals any of the twenty naturally occurring L-amino acids
  MISC_FEATURE (137): Xaa equals any of the twenty naturally occurring L-amino acids
  MISC_FEATURE (139): Xaa equals any of the twenty naturally occurring L-amino acids
MPFQVPELPVGNETGLLAASSKTRALCEPLPYYTCSCVLGFIACSVFLRMSLEPKVVLLTVALVAYLVLFNLSPCWQWDCCGQGLGNLTKPNGTTSGTPSCSWKDLKTMTNFYLVLFYIHPALHSXRQIGLXMAAWXCXWKKNFKKEHEEF

SEQ ID NO: 2019 - protein, 129 aa, Homo sapiens
MSISRAVLGEKEGGLGSVAPCQPALREDRVSHARMAGHVSVLVSHFPPSVTYLGIPQGLLECDCPLPSCLGYKSWPYVPAVRGSGNPTQPPVLGWSVSIHPLVVIEAALPVLGEDIWATRAPLAPSRRK

SEQ ID NO: 2020 - protein, 171 aa, Homo sapiens
  MISC_FEATURE (60): Xaa equals any of the twenty naturally occurring L-amino acids
  MISC_FEATURE (170): Xaa equals any of the twenty naturally occurring L-amino acids
MAPAADREGYWGPTTSTLDWCEENYSVTWYIAEFWNTVSNLIMIIPPMFGAIQSVRDGLXKRYIASYLALTVVGMGSWCFHMTLKYEMQLLDELPMIYSCCIFVYCMFECFKIKNSVNYHLLFTLVLFSLIVTTVYLKVKEPIFHQVIFCKLLHIRLFTIHGCFVISLAXK

SEQ ID NO: 2021 - protein, 224 aa, Homo sapiens
MVCLVLLNHPKELNMAKQMVKASRLFYFGSARSPLTCDLCCPSRWSQAIQPCPLPLCPDASGARLFRLALTSGRQPTLRDVANTTPPVLSVGRAEAAWEARGDRKRALSSSEKRICHQIEFRPLSLFGRMVQIQIKVVTQPEMSGKAFCRENVPPPAICSQVCATRQPSRNIVWILKMCLFLFLNHFITYFLIYFVMSCFEVLLLSLLSFPLFLSLIYFVKVVH

SEQ ID NO: 2022 - protein, 304 aa, Homo sapiens
MLVVSWFWMHWLFLGCNFKETCSLSKKKKTKREQLSEKRIQEEYEKLGDISYPEMVTGFFFILMTVLWFTREPGFVPGWDSFFEKKGYRTDATVSVFLGFLLFLIPAKKPCFGKKNDGENQEHSLGTEPIITWKDFQKTMPWEIVILVGGGYALASGSKSSGLSTWIGNQMLSLSSLPPWAVTLLACILVSIVTEFVSNPATITIFLPILCSLSETLHINPLYTLIPVTMCISFAVMLPVGNPPNAIVFSYGHCQIKDMVKAGLGVNVIGLVIVMVAINTWGVSLFHLDTYPAWARVSNITDQA

SEQ ID NO: 2023 - protein, 124 aa, Homo sapiens
  MISC_FEATURE (42): Xaa equals any of the twenty naturally occurring L-amino acids
MVCHLLRMWRFLFYSWNWIAVASGRHKAFCSVLYPRQSCCVXSTCFLMGPVKQLKKMFEATRLLATIVMLLCFIFTLCAALWWHKKGLAVLFCILQFLSMTWYSLSYIPYARDAVIKCCSSLLS

SEQ ID NO: 2024 - protein, 135 aa, Homo sapiens [sequence omitted]

SEQ ID NO: 2025 - protein, 368 aa, Homo sapiens
MLFWVISMVMVAVGVYARLMKHAEAALACLAVDPAILLIVVGVLMFLLTFCGCIGSLRENICLLQTFSLCLTAVFLLQLAAGILGFVFSDKARGKVSEIINNAIVHYRDDLDLQNLIDFGQKKFSCCGGISYKDWSQNMYFNCSEDNPSRERCSVPYSCCLPTPDQAVINTMCGQGMQAFDYLEASKVIYTNGCIDKLVNWIHSNLFLLGGVALGLAIPQLVGILLSQILVNQIKDQISYSSTTSSTGLTHGTENPSCTSSPWKLASLINEQQWVLKAAPNGDLDSSPPVTAQWEEANSRWAEGRVHRWLQSQEDAPPLPHPSPQHCARVIPLSVWVYVFSFVWETAVAQRVGGTAAAFSPRHCHHQL

SEQ ID NO: 2026 - protein, 245 aa, Homo sapiens
MNGRADFREPNAEVPRPIPHIGPDYIPTEEERRVFAECNDESFWFRSVPLAATSMLITQGLISKGILSSHPKYGSIPKLILACIMGYFAGKLSYVKTCQEKFKKLENSPLGEALRSGQARRSSPPGHYYQKSKYDSSVSGQSSFVTSPAADNIEMLPHYEPIPFSSSMNESAPTGITDHIVQGPDPNLEESPKRKNITYEELRNKNRESYEVSLTQKTDPSVRPMHERVPKKEVKVNKYGDTWDE

SEQ ID NO: 2027 - protein, 185 aa, Homo sapiens
  MISC_FEATURE (7): Xaa equals any of the twenty naturally occurring L-amino acids
MAGPRPXWRDQLLFMSIIVLVIVVICLMLYALLWEAGNLTDLPNLRIGFYNFCLWNEDTSTLQCHQFPELEALGVPRVGLGLARLGVYGSLVLTLFAPQPLLLAQCNSDERAWRLAVGFLAVSSVLLAGGLGLFLSYVWKWVRLSLPGPGFLALGSAQALLILLLIAMAVFPLRAERAESKLESC

SEQ ID NO: 2028 - protein, 149 aa, Homo sapiens
MGFRLEGIFPAALLPLLLTMILFLGPLMQLSMDCPCDLADGLKVVLAPRSWARCLTDMRWLRNQVIAPLTEELVFRACMLPMLAPCMGLGLLCSPARSFLELPIFTILLSSCVSARAAWGTSSCLLRSSSPTQLSSVPTLLSSSSAQDT

SEQ ID NO: 2029 - protein, 217 aa, Homo sapiens
HEVFFMEYFFPPPFLCFPLPVSPPSHLFLSFPIPCTLTSSWMHLLPSLSSCCFLPVLFCCPHPVFTPELFLFFFSFFFFFFLRRILTLWPRLERSGAISTHCNPRLLGSSDSPAPASQVAGRTGVSCRTQPVSLFPLFFFLISFLGCLSAFLSACFASTFSCVLGSPETSFSPCLHPPPKVLSSHPHPLQPSMPQPPKGPHCQSIAASLHPMEAMSP

SEQ ID NO: 2030 - protein, 120 aa, Homo sapiens
  MISC_FEATURE (67): Xaa equals any of the twenty naturally occurring L-amino acids
  MISC_FEATURE (91): Xaa equals any of the twenty naturally occurring L-amino acids
MKRPVSTLPSLTADSAMPLPRSAFEDCDLHQEVLLTPVGKISPSFCLECPVFDLAAGVEPSPRPPGXLPLWLSRNRMWLPWPNVVLLSPTXAPQLLSSSGPCVWLVFAGLSLCSGIALPL

SEQ ID NO: 2031 - protein, 120 aa, Homo sapiens
MCLGFLRGFPESVPNSDVFIRNTRGPSEVIPAPGKLTWHGAPFCPGLFHPICPGPRACPVWSSLSCLVCHHVMLGWLVFAASLPKLTDVSARDHQLPSRMTVLSFKVQRLPFQSGPSPTS

SEQ ID NO: 2032 - protein, 195 aa, Homo sapiens
MVISSFGGLILSKTVSKQQYKGMAIFTPVICGVGGNLVAIQTSRISTYLHMWSAPGVLPLQMKKFWPNPCSTFCTSEINSMSARVLLLLVVPGHLIFFYIIYLVEGQSVINSQTFVVLYLLAGLIQVTILLYLAEVMVRLTWHQALDPDNHCIPYLTGLGDLLGTGLLALCFFTDWLLKSKAELGGISELASGPP

SEQ ID NO: 2033 - protein, 137 aa, Homo sapiens
  MISC_FEATURE (109): Xaa equals any of the twenty naturally occurring L-amino acids
MGREWPRPAPSLLPAFPELVPGSAQRGVPAISPCICQAPKTPSLVCLPARPPRSCLSVPDRVSLLCTLRSLLFLLALSARGPLPQWGRWRSLAPGWADRAPSWVRRSHXLKWRALCPGGTARCVDRRCHEPFPEPQG

SEQ ID NO: 2034 - protein, 170 aa, Homo sapiens
  MISC_FEATURE (155): Xaa equals any of the twenty naturally occurring L-amino acids
  MISC_FEATURE (159): Xaa equals any of the twenty naturally occurring L-amino acids
MYIMLHSITVKSPLCPLPQKSFSLVSKLGKRRSLLLPVQFVLGQQLEVLGAQPVQLQLQLPHTRVVATQPLALQPQPVVLVLHAREALLQFQVLLDELLLAHVLQALRVVPLVRLREVPLQKLAAVPSHPIAAPILLTPFFHEVVIAGVVGFAAXRLEXRPVLRSGSSWS

SEQ ID NO: 2035 - protein, 118 aa, Homo sapiens
  MISC_FEATURE (44): Xaa equals any of the twenty naturally occurring L-amino acids
MGKRQRALSVPLKTNTLNIPCDLEQCGSFHSTGPFIGGLNVSLXSVTNSLLSASLSVNWMKRALMPFRLLEAIDLDKPSKMGVLPGLFPFPPSLATVLGVWQLFGFFFFLQLCVCVFV

SEQ ID NO: 2036 - protein, 377 aa, Homo sapiens
MEALLLGAGLLLGAYVLVYYNLVKAPPCGGMGNLRGRTAVVTGANSGIGKMTALELARRGARVVLACRSQERGEAAAFDLRQESGNNEVIFMALDLASLASVRAFATAFLSSEPRLDILIHNAGISSCGRTREAFNLLLRVNHIGPFLLTHLLLPCLKACAPSRVVVVASAAHCRGRLDFKRLDRPVVGWRQELRAYADTKLANVLFARELANQLEATGVTCYAAHPGPVNSELFLRHVPGWLRPLLRPLAWLVLRAPRGGAQTPLYCALQEGIEPLSGRYFANCHVEEVPPAARDDRAAHRLWEASKRLAGLGPGEDAEPDEDPQSEDSEAPSSLSTPHPEEPTVSQPYPSPQSSPDLSKMTHRIQAKVEPEIQLS

SEQ ID NO: 2037 - protein, 354 aa, Homo sapiens
MDFILEDMDLAANEISIYDKLSETVDLVRQTGHQCGMSEKAIEKFIRQLLEKNEPQRPPPQYPLLIVVYKVLATLGLILLTAYFVIQPFSPLAPEPVLSGAHTWRSLIHHIRLMSLPIAKKYMSENKGVPLHGGDEDRPFPDFDPWWTNDCEQNESEPIPANCTGCAQKHLKVMLLEDAPRKFERLHPLVIKTGKPLLEEEIQHFLCQYPEATEGFSEGFFAKWWRCFPERWFPFPYPWRRPLNRSQMLRELFPVFTHLPFPKDASLNKCSFLHPEPVVGSKMHKMPDLFIIGSGEAMLQLIPPFQCRRHCQSVAMPIEPGDIGYVDTTHWKVYVIARGVQPLVICDGTAFSEL

SEQ ID NO: 2038 - protein, 167 aa, Homo sapiens
  MISC_FEATURE (135): Xaa equals any of the twenty naturally occurring L-amino acids
MEAGGFLDSLIYGACVVFTLGMFSAGLSDLRHMRMTRSVDNVQFLPFLTTEVNNLGWLSYGALKGDGILIVVNTVGAALQTLYILAYLHYCPRKAKVIQTKSTQCLSYPLTIATLLTSASWCLYGFRLRDPYIMXSNFPGIVTSFIRFWLFWKYPQEQDRNYWLLQT

SEQ ID NO: 2039 - protein, 716 aa, Homo sapiens
MFSLSSTVQPQVTVPLSHLINAFHTPKNTSVSLSGVSVSQNQHRDVVPEHEAPSSEPSLNLRDLGLSELKIGQIDQLVENLLPGFCKGKNISSHWHTSHVSAQSFFENKYGNLDIFSTLRSSCLYRHHSRALQSICSDLQYWPVFIQSRGFKTLKSRTRRLQSTSERLAETQNIAPSFVKGFLLRDRGSDVESLDKLMKTKNIPEAHQDAFKTGFAEGFLKAQALTQKTNDSLRRTRLILFVLLLFGIYGLLKNPFLSVRFRTTTGLDSAVDPVQMKNVTFEHVKGVEEAKQELQEVVEFLKNPQKFTILGGKLPKGILLVGPPGTGKTLLARAVAGEADVPFYYASGSEFDEMFVGVGASRIRNLFREAKANAPCVIFIDELDSVGGKRIESPMHPYSRQTINQLLAEMDGFKPNEGVIIIGATNFPEALDNALIRPGRFDMQVTVPRPDVKGRTEILKWYLNKIKFDQSVDPEIIARGTVGFSGAELENLVNQAALKAAVDGKEMVTMKELEFSKDKILMGPERRSVEIDNKNKTITAYHESGHAIIAYYTKDAMPINKATIMPRGPTLGHVSLLPENDRWNETRAQLLAQMDVSMGGRVAEELIFGTDHITTGASSDFDNATKIAKRMVTKFGMSEKLGVMTYSDTGKLSPETQSAIEQEIRILLRDSYERAKHILKTHAKEHKNLAEALLTYETLDAKEIQIVLEGKKLEVR

SEQ ID NO: 2040 - protein, 124 aa, Homo sapiens
MAWPNVFQRGSLLSQFSHHHVVVFLLTFFSYSLLHASRKTFSNVKVSISEQWTPSAFNTSVELPLEIWSSNHLFPSAEKATLFLGTLDTIFLFSYAVGLFISGIVGDRLNLRWVLSFGMCSSAL

SEQ ID NO: 2041 - protein, 568 aa, Homo sapiens
  MISC_FEATURE (83): Xaa equals any of the twenty naturally occurring L-amino acids
  MISC_FEATURE (240): Xaa equals any of the twenty naturally occurring L-amino acids
  MISC_FEATURE (522): Xaa equals any of the twenty naturally occurring L-amino acids
MTSFAVLMDVSRRENGEILPLKTLTYVALGVALAALLLTFFFLTLLRILRSNQHGIRRNLTAALGLAQLVFLLGINQADLPFXCTVIAILLHFLYLCTFSWALLEALHLYRALTEVRDVNTGPMRFYYMLGWGVPAFITGLAVGLDPEGYGNPDFCWLSIYDTLIWSFGGPVAFAVSMSVFLYILAARASCAAQRQGFEKKGPVSGLQPSFAVLLLLSATWLLALLSVNRDTLLFHYLFXTCNCIQGPFIFLSYVVLSKEVRKALKLACSRKPSPDPALTTKSTLTSSYNCPSPYADGRLYQPYGDSAGSLHSTSRSGKSQPSYIPFLLREESALNPGQGPPGLGDPGSLFLEGQDQQHDPDTDSDSDLSLEDDQSGSYASTHSSDSEEEEEEEEEEAAFPGEQGWDSLLGPGAERLPLHSTPKDGGPGPGKAPWPGDFGTTAKESSGNGAPEERLRENGDALSREGSLGPLPGSSAQPHKGILKKKCLPTISEKSSLLRLPLEQCTGSSRGSSASEGSRGXPPPRPPPRQSLQEQLNGVMPIAMSIKAGTVDEDSSGSEFLFFNFLH

SEQ ID NO: 2042 - protein, 271 aa, Homo sapiens
MTQGKLSVANKAPGTEGQQQVHGEKKEAPAVPSAPPSYEEATSGEGMKAGAFPPAPTAVPLHPSWAYVDPSSSSSYDNGFPTGDHELFTTFSWDDQKVRRVFVRKVYTILLIQLLVTLAVVALFTFCDPVKDYVQANPGWYWASYAVFFATYLTLACCSGPRRHFPWEPDSPDRLYPVHGLPHWDAVQLLQHHLRAAVPGHHGPCLPLSHRLQLPDQVRLHLLPGRALRASHDSFLQRTHPGHPPTLPICALAPCSLCSTGSGCIYIVPGT

SEQ ID NO: 2043 - protein, 126 aa, Homo sapiens
MTTLLLEMSTPFTCVSWMLLKAGWSESLFWKLNQWLMIHMFHCRMVLTYHMWWVCFWHWDGLVSSLYLPHLTLFLVGLALLTLIINPYWTHKKTQQLLNPVDWNFAQPEAKSRPEGNGQLLRKKRP

SEQ ID NO: 2044 - protein, 191 aa, Homo sapiens
  MISC_FEATURE (52): Xaa equals any of the twenty naturally occurring L-amino acids
  MISC_FEATURE (84): Xaa equals any of the twenty naturally occurring L-amino acids
  MISC_FEATURE (91): Xaa equals any of the twenty naturally occurring L-amino acids
  MISC_FEATURE (92): Xaa equals any of the twenty naturally occurring L-amino acids
  MISC_FEATURE (98): Xaa equals any of the twenty naturally occurring L-amino acids
  MISC_FEATURE (101): Xaa equals any of the twenty naturally occurring L-amino acids
  MISC_FEATURE (112): Xaa equals any of the twenty naturally occurring L-amino acids
  MISC_FEATURE (159): Xaa equals any of the twenty naturally occurring L-amino acids
  MISC_FEATURE (162): Xaa equals any of the twenty naturally occurring L-amino acids
  MISC_FEATURE (165): Xaa equals any of the twenty naturally occurring L-amino acids
  MISC_FEATURE (174): Xaa equals any of the twenty naturally occurring L-amino acids
  MISC_FEATURE (187): Xaa equals any of the twenty naturally occurring L-amino acids
MASSSASATPEFEGRGGDDLGTEIANTLYRIFNNKSSVDLKTLCISPREHCXVLYVDVLLLECGGNLFDAISIAVKAALFNTRXPRVRVLXXEEGSKXIEXSDDPYDCIRLXVENVPCIVTLCKIAIGMWWMLLFRRRPARWPACWCPVTSKGVATCMXKVXKGXLDPESIFEXMETGKRVARYWMXSLQK

SEQ ID NO: 2045 - protein, 369 aa, Homo sapiens
  MISC_FEATURE (357): Xaa equals any of the twenty naturally occurring L-amino acids
  MISC_FEATURE (365): Xaa equals any of the twenty naturally occurring L-amino acids
MANERMNLMNMAKLSIKGLIESALNLGRTLDSDYAPLQQFFVVMEHCLKHGLKAKKTFLGQNKSFWGPLELVEKLVPEAAEITASVKDLPGLKTPVGRGRAWLRLALMQKKLSEYMKALINKKELLSEFYEPNALMMEEEGAIIAGLLVGLNVIDANFCMKGEDLDSQVGVIDFSMYLKDGNSSKGTEGDGQITAILDQKNYVEELNRHLNATVNNLQAKVDALEKSNTKLTEELAVANNRIITLQEEMERVKEESSYILESNRKGPKQDRTAEGQALSEARKHLKEETQLRLDVEKELEMQISMRQEMELAMKMLEKDVCEKQVPWYLFGQQLDDLRALKHELAFKLQSSDLGVKXKSELNSRXGRED

SEQ ID NO: 2046 - protein, 112 aa, Homo sapiens
  MISC_FEATURE (24): Xaa equals any of the twenty naturally occurring L-amino acids
  MISC_FEATURE (99): Xaa equals any of the twenty naturally occurring L-amino acids
  MISC_FEATURE (111): Xaa equals any of the twenty naturally occurring L-amino acids
MTHLLPRLPQHMFYVGQDSSRCVXCMVDSSLGVWVTLKGSAHVCLYHPDTFEQLAEVDVTPPVHRMLAGSDAIIRQHKAACLRITALLVCEELLWVGTXAGVVSPCPLRPXL

SEQ ID NO: 2047 - protein, 107 aa, Homo sapiens
MGPSPQIQSSQAFHELASSFCSLSNCPGCPVSDSSYFVGLLWNHEKSPKQSQFSSSLRLDISTLSSLVFLEINLLFFIVFLWSCFPFVGYYFIFSFSHHTDICWLFF

SEQ ID NO: 2048 - protein, 176 aa, Homo sapiens
  MISC_FEATURE (158): Xaa equals any of the twenty naturally occurring L-amino acids
MCMVIFAPLFAIFAFATCGGYSGGLRLSVDCVNKTESNLSIDIAFAYPFRLHQVTFEVPTCEGKERQKLALIGDSSSSAEFFVTVAVFAFLYSLAATVVYIFFQNKYRENNRGPLIDFIVTVVFSFLWLVGSSAWAKGLSDVKVATDPKEVLLLMSAXKQAIQQMHGLSTALLCQA

SEQ ID NO: 2049 - protein, 202 aa, Homo sapiens
  MISC_FEATURE (160): Xaa equals any of the twenty naturally occurring L-amino acids
MAELQEVQITEEKPLLPGQTPEAAKEAELAARILLDQGQTHSVETPYGSVTFTVYGTPKPKRPAILTYHDVGLNYKSCFQPLFQFEDMQEIIQNFVRVHVDAPGMEEGAPVFPLGYQYPSLDQLADMIPCVLQYLNFSTIIGVGVGAGAYILARYALNHXDTVEGLVLINIDPNAKGWMDWAAHKLTGLTSSIPEMILGHLF

SEQ ID NO: 2050 - protein, 325 aa, Homo sapiens
  MISC_FEATURE (285): Xaa equals any of the twenty naturally occurring L-amino acids
MAELQEVQITEEKPLLPGQTPEAAKTHSVETPYGSVTFTVYGTPKPKRPAILTYHDVGLNYKSCFQPLFQFEDMQEIIQNFVRVHVDAPGMEEGAPVFPLGYQYPSLDQLADMIPCVLQYLNFSTIIGVGVGAGAYILARYALNHPDTVEGLVLINIDPNAKGWMDWAAHKLTGLTSSIPEMILGHLFSQEELSGNSELIQKYRNIITHAPNLDNIELYWNSYNNRRDLNFERGGDITLRCPVMLVVGDQAPHEDAVVECNSKLDPTQTSFLKMADSGGQPQLTXARQADRGLQVLPARHGLHGLILHDSPVPVSYSLSDQCSIR

SEQ ID NO: 2051 - protein, 105 aa, Homo sapiens [sequence omitted]

SEQ ID NO: 2052 - protein, 290 aa, Homo sapiens
  MISC_FEATURE (39): Xaa equals any of the twenty naturally occurring L-amino acids
  MISC_FEATURE (125): Xaa equals any of the twenty naturally occurring L-amino acids
  MISC_FEATURE (132): Xaa equals any of the twenty naturally occurring L-amino acids
  MISC_FEATURE (137): Xaa equals any of the twenty naturally occurring L-amino acids
MERGPVVGAGLGAGRNPGTAGLPAQGAALGGLCLLYFGXEQAARLLGSPCLRRLYHAWLAAVVIFGPLLQFHVNPRTIFASHGNFFNIKFVNSAWGWTCTFLGGFVLLVVFLATRRVAVTARHLXRLVVGAXVWRGXGRAFLLIEDLTGSCFEPLPQGLLLHELPDRRSCLAAGHQWRGYTVSSHTFLLTFCCLLMAEEAAVFAKYLRPWASCRRPTAPCLPAERAAAGPLELLAALYRHLFPPVHSQGGGRRSGHLCLVPHLWQLVSSALVSREPRPWALPPSPLQPQA

SEQ ID NO: 2053 - protein, 162 aa, Homo sapiens [sequence omitted]

SEQ ID NO: 2054 - protein, 105 aa, Homo sapiens
MGNLRGKRQGPACPAMRGIPCPPALCLPRWNVGPCSPSGCAVSDLCLHPRGVSASSPPRSGCGPAACCGVLTCVTTAPLAPGGVMVSSWMLLLESFFLINLLQLR

SEQ ID NO: 2055 - protein, 105 aa, Homo sapiens
  MISC_FEATURE (13): Xaa equals any of the twenty naturally occurring L-amino acids
MCLPPLCGHGFAXASKCRRTCHLRLVLHSGPWLRFLLVCLPRSSFLYPCDQTVFVGTVADLGFLQFFLSKLHPVPQERGENSPNVFGFLAAWNLLLPPAGHHCPH

SEQ ID NO: 2056 - protein, 216 aa, Homo sapiens
  MISC_FEATURE (126): Xaa equals any of the twenty naturally occurring L-amino acids
  MISC_FEATURE (148): Xaa equals any of the twenty naturally occurring L-amino acids
  MISC_FEATURE (154): Xaa equals any of the twenty naturally occurring L-amino acids
  MISC_FEATURE (171): Xaa equals any of the twenty naturally occurring L-amino acids
MFYFRGCGRWVAVSFTKQQFPLARLSSDSAAPRTPHFDVIVIGGGHAGTEAATAAARCGSRTLLLTHRVDTIGQMSCNPSFGGIGKGHLMREVDALDGLCSRICDQSGVHYKVLNRRKGPAVWGLXAQIDRKLYKQNMQKEILNTPLXTVQEGXVEDLILTEPEPEHTGKXRVSGVVLVDGSTVYAESVILTTGTFLRGMIVIGLETHPAGRLGDQ

SEQ ID NO: 2057 - protein, 316 aa, Homo sapiens
MFSSPSPPPALLEKVFQYIDLHQDEFVQTLKEWVAIESDSVQPVPRFRQELFRMMAVAADTLQRLGARVASVDMGPQQVLDGQSLPIPPVILAELGSDPTKGTVCFYGHLDVQPADRGDGWLTDPYVLTEVDGKLYGRGATDNKGPVLAWINAVSAFRALEQDLPVNIKFIIEGMERGWLCLPWRNLWEKEKDRFFSGVDYIVISDNLWISQRKPAITYGTRGNSYFMVEVKCRDQDFHSGTFGGILHEPMADLVALLGSLVDSSGHILVPGIYDEVVPLTEEEINTYQSHPSRPKKNTGIAAGLRNFCSILRRRF

SEQ ID NO: 2058 - protein, 262 aa, Homo sapiens
MLFSALLLEVIWILAADGGQHWTYEGPHGQDHWPASYPECGNNAQSPIDIQTDSVTFDPDLPALQPHGYDQPGTEPLDLHNNGHTVQLSLPSTLYLGGLPRKYVAAQLHLHWGQKGSPGGSEHQINSEATFAELHIVHYDSDSYDSLSEAAERPQGLAVLGILIELEKLQGTLFSTEEEPSKLLVQNYRALQPLNQRMVFASFIQAGSSYTTGEMLSLGVGILVGCLCLLLAVYFIARKIRKKRLENRKSVVFTSAQATTEA

SEQ ID NO: 2059 - protein, 438 aa, Homo sapiens
  MISC_FEATURE (72): Xaa equals any of the twenty naturally occurring L-amino acids
MPEGGGALAEGFQVRMFEFQNFERRFEECISQSAVKTKFEQHTVRAKQIAEAVRLIMDSLHMAAREQQVYCXEMREERQDRLKFIDKQLELLAQDYKLRIKQITEEVERQVSTAMAEEIRRLSVLVDDYQMDFHPSPVVLKVYKNELHRHIEEGLGRNMSDRCSTAITNSLQTMQQDMIDGLKPLLPVSVRSQIDMLVPRQCFSLNYDLNCDKLCADFQEDIEFHFSLGWTMLVNRFLGPKNSRRALMGYNDQVQRPIPLTPANPSMPPLPQGSLTQEEFMVSMVTGLASLTSRTSMGILVVGGVVWKAVGWRLIALSFGLYGLLYVYERLTWTTKAKERAFKRQFVEHASEKLQLVISYTGSNCSHQVQQELSGTFAHLCQQVDVTRENLEQEIAAMNKKIEVLDSLQSKAKLLRNKAGWLDSELNMFTHQYLQPSR

SEQ ID NO: 2060 - protein, 160 aa, Homo sapiens
  MISC_FEATURE (147): Xaa equals any of the twenty naturally occurring L-amino acids
  MISC_FEATURE (160): Xaa equals any of the twenty naturally occurring L-amino acids
MAWRGWAQRGWGCGQAWGASVGGRSCEELTAVLTPPQLLGRRFNFFIQQKCGFRKAPRKVEPRRSDPGTSGEAYKRSALIPPVEETVFYPSPYPIRSLIKPLFFTVGFTGCAFGSAAIWQYESLKSRVQSYFDGIKADWLDSIRPQXEGDFRKEINKWWX

SEQ ID NO: 2061 - protein, 261 aa, Homo sapiens
MELLQVTILFLLPSICSSNSTGVLEAANNSLVVTTTKPSITTPNTESLQKNVVTPTTGTTPKGTITNELLKMSLMSTATFLTSKDEGLKATTTDVRKNDSIISNVTVTSVTLPNAVSTLQSSKPKTETQSSIKTTEIPGSVLQPDASPSKTGTLTSIPVTIPENTSQSQVIGTEGGKNASTSATSRSYSSIILPVVIALIVITLSVFVLVGLYRMCWKADPGTPENGNDQPQSDKESVKLLTVKTISHESGEHSAQGKTKN

SEQ ID NO: 2062 - protein, 504 aa, Homo sapiens
  MISC_FEATURE (99): Xaa equals any of the twenty naturally occurring L-amino acids
  MISC_FEATURE (189): Xaa equals any of the twenty naturally occurring L-amino acids
  MISC_FEATURE (194): Xaa equals any of the twenty naturally occurring L-amino acids
  MISC_FEATURE (403): Xaa equals any of the twenty naturally occurring L-amino acids
MGIKTALPAAELGLYSLVLSGALAYAGRGLLEASQDGAHRKAFRESVRPGWEYIGRKMDVADFEWVMWFTSFRNVIIFALSGHVLFAKLCTMVAPKLRXWMYAVYGALAVMGTMGPWYLLLLLGHCVGLYVASLLGQPWLCLGLGLASLASFKMDPLISWQSGFVTGTFDLQEVLFHGGSSFTVLRCTXFALEXCAHPDRHYSLADLLKYNFYLPFFFFGPIMTFDRFHAQVSQVEPVRREGELWHIRAQAGLSVVAIMAVDIFFHFFYILTIPSDLKFANRLPDSALAGLAYSNLVYDWVKAAVLFGVVNTVACLDHLDPPQPPKCITALYVFAETHFDRGINDWLCKYVYNHIGGEHSAVIPELAATVATFAITTLWLGPCDIVYLWSFLNCFGLNFELWXQKLAEWGPLARIEASLSVQMSRRVRALFGAMNFWAIIMYNLVSLNSLKFTELVARRLLLTGFPQTTLSILFVTYCGVQLVKERERTLALEEEQKQDKEKPE

SEQ ID NO: 2063 - protein, 259 aa, Homo sapiens
  MISC_FEATURE (242): Xaa equals any of the twenty naturally occurring L-amino acids
MLSKGALNPADITVLFKMFTSMDPPPVELIRVPAFLDLFMQSLFKPGARINQDHKHKYIHILAYAASVVETWKKNKRVSINKDELKSTSKAVETVHNLCCNENKGASELVAELSTLYQCIRFPVVAMGVLKWVDWTVSEPRYFQLQTDHTPVHLALLDEISTCHQLLHPQVLQLLVKLFETEHSQLDVMEQLELKKTLLDRMVHLLSRGYVLPVVSYIRKCLEKLDTDISLIRYFVTEVSNXPLVSCFILFTLALPFLA

SEQ ID NO: 2064 - protein, 177 aa, Homo sapiens
MQTTQVIEPHDISVALNTRKLWSMHLHVQAKLLQEIVRSFSGTTCQPIQHMLRRICVQLCDLASPTALLIMRTVLDLIVEDLQSTSEDKEKQYTSQTTRLLALLDALASHKACKLAILHLINGTIKGDERYAEIFQDLLALVRSPGDSVIRQQCVEYVHPFCSLSVLSAPESLQNLL

SEQ ID NO: 2065 - protein, 231 aa, Homo sapiens
MGEHTVNESAIFHGWVLQKVSQFLQVLETDLYRGIGGHLDSLLGQCMYFGLSFSRVGADFRGQLAPVFQRVAISTFQKAIQETVEKFQEEMNSYMLISAPAILGTSNMPAAVPATQPGTLQPPMVLLDFPPLACFLNNILVAFNDLRLCCPVALAQDVTGALEDALAKVTKIILAFHRAEEAAFSSGEQELFVQFCTVFLEDLVPYLNRCLQVLFPPAQIAQTLGKRMKIL

SEQ ID NO: 2066 - protein, 226 aa, Homo sapiens
  MISC_FEATURE (223): Xaa equals any of the twenty naturally occurring L-amino acids
  MISC_FEATURE (224): Xaa equals any of the twenty naturally occurring L-amino acids
MAAGLFGLSARRLLAAAATRGLPAARVRWESSFSRTVVAPSAVAGKRPPEPTTPWQEDPEPEDENLYEKNPDSHGYDKDPVLDVWNMRLVFFFGVSIILVLGSTFVAYLPDYRCTGCPRAWDGMKEWSRREAERLVKYREPMAFPSWNPTASTPARSSCQRMSDQLLSGAQEAPPSPPPACHSDLFSEHLIKGAESLKKKKKKKKKKKKKKKKKKKKKKGRPXXKS

SEQ ID NO: 2067 - protein, 225 aa, Homo sapiens
  MISC_FEATURE (212): Xaa equals any of the twenty naturally occurring L-amino acids
  MISC_FEATURE (223): Xaa equals any of the twenty naturally occurring L-amino acids
MGNLPSSQNSARGLFGLSARRLLAAAATRGLPAARVRWESSFSRTVVAPSAVAGKRPPEPTTPWQEDPEPEDENLYEKNPDSHGYDKDPVLDVWNMRLVFFFGVSIILVLGSTFVAYLPDYRMKEWSRREAERLVKYREPMAFPSWNPTASTPARSSCQRMSDQLLSGAQEAPPSPPPACHSDLFSEHLIKGAESLKKKKKKKKKKKKKKKXKKKKKKKKKKXGG

SEQ ID NO: 2068 - protein, 106 aa, Homo sapiens
MSTNNMSDPRRPNKVLRYKPPPSECNPALDDPTPDYMNLLGMIFSMCGLMLKLKWCAWVAVYCSFISFANSRSSEDTKQMMSSFMLSISAVVMSYLQNPQPMTPPW

SEQ ID NO: 2069 - protein, 329 aa, Homo sapiens
  MISC_FEATURE (265): Xaa equals any of the twenty naturally occurring L-amino acids
  MISC_FEATURE (269): Xaa equals any of the twenty naturally occurring L-amino acids
MELHILEHRVRVLSVARPGLWLYTHPLIKLLFLPRRSRCKFFSLTETPEDYTLMVDEEGFKELPPSEFLQVAEATWLVLNVSSHSGAAVQAAGVTKIARSVIAPLAEHHVSVLMLSTYQTDFILVREQDLSVVIHTLAQEFDIYREVGGEPVPVTRDDSSNGFPRTQHGPSPTVHPIQSPQNRFCVLTLDPETLPAIATTLIDVLFYSHSTPKEAASSSPEPSSITFFAFSLIEGYISIVMDAETQKKFPSDLLLTSSSGELWRXVRIXGQPLGFDECGIVAQIAGPLAAADISAYYISTFNFDHALVPEDGIGSVIEVLQRRQEGLAS

SEQ ID NO: 2070 - protein, 123 aa, Homo sapiens
MATAAGATYFQRGSLFWFTVITLSFGYYTWVVFWPQSIPYQNLGPLGPFTQYLVDHHHTLLCNGYWLAWLIHVGESLYAIVLCKHKGITSGRAQLLWFLQTFFFGIASLTILIAYKRKRQKQT

SEQ ID NO: 2071 - protein, 122 aa, Homo sapiens
  MISC_FEATURE (83): Xaa equals any of the twenty naturally occurring L-amino acids
MKNRNLFPTVLKVGGSPKSRLQQIQCLISCPLLSRWSLVSVSSLGRRNELAPLSPYIKSLILSIRVELVWPNHLMKAPPLYFXFLVEMGSHCVAQAGVEFLGSMILLLGPRNAVVTGVSHTS

SEQ ID NO: 2072 - protein, 169 aa, Homo sapiens
  MISC_FEATURE (74): Xaa equals any of the twenty naturally occurring L-amino acids
  MISC_FEATURE (87): Xaa equals any of the twenty naturally occurring L-amino acids
MRPAGPCAPPTWPAPSTTTSTCTSRRAGCTASSASYSTLAAACSLRRSGVRWPPSSAYSTWAFASCCASSASCXVLLLLLGRRRVDXRLVNELLVYGIHVTMLLVGGWAGASWSSWTCEGRGCELDVSSRPVAVFSPWVGSASAFPSPIPQAVAAARRPRREKKGLRLL

SEQ ID NO: 2073 - protein, 165 aa, Homo sapiens
  MISC_FEATURE (163): Xaa equals any of the twenty naturally occurring L-amino acids
MDSSRARQQLRRRFLLLPDAEAQLDREGDAGPETSTAVEKKEKPLPRLNIHSGFWILASIVVTYYVDFFKTLKENFHTSSWFLCGSALLLVSLSIAFYCIVYLEWYCGIGEYDVKYPALIPITTASFIAAGICFNIALWHVWSFFTPLLLFTQFMGVVMFITXLG

SEQ ID NO: 2074 - protein, 122 aa, Homo sapiens
  MISC_FEATURE (103): Xaa equals any of the twenty naturally occurring L-amino acids
MTTFLYRILPQHVNCPGGINAWNTITSYIDNQICQGQKNLCNNTGDPEMCPENGSCVPDGPGLLQCVCADGFHGYKCMRQGSFSLLMFFGILGATTLSVSILXLGDPAPEKPRLHELHRSYH

SEQ ID NO: 2075 - protein, 210 aa, Homo sapiens
MLHVFVLGEWQPIEYGKKKLKYLPYNHQHEYFFLIGPPLLIPMYFQYQIIMTMIVHKNWVDLAWAVSYYIRFFITYIPFYGILGALLFLNFIRFLESHWFVWVTQMNHIVMEIDQEAYRDWFSSQLTATCNVEQSFFNDWFSGHLNFQIEHHLFPTMPRHNLHKIAPLVKSLCAKHGIEYQEKPLLRALLDIIRSLKKSGKLWLDAYLHK

SEQ ID NO: 2076 - protein, 176 aa, Homo sapiens
MPGSLRKMPVWLPIVILLVAMASIQGGASLAKSLFPLVGAPGVTALRLALGTLILIAFFKPWRLRFAKEQRLPLLFYGVSLGGMNYLFYLSIQTVPLGIAVALEFTGPLAVALFSSRRPVDFVWVVLAVLGLWFLLPLGQDVSHVDLTGCALALGAGACWAIYILSGQRAGAEHGP

SEQ ID NO: 2077 - protein, 114 aa, Homo sapiens
  MISC_FEATURE (11): Xaa equals any of the twenty naturally occurring L-amino acids
  MISC_FEATURE (16): Xaa equals any of the twenty naturally occurring L-amino acids
  MISC_FEATURE (43): Xaa equals any of the twenty naturally occurring L-amino acids
  MISC_FEATURE (78): Xaa equals any of the twenty naturally occurring L-amino acids
  MISC_FEATURE (105): Xaa equals any of the twenty naturally occurring L-amino acids
MTHLIEYDRHXKSRLXPLQHLYLLPADHSRNAAERFPGAWFQXPTVDSEASAFAGGLPVIFWSWAGLVGFPFVWPVSXCLNPLSFIKSKTKEKKKKKKKKFGGGXRYPIGPLGG

SEQ ID NO: 2078 - protein, 338 aa, Homo sapiens
MVMSLLSANTPEEDQRTYVFRAQSAEMKERGGNQTSGIDFFITQERIVFLDTQPILSPSILDHLINNDRKLPPEYNLPHTYVEMQSLQIAAFLFTVCHVVIVVQDWFTDLSLYRFLQTAEMVKPSTPSPSHESSSSSGSDEGTEYYPHLVFLQNKARREDFCPRKLRQMHLMIDQLMAHSHLRYKGTLSMLQCNVFPGLPPDFLDSEVNLFLVPFMDSEAESENPPRAGPGSSPLFSLLPGYRGHPSFQSLVSKLRSQVMSMARPQLSHTILTEKNWFHLRCPDLGWGEKVLCSGRVQPPAGLRPRRGMSCRGPPGSAVYCEGAQMSIPRWGGERQQA

SEQ ID NO: 2079 - protein, 104 aa, Homo sapiens
  MISC_FEATURE (81): Xaa equals any of the twenty naturally occurring L-amino acids
  MISC_FEATURE (88): Xaa equals any of the twenty naturally occurring L-amino acids
  MISC_FEATURE (92): Xaa equals any of the twenty naturally occurring L-amino acids
  MISC_FEATURE (100): Xaa equals any of the twenty naturally occurring L-amino acids
MVYEKLGEQVFGTTGKFVIFGATSLQNTGAMLSYLFIVKNELPSAIKFLMGKEETFSAWYVDGRVLVVIVTFGIILPLCLXEELRVSXAITXWDFPLELXWVFF

SEQ ID NO: 2080 - protein, 332 aa, Homo sapiens
  MISC_FEATURE (308): Xaa equals any of the twenty naturally occurring L-amino acids
  MISC_FEATURE (309): Xaa equals any of the twenty naturally occurring L-amino acids
MAAAQEADGARSAVVAAGGGSSGQVTSNGSIGRDPPAETQPQNPPAQPAPNAWQVIKGVLFRIFIIWAISSWFRRGPAPQDQAGPGGAPRVASRNLFPKDTLMNLHVYISEHEHFTDFNATSALFWEQHDLVYGDWTSGENSDGCYEHFAELDIPQSVQQNGSIYIHVYFTKSGFHPDPRQKALYRRLATVHMSRMINKYKRRRFQKTKNLLTGETEADPEMIKRAEDYGPVEVISHWHPNITINIVDDHTPWVKGSVPPPLDQYVKFDAVSGDYYPIIYFNDYWNLQKDYYPINESLASLPLRSPSXXSRFGAGSSMLPRAPSRPGNFLGD

SEQ ID NO: 2081 - protein, 204 aa, Homo sapiens
  MISC_FEATURE (186): Xaa equals any of the twenty naturally occurring L-amino acids
  MISC_FEATURE (191): Xaa equals any of the twenty naturally occurring L-amino acids
MLQSTKSPWNFLGDELYEQSDEEQDSVKVALLETNPYLLALTIIVSIVHSVFEFLAFKNDIQFWNSRQSLEGLSVRSVFFGVFQSFVVLLYILDNETNFVVQVSVFIGVLIDLWKITKVMDVRLDREHRVAGIFPRLSFKDKSTYIESSTKVYDDMAFRYLSWILFPLLGCYAVYSLLYLEHKGWXSWVLXMLYGFLLTSASSP

SEQ ID NO: 2082 - protein, 381 aa, Homo sapiens
  MISC_FEATURE (290): Xaa equals any of the twenty naturally occurring L-amino acids
MDTEEQEEFKAADVEQLKPEEIKSGTTAPLGFDEMEVEIQTVKTEEDQDPRTDKAHKETENEKPERSRESTIHTAHQFLMDTIFQPFLKDVNELRQELERQLEMWQPRESGNPEEEKVAAEMWQSYLILTAPLSQRLCEELRLILEPTQAAKLKGDYRTGKRLNIRKVIPYIASQFRKDKIWLRRTKPSKRQYQICLAIDDSSSMVDNHTKQLAFESLAVIGNALTLLEVGQIAVCSFGESVKLLHPFHEQFSDYSGSQILRLCKFQQKKTKIAQFLESVANMFAAAQQXSQNISSETAQLLLVVSDGRGLFLEGKERVLAAVQAAGMQISLSSLLYWTIPVHGILSWTLKYRYLKDLERCLKSDPTWKSSHSHTISFFEM

SEQ ID NO: 2083 - protein, 101 aa, Homo sapiens
MNLERVSNEEKLNLCRKYYLGGFAFLPFLWLVNIFWFFREAFLVPAYTEQSQIKGYVWRSAVGFLFWVIVLTSWITIFQIYRPRWGALGDYLSFTIPLGTP

SEQ ID NO: 2084 - protein, 130 aa, Homo sapiens
MASDLIRTILVVALISKLGTAVDAELMPSGAILQNKRENLPRVCHALAFLGMARCQDLFLVRLQGWKLGTRFQDGPRSTPQEEGGSPQRKRGMPVQIHFLLKSFLSSPITFAFISLARTVSLATAICKIV

SEQ ID NO: 2085 - protein, 153 aa, Homo sapiens
  MISC_FEATURE (110): Xaa equals any of the twenty naturally occurring L-amino acids
  MISC_FEATURE (129): Xaa equals any of the twenty naturally occurring L-amino acids
  MISC_FEATURE (130): Xaa equals any of the twenty naturally occurring L-amino acids
MEDAKFYLTLPGTKMEMEEKELQASKNLVTFTPSKDSTKDSFQIATLICSTKLTQNVDLLGLLNWRSNSQNIKHNLKKLMEVDGGEIVKFLQDTLDALFNIMMEMSDSEXYDFLVFDALVFIISLIGDXXFQHFNPVLETYIYKHFSATLAYV

SEQ ID NO: 2086 - protein, 122 aa, Homo sapiens
  MISC_FEATURE (23): Xaa equals any of the twenty naturally occurring L-amino acids
  MISC_FEATURE (26): Xaa equals any of the twenty naturally occurring L-amino acids
  MISC_FEATURE (34): Xaa equals any of the twenty naturally occurring L-amino acids
MAEEFMVAFRDCKDHIDMSQVEXGPXAVLHKCLXTCPSSIQECVTEGLAGPTCWLRHVTGLTACPGHCQGSMGQPSPTPPWIFLSITSFLTICSLPFLKHLMPHRSPSGDWICKGYLPPSGV

SEQ ID NO: 2087 - protein, 159 aa, Homo sapiens
  MISC_FEATURE (20): Xaa equals any of the twenty naturally occurring L-amino acids
  MISC_FEATURE (72): Xaa equals any of the twenty naturally occurring L-amino acids
MLIASVWRQRQFPPQLGPGXCFLACDAPCTSSPSSPASAFCWVKGGLFLSSLELFPVGFPRAHLLVQSTLPXPRPERAFTAPSLSPVTLGFCLGRILCQRLLLCPSCLATALSINGYSRTAGCQSWKGRDTGLHKGKLLEALGGTEGFGDRARAKIEDS

SEQ ID NO: 2088 - protein, 147 aa, Homo sapiens
MVAMVEVQLDADHDYPPGLLIAFSACTTVLVAVHLFALMISTCILPNIEAVSNVHNLNSVKESPHERMHRHIELAWAFSTVIGTLLFLAEVVLLCWVKFLPLKKQPGQPRPTSKPPASGAQPTSAPAASPRARQLPSPRPPSWCPSA

SEQ ID NO: 2089 - protein, 228 aa, Homo sapiens
  MISC_FEATURE (209): Xaa equals any of the twenty naturally occurring L-amino acids
  MISC_FEATURE (210): Xaa equals any of the twenty naturally occurring L-amino acids
  MISC_FEATURE (224): Xaa equals any of the twenty naturally occurring L-amino acids
MCAQYCISFADVEKAHINIRDSIHLTPVLTSSILNQLTGRNLFFKCELFQKTGSFKIRGALNAVRSLVPDALERKPKAVVTHSSGNHGQALTYAAKLEGIPAYIVVPQTAPDCKKLAIQAYGASIVYCEPSDESRENVAKRVTEETEGIMVHPNQEPAVIAGQGTIALEVLNQVPLVDALVVPVGGGGMLAGIAITVKALKPSVKVYAXXPQMQMTVPVQAEGXLMPI

SEQ ID NO: 2090 - protein, 422 aa, Homo sapiens
  MISC_FEATURE (377): Xaa equals any of the twenty naturally occurring L-amino acids
MKLLGECSSSIDSVKRLEHKLKEEEESLPGFVNLHSTETQTAGVIDRWELLQAQALSKELRMKQNLQKWQQFNSDLNSIWAWLGDTEEELEQLQRLELSTDIQTIELQIKKLKELQKAVDHRKAIILSINLCSPEFTQADSKESRDLQDRLSQMNGRWDRVCSLLEEWRGLLQDALMQCQGFHEMSHGLLLMLENIDRRKNEIVPIDSNLDAEILQDHHKQLMQIKHELLESQLRVASLQDMSCQLLVNAEGTDCLEAKEKVHVIGNRLKLLLKEVSRHIKELEKLLDVSSSQQDLSSWSSADELDTSGSVSPTSGRSTPNRQKTPRGKCSLSQPGPSVSSPHSRSTKGGSDSSLSEPGPGRSGRGFLFRVLRAALXLQLLLLLLIGLACLVPMSEEDYSCALSTTFAGIPPMLRYTNGLSL

SEQ ID NO: 2091 - protein, 116 aa, Homo sapiens
  MISC_FEATURE (110): Xaa equals any of the twenty naturally occurring L-amino acids
MDQGRRRADGTWAQQGLVLRALGGHGWEGHGRGWHPCRARGATQGSDIPDMLGSPHPCCETGVPWGHEVSTPQSCSAALPLADFFVAHIHFLSISIYFSFYLSFLTVHVXYMIITI

SEQ ID NO: 2092 - protein, 151 aa, Homo sapiens
MQASLWEPPRSGLPLWAEGLTFFYCYMLLLVLPCVALSEVSMQGEHIAPQKMMLYPVLSLATVNVVAVLARAANMALFRDSRVSAIFVGKNVVALATKACTFLEYRRQVRDFPPLALSLELQPPPPQRNSVPLAAAAARPAWAPPHVLAHA

SEQ ID NO: 2093 - protein, 326 aa, Homo sapiens
  MISC_FEATURE (76): Xaa equals any of the twenty naturally occurring L-amino acids
  MISC_FEATURE (87): Xaa equals any of the twenty naturally occurring L-amino acids
  MISC_FEATURE (249): Xaa equals any of the twenty naturally occurring L-amino acids
  MISC_FEATURE (253): Xaa equals any of the twenty naturally occurring L-amino acids
  MISC_FEATURE (258): Xaa equals any of the twenty naturally occurring L-amino acids
  MISC_FEATURE (261): Xaa equals any of the twenty naturally occurring L-amino acids
  MISC_FEATURE (316): Xaa equals any of the twenty naturally occurring L-amino acids
MVVVGILLAYLAGWVLEWRWLAVLGCVPPSLMLLLMCFMPETPRFLLTQHRRQEAMAALRFLWGSEQGWEDPPIGXEQSFHLALLRXPGIYKPFIIGVSLMAFQQLSGVNAVMFYAETIFEEAKFKDSSLASVVVGVIQVLFTAVAALIMDRAGRRLLLVLSGVVMVFSTSAFGAYFKLTQGGPGNSSHVAISAPVSAQPVDASVGLAWLAVGSMCLFIAGFAVGWGPIPWLLMSEIFPLHVKGVATGXCVLXNWLMXFLXTKEFSSLMEVLRPYGAFWLASAFCIFSVLFTLVCALKLKERLWNKSQPILRGDDXHSLRGMEQAL

SEQ ID NO: 2094 - protein, 211 aa, Homo sapiens
  MISC_FEATURE (89): Xaa equals any of the twenty naturally occurring L-amino acids
  MISC_FEATURE (210): Xaa equals any of the twenty naturally occurring L-amino acids
MALLIPTGLHQVLTPSPGSRLVNSPTRRVRFSTVTLTASMPVTTAGMFMSGFFPIMMFGLPGAALAMYFAAPKERRPMVGGMLLSVAVXAFLTGVTEPLEFLFMFLAPLLYLLHALLTGISLFVATLLGIHAGFSFSAGAIDYALMYNLPAASQNVWMLLVMGVIFFAIYFVVFSLVIRMFNLKTPGREDKEDEIVTEEANSNTEEGLTXL

SEQ ID NO: 2095 - protein, 193 aa, Homo sapiens
MQQSVEYERKKFQEILERQPNSLDFVTQWLEEASEDLMTQKYKHALPVGGMAAGSGDMPRLSPVAVQNYAYLKLLKWDHLQRPFPETVLMDQSRFHELQLQLEQLTILGAVLLVTFSMAAPGISSQADFAEKLKMIVKILLTDMHLPSFHLKDVLTTIGEKVCLEVSSCLSLCGSSPFTTDKETVLKGQIHAE

SEQ ID NO: 2096 - protein, 209 aa, Homo sapiens
  MISC_FEATURE (3): Xaa equals any of the twenty naturally occurring L-amino acids
  MISC_FEATURE (39): Xaa equals any of the twenty naturally occurring L-amino acids
MAXSSRGNADSIVASLVLMVLYLIKKRLVACAAVFYGFXVHMKIYPVTYILPITLHLLPDRDNDKSLRQFRYTFQACLYELLKKLCNRAVLLFVAVAGLTFFALSFGFYYEYGWEFLEHTYFYHLTRRDIRHNFSPYFYMLYLTAESKWSFSLGIAAFLPQLILLSAVSFAYYRDLVFCCFLHTSIFVTFNKVCTSQYFLWVPLAYCLL

SEQ ID NO: 2097 - protein, 139 aa, Homo sapiens
MRPPSAFSSYCHKCLLARVGWYGLELHSTVRRVLQDDRLRTRREGIPCTMLASQWTFPETKSIISKLMAVLVFGSLAPVTLGADEDRCLLLVWESICHPKICLNSIRIILRNCSYRRNSENRVYQFLREIDIYKGNLHL

SEQ ID NO: 2098 - protein, 115 aa, Homo sapiens
MAGTVLGVGAGVFILALLWVAVLLLCVLLSRASGAARFSVIFLFFGAVIITSVLLLFPRAGEFPAPEVEVKIVDDFFIGRYVLLAFLSAIFLGGLFLVLIHYVLEPIYAKPLHSY

SEQ ID NO: 2099 - protein, 297 aa, Homo sapiens
  MISC_FEATURE (96): Xaa equals any of the twenty naturally occurring L-amino acids
MLVALVVNLILHCPKFWPFAMLGGCIWATGNIAVVPIIKTIGLGLGILIWGSFNALTGWASSRFGWFGLDAEEVSNPLLNYIGAGLSVRKCFHILXIKSEIPNNTCSMDTTPLITEHVINTTQDPCSWVDKLSTVHHRIVGCSLAVISGVLYGSTFVPIIYIKDHSKRNDSIYAGASQYDLDYVFAHFSGIFLTSTVYFLAYCIAMKNSPKLYPEAVLPGFLSGVLWAIATCCWFIANHSLSAVVSFPIITAGPGFIAAMWGIFMFKEIKGLQNYLLMILAFCIILTGALCTAFSKI

SEQ ID NO: 2100 - protein, 161 aa, Homo sapiens
  MISC_FEATURE (21): Xaa equals any of the twenty naturally occurring L-amino acids
  MISC_FEATURE (150): Xaa equals any of the twenty naturally occurring L-amino acids
MGFASYLLHPSLLPSSSSSSXSSVCLLSPLRQVGPPCQPSPAPICSSLSGWRRVKETEKRAPSLPPPPFPPDPIQVLSQKCRYVIMHFTDEGRGRSAQNPPHPPVQTSGSPPQASSAHWATASQQVTEANEGTVSLPLLSSFLDLFFAFXFISLTRRAKLF

SEQ ID NO: 2101 - protein, 168 aa, Homo sapiens
  MISC_FEATURE (144): Xaa equals any of the twenty naturally occurring L-amino acids
  MISC_FEATURE (165): Xaa equals any of the twenty naturally occurring L-amino acids
  MISC_FEATURE (167): Xaa equals any of the twenty naturally occurring L-amino acids
MAESEGDGETRPIPSAASFPPRPYSGFKSKMSICHYALPQPEVFFSFLLFYYFFLFLKSSDRGFLDSSWALLPTSFTLHSCPPLPPPPPPPSVSFHLCARSVLPAKLPPSGRIRGLQPQASKRPTGATAKPNKVTRKPKRRGDXFPLSNFLILFFLESFFLHFPXIXF

SEQ ID NO: 2102 - protein, 604 aa, Homo sapiens
  MISC_FEATURE (10): Xaa equals any of the twenty naturally occurring L-amino acids
  MISC_FEATURE (226): Xaa equals any of the twenty naturally occurring L-amino acids
  MISC_FEATURE (397): Xaa equals any of the twenty naturally occurring L-amino acids
MPVLPVPLCXFRFLPALHHVRLRRRVFNARLRRWHRLRIQAGQGPEYLRYSLCILYLFDVQRVINQILLLFLVNGHIPYRRRGGGRAACITQRSPKRNHFTEMMLAAVPCALVERLFLAPDKILDVSKLLQHFLHRFMRERVELLDTHNGDIVLIVLTTLFQQVVINLTRTHHYALSRPSDQARRFHRWLAGRCRSPVLRGWKPPADDAAGISATSRPADDASRAXLTTQHVVNLCRGRRYANLHVLLSTKLQITFQTRGGVLRPLPFVTVRQQHHQTTHPAPFLFARGDELVDNHLRTVGEVTELRFPDGQSAWFCGGITIFKRQHCFFRQYGVPDTERALPVMDMLQRRVSGTVRLVVDHRVAVEEGTATGVFTRQANRNAFINQRGVSEVFRTXPVEQFLTGSHRLAIAINLGNARLHFNCFRHRADAFRQLLQALHLNFVRVLFVPFVVEVRRPGERVHVHRTPLCHYAIASIQRIAVQVNHLGGIFQRRHFFLLQLVSVDFARCRMFFDFLIHQRLGCARLVGFVVAVTAVAHQVDEDITFKGVTEIERQTGHKGNGFRIVRVNVENRGLNHLTDISTVRRRTGIQRIRGGETNLVVDN

SEQ ID NO: 2103 - protein, 241 aa, Homo sapiens
  MISC_FEATURE (11): Xaa equals any of the twenty naturally occurring L-amino acids
  MISC_FEATURE (203): Xaa equals any of the twenty naturally occurring L-amino acids
  MISC_FEATURE (219): Xaa equals any of the twenty naturally occurring L-amino acids
  MISC_FEATURE (235): Xaa equals any of the twenty naturally occurring L-amino acids
MLLMEFVEGTXHDVDLVLFGGRLLAAFVSDNGPTRLPGFTETAACMPTGLAPEQEAQMVQAAFRCCLGCGLLDGVFNVELKLTGAGPRLIEINPRMGGFYLRDWILELYGVDLLLAAVMVACGLRPALPTRPRARGHLVGVMCLVSQHLQALSSTASRETLQALHDRGLLRLNLLEEALVPGEYEEPYCSVACAGPSPTEARXRLLGLCQGLGIDGPSXPVAHFLSNSNNTGVRXGEAVWV

SEQ ID NO: 2104 - protein, 111 aa, Homo sapiens
  MISC_FEATURE (70): Xaa equals any of the twenty naturally occurring L-amino acids
  MISC_FEATURE (107): Xaa equals any of the twenty naturally occurring L-amino acids
MSTGLVPVEAPGQNLLLVSFTSRGCQHSLASGCVTMISVSMITLPSPLMYLNLLQFPSFFLDGVSLLLPXLGVAMARSRAHWTFCLPGSSDSSASASYMGWGLRTLXHHPQ

SEQ ID NO: 2105 - protein, 174 aa, Homo sapiens
  MISC_FEATURE (150): Xaa equals any of the twenty naturally occurring L-amino acids
  MISC_FEATURE (157): Xaa equals any of the twenty naturally occurring L-amino acids
  MISC_FEATURE (173): Xaa equals any of the twenty naturally occurring L-amino acids
MAEAEESPGDPGTASPRPLFAGLSDISISQDIPVEGEITIPMRSRIREFDSSTLNESVRNTIMRDLKAVGKKFMHVLYPRKSNTLLRDWDLWGPLILCVTLALMLQRDSADSEKDGGPQFAEVFVIVWFGAVTITLNSKLLGGNISFFQXLCVLGYXILPLTVAMLICRLVLXG

SEQ ID NO: 2106 - protein, 107 aa, Homo sapiens [sequence omitted]

SEQ ID NO: 2107 - protein, 260 aa, Homo sapiens
  MISC_FEATURE (74): Xaa equals any of the twenty naturally occurring L-amino acids
MPPTLGTNVLGRKVLYLPSFFTYAKYIVQVDGKIGLFRGLSPRLMSNALSTVTRGSMKKVFPPDEIEQVSNKDXMKTSLKKVVKETSYEMMMQCVSRMLAHPLHVISMRCMVQFVGREAKYSGVLSSIGKIFKEEGLLGFFVGLIPHLLGDVVFLWGCNLLAHFINAYLVDDSFSQALAIRSYTKFVMGIAVSMLTYPFLLVGDLMAVNNCGLQAGLPPYSPVFKSWIHCWKYLSVQGQLFRGSSLLFRRVSSGSCFALE

SEQ ID NO: 2108 - protein, 111 aa, Homo sapiens
  MISC_FEATURE (20): Xaa equals any of the twenty naturally occurring L-amino acids
  MISC_FEATURE (33): Xaa equals any of the twenty naturally occurring L-amino acids
  MISC_FEATURE (38): Xaa equals any of the twenty naturally occurring L-amino acids
  MISC_FEATURE (55): Xaa equals any of the twenty naturally occurring L-amino acids
MAGTGSMLPCSGLCPSAPTXPGFGLVTRYPVRXWLLGXLLSGLSVAIMQLPQGLXYALLAGLPPVFGLYSSFYPVFIYFLFGTSRQPCFGHQTLNMLHPAQDCTSGGAGHP

SEQ ID NO: 2109 - protein, 152 aa, Homo sapiens
  MISC_FEATURE (7): Xaa equals any of the twenty naturally occurring L-amino acids
  MISC_FEATURE (8): Xaa equals any of the twenty naturally occurring L-amino acids
  MISC_FEATURE (13): Xaa equals any of the twenty naturally occurring L-amino acids
  MISC_FEATURE (14): Xaa equals any of the twenty naturally occurring L-amino acids
  MISC_FEATURE (15): Xaa equals any of the twenty naturally occurring L-amino acids
  MISC_FEATURE (34): Xaa equals any of the twenty naturally occurring L-amino acids
  MISC_FEATURE (37): Xaa equals any of the twenty naturally occurring L-amino acids
  MISC_FEATURE (40): Xaa equals any of the twenty naturally occurring L-amino acids
  MISC_FEATURE (48): Xaa equals any of the twenty naturally occurring L-amino acids
  MISC_FEATURE (56): Xaa equals any of the twenty naturally occurring L-amino acids
  MISC_FEATURE (95): Xaa equals any of the twenty naturally occurring L-amino acids
YFALLDXXPQQQXXXRAQAPQRLVLARSYSLDSXQGXAGXETQQEPYXGEKRLRGXGSRDPAELCSCWRPGGPFPNPVKGGSSPAVGSKTSYLQXQQPERFNRQPGMAHEPQATATAQASCSQLACRLGQKSALGWGQGSVKEKALDPAGGR

SEQ ID NO: 2110 - protein, 114 aa, Homo sapiens [sequence omitted]

SEQ ID NO: 2111 - protein, 247 aa, Homo sapiens
MLKPLQQPGLTWLQSPYWAERSRVAPAEPQEAPDSTAAGGSASKRMALVLERVCSTLLGLEEHLNALDRAAGDGDCGTTHSRAARAIQEWLKEGPPPASPAQLLSKLSVLLLEKMGGSSGALYGLFLTAAAQPLKAKTSLPAWSAAMDAGLEAMQKYGKAAPGDRTMLDSLWAAGQELQAWKSPGADLLQVLTKAVKSAEAAAEATKNMEAGAGRASYISSARLEQPDPGAVAAAAILRAILEVLQS

SEQ ID NO: 2112 - protein, 277 aa, Homo sapiens
  MISC_FEATURE (60): Xaa equals any of the twenty naturally occurring L-amino acids
  MISC_FEATURE (94): Xaa equals any of the twenty naturally occurring L-amino acids
MKIWQASNGELRRVLEGHVFDVNCCRFFPSGLVVLSGGMDAQLKIWSAEDASCVVTFKGXKGGILDTAIVDRGRNVVSASRDGTARLWDCGRSXCLGVLADCGSSINGVAVGAADNSINLGSPEQMPSEREVGTEAKMLLLAREDKKLQCLGLQSRQLVFLFIGSDAFNCCTFLSGFLLLAGTQDGNIYQLDVRSPRAPVQVIHRSGAPVLSLLSVRDGFIASQGDGSCFIVQQDLDYVTELTGADCDPVYKVATWEKQIYTCCRDGLVRRYQLSDL

SEQ ID NO: 2113 - protein, 139 aa, Homo sapiens
MEAVVFVFSLLDCCALIFLSVYFIITLSDLECDYINARSCCSKLNKWVIPELIGHTIVTVLLLMSLHWFIFLLNLPVATWNIYRYIMVPSGNMGVFDPTEIHNRGQLKSHMKEAMIKLGFHLLCFFMYLYSMILALIND

SEQ ID NO: 2114 - protein, 346 aa, Homo sapiens [sequence omitted]

SEQ ID NO: 2115 - protein, 193 aa, Homo sapiens
  MISC_FEATURE (42): Xaa equals any of the twenty naturally occurring L-amino acids
MGIFSHSQFFDLMLYSHGQIEIDDQVEGLQYLASRYDFIDLXRVGIHGWSYGGYLSLMALMQRSDIFRVAIAGAPVTLWIFYDTGYTERYMGHPDQNEQGYYLGSVAMQAEKFPSEPNRLLLLHGFLDENVHFAHTSILLSFLVRAGKPYDLQIYPQERHSIRVPESGEHYELHLLHYLQENLGSRIAALKVI

SEQ ID NO: 2116 - protein, 286 aa, Homo sapiens
  MISC_FEATURE (25): Xaa equals any of the twenty naturally occurring L-amino acids
  MISC_FEATURE (266): Xaa equals any of the twenty naturally occurring L-amino acids
MAMEGYWRFLALLGSALLVGFLSVXFALVWVLHYREGLGWDGSALEFNWHPVLMVTGFVFIQGIAIIVYRLPWTWKCSKLLMKSIHAGLNAVAAILAIISVVAVFENHNVNNIANMYSLHSWVGLIAVICYLLQLLSGFSVFLLPWAPLSLRAFLMPIHVYSGIVIFGTVIATALMGLTEKLIFSLRDPAYSTFPPEGVFVNTLGLLILVFGALIFWIVTRPQWKRPKEPNSTILHPNGGTEQGARGSMPAYSGNNMDKSDSELNXEVAARKRNLALDEAGQRSTM

SEQ ID NO: 2117 - protein, 103 aa, Homo sapiens
  MISC_FEATURE (20): Xaa equals any of the twenty naturally occurring L-amino acids
MSPAQVYVEGMGSLQVGGGXASGLVVAFNLLHWCFSDEREIHIPLCLNFLIYTGFKVKTLFQELTESLGSFRTSATLFIKILGSLPCAYSVVGLLASRSQKRR

SEQ ID NO: 2118 - protein, 104 aa, Homo sapiens
  MISC_FEATURE (45): Xaa equals any of the twenty naturally occurring L-amino acids
  MISC_FEATURE (56): Xaa equals any of the twenty naturally occurring L-amino acids
  MISC_FEATURE (61): Xaa equals any of the twenty naturally occurring L-amino acids
  MISC_FEATURE (63): Xaa equals any of the twenty naturally occurring L-amino acids
  MISC_FEATURE (68): Xaa equals any of the twenty naturally occurring L-amino acids
  MISC_FEATURE (70): Xaa equals any of the twenty naturally occurring L-amino acids
  MISC_FEATURE (72): Xaa equals any of the twenty naturally occurring L-amino acids
  MISC_FEATURE (95): Xaa equals any of the twenty naturally occurring L-amino acids
MGPWGEPELLVWRPEAVASEPPVPVGLEVKLGALVLLLVLTLLCXLVPICVLRRPXANHEXSXSRQKXLXLXSCFAGGVFLATCLLDLLPDYLAXIDEALAALT

SEQ ID NO: 2119 - protein, 336 aa, Homo sapiens
  MISC_FEATURE (186): Xaa equals any of the twenty naturally occurring L-amino acids
MVSQCLFLFYWPFCLPTSLGIVNIGVNNVQELIIAADMLQLTEVVHLCCEFLKGQIDPLNCIGIFQFSEQIACHDLLEFSENYIHVHFLEVHSGEEFLALTKDQLIKILRSEELSIEDEYQVFLAAMQWILKDLGKRRKHVVEVLDPIRFPLLPPQRLLKYIEGVSDFNLRVALQTLLKEYCEVCXSPKENKFCSFLQTSKVRPRKKARKYLYAVGGYTRLQGGRWSDSRALSCVERFDTFSQYWTTVSSLHQARSGLGVTVLGGMVYAIGGEKDSMIFDCTECYDPVTKQWTTVASMNHPRCGLGVCVCYGAIYALGGWVGAEIGNTLNDLILMK

SEQ ID NO: 2120 - protein, 239 aa, Homo sapiens
MGSRPRIHPLVPQVPGPVTAAMATGLAVNGKGTSPFMDALTANGTTNIQTSVTGVTASKRKFIDDRRDQPFDKRLRFSVRQTESAYRYRDIVVRKQDGFTHILLSTKSSENNSLNPEVMREVQSALSTAAADDSKLVLLSAVGSVFCCGLDFIYFIRRLTDDRKRESTKMAEAIRNFVNTFIQFKKPIIVAVNGPAIGLGASILPLCDVVWANEKAWFQTPYTTFGQSQMAVLPLCFPR

SEQ ID NO: 2121 - protein, 108 aa, Homo sapiens
MIDKNQTCGVGQDSVPYMICLIHILEEWFGVEQLEDYLNFANYLLWVFTPLILLILPYFTIFLLYLTIIFLHIYKRKNVLKEATLIIYGMVQGKQWQLCGMDMQPFGW

SEQ ID NO: 2122 - protein, 151 aa, Homo sapiens
  MISC_FEATURE (151): Xaa equals any of the twenty naturally occurring L-amino acids
MASMQKRLQKELLALQNDPPPGMTLNEKSVQNSITQWIVDMEGAPGTLYEGEKFQLLFKFSSRYPFDSPQVMFTGENIPVHPHVYSNGHICLSILTEDWSPALSVQSVCLSIISMLSSCKEKRRPPDNSFYVRTCNKNPKKTKWWYHDDTX

SEQ ID NO: 2123 - protein, 172 aa, Homo sapiens
  MISC_FEATURE (134): Xaa equals any of the twenty naturally occurring L-amino acids
  MISC_FEATURE (157): Xaa equals any of the twenty naturally occurring L-amino acids
MLVHLFRVGIRGGPFPGRLLPPLRFQTFSAVRYSDGYRSSSLLRAVAHLRSQLWAHLPRAPLAPRWSPSAWCWVGGALLGPMVLSKHPHLCLVALCEAEEAPPASSTTHVVGSRFNWKLFWQFLHPQLLVLGVXVVLALGAALVNVQIPLSWANLVXVVGQVHKGPRKGVHD

SEQ ID NO: 2124 - protein, 161 aa, Homo sapiens
  MISC_FEATURE (52): Xaa equals any of the twenty naturally occurring L-amino acids
  MISC_FEATURE (75): Xaa equals any of the twenty naturally occurring L-amino acids
  MISC_FEATURE (131): Xaa equals any of the twenty naturally occurring L-amino acids
  MISC_FEATURE (142): Xaa equals any of the twenty naturally occurring L-amino acids
  MISC_FEATURE (149): Xaa equals any of the twenty naturally occurring L-amino acids
MPLSPYRYSDGYRSSSLLRAVAHLRSQLWAHLPRAPLAPRWSPSAWCWVGGXLLGPMVLSKHPHLCLVALCEAEXAPPASSTPHVVGSRFNWKLFWQFLHPHLLVLGVAVVLALGAALVECYRSPWFLGPXGKSSGPITQGXTKGFSWXDSQNFSNHWFIP

SEQ ID NO: 2125 - protein, 114 aa, Homo sapiens
MRERGLGPLGVFRSDAGLKSLPEGRRESGALEECVIHTQRVCDWKVPEHPLAPLLLLSFAVLRILAKPLPTHESCSFSSPGLPSLTNISLSADSSFLPSNASPCYLQPGNFSNE

SEQ ID NO: 2126 - protein, 425 aa, Homo sapiens
  MISC_FEATURE (261): Xaa equals any of the twenty naturally occurring L-amino acids
MLKHQCSCGDNSRHPEHAGRIQSIWSRLQERGLRSQCECLRGRKASLEELQSVHSERHVLLYGTNPLSRLKLDNGKLAGLLAQRMFVMLPCGGVGVDTDTIWNELHSSNAARWAAGSVTDLAFKVASRELKNGFAVVRPPGHHADHSTAMGFCFFNSVAIACRQLQQQSKASKILIVDWDVHHGNGTQQTFYQDPSVLYISLHRHDDGNFFPGSGAVDEVGAGSGEGFNVNVAWAGGLDPPMGDPEYLAAFRIVVMPIARXFSPDLVLVSAGFDAAEGHPAPLGGYHVSAKCFGYMTQQLMNLAGGAVVLALEGGHDLTAICDASEACVAALLGNRVDPLSEEGWKQKPNLNAIRSLEAVIRVHSKYWGCMQRLASCPDSWVPRVPGADKEEVEAVTALASLSVGILAEDRPSEQLVEEEEPMNL

SEQ ID NO: 2127 - protein, 258 aa, Homo sapiens
  MISC_FEATURE (180): Xaa equals any of the twenty naturally occurring L-amino acids
MPRPRRVSQLLDLCLWCFMKNISRYLTDIKPLPPNIKDRLIKIMSMQGQITDSNISEILHPEVQTLDLRSCDISDAALLHLSNCRKLKKLNLNASKGNRVSVTSEGIKAVASSCSYLHEASLKRCCNLTDEGVVALALNCQLLKIIDLGGCLSITDVSLHALGKNCPFLQCVDFSATQVXDSGVIALVSGPCAKKLEEIHMGHCVNLTDGAVEAVLTYCPQIRILLFHGCPLITDHSREVLEQLVGPNKLKQVTWTVY

SEQ ID NO: 2128 - protein, 329 aa, Homo sapiens
MDGPVAEHAKQEPFHVVTPLLESWALSQVAGMPVFLKCENVQPSGSFKIRGIGHFCQEMAKKGCRHLVCSSGGNAGIAAAYAARKLGIPATIVLPESTSLQVVQRLQGEGAEVQLTGKVWDEANLRAQELAKRDGWENVPPFDHPLIWKGHASLVQELKAVLRTPPGALVLAVGGGGLLAGVVAGLLEVGWQHVPIIAMETHGAHCFNAAITAGKLVTLPDITSVAKSLGAKTVAARALECMQVCKIHSEVVEDTEAVSAVQQLLDDERMLVEPACGAALAAIYSGLLRRLQAEGCLPPSLTSVVVIVCGGNNINSRELQALKTHLGQV

SEQ ID NO: 2129 - protein, 110 aa, Homo sapiens
MAAPRRGRGSSTVLSSVPLQMLFYLSGTYYALYFLATLLMITYKSQVFSYPHRYLVLDLALLFLMGILEAVRLYLGTRGNLTEAERPLAASLALTAGTASSLPTSCFGRP

SEQ ID NO: 2130 - protein, 169 aa, Homo sapiens
  MISC_FEATURE (2): Xaa equals any of the twenty naturally occurring L-amino acids
  MISC_FEATURE (164): Xaa equals any of the twenty naturally occurring L-amino acids
MXLGIIILKKRYSIFKYTSIALVSVGIFICTFMSAKQVTSQSSLSENDGFQAFVWWLLGIGALTFALLMSARMGIFQETLYKRFGKHSKEALFYNHALPLPGFVFLASDIYDHAVLFNKSELYEIPVIGVTLPIMWFYLLMNIITQYVCIRGVFILTTGMRLPXRHARS

SEQ ID NO: 2131 - protein, 118 aa, Homo sapiens
  MISC_FEATURE (67): Xaa equals any of the twenty naturally occurring L-amino acids
  MISC_FEATURE (68): Xaa equals any of the twenty naturally occurring L-amino acids
  MISC_FEATURE (77): Xaa equals any of the twenty naturally occurring L-amino acids
  MISC_FEATURE (107): Xaa equals any of the twenty naturally occurring L-amino acids
MASLPQLMAAPTSSCTSLSESAAGLGGLAGVGASLALWRWGWCVTLMGAVCEDEWLGLCDSACGWCXXCAPVCVLGXGCETLRSCVGGCEAGGDTVLVIVPGCVFVXWVCKVLCVLGL

SEQ ID NO: 2132 - protein, 225 aa, Homo sapiens
  MISC_FEATURE (33): Xaa equals any of the twenty naturally occurring L-amino acids
MAEGETESPGPKKCGPYISSVTSQSVNLMIRGXVLFFIGVFLALVLNLLQIQRNVTLFPPDVIASIFSSAWWVPPCCGTASAVIGLLYPCIDRHLGEPHKFKREWSSVMRCVAVFVGINHASAKVDFDNNIQLSLTLAALSIGLWWTFDRSRSGFGLGVGIAFLATVVTQLLVYNGVYQYTSPDFLYVRSWLPCIFFAGGITMGNIGRQLAMYECKVIAEKSHQE

SEQ ID NO: 2133 - protein, 100 aa, Homo sapiens
  MISC_FEATURE (82): Xaa equals any of the twenty naturally occurring L-amino acids
  MISC_FEATURE (84): Xaa equals any of the twenty naturally occurring L-amino acids
MGCPIGKAQLKNRMEGSGRRQLTGEPTFLTQVPKESDANTPSALSIAFIYSLLRVLSPFGEGSSPGTVGSACSPLGYILGLXSXHYSWRVQSFTSICKCP

SEQ ID NO: 2134 - protein, 314 aa, Homo sapiens
  MISC_FEATURE (195): Xaa equals any of the twenty naturally occurring L-amino acids
  MISC_FEATURE (262): Xaa equals any of the twenty naturally occurring L-amino acids
MNLEGSIQDLFELFSSNENQPLTTKVCVVPSQPVVELVLMKVLGACKLLLRLLDCCCKTFLLTVKHLGLQEFIILNLVMVGLVSRLWVLYKGVLKRLILLYEPLFGLLQEVARIQPMPYFKDFTFPSDITEFLGQPYFEAFKKKMPIAFAAKGINKLLNKLFLINEQSPRASEETLLGISKKAKQMKINVQNNVXLGQPVKNKRVFKEESSEFDVRAFCNQLKHKATQETSFDFKCSQSRLKTTKYSSQKVIGTPHAKSIVXRFREAESFTQLSEEIQMAVVWCRSKKLKAQAIFLGNKLLKSNRLKHLGSSRY

SEQ ID NO: 2135 - protein, 113 aa, Homo sapiens
  MISC_FEATURE (109): Xaa equals any of the twenty naturally occurring L-amino acids
MFGAMSLYGYTTKRDLSGFGNMLFMALIGIVLASLVNFWLKSEALMWAVTYIGVIVFVGLTAYDTQKLKNMGEQIDTRDTSNLRKYSILGALTLYLDFINLFLMLLRIXGNRR

SEQ ID NO: 2136 - protein, 114 aa, Homo sapiens
MLPLLARLCLVPLETIVIINKFAMIFTGLEVLYFLGSNLLVPYNLAKSAYRELVQVVEVYGLLALGMSLWNQLVVPVLFMVFWLVLFALQIYSYFSTRDQPASRERLLFLFLTR

SEQ ID NO: 2137 - protein, 120 aa, Homo sapiens
  MISC_FEATURE (99): Xaa equals any of the twenty naturally occurring L-amino acids
  MISC_FEATURE (115): Xaa equals any of the twenty naturally occurring L-amino acids
  MISC_FEATURE (120): Xaa equals any of the twenty naturally occurring L-amino acids
MLALPRSLTPPGCTWVGMVASMPLCLLKDLLLLLSFHPSLADDPEPSDDGILLAREKDLTRLLNLNSFRLYFNFFFFVQVLILIHFNMLLSKKKKKKGXRSRGSLEGPKLTRACXVIALX

SEQ ID NO: 2138 - protein, 206 aa, Homo sapiens
  MISC_FEATURE (84): Xaa equals any of the twenty naturally occurring L-amino acids
  MISC_FEATURE (155): Xaa equals any of the twenty naturally occurring L-amino acids
  MISC_FEATURE (181): Xaa equals any of the twenty naturally occurring L-amino acids
  MISC_FEATURE (183): Xaa equals any of the twenty naturally occurring L-amino acids
  MISC_FEATURE (184): Xaa equals any of the twenty naturally occurring L-amino acids
  MISC_FEATURE (189): Xaa equals any of the twenty naturally occurring L-amino acids
  MISC_FEATURE (197): Xaa equals any of the twenty naturally occurring L-amino acids
  MISC_FEATURE (198): Xaa equals any of the twenty naturally occurring L-amino acids
  MISC_FEATURE (201): Xaa equals any of the twenty naturally occurring L-amino acids
  MISC_FEATURE (206): Xaa equals any of the twenty naturally occurring L-amino acids
MPDPHNLPIVAGWKKYPLFFGTAVFAFEGIGVVLPLENQMKESKRFPQALNIGMGIVTTLYVTLATLGYMCFHDEIKGSITLNXPQDVWLYQSVKILYSFGIFVTYSIQFYVPAEIIIPGITSKFHTKWKQICEFGIRSFLVSILVPEQFLFPFXHCDFFVGAVSSSTLALILPPLVEILXFXXGTLYXGGPEKIFXXFLXFVWAX

SEQ ID NO: 2139 - protein, 116 aa, Homo sapiens
  MISC_FEATURE (107): Xaa equals any of the twenty naturally occurring L-amino acids
  MISC_FEATURE (108): Xaa equals any of the twenty naturally occurring L-amino acids
  MISC_FEATURE (110): Xaa equals any of the twenty naturally occurring L-amino acids
MAVSLVIIYQYVVRNMPDPHNLPIVAGWKKYPLFFGTAVFAFEGIGVVLPLENQMKESKRFPQALNIGMGIVTTLYVTLATLGYMCFHDEIKGSITLNLPQDVWLYXXVXISLYIL

SEQ ID NO: 2140 - protein, 200 aa, Homo sapiens
  MISC_FEATURE (9): Xaa equals any of the twenty naturally occurring L-amino acids
  MISC_FEATURE (161): Xaa equals any of the twenty naturally occurring L-amino acids
  MISC_FEATURE (184): Xaa equals any of the twenty naturally occurring L-amino acids
  MISC_FEATURE (192): Xaa equals any of the twenty naturally occurring L-amino acids
ASRKTVLKXLHSVIIQLFKPWILVLEDNESSQQRHYPWLESDTVVASSIVQLFTDCIDSLHESFKDKLLPGDAGALWLHLMHYCEACTAPKMPEFILYAFHSTYRKLPWKDLHPDQMLMEAFFKVERGSPKSCFLFLGSVLCEVNWVSVLSDAWNSSPHPXTRSMIVCLLFMMILLAKEVQLVXQTDSPLLXLLGQTSSL

SEQ ID NO: 2141 - protein, 147 aa, Homo sapiens
MSQILPLSGTLLYYRRFPGLMLLSFKLQITSCTVSRNEKDQQSLLFFPANILSFQLAMQGNTVIFIVFTVVAFLWITSQAASNLLVFVAVIPESKVSSSSESLGSCSENSIFLFVFLQQCKVPFPFLGYTASFFFFFLFLVNRVRPC

SEQ ID NO: 2142 - protein, 274 aa, Homo sapiens
MGKSLSHLPLHSSKEDAYDGVTSENMRNGLVNSEVHNEDGRNGDVSQFPYVEFTGRDSVTCPTCQGTGRIPRGQENQLVALIPYSDQRLRPRRTKLYVMASVFVCLLLSGLAVFFLFPRSIDVKYIGVKSAYVSYDVQKRTIYLNITNTLNITNNNYYSVEVENITAQVQFSKTVIGKARLNNISIIGPLDMKQIDYTVPTVIAEEMSYMYDFCTLISIKVHNIVLMMQVTVTTTYFGHSEQISQERYQYVDCGRNTTYQLGQSEYLNVLQPQQ

SEQ ID NO: 2143 - protein, 497 aa, Homo sapiens
  MISC_FEATURE (181): Xaa equals any of the twenty naturally occurring L-amino acids
MGSNSSRIGDLPKNEYLKKLSGTESISENDPFWNQLLSFSFPAPTSSSELKLLEEATISVCRSLVENNPRTGNLGALIKVFLSRTKELKLSAECQNHIFIWQTHNALFIICCLLKVFICQMSEEELQLHFTYEEKSPGNYSSDSEDLLEELLCCLMQLITDIPLLDITYEISVEAISTMVXFLSCQLFHKEVLRQSISHKYLMRGPCLPYTSKLVKTLLYNFIRQEKPPPPGAHVFPQQSDGGGLLYGLASGVATGLWTVFTLGGVGSKAAASPELSSPLANQSLLLLLVLANLTDASDAPNPYRQAIMSFKNTQDSSPFPSSIPHAFQINFNSLYTALCEQQTSDQATLLLYTLLHQNSNIRTYMLARTDMENLVLPILEILYHVEERNSHHVYMALIILLILTEDDGFNRSIHEVILKNITWYSERVFYPLCLVSCLQLSSRPVLESTGHPAVHHGFRLRAGCSPTRTPPAKQPFKFFYFWVTEVDRQVTWCIFC

SEQ ID NO: 2144 - protein, 180 aa, Homo sapiens
  MISC_FEATURE (82): Xaa equals any of the twenty naturally occurring L-amino acids
MINFSAFLGAATMYTRYKIVQKQNQTCYFSTPVFNLVSLVLGLVGCFGMGIVANFQELAVPVVHDGGALLAFVCGVVYTLLXSIISYKSCPQWNSLSTCHIRMVISAVSCAAVIPMIVCASLISITKLEWNPREKDYVYHVVSAICEWTVAFGFIFYFLTFIQDFQSVTLRISTEINGDI

SEQ ID NO: 2145 - protein, 149 aa, Homo sapiens
MVTTPTGYKYEGVKFEKGNCGVSIMRSGEAMEQGLRDCCRSIRIGKILIQSDEETQRAKVYYAKFPPDIYRRKVLLMYPILSTGNTVIEAVKVLIEHGVQPSVIILLSLFSTPHGAKSIIQEFPEITILTTEVHPVAPTHFGQKYFGTD

SEQ ID NO: 2146 - protein, 114 aa, Homo sapiens
MEKPLFPLVPLHWFGFGYTALVVSGGIVGYVKTGSVPSLAAGLLFGSLAGLGAYQLYQDPRNVWGFLAATSVTFVGVMGMRSYYYGKFMPVGLIAGASLLMAAKVGVRMLMTSD

SEQ ID NO: 2147 - protein, 254 aa, Homo sapiens
  MISC_FEATURE (61): Xaa equals any of the twenty naturally occurring L-amino acids
  MISC_FEATURE (158): Xaa equals any of the twenty naturally occurring L-amino acids
  MISC_FEATURE (163): Xaa equals any of the twenty naturally occurring L-amino acids
  MISC_FEATURE (165): Xaa equals any of the twenty naturally occurring L-amino acids
  MISC_FEATURE (197): Xaa equals any of the twenty naturally occurring L-amino acids
  MISC_FEATURE (201): Xaa equals any of the twenty naturally occurring L-amino acids
MALLVDRVRGHWRIAAGLLFNLLVSICIVFLNKWIYVYHGFPNMSLTLVHFVVTWLGLYIXQKLDIFAPKSLPPSRLLLLALSFCGFVVFTNLSLQNNTIGTYQLAKAMTTPVIIAIQTFCYQKTFSTRIQLTLIPITLGVILNSYYDVKFNFLGMVXAALGXLXTSLYQVWVGAKQHELQVNSMQLLSTRLRCHLXCCWXLCPSLSQCLEKEEYLVPGQFLLCRPGWNAVAQSWLTAASASWAQAILLPQPPQ

SEQ ID NO: 2148 - protein, 144 aa, Homo sapiens
  MISC_FEATURE (116): Xaa equals any of the twenty naturally occurring L-amino acids
  MISC_FEATURE (120): Xaa equals any of the twenty naturally occurring L-amino acids
  MISC_FEATURE (132): Xaa equals any of the twenty naturally occurring L-amino acids
  MISC_FEATURE (140): Xaa equals any of the twenty naturally occurring L-amino acids
MVSMSFKRNRSDRFYSTRCCGCCHVRTGTIILGTWYMVVNLLMAILLTVEVTHPNSMPAVNIQYEVIGNYYSSERMADNACVLFAVSVLMFIISSMLVMEQFLSSGLADSIFCYRXFDFXLSCLVAISSLTXLPKNQRIXGSTT

SEQ ID NO: 2149 - protein, 233 aa, Homo sapiens
MVSMSFKRNRSDRFYSTRCCGCCHVRTGTIILGTWYMVVNLLMAILLTVEVTHPNSMPAVNIQYEVIGNYYSSERMADNACVLFAVSVLMFIISSMLVYGAISYQVGWLIPFFCYRLFDFVLSCLVAISSLTYLPRIKEYLDQLPDFPYKDDLLALDSSCLLFIVLVFFALFIIFKAYLINCVWNCYKYINNRNVPEIAVYPAFEAPPQYVLPTYEMAVKMPEKEPPPPYLPA

SEQ ID NO: 2150 - protein, 233 aa, Homo sapiens
MSNALSTVTRGSMKKVFPPDEIEQVSNKDDMKTSLKKVVKETSYEMMMQCVSRMLAHPLHVISMRCMVQFVGREAKYSGVLSSIGKIFKEEGLLGFFVGLIPHLLGDVVFLWGCNLLAHFINAYLVDDSVSDTPGGLGNDQNPGSQFSQALAIRSYTKFVMGIAVSMLTYPFLLVGDLMAVNNCGLQAGLPPYSPVFKSWIHCWKYLSVQGQLFRGSSLLFRRVSSGSCFALE

SEQ ID NO: 2151 - protein, 131 aa, Homo sapiens
  MISC_FEATURE (41): Xaa equals any of the twenty naturally occurring L-amino acids
  MISC_FEATURE (87): Xaa equals any of the twenty naturally occurring L-amino acids
  MISC_FEATURE (90): Xaa equals any of the twenty naturally occurring L-amino acids
  MISC_FEATURE (103): Xaa equals any of the twenty naturally occurring L-amino acids
  MISC_FEATURE (120): Xaa equals any of the twenty naturally occurring L-amino acids
MWFLVGCNLLATSSMPTWWMTSVSDTPGGLGNDQNPGSQFXQALAIRSYTKFVMGIAVSMLTYPFLLVGDLMAVNNCGLQAGLPPYXPVXKSWIHCWKYLSVXGQLFRSSSLLFRRVSSXSCFGLELPESS

SEQ ID NO: 2152 - protein, 286 aa, Homo sapiens
MAGAGAGAGARGGAAAGVEARARDPPPAHRAHPRHPRPAAQPSARRMDGGSGGLGSGDNAPTTEALFVALGAGVTALSHPLLYVKLLIQVGHEPMPPTLGTNVLGRKVLYLPSFFTYAKYIVQVDGKIGLFRGLSPRLMSNALSTVTRGSMKKVFPPDEIEQVSNKDDMKTSLKKVVKETSYEMMMQCVSRMLAHPLHVISMRCMVQFVGREAKYSGVLSSIGKIFKEEGLLGFFVVREFIHPITGHGHGSANRCVLNLSDRSCWPGTSLHGPALPECCSQLSRAP

SEQ ID NO: 2153 - protein, 118 aa, Homo sapiens
MEDLQFENWGPVPKSVIVLTTCITALLDTQESHGNANWKGPLPQGSLRRRGSVESKPTFPKSPPTRPLTPSTVRLYVSGIQGNVNFLFIWEIVHGKQIFFSLVHLLIVYNICTSMQNT

SEQ ID NO: 2154 - protein, 129 aa, Homo sapiens
  MISC_FEATURE (75): Xaa equals any of the twenty naturally occurring L-amino acids
  MISC_FEATURE (94): Xaa equals any of the twenty naturally occurring L-amino acids
  MISC_FEATURE (98): Xaa equals any of the twenty naturally occurring L-amino acids
  MISC_FEATURE (118): Xaa equals any of the twenty naturally occurring L-amino acids
MSEKENNFPPLPKFIPVKPCFYQNFSDEIPVEHQVLVKRIYRLWMFYCATLGVNLIACLAWWIGGGSGTNFGLAXVWLLLFTPCGYVCWFRPVXKASXADSSFNFMAFFFIFGAQFVXTVIQAIGSPAG

SEQ ID NO: 2155 - protein, 184 aa, Homo sapiens
  MISC_FEATURE (51): Xaa equals any of the twenty naturally occurring L-amino acids
  MISC_FEATURE (102): Xaa equals any of the twenty naturally occurring L-amino acids
  MISC_FEATURE (163): Xaa equals any of the twenty naturally occurring L-amino acids
  MISC_FEATURE (171): Xaa equals any of the twenty naturally occurring L-amino acids
  MISC_FEATURE (184): Xaa equals any of the twenty naturally occurring L-amino acids
TFGTRKVGEQVEEATLLGADGFKSGFKSLLCLKSMSEVGEGWTGSSSRRSXSPTPSPPPGKWPQRSSLFPSPEWVSRSAFRDPVLHWATFRAALGRQSCFSXSQNPFPSPLRSCKEKGTVYILSPFIIHFSAVPGITWLWNILSGKKIYPLKKLEKSKSGPGXSGFHICIXQHFGEGQGQVGFX

SEQ ID NO: 2156 - protein, 313 aa, Homo sapiens
  MISC_FEATURE (200): Xaa equals any of the twenty naturally occurring L-amino acids
  MISC_FEATURE (310): Xaa equals any of the twenty naturally occurring L-amino acids
MKKRKELNALIGLAGDSRRKKPKKGPSSHRLLRTEPPDSDSESSSEEEEEFGVVGNRSRFAKGDYLRCCKICYPLCGFVILAACVVACVGLVWMQVALKEDLDALKEKFRTMESNQKSSFQEIPKLNEELLSKQKQLEKIESGEMGLNKVWINITEMNKQISLLTSAVNHLKANVKSAADLISLPTTVEGLQKSVASIGXTLNSVHLAVEALQKTVDEHKKTMELLQSDMNQHFLKETPGSNQIIPSPSATSELDNKTHSENLKQMGDRSATLKRQSLDQVTNRTDTVKIQSIKKEDSSKFSRYPKLKRXTPA

SEQ ID NO: 2157 - protein, 160 aa, Homo sapiens
  MISC_FEATURE (129): Xaa equals any of the twenty naturally occurring L-amino acids
  MISC_FEATURE (133): Xaa equals any of the twenty naturally occurring L-amino acids
  MISC_FEATURE (135): Xaa equals any of the twenty naturally occurring L-amino acids
  MISC_FEATURE (142): Xaa equals any of the twenty naturally occurring L-amino acids
  MISC_FEATURE (151): Xaa equals any of the twenty naturally occurring L-amino acids
  MISC_FEATURE (154): Xaa equals any of the twenty naturally occurring L-amino acids
  MISC_FEATURE (157): Xaa equals any of the twenty naturally occurring L-amino acids
MARASSGNGSEEAWGALRAPQQQLRELCPGVNNQPYLCESGHCCGETGCCTYYYELWWFWLLWTVLILFSCCCAFRHRRAKLRLQQQQRQREINLLAYHGACHGAGPFPTGSLLDLRFLSTFKAPSLRXCGSXPXHTNPPLXCGPRRPFDXFSXQTXWSF

SEQ ID NO: 2158 - protein, 228 aa, Homo sapiens
  MISC_FEATURE (134): Xaa equals any of the twenty naturally occurring L-amino acids
  MISC_FEATURE (163): Xaa equals any of the twenty naturally occurring L-amino acids
  MISC_FEATURE (172): Xaa equals any of the twenty naturally occurring L-amino acids
MGMSPLLQAHHAMEKMEEFVCKVWEGRWRVIPHDVLPDWLKDNDFLLHGHRPPMPSFRACFKSIFRIHTETGNIWTHLLGCVFFLCLGIFYMFRPNISFVAPLQEKVVFGLFFLGAILCLSFSWLFHTVYCHSXGVSRLFSKLGLLWYCSSELWEVLFLGFIXLSTVIHNLXHLLIVICVLGHCSHYSLPVGHVCHPSVSGSKSRSVFGPRPEWNHSYLALCHLGGVP

SEQ ID NO: 2159 - protein, 816 aa, Homo sapiens
  MISC_FEATURE (62): Xaa equals any of the twenty naturally occurring L-amino acids
  MISC_FEATURE (82): Xaa equals any of the twenty naturally occurring L-amino acids
  MISC_FEATURE (804): Xaa equals any of the twenty naturally occurring L-amino acids
  MISC_FEATURE (807): Xaa equals any of the twenty naturally occurring L-amino acids
  MISC_FEATURE (813): Xaa equals any of the twenty naturally occurring L-amino acids
MIFVCSATHKTKSMFFFLAQTEQGDIFKITLETDEDMVTEIRLKYFDTVPVAAAMCVLKTGXLFVASEFGNHYLYQIAHLGXDDEEPEFSSAMPLEEGDTFFFQPRPLKNLVLVDELDSLSPILFCQIADLANEDTPQLYVACGRGPRSSLRVLRHGLEVSEMAVSELPGNPNAVWTVRRHIEDEFDAYIIVSFVNATLVLSIGETVEEVTDSGFLGTTPTLSCSLLGDDALVQVYPDGIRHIRADKRVNEWKTPGKKTIVKCAVNQRQVVIALTGGELVYFEMDPSGQLNEYTERKEMSADVVCMSLANVPPGEQRSRFLAVGLVDNTVRIISLDPSDCLQPLSMQALPAQPESLCIVEMGGTEKQDELGERGSIGFLYLNIGLQNGVLLRTVLDPVTGDLSDTRTRYLGSRPVKLFRVRMQGQEAVLAMSSRSWLSYSYQSRFHLTPLSYETLEFASGFASEQCPEGIVAISTNTLRILALEKLGAVFNQVAFPLQYTPRKFVIHPESNNLIIIETDHNAYTEATKAQRKQQMAEEMVEAAGEDERELAAEMAAAFLNENLPESIFGAPKAGNGQWASVIRVMNPIQGNTLDLVQLEQNEAAFSVAVCRFSNTGEDWYVLVGVAKDLILNPRSVAGGFVYTYKLVNNGEKLEFLHKTPVEEVPAAIAPFQGRVLIGVGKLLRVYDLGKKKLLRKCENKHIANYISGIQTIGHRVIVSDVQESFIWVRYKRNENQLIIFADDTYPRWVTTASLLDYDTVAGADKFGNICVVRLPPNTNDEVDEDPTGNKALWDRGLLNGASQXGKXRGGFGXKKF

SEQ ID NO: 2160 - protein, 208 aa, Homo sapiens
  MISC_FEATURE (6): Xaa equals any of the twenty naturally occurring L-amino acids
  MISC_FEATURE (16): Xaa equals any of the twenty naturally occurring L-amino acids
  MISC_FEATURE (58): Xaa equals any of the twenty naturally occurring L-amino acids
  MISC_FEATURE (64): Xaa equals any of the twenty naturally occurring L-amino acids
  MISC_FEATURE (92): Xaa equals any of the twenty naturally occurring L-amino acids
  MISC_FEATURE (93): Xaa equals any of the twenty naturally occurring L-amino acids
GRGCYXAERCRSIRQXGHSRASEAQMGTAECRQGVTGTARCRRARRRRQGAERVQQQXRIWMGXSRVRTGHRQGAAGCGRGTDRAQTTQTGXXEGADGAGRVRMGRTWGTDRAQAGCRHGADGVQSGHRQVTDSVWSGTGWRGLAPVLTPGLLCRGQALGPSVPLNQTTFQEAWTLTRRPATHGRMKAHLRFEAHRSAAGHSSRMWAL

SEQ ID NO: 2161 - protein, 166 aa, Homo sapiens
  MISC_FEATURE (52): Xaa equals any of the twenty naturally occurring L-amino acids
MNIKHLVDPIDDLFLAAKKIPGISSTGVGDGGNELGMGKVKEAVRRHIRHGXVIACDVEADFAVIAGVSNWGGYALACALYILYSCAVHSQYLRKAVGPSRAPGDQAWTQALPSVIKEEKMLGILVQHKVRSGVSGIVGMEVDGLPFHNTHAEMIQKLVDVTTAQV

SEQ ID NO: 2162 - protein, 127 aa, Homo sapiens [sequence omitted]

SEQ ID NO: 2163 - protein, 121 aa, Homo sapiens
MLSAFNATSGKAIWTLNPNYLSNGTLAAPVVVLPDLDEDGVRDLVVLAIGELQPDLCFLLVSGRTGNPVGRPVKYNIVGSWESELVLRFTSPQMGLSTSCLGLEIYKLSHCGDIFVPGPKS

SEQ ID NO: 2164 - protein, 373 aa, Homo sapiens
  MISC_FEATURE (96): Xaa equals any of the twenty naturally occurring L-amino acids
  MISC_FEATURE (278): Xaa equals any of the twenty naturally occurring L-amino acids
MWVCSTLWRVRTPARQWRGLLPASGCHGPAASSYSASAEPARVRALVYGHHGDPAKVVELKNLELAAVRGSDVRVKMLAAPINPSDINMIQGNYGXLPELPAVGGNEGVAQVVAVGSNVTGLKPGDWVIPANAGLGTWRTEAVFSEEALIQVPSDIPLQSAATLGVNPCTAYRMLMDFEQLQPGDSVIQNASNSGVGQAVIQIAAALGLRTINVVRDRPDIQKLSDRLKSLGAEHVITEEELRRPEMKNFFKDMPQPRLALNCVGGKSSTELLRQLAXGGTMVTYGGMAKQPVVASVSLLIFKDLKLRGFWLSQWKKDHSPDQFKELILTLCDLIRRGQLTAPACSQVPLQDYQSALEASMKPFISSKQILTM

SEQ ID NO: 2165 - protein, 135 aa, Homo sapiens [sequence omitted]

SEQ ID NO: 2166 - protein, 194 aa, Homo sapiens
MVCPSAEAQDPFPTVGPNSVLSPQRLVLETLCKLSIQDNNVDLILATPPFSRQEKFYATLVRYVGDRKNPVCREMSMALLSNLAQGDALAARAIAVQKGSIGNLISFLEDGVTMAQYQQSQHNLMHMQPPPLEPPSVDMMCRAAKALLAMARVDENRSEFLLHEGRLLDISISAVLNSLVASVICDVLFQIGQL

SEQ ID NO: 2167 - protein, 145 aa, Homo sapiens
MHSTSSHEGHKQHRSQTLPIIRGKNALSNPKLLQMLDNTMTSNSNEIDIVHHVDTEANIATEVCLTILDLLSLFTQTHQRQLQQCDCQNSLMKRVFDTYMLFFQVNQSATALKHVFASLRLFVCKFPSAFFQGPADLCGSFCYES

SEQ ID NO: 2168 - protein, 269 aa, Homo sapiens
  MISC_FEATURE (84): Xaa equals any of the twenty naturally occurring L-amino acids
MEPEFLYDLLQLPKGVEPPAEEELSKGGKKKYLPPTSRKDPKFEELQKVLMEWINATLLPEHIVVRSLEEDMFDGLILHHLFQXLAALKLEAEDIALTATSQKHKLTVVLEAVNRSLQLEEWQAKWSVESIFNKDLLSTLHLLVALAKRFQPDLSLPTNVQVEVITIESTKSGLKSEKLVEQLTEYSTDKDEPPKDVFDELFKLAPEKVNAVKEAIVNFVNQKLDRLGLSVQNLDTQFADGVILLLLIGQLEGFFLHLKEFYLTFELFC

SEQ ID NO: 2169 - protein, 130 aa, Homo sapiens
  MISC_FEATURE (5): Xaa equals any of the twenty naturally occurring L-amino acids
  MISC_FEATURE (35): Xaa equals any of the twenty naturally occurring L-amino acids
  MISC_FEATURE (113): Xaa equals any of the twenty naturally occurring L-amino acids
  MISC_FEATURE (122): Xaa equals any of the twenty naturally occurring L-amino acids
MSLRXMGMTSLCGDWLQGLHRFVAREKIMSVLSEXGLFRGLQNHPMVLPICSRSGDVIEYLLKNQWFVRCQEMGARAAKAVESGALELSPSFHQKNWQHWVFPYWGLVCLPAXVVGAIRFQXNLVVRGPC

SEQ ID NO: 2170 - protein, 150 aa, Homo sapiens
  MISC_FEATURE (114): Xaa equals any of the twenty naturally occurring L-amino acids
MRKKTVGNQTGIKSSALPRKSGRYSGFPKKQRKRRSLDEETVQQEEGLLTLSCACGSPEDPVKIQILIQWVCVEPETAILTCSQGMLMLLALGLHCMHVKPYRSQQRPMERECXALAAQGPTRFTRIVLLPGQPLATAPPAAVAERASSL

SEQ ID NO: 2171 - protein, 191 aa, Homo sapiens
MTCVEKAGTDEKMLMKVFRCLGSWFNLGVLDSNFMANNKLLALLFEVLQQDKTSSNLHEAASDCVCSALYAIENVETNLPLAMQLFQGVLTLETAYHMAVAREDLDKVLNYCRIFTELCETFLEKIVCTPGQGLGDLRTLELLLICAGHPQYEVVFMLFKGHYSPSCVLHIIYISLPRAQIFIVEKLQSCF

SEQ ID NO: 2172 - protein, 591 aa, Homo sapiens [sequence omitted]

SEQ ID NO: 2173 - protein, 252 aa, Homo sapiens
MLANNETGIVMPVPEISQRIKALNQERVAAGLPPILVHTDAAQALGKQRVDVEDLGVDFLTIVGHKFYGPRIGALYIRGLGEFTPLYPMLFGGGQERNFRPGTENTPMIAGLGKAAELVTQNCEAYEAHMRDVRDYLEERLEAEFGQKRIHLNSQFPGTQRLPNTCNFSIRGPRLQGHVVLAQCRVLMASVGAACHSDHGDQPSPVLLSYGVPFDVARNALRLSVGRSTTRAEVDLVVQDLKQAVAQLEDQA

SEQ ID NO: 2174 - protein, 165 aa, Homo sapiens
MTRLCLPRPEAREDPIPVPPRGLGAGEGSGSPVRPPVSTWGPSWAQLLDSVLWLGALGLTIQAVFSTTGPALLLLLVSFLTFDLLHRPAGHTLPQRKLLTRGQSQGAGEGPGQQEALLLQMGTVSGQLSLQDALLLLLMGLGPLLRACGMPLTLLGLAFCLHPWA

SEQ ID NO: 2175 - protein, 394 aa, Homo sapiens
  MISC_FEATURE (389): Xaa equals any of the twenty naturally occurring L-amino acids
  MISC_FEATURE (393): Xaa equals any of the twenty naturally occurring L-amino acids
MATSKLPVVPGEEENTILMAKERLEALRTAFESGDLPQAASHLQELLASTESIRLEVGVTGESGAGKSSLINALRGLEAEDPGAALTGVMETTMQPSPYPHPQFPDVTLWDLPGAGSPGCPADKYLKQVDFSRYDFFLLVSPRRCGAVETRLAAEILCQGKKFYFVRTKVDEDLAATRTQRPSGFREAAVLQEIRDHCAERLREAGVADPRIFLVSNLSPARYDFPTLVSTWEHDLPSHRRHAGLLSLPDISLEALQKKKAMLQEQVLKTALVLGVIQALPVPGLAAAYDDALLIHSLRGYHRSFGLDDDSLAKLAEQVGKQAGDLRSVIRSPLANEVSPETVLRLYSQSSDGAMRVARAFERGIPVFGTLVAGGISFWRCLHHAPRLXQRRXA

SEQ ID NO: 2176 - protein, 141 aa, Homo sapiens
  MISC_FEATURE (49): Xaa equals any of the twenty naturally occurring L-amino acids
  MISC_FEATURE (113): Xaa equals any of the twenty naturally occurring L-amino acids
  MISC_FEATURE (118): Xaa equals any of the twenty naturally occurring L-amino acids
MCRSWRATSTGCWCGSWRPHPRCCRSPRAPPNSLPHPTPRRVGMDLLLXALSPPELSHLQWGIVCLALSLLAPLPPASTGAAGRGPSGFPLEASGSVHNLCVFGSPGSFPPAXFHIPXLWGPQGIGTLPQDRAGVNCSLMQ

SEQ ID NO: 2177 - protein, 316 aa, Homo sapiens
  MISC_FEATURE (165): Xaa equals any of the twenty naturally occurring L-amino acids
  MISC_FEATURE (236): Xaa equals any of the twenty naturally occurring L-amino acids
  MISC_FEATURE (267): Xaa equals any of the twenty naturally occurring L-amino acids
  MISC_FEATURE (274): Xaa equals any of the twenty naturally occurring L-amino acids
  MISC_FEATURE (281): Xaa equals any of the twenty naturally occurring L-amino acids
  MISC_FEATURE (285): Xaa equals any of the twenty naturally occurring L-amino acids
  MISC_FEATURE (288): Xaa equals any of the twenty naturally occurring L-amino acids
  MISC_FEATURE (290): Xaa equals any of the twenty naturally occurring L-amino acids
  MISC_FEATURE (315): Xaa equals any of the twenty naturally occurring L-amino acids
MAVAPSCLPASQEPISLASCAMADLVPDLQPILFWMSNSIELLYFIQQKCPLYMQSMEEQLDITGSKESLFSCTLTASEEAMAVLEEVVLYAFQQCVYYVSKSLYICLPALLECPPFQTERRESWSSAPELPEELRRVVSVYQAALDLLRQLQVHPEVASQMLAXLFFFSGTLLLNQLLDRGPSLSCFHWPRGVQACARLQQLLEWMRSAGFGAAGEHFFQKLSCTLNLLATPRAXLIQMSWTALRAAFPALSPAQLHRLLTHYQLXSAMGPMXTWEPGAXDSPXAFXSXDVLESYENPPPIVLPSDGFQVDLEXN

SEQ ID NO: 2178 - protein, 140 aa, Homo sapiens
MQPRHLLQHPLPDHAGGDCGVHGAGGGCRRGGHGDGTADSVRRGRVAAGPDHERLPLPRRTAAADRLDRLHREECVEEQRLLLLVLFFWVAGLTLLNSRGLLLSAGRHDHAEHRRHQWIPRVSVTAACLGQNKGTAFFSK

SEQ ID NO: 2179 - protein, 113 aa, Homo sapiens
  MISC_FEATURE (91): Xaa equals any of the twenty naturally occurring L-amino acids
MSTSASALLACVREVKVAPSELARSRCALFSGPLVQAVSALVGFATEPQFLGRAAAVSAEGKAVQTAILGGAMSVVSACVLLTQCLRDLAXTPTGRQDVGPQGEAEELGLRRV

SEQ ID NO: 2180 - protein, 183 aa, Homo sapiens
  MISC_FEATURE (73): Xaa equals any of the twenty naturally occurring L-amino acids
MTDQTYCDRLVQDTPFLTGHGRLSEQQVDRIILQLNRYYPQILTNKEAEKFRNPKASLRVRLCDLLSHLQRSXERDCQEFYRALYIHAQPLHSRLPSRHALQNSDCTELDSGSQSGELSNRGPMSFLAGLGLAVGLALLLYCYPPDPKGLPGTRRVLGFSPVIIDRHVSRYLLAFLADDLGGL

SEQ ID NO: 2181 - protein, 183 aa, Homo sapiens
  MISC_FEATURE (11): Xaa equals any of the twenty naturally occurring L-amino acids
MMKTCSSPYWXVISVLGEARPDSSKASSLGSPSNGASGRAGSPCQNPILALQKDWTSVSLQWEATLDTRSHSGGHKATLLALDLEELSHAGEILLVGLSHLLLCRLWVHNLQALEWGEGHAGGRARGAVADGGLPAIYDALLLQGRCSVLEILALVASFTCVCRTRPLPDLPRWPRLNPRSSW

SEQ ID NO: 2182 - protein, 119 aa, Homo sapiens
MSHLGWPFLVKDGLFKSCNIFLLGSNLFHDLGQMISQLVPGILCILQPILECRVHHITLLAQIIGCLGQDSIHQGFQHQGVVPLLVSLLHIGAGEVQPVFQTHGVWLNPHGVLRISDVW

SEQ ID NO: 2183 - protein, 330 aa, Homo sapiens
MFASPRRWSSRRPSLASGHSYLPSSACYHSASPQHPCSATTGLWAHRRCPSPCARKVWQPSALTCQCPWMEIPTHPPRRWYNTTGRLGMTGSPSGASGVACGYPVRKLWKNQGRGAEVSLNLHHQPREKILWLSLGTQITYIGLQFISFLLLLTDLLLTGNPACGLKLSAFAAVSSVLSGLLGMVAHMMYSQVFQATVNLGPEDWRPHVWNYGWAFYMAWLSFTCCMASAVTTFNTYTRMVLEFKCKHSKSFKENPNCLPHHHQCFPRRLSSAAPTVGPLTSYHQYHNQPIHSVSEGVDFYSELRNKGFQRGASQELKEAVRSSVEEEQC

SEQ ID NO: 2184 - protein, 604 aa, Homo sapiens
MNTKRDFESKANHLGDSGGTPVKTRRHSWRQQIFLRVATPQKACDSSSRYEDYSELGELPPRSPLEPVCEDGPFGPPPEEKKRTSRELRELWQKAILQQILLLRMEKENQKLQASENDLLNKRLKLDYEEITPCLKEVTTVWEKMLSTPGRSKIKFDMEKMHSAVGQGVPRHHRGEIWKFLAEQFHLKHQFPSKQQPKDVPYKELLKQLTSQQHAILIDLGRTFPTHPYFSAQLGAGQLSLYNILKAYSLLDQEVGYCQGLSFVAGILLLHMSEEEAFKMLKFLMFDMGLRKQYRPDMIILQIQMYQLSRLLHDYHRDLYNHLEEHEIGPSLYAAPWFLTMFASQFPLGFVARVFDMIFLQGTEVIFKVALSLLGSHKPLILQHENLETIVDFIKSTLPNLGLVQMEKTINQVFEMDIAKQLQAYEVEYHVLQEELIDSSPLSDNQRMDKLEKTNSSLRKQNLDLLEQLQVANGRIQSLEATIEKLLSSESKLKQAMLTLELERSALLQTVEELRRRSAEPSDREPECTQPEPRATDSSAGEIATPSHTVQALTERDRRRWKERRKREVCFSGRKPACQQVDSYELQLAIQGACPSVFFVVFRY

SEQ ID NO: 2185 - protein, 131 aa, Homo sapiens
  MISC_FEATURE (123): Xaa equals any of the twenty naturally occurring L-amino acids
  MISC_FEATURE (131): Xaa equals any of the twenty naturally occurring L-amino acids
MSGKTKARRAAMFFRRCSEDASGSASGNALLSEDENPDANGVTRSWKIILSTMLTLTFLLVGLLNHQWLKETDVPQKSRQLYAIIAEYGSRLYKYQARLRMPKEQLELLKKESQNLENNFRQXLFLIEQIX

SEQ ID NO: 2186 - protein, 122 aa, Homo sapiens
MHVESSAEPGKAPKHAGQKKTYRAIAETYAFLPREAVTRFLMSCTECQKRMHFNSNGLEPKENEPPSPLVSGIIDYNMPLTSTYLKQMKLRVMNSQEQPSSLSPAPGFVNTVITVLICAHEE

SEQ ID NO: 2187 - protein, 173 aa, Homo sapiens
MSSSRCPIFYWLHQWLYWLPGNLDIRDHSPLALLTLGLQRSKNNKTLEKPDLGFLSPQVFVYVVHAAVLLLFGGLCMHVQVLTRFLGSSTPIMYWFPAHLLQDQEPLLRSLKTVPWKPLAEDSPPGQKVPRNPIMGLLYHWKTCSPVTRYILGYFLTYWLLGLLLHCNFLPWT

SEQ ID NO: 2188 - protein, 107 aa, Homo sapiens
  MISC_FEATURE (43): Xaa equals any of the twenty naturally occurring L-amino acids
  MISC_FEATURE (55): Xaa equals any of the twenty naturally occurring L-amino acids
  MISC_FEATURE (65): Xaa equals any of the twenty naturally occurring L-amino acids
  MISC_FEATURE (72): Xaa equals any of the twenty naturally occurring L-amino acids
  MISC_FEATURE (80): Xaa equals any of the twenty naturally occurring L-amino acids
MKDAETNWPSYIKYSEHFINTCQSYPGKHIFIFQIMWLGYLVXLNFGYVCLFPRXRNIHYLFNTXLFLIAWXLLIARSQXARNVWFFIVSFCYKFLSYFRASSTLKV

SEQ ID NO: 2189 - protein, 165 aa, Homo sapiens
MVVQQESRNLNIAIIRPSIVGATWQEPFPGWVDNINGPNGIIIATGKGFLRAIKATPMAVADVIPVDTVVNLMLAVGWYTAVHRPKSTLVYHITSGNMNPCNWHKMGVQVLATFEKIPFERPFRRPNANFTSNSFTSQYWNAVSHRAPAIIYDCYLRLTGKEAQG

SEQ ID NO: 2190 - protein, 193 aa, Homo sapiens
MNIFMTFVINVLRKNLFHGFMVITQAPVRILPSQERIRTPCHSPAILLSSCRVLSGNNCIMAALTSVIKRNLLFFRLDLFPLWLIFLYIVKMGDFPSAPTHLNTAAICTCLLPIPLGTHSDLLSVSCSWFHLFEKGPPLSYKHLVRQVHPLMNADTAAGGFVYTCKDKLRSLLFGEVKEDGNGCFICMSLEQC

SEQ ID NO: 2191 - protein, 103 aa, Homo sapiens
METTNGTETWYESLHAVLKALNATLHSNLLCRPGPGLGPDNQTEERRASLPGRDDNSYMYILFVMFLFAVTVGSLILGYTRSRKVDKRSDPYHVYIKNRVSMI

SEQ ID NO: 2192 - protein, 171 aa, Homo sapiens
  MISC_FEATURE (151): Xaa equals any of the twenty naturally occurring L-amino acids
MTPEFDEEVVFENSPLYQYLQDLGHTDFEICSSLSPKTEKCTTEGQQKPPTRVLPKQGILLKVAETIKSWIFFSQCNKKDDLLHKLDIGFRLDSLHTILQQEVLLQEDVELIELLDPSILSAGQSQQQEKWTPSNTCSLATPNIWDLSMLXAFISLLLCFHLVDCVSWLVW

SEQ ID NO: 2193 - protein, 187 aa, Homo sapiens
  MISC_FEATURE (4): Xaa equals any of the twenty naturally occurring L-amino acids
  MISC_FEATURE (24): Xaa equals any of the twenty naturally occurring L-amino acids
  MISC_FEATURE (86): Xaa equals any of the twenty naturally occurring L-amino acids
  MISC_FEATURE (113): Xaa equals any of the twenty naturally occurring L-amino acids
  MISC_FEATURE (116): Xaa equals any of the twenty naturally occurring L-amino acids
  MISC_FEATURE (118): Xaa equals any of the twenty naturally occurring L-amino acids
  MISC_FEATURE (123): Xaa equals any of the twenty naturally occurring L-amino acids
MLKXWAIKQGILLKVAETIKSWIXFSQCNKKDDLLHKLDIGFRLDSLHTILQQEVLLQEDVELIELLDPSILSAGQSQQQENGHLXTLCSLATPNIWDLSMLFAFISLLVMLXTWXIXSSWLXWGVILFVYLVIRALRLWRTAKLQVTLKKYSVHLEDMATNSRAFTNLVRKALPPCRNRLLVMRRK

SEQ ID NO: 2194 - protein, 107 aa, Homo sapiens
  MISC_FEATURE (96): Xaa equals any of the twenty naturally occurring L-amino acids
MQSLQPVVSCGWLAPPPNGQKEGNRYLAGSTIYFHCDNGYSLAGAETSTCQADGTWSSPTPKCQPGRSYAVLLGIIFGGLAVVAAVALVYVLLRRXKGNTHVWGAQP

SEQ ID NO: 2195 - protein, 138 aa, Homo sapiens
  MISC_FEATURE (83): Xaa equals any of the twenty naturally occurring L-amino acids
MPGLTFSNELISRDEGLHCDFACLMFQYLVNKPSEERVREIIVDAVKIEQEFLTEALPVGLIGMNCILMKQYIEFVADRLLVXLGFSKVFQAENPFDFMENISLEGKTNFFEKRVSEYQRFAVMAETTDNVFTLDADF

SEQ ID NO: 2196 - protein, 131 aa, Homo sapiens
  MISC_FEATURE (124): Xaa equals any of the twenty naturally occurring L-amino acids
MDTAEEDICRVCRSEGTPEKPLYHPCVCTGSIKFIHQECLVQWLKHSRKEYCELCKHRFAFTPIYSPDMPSRLPIQDIFAGLVTSIGTAIRYWFHYTLVAFAWLGVVPLTACRIYKCLFTGSRXLTADGCH

SEQ ID NO: 2197 - protein, 117 aa, Homo sapiens
  MISC_FEATURE (52): Xaa equals any of the twenty naturally occurring L-amino acids
  MISC_FEATURE (61): Xaa equals any of the twenty naturally occurring L-amino acids
  MISC_FEATURE (66): Xaa equals any of the twenty naturally occurring L-amino acids
  MISC_FEATURE (82): Xaa equals any of the twenty naturally occurring L-amino acids
  MISC_FEATURE (88): Xaa equals any of the twenty naturally occurring L-amino acids
  MISC_FEATURE (97): Xaa equals any of the twenty naturally occurring L-amino acids
  MISC_FEATURE (99): Xaa equals any of the twenty naturally occurring L-amino acids
MDNRFATAFVIACVLSLISTIYMAASIGTDFWYEYRSPVQENSSDLNKSIWXEFISDEADXKTYNXALFRYNGTVGLWRRCXTIPKNXHWYSPPERXGXSLILTSVFFTWLIIDKTT

SEQ ID NO: 2198 - protein, 139 aa, Homo sapiens
  MISC_FEATURE (11): Xaa equals any of the twenty naturally occurring L-amino acids
  MISC_FEATURE (16): Xaa equals any of the twenty naturally occurring L-amino acids
  MISC_FEATURE (124): Xaa equals any of the twenty naturally occurring L-amino acids
HTHTHTHTVLXFPTQXLLLKFCCSRRNENLYLKISAKAQIQSHKDTKCLTASLLQVRNKSVLCVFPQLCPSLFLIASGLHWEEGRQQILPFTAAQGGSEIKPQQRKGPKNVCIQCHAHRNVFLXKWHFNQEGLFPGLLV

SEQ ID NO: 2199 - protein, 121 aa, Homo sapiens
  MISC_FEATURE (30): Xaa equals any of the twenty naturally occurring L-amino acids
MDIEEEGQVWSHPEWFLLLPRCPGFSHGLXWVLPWVLWMHPACWKFCALCFHPFVVVMTVYLSPVPSSACSPCRPLSLWLSHQHFPTARCSSFLFSGDLSTDCIVPLSLILKMFLTTTKKK

SEQ ID NO: 2200 - protein, 453 aa, Homo sapiens
  MISC_FEATURE (126): Xaa equals any of the twenty naturally occurring L-amino acids
MEHWGGVSAGAGFPGPQQSLPAQEGHFPWPRPQANVHHVCEELQVHLAWCPPLHQFHAVDLDGAAGPGAGCGLPARLPLHPPARHTPAQRHDHPQEGNIPVCVQLAVCALPLPVVPGPEHCGPQRXLQPLVYPLAQVIIGCIKLIPTARFYPLRMHCIRALTLLSGSSGAFIPVLPFILEMFQQVDFNRKPGRMSSKPINFSVILKLSNVNLQEKAYRDGLVEQLYDLTLEYLHSQAHCIGFPELVLPVVLQLKSFLRECKVANYCRQVQQLLGKVQENSAYICSRRQRVSFGVSEQQAVEAWEKLTREEGTPLTLYYSHWRKLRDREIQLEISGKERLEDLNFPEIKRRKMADRKDEDRKQFKDLFDLNSSEEDDTEGFSERGILRPLSTRHGVEDDEEDEEEGEEDSSNSEGEWSWDGDPDAEAGLAPGELQQLAQGPEDELEDLQLSEDD

SEQ ID NO: 2201 - protein, 106 aa, Homo sapiens
MRGWCPWPCGASCGGARVSRSAWGPTPSWRLCASTATPSLSSSPWWSCGSSLCLGWQWLFGALALGLSAAGLVFTLWPVVREDTRLVATVLLSVVVLLHALLAMGL

SEQ ID NO: 2202 - protein, 104 aa, Homo sapiens [sequence omitted]

SEQ ID NO: 2203 - protein, 284 aa, Homo sapiens
  MISC_FEATURE (8): Xaa equals any of the twenty naturally occurring L-amino acids
  MISC_FEATURE (9): Xaa equals any of the twenty naturally occurring L-amino acids
  MISC_FEATURE (25): Xaa equals any of the twenty naturally occurring L-amino acids
  MISC_FEATURE (31): Xaa equals any of the twenty naturally occurring L-amino acids
  MISC_FEATURE (274): Xaa equals any of the twenty naturally occurring L-amino acids
MASCLATXXPPSSAFGLCPQAPSDXQRDGQXLDSLLPTWYFLWRLLALAAARLPCGAVPLAAAGLPAARLPLPLRVVLRAHLQLHVAPHAPHLLLPRLRRAQPLQSGFLELESPGLSKVLRTGAFAYPFLFDNLPLFYRLGLCWGRGHGCGQEALSTSHGYHLFCALLTGFLFASHLPESWHQDALITSATATSYSTSVQCWAPTSSWRQCWLIWDHAEPGWPHRNLPWAWQAQWPHWSWLQLGTTHYCCFHSQPASGPQYMPSAARWPTGGGXPGQTTVRPHP

SEQ ID NO: 2204 - protein, 124 aa, Homo sapiens
MADDLKRFLYKKLPSVEGLHAIVVSDRDGVPVIKVANDNAPEHALRPGFLSTFALATDQGSKLGLSKNKSIICYYNTYQVVQFNRLPLVVSFIASSSANTGLIVSLEKELAPLFEELRQVVEVS

SEQ ID NO: 2205 - protein, 238 aa, Homo sapiens
MPFATVIFFVMILDFYVDSICSVKMEVSKCARYGSFPIFISALLFGNFWTHPITDQLRAMNKAAHQESTEHVLSGGVVVSAIFFILSANILSSPSKRGQKGTLIGYSPEGTPLYNFMGDAFQHSSQSIPRFIKESLKQILEESDSRQIFYFLCLNLLFTFVELFYGVLTNSLGLISDGFHMLFDCSALVMGLFAALMSRWKATRIFSYGYGRIEILSGFINGLFLIVIAFFVFMGVSG

SEQ ID NO: 2206 - protein, 152 aa, Homo sapiens
MEAVLNELVSVEDLLKFEKKFQSEKAAGSVSKSTQFEYAWCLVRSKYNDDIRKGIVLLEELLPKGSKEEQRDYVFYLAVGNYRLKEYEKALKYVRGLLQTEPQNNQAKELERLIDKAMKKDGLVGMAIVGGMALGVAGLAGLIGLAVSKSKS

SEQ ID NO: 2207 - protein, 115 aa, Homo sapiens
MWLYRNPYVEAEYFPTKPMFVIAFLSPLSLIFLAKFLKKADTRDSRQACLAASLALALNGVFTNTIKLIVGSISHQRPQQSVSVLLSTFLKLQCHLLFALKSHAQISSTAASLMG

SEQ ID NO: 2208 - protein, 322 aa, Homo sapiens
  MISC_FEATURE (112): Xaa equals any of the twenty naturally occurring L-amino acids
MNFSIFLQEMSLFKQQSPGKFCLLVCSVCTFFTILGSYIPGVILSYLLLLCAFLCPLFKCNDIGQKIYSKIKSVLLKLDFGIGEYINQKKRERSEADKEKSHKDDSELDFSXLCPKISLTVAAKELSVSDTDVSEVSWTDNGTFNLSEGYTPQTDTSDDLDRPSEEVFSRDLSDFPSLENGMGTNDEDELSLGLPTELKRKKEQLDSGHRPSKETQSAAGLTLPLNSDQTFHLMSNLAGDVITAAVTAAIKDQLEGVQQALSQAAPIPEEDTDTEEGDDFELLDQSELDQIESELGLTQDQEAEAQQNKKSSGFLSNLLGGH

SEQ ID NO: 2209 - protein, 167 aa, Homo sapiens
  MISC_FEATURE (155): Xaa equals any of the twenty naturally occurring L-amino acids
MILGRVIMQIIKDMVLSRTRGAQLWRSLSESWEVINSKPDERPRLSHCIAESWMNFSIFLQEMSLFKQQSPGKFCLLVCSVCTFFTILGSYIPGVILSYLLLLCAFLCPLFKCNDIGQKIYSKIKSVLLKLDFGIGEYINQKKRERSEADKEKSXKDDSELTFHSLS

SEQ ID NO: 2210 - protein, 156 aa, Homo sapiens
  MISC_FEATURE (22): Xaa equals any of the twenty naturally occurring L-amino acids
MLACHHGNVDLVRLLLAHPACXSSLTDKAGRTALSIALKSPTHMEIAGLLRAHADRAGPWGCRGCRRTGRGEQKPSSLDSSLALEEGRGHRPESHPSREETMSNMHIHSCCIILLIRMLCSFCLRPSLKTTRASEQGSSASEGYVVSSKHPKHLQP

SEQ ID NO: 2211 - protein, 483 aa, Homo sapiens
  MISC_FEATURE (461): Xaa equals any of the twenty naturally occurring L-amino acids
  MISC_FEATURE (465): Xaa equals any of the twenty naturally occurring L-amino acids
  MISC_FEATURE (467): Xaa equals any of the twenty naturally occurring L-amino acids
MAGKGSSGRRPLLLGLLVAVATVHLVICPYTKVEESFNLQATHDLLYHWQDLEQYDHLEFPGVVPRTFLGPVVIAVFSSPAVYVLSLLEMSKFYSQLIVRGVLGLGVIFGLWTLQKEVRRHFGAMVATMFCWVTAMQFHLMFYCTRTLPNVLALPVVLLALAAWLRHEWARFIWLSAFAIIVFRVELCLFLGLLLLLALGNRKVSVVRALRHAVPAGILCLGLTVAVDSYFWRQLTWPEGKVLWYNTVLNKSSNWGTSPLLWYFYSALPRGLGCSLLFIPLGLVDRRTHAPTVLALGFMALYSLLPHKELRFIIYAFPMLNITAARGCSYLLNNYKKSWLYKAGSLLVIGHLVVNAAYSATALYVSHFNYPGGVAMQRLHQLVPPQTDVLLHIDVAAAQTGVSRFLQVNSAWRYDKREDVQPGTGMLAYTHILMEAAPGLLALYRDTHRVLASVVGTTGVXLNLXQXAPFNVHLQTKLVLLGK

SEQ ID NO: 2212 - protein, 118 aa, Homo sapiens
  MISC_FEATURE (102): Xaa equals any of the twenty naturally occurring L-amino acids
  MISC_FEATURE (112): Xaa equals any of the twenty naturally occurring L-amino acids
MSSLLPTMWLGAQNGCLYVHSSVAQWRKCLHSIKLKDSILSIVHVKGIVLVALADGTLAIFHRGVDGQWDLSNYHLLDLGRPHHSIRCMTVVHDKVWCGYRXKIYVVQPKAXENREIF

SEQ ID NO: 2213 - protein, 132 aa, Homo sapiens
MHPWNQQVPDKESGGGSHGNAASSCSRFHYSYAGVHSESTHFSLVLLLDWAMAFILCPLTCPGECEGSTGKLECCLCLPSQWAVLTAAPHPYRWSQEAGRVGEGKIGKTGRPRPRQNSLSSLHFWSPVVMCL

SEQ ID NO: 2214 - protein, 345 aa, Homo sapiens
MLAARLVCLRTLPSRVFHPAFTKASPVVKNSITKNQWLLTPSREYATKTRIGIRRGRTGQELKEAALEPSMEKIFKIDQMGRWFVAGGAAVGLGALCYYGLGLSNEIGAIEKAVIWPQYVKDRIHSTYMYLAGSIGLTALSAIAISRTPVLMNFMMRGSWVTIGVTFAAMVGAGMLVRSIPYDQSPGPKHLAWLLHSGVMGAVVAPLTILGGPLLIRAAWYTAGIVGGLSTVAMCAPSEKFLNMGAPLGVGLGLVFVSSLGSMFLPPTTVAGATLYSVAMYGGLVLFSMFLLYDTQKVIKRAEVSPMYGVQKYDPINSMLSIYMDTLNIFMRVATMLATGGNRKK

SEQ ID NO: 2215 - protein, 145 aa, Homo sapiens
  MISC_FEATURE (98): Xaa equals any of the twenty naturally occurring L-amino acids
STTMLVEKSLSVILLVVALAMLIIDLRMKSFLAIPNLVIFAVLLFFSSLETPKNPIAFACFFICLITDPFLDIYFSGLSVTERWKPFLYRGRICRRLXVVFAGMIELTFFILSAFKLRDTHLWYFVIPGFSIFGIFWMICHIIFF

SEQ ID NO: 2216 - protein, 227 aa, Homo sapiens
  MISC_FEATURE (123): Xaa equals any of the twenty naturally occurring L-amino acids
  MISC_FEATURE (129): Xaa equals any of the twenty naturally occurring L-amino acids
  MISC_FEATURE (168): Xaa equals any of the twenty naturally occurring L-amino acids
MKKILEVVNQIQDEERMVQSQKSSSPLSSTRSKRSTLLPPEASEGSSSFLGKLMGFIATPFIKLFQLIYYLMVAILKNIVYFLWCVTKQVINGIESCLYRLGSATISYFMAIGEELVSIPWKXLKVVAXVIRALLRILCCLLKAICRVLSIPVRVLVDVATFPVYTMXAIPIVCKDIALGLGGTVSLLFDTAFGTLGGLFQVVFSVCKRIGYKVTFDNSGGVINSKN

SEQ ID NO: 2217 - protein, 100 aa, Homo sapiens
MEAVSQIAGFVTILGPSQDHYMLLVAPEIDFSDTPNVTIYLHQFPPNVTFQIQIQLLKPGHIFILCLVISPKSHPSPPPPGLSISKPIRDKFSNLSRTQT

SEQ ID NO: 2218 - protein, 188 aa, Homo sapiens
MIRYFTSNPASKVLCSPMLLSTFSHFSLFHMAANMYVLWSFSSSIVNILGQEQFMAVYLSAGVISNFVSYVGKVATGRYGPSLGASGAIMTVLAAVCTKIPEGRLAIIFLPMFTFTAGNALKAIIAMDTAGMILGWKFFDHAAHLGGALFGIWYVTYGHELIWKNREPLVKIWHEIRTNGPKKGGGSK

SEQ ID NO: 2219 - protein, 156 aa, Homo sapiens
  MISC_FEATURE (100): Xaa equals any of the twenty naturally occurring L-amino acids
  MISC_FEATURE (104): Xaa equals any of the twenty naturally occurring L-amino acids
MRRRFWGVFNCLCAGAFGALAAASAKLAFGSEVSMGLCVLGIIVMASTNSLMWTFFSRGLSFSMSSAIASVTVTFSNILSSAFLGLCAVWRVPGVLWWGXVFLXLCGTSPNPQEAPTHLEAPSTQAAVATTWLRRTSWKDHDGWAQLWDVKWELCS

SEQ ID NO: 2220 - protein, 129 aa, Homo sapiens
MLFYLSSQPDWQLDFFRVSFNGPVFFIIIFNDRAGFRMQALVSQAACRRSRYKLSVVYMVQGPLTHLMLVLLISLIFLSRGSGRAWAFSHSCFKTSDLLPCRNRWEVIEFLHYSNLHSHISLSVTKTFL

SEQ ID NO: 2221 - protein, 120 aa, Homo sapiens
  MISC_FEATURE (58): Xaa equals any of the twenty naturally occurring L-amino acids
MGLLALPFFAILVMDRGWPRGTWLPVTSGRLHAGQGRVTLPLAGGGMRLPRGTQVSLXLALYPVSFAVFMCSDALPLGASKLQCPLPPGRGDPQAPSAQRCTCLVALLLPGTVDLSVCLF

SEQ ID NO: 2222 - protein, 130 aa, Homo sapiens
  MISC_FEATURE (30): Xaa equals any of the twenty naturally occurring L-amino acids
MKKTEPSWPPVSPLCLSLMGCLGAACTAQXAFTVRSGSVGSVVPVLPAVPSGEALVALRWTKSSRKKRQRDASHSPPQTLGQAPLGPAACLRRWAQGGWQGVPAACFRTSQFFLPSLPCLQNHSPSPQGG

SEQ ID NO: 2223 - protein, 256 aa, Homo sapiens
  MISC_FEATURE (122): Xaa equals any of the twenty naturally occurring L-amino acids
  MISC_FEATURE (218): Xaa equals any of the twenty naturally occurring L-amino acids
  MISC_FEATURE (224): Xaa equals any of the twenty naturally occurring L-amino acids
  MISC_FEATURE (233): Xaa equals any of the twenty naturally occurring L-amino acids
  MISC_FEATURE (236): Xaa equals any of the twenty naturally occurring L-amino acids
  MISC_FEATURE (246): Xaa equals any of the twenty naturally occurring L-amino acids
  MISC_FEATURE (256): Xaa equals any of the twenty naturally occurring L-amino acids
MLKWMYIPASNNNTPIHGFYIYYRPTDSDNDSDYKKDMVEGDKYWHSISHLQPETSYDIKMQCFNEGGESEFSNVMICETKARKSSGQPGRLPPPTLAPPQPPLPETIERPVGTGAMVARSXDLPYLIVGVVLGSIVLIIVTFIPFCLWRAWSKQKHTTDLGFPRSALPPSCPYTMVPLGGLPGHQASGQPYLSGISGRACANGIHMNRGCPSAAVGXPGMKPXQHCPGELQXVAXSWVWAAVWDXQKDCWAAWGX

SEQ ID NO: 2224 - protein, 144 aa, Homo sapiens
  MISC_FEATURE (89): Xaa equals any of the twenty naturally occurring L-amino acids
  MISC_FEATURE (131): Xaa equals any of the twenty naturally occurring L-amino acids
MLFVVMMSPDIVMAISLLVLFMLLGIQLGFWSLLFSHITFCLPFVVVTVYSRLKGFDVRMLEAAKDLGASEFTILRKIILPLAMPAVAXGWVLSFTLSMDDVVVSSFVTGPSYEILPLKIYSMVKVGVSGXLTRWQPYYWCCRW

SEQ ID NO: 2225 - protein, 183 aa, Homo sapiens
  MISC_FEATURE (7): Xaa equals any of the twenty naturally occurring L-amino acids
MTAQGAXLANRGRRFKWAIELSGPGGGSRGRSDRGSGQGDSLYPVGYLDKQVPDTSVQETDRILVEKRCWDIALGPLKQIPMNLFIMYMAGNTISIFPTMMVCMMAWRPIQALMAISATFKMLESSSQKFLQGLVYLIGNLMGLALAVYKCQSMGLLPTHASDWLAFIEPPERMEFSGGGLLL

SEQ ID NO: 2226 - protein, 153 aa, Homo sapiens
  MISC_FEATURE (124): Xaa equals any of the twenty naturally occurring L-amino acids
  MISC_FEATURE (132): Xaa equals any of the twenty naturally occurring L-amino acids
MEEGGNLGGLIKMVHLLVLSGAWGMQMWVTFVSGFLLFRSLPRHTFGLVQSKLFPFYFHISMGCAFINLCILASQHAWAQLTFWEASQLYLLFLSLTLATVNARWLEPRTTAAMWALQTVEKEXGLGGEVPXSHQGPDPYRQLREKDPKYSAL

SEQ ID NO: 2227 - protein, 206 aa, Homo sapiens
  MISC_FEATURE (118): Xaa equals any of the twenty naturally occurring L-amino acids
  MISC_FEATURE (190): Xaa equals any of the twenty naturally occurring L-amino acids
MICDTDPELGGAVQLMGLLRTLVDPENMLATANKTEKTEFLGFFYKHCMHVLTAPLLANTTEDKPSKDDFQTAQLLALVLELLTFCVEHHTYHIKNYIINKDILRRVLVLMASKHAFXALCALRFKRKIIGLKDEFYNRYIMKSFLFEPVVKAFLNNGSRYNLMNSAIIEMVEFIRVEDIKSLTAHVIEXYWKALEDVDYVRHLKD

SEQ ID NO: 2228 - protein, 277 aa, Homo sapiens
MNQTQSLPGVAQRSGGERHRENSPSPGGKEAETRQPVVILLGWGGCKDKNLAKYSAIYHKRGCIVIRYTAPWHMVFFSESLGIPSLRVLAQKLLELLFDYEIEKEPLLFHVFSNGGVMLYRYVLELLQTRRFCRLRVVGTIFDSAPGDSNLVGALRALAAILERRAAMLRLLLLVAFALVVVLFHVLLAPITALFHTHFYDRLQDAGSRWPELYLYSRADEVVLARDIERMVEARLARRVLARSVDFVSSAHVSHLRDYPTYYTSLCVDFMRNCVRC

SEQ ID NO: 2229 - protein, 128 aa, Homo sapiens
  MISC_FEATURE (50): Xaa equals any of the twenty naturally occurring L-amino acids
  MISC_FEATURE (87): Xaa equals any of the twenty naturally occurring L-amino acids
MASHVECRPLGVFECELCTLTAPYSYVGQKPPNTQSMVLLEESYVMKDPXTSDKDRFLVLGSCCSLCSRLVCVGPECSLFYSRDSAXLVSGRTSMLFLRKFGKTWRKGKLHQRGPPASPVLGRECNWG

SEQ ID NO: 2230 - protein, 578 aa, Homo sapiens
  MISC_FEATURE (117): Xaa equals any of the twenty naturally occurring L-amino acids
  MISC_FEATURE (124): Xaa equals any of the twenty naturally occurring L-amino acids
MEPDVPLPQTLLSHPSYLKVFVPDYTRELLLELRDCVSNGSLGCPVRLTVGPVTLPSNFQKVLTCTGAPWPCRLLLPSPPWDRWLQVTAESLVGPLGTVAFSAVAALTACRPRSVTXQPLLQSXQNQSFNASSGLLSPSPDHQDLGRSGRVDRSPFCLTNYPVTREDMDVVSVHFQPLDRVSVRVCSDTPSVMRLRLNTGMDSGGSLTISLRANKTEMRNETVVVACVNAASPFLGFNTSLNCTTAFFQGYPLSLSAWSRRANLIIPYPETDNWYLSLQLMCPENAEDCEQAVVHVETTLYLVPCLNDCGPYGQCLLLRRHSYLYASCSCKAGWRGWSCTDNSTAQTVAQQRAATLLLTLSNLMFLAPIAVSVRRFFLVEASVYAYTMFFSTFYHACDQPGEAVLCILSYDTLQYCDFLGSGAAIWVTILCMARLKTVLKYVLFLLGTLVIAMSLQLDRRGMWNMLGPCLFAFVIMASMWAYRCGHRRQCYPTSWQRWAFYLLPGVSMASVGIAIYTSMMTSDNYYYTHSIWHILLAGSAALLLPPPDQPAEPWACSQKFPCHYQICKNDREELYAVT

SEQ ID NO: 2231 - protein, 179 aa, Homo sapiens [sequence omitted]

SEQ ID NO: 2232 - protein, 116 aa, Homo sapiens [sequence omitted]

SEQ ID NO: 2233 - protein, 192 aa, Homo sapiens
  MISC_FEATURE (18): Xaa equals any of the twenty naturally occurring L-amino acids
  MISC_FEATURE (43): Xaa equals any of the twenty naturally occurring L-amino acids
  MISC_FEATURE (50): Xaa equals any of the twenty naturally occurring L-amino acids
  MISC_FEATURE (112): Xaa equals any of the twenty naturally occurring L-amino acids
  MISC_FEATURE (118): Xaa equals any of the twenty naturally occurring L-amino acids
MDAPRLPVRPGVLLPNWXCSLSTQMIALLSVGKDCKSYCCDGXTPYCCSXYAYIGNILSGTAIAGIVFGIIFIMGVIAGIAICICMCMKNTGRPRGHPQDDSHQHRLLLSWXTTLRSXPRDGILCRLASSILPHPTGSSTAFSTPSLSWKRKEIIYLPEQNMCQWAILPGIKCLYSETGRKELLQGILFGVR

SEQ ID NO: 2234 - protein, 182 aa, Homo sapiens
MRIRYGWELALAALLVIEIVAFGAINPRMLDLNMLLFSTSDFICIGIVALPLTMVIVSGGIDISFGSTIGLCAIALGVLFQSGVPMPLAILLTLLLGALCGLINAGLIIYTKVNPLVITLGTLYLFAGSALLLSGMAGATGYEGIGGFPMAFTDFANLDVLGLPVPLIIFLIMSPRFLALAA

SEQ ID NO: 2235 - protein, 119 aa, Homo sapiens [sequence omitted]

SEQ ID NO: 2236 - protein, 221 aa, Homo sapiens [sequence omitted]

SEQ ID NO: 2237 - protein, 103 aa, Homo sapiens
MINFTSGALSGSFAAVATLPFDVVKTQKQTQLWTYESHKISMPLHMSTWIIMKNIVAKNGFSGLFSGLIPRLIKIAPACAIMISTYEFGKAFFQKQNVRRQQY

SEQ ID NO: 2238 - protein, 486 aa, Homo sapiens
  MISC_FEATURE (276): Xaa equals any of the twenty naturally occurring L-amino acids
MRRLVHDLLPPEVCSLLNPAAIYANNEISLRDVEVYGFDYDYTLAQYADALHPEIFSTARDILIEHYKYPEGIRKYDYNPSFAIRGLHYDIQKSLLMKIDAFHYVQLGTAYRGLQPVPDEEVIELYGGTQHIPLYQMSGFYGKGPSIKQFMDIFSLPEMALLSCVVDYFLGHSLEFDQAHLYKDVTDAIRDVHVKGLMYQWIEQDMEKYILRGDETFAVLSRLVAHGKQLFLITNSPFSFVDKGMRHMVGPDWRQLFDVVIVQADKPSFFTDRRKXFRKLDEKGSLQWDRITRLEKGKIYRQGNLFDFLRLTEWRGPRVLYFGDHLYSDLADLMLRHGWRTGAIIPELEREIRIINTEQYMHSLTWQQALTGLLERMQTYQDAESRQVLAAWMKERQELRCITKALFNAQFGSIFRTFHNPTYFSRRLVRFSDLYMASLSCLLNYRVDFTFYPRRTPLQHEAPLWMDQLCTGCMKTPFLGDMAHIR

SEQ ID NO: 2239 - protein, 146 aa, Homo sapiens
  MISC_FEATURE (14): Xaa equals any of the twenty naturally occurring L-amino acids
MMPSVLLRQIRALXRRVPAPCQAPTFHRPPLMSQAATNTVIVTNSENARSWIKDSQTHQWRLGEPIELRRAMNVIHGDGGGLSGGAAAGVTVGVTTILAVVITLAIYGTRKFKKKAYQAIEERQSLVPGTAATGDTTYQEQGQSPA

SEQ ID NO: 2240 - protein, 188 aa, Homo sapiens
  MISC_FEATURE (10): Xaa equals any of the twenty naturally occurring L-amino acids
  MISC_FEATURE (181): Xaa equals any of the twenty naturally occurring L-amino acids
  MISC_FEATURE (186): Xaa equals any of the twenty naturally occurring L-amino acids
MDGTETRQRXLDSCGKPGELGLPHPLSTGGLPVASEDGALRAPESQSVTPKPLETEPSRETAWSIGLQVTVPFMFAGLGLSWAGMLLDYFQHWPVFVEVKDLLTLVPPLVGLKGNLEMTLASRLSTAANTGQIDDPQEQHRVISSNLALIQVQATVVGLLAAVAALLLGVVSRRGSGCRQXGVLCXSS

SEQ ID NO: 2241 - protein, 409 aa, Homo sapiens
MVILEVACEPIRRYLRTREDTVRQIVAGLTGDSDGTGDLAVELSKTDPASLETGQDSEDDSGEPEDWVPDPVDADPGKSSSKRRSSDIISLLVSIYGSKDLFINEYRSLLADRLLHQFSFSPEREIRNVELLKLRFGEAPMHFCEVMLKDMADSRRINANIREEDEKRPAEEQPPFGVYAVILSSEFWPPFKDEKLEVPEDIRAALEAYCKKYEQLKAMRTLSWKHTLGLVTMDVELADRTLSVAVTPVQAVILLYFQDQASWTLEELSKAVKMPVALLRRRMSVWLQQGVLREEPPGTFSVIEEERPQDRDNMVLIDSDDESDSGMASQADQKEEELLLFWTYIQAMLTNLESLSLDRIYNMLRMFVVTGPALAEIDLQELQGYLQKKVRDQQLVYSAGVYRLPKNCS

SEQ ID NO: 2242 - protein, 101 aa, Homo sapiens
MKTISPFPALNVLLALGAHHATEENVETQKVRTDFQALATDVTVFNFNNYTYLYISEKFLIFLCPLFISFKMIFSALRFASRKSTSLHLKALKTRDTLYTF

SEQ ID NO: 2243 - protein, 128 aa, Homo sapiens
  MISC_FEATURE (60): Xaa equals any of the twenty naturally occurring L-amino acids
  MISC_FEATURE (77): Xaa equals any of the twenty naturally occurring L-amino acids
  MISC_FEATURE (110): Xaa equals any of the twenty naturally occurring L-amino acids
  MISC_FEATURE (112): Xaa equals any of the twenty naturally occurring L-amino acids
  MISC_FEATURE (117): Xaa equals any of the twenty naturally occurring L-amino acids
  MISC_FEATURE (121): Xaa equals any of the twenty naturally occurring L-amino acids
MLQGHRPRVWQQTGAAVVTGAWSLLDMTSCGHAPTVSLCASRLCRCLCTRSRSTSFISTXMLGLRQKLTTSLTSAAXLTCVLLLSMTGMTTSSSRAFCGRPEERYYHICXKXANVRXVQGXDLKIPSI

SEQ ID NO: 2244 - protein, 236 aa, Homo sapiens
  MISC_FEATURE (95): Xaa equals any of the twenty naturally occurring L-amino acids
  MISC_FEATURE (212): Xaa equals any of the twenty naturally occurring L-amino acids
MKRSGNPGAEVTNSSVAGPDCCGGLGNIDFRQADFCVMTRLLGYVDPLDPSFVAAVITITFNPLYWNVVARWEHKTRKLSRAFGSPYLACYSLSXTILLLNFLRSHCFTQAMLSQPRMESLDTPAAYSLGLALLGLGVVLVLSSFFALGFAGTFLGDYFGILKEARVTVFPFNILDNPMYWGSTANYLGWAIMHASPTGLLLTVLVALTYIXALLYEEPFTAEIYRQKASGSHKRS

SEQ ID NO: 2245 - protein, 176 aa, Homo sapiens
  MISC_FEATURE (9): Xaa equals any of the twenty naturally occurring L-amino acids
  MISC_FEATURE (164): Xaa equals any of the twenty naturally occurring L-amino acids
MAWSSPAAXLRFLFRQLLLATQGGPKGKEQSVLAPQPGPGPPFTLKPRVFLHLYISNTPKGAARDIYLPPTSEGGLPHSPPMRLQAHVLGQLKPVCYVAPSLCDTHVGCLSASDKLARWAVLGLGGALLAHLVSPLYSTSLILVPPWGLPPVSARPPFSGPFTXRPGLWGSPTSWP

SEQ ID NO: 2246 - protein, 107 aa, Homo sapiens
MFDAEILGFSTPPGRLSMMSFILNALTCALGLLYFIRRGKQCLDFTVTVHFFHLLGCWFYSSRFPSALTWWLVQAVCIALMAVIGEYLCMRTELKEIPLNSAPKSNV

SEQ ID NO: 2247 - protein, 144 aa, Homo sapiens
  MISC_FEATURE (120): Xaa equals any of the twenty naturally occurring L-amino acids
  MISC_FEATURE (124): Xaa equals any of the twenty naturally occurring L-amino acids
  MISC_FEATURE (134): Xaa equals any of the twenty naturally occurring L-amino acids
  MISC_FEATURE (142): Xaa equals any of the twenty naturally occurring L-amino acids
MDLQKKQSNLATGLSKAKSQVFKNQDPVLPPRPKPGHPLYSKYMLSVPHGIANEDIVSQNPGELSCKRGDVLVMLKQTENNYLECQKGEDTGRVHLSQMKIITPLDEHLRSRPNDPSHAXEACXTVVLLMLSFXMIFPAEQXDD

SEQ ID NO: 2248 - protein, 127 aa, Homo sapiens
MLILGKMIRWEDYVLRLWRKYSNKLQILNSIFPGIGCPVPRIPAEANPLADHVSATRILCGALVFPTIATIVGKLMFSSVNSNLQRTILGGIAFVAIKGAFKVYFKQQQYLRQAHRKILNYPEQEEA

SEQ ID NO: 2249 - protein, 112 aa, Homo sapiens [sequence omitted]

SEQ ID NO: 2250 - protein, 115 aa, Homo sapiens
  MISC_FEATURE (13): Xaa equals any of the twenty naturally occurring L-amino acids
  MISC_FEATURE (65): Xaa equals any of the twenty naturally occurring L-amino acids
  MISC_FEATURE (90): Xaa equals any of the twenty naturally occurring L-amino acids
MDRIRHILAALHXCPKIDVVRVGSHTACSVGNLFVIIPSALPENNAASVCRPIGLMNFSANRFNXPKPPRRIRARRDSCCLPVIFIFILXVVFILIFIDPGIIATGTITGEGENV

SEQ ID NO: 2251 - protein, 125 aa, Homo sapiens
  MISC_FEATURE (93): Xaa equals any of the twenty naturally occurring L-amino acids
  MISC_FEATURE (102): Xaa equals any of the twenty naturally occurring L-amino acids
  MISC_FEATURE (110): Xaa equals any of the twenty naturally occurring L-amino acids
MILTYYEGEEVNAGRIGLTLVVAGMVGSILCGLWLDYTKTYNFFMTGYLPLGFEFAVEITYPESEGTSSGLLNASAQIFGILFTLAQGKLTSXYGPKAGNIXLCVWMFIXIILTALIKSDLRDTT

SEQ ID NO: 2252 - protein, 385 aa, Homo sapiens
  MISC_FEATURE (75): Xaa equals any of the twenty naturally occurring L-amino acids
MAEDACRISAHENSEASFPLAVVSPLGKEQLPTTSRLMALERMGIVSDYEKIRTFAVAIVGVGGVGSVTAEMLTXCGIGKLLLFDYDKVELANMNRLFFQPHQAGLSKVQAAEHTLRNINPDVLFEVHNYNITTVENFQHFMDRISNGGLEEGKPVDLVLSCVDNFEARMTINTACNELGQTWMESGVSENAVSGHIQLIIPGESACFACAPPLVVAANIDEKTLKREGVCAASLPTTMGVVAGILVQNVLKFLLNFGTVSFYLGYNAMQDFFPTMSMKPNPQCDDRNCRKQQEEYKKKVAALPKQEVIQEEEEIIHEDNEWGIELVSEVSEEELKNFSGPVPDLPEGITVAYTIPKKQEDSVTELTVEDSGESLEDLMAKMKNM

SEQ ID NO: 2253 - protein, 270 aa, Homo sapiens
MQLAARIRPRDLEDFFSAVGKVRDVRIISDRNSRRSKGIAYVEFCEIQSVPLAIGLTGQRLLGVPIIVQASQAEKNRLAAMANNLQKGNGGPMRLYVGSLHFNITEDMLRGIFEPFGKIDNIVLMKDSDTGRSKGYGFITFSDSECARRALEQLNGFELAGRPMRVGHVTERLDGGTDITFPDGDQELDLGSAGGRFQLMAKLAEGAGIQLPSTAAAAAAAAAAQAAALQLNGAVPLGALNPAALTALSPALNLASQCFQLSSLFTPQTM

SEQ ID NO: 2254 - protein, 149 aa, Homo sapiens
MSFSAYQTAFICLGLLVQQIIFFLGTTALAFLVLMPVLHGRNLLLFRSLESSWPFWLTLALAVILQNMAAHWVFLETHDGHPQLTNRRVLYAATFLLFPLNVLVGAMVATWRVLLSALYNAIHLGQMDLSLLPPRAALSTPATTRTETS

SEQ ID NO: 2255 - protein, 140 aa, Homo sapiens
MAAYAMAEAFMSTGVGASLILIALKVGITAKTVAVIGAIVTSILSIATGTSWGTFAACAPIFLWLNHIVGGNILLTTAAIAGGACFGDNIGLISDTTIVSSGIQKVEVVRRIRHQGVWSALVLLSGIIVFAIVGFTWIYP

SEQ ID NO: 2256 - protein, 175 aa, Homo sapiens
MRQKKIREDHKSYYAINTVYVYGQEKYLLLHDISESEFLTEAEIICDVVCLVYDVSNPKSFEYCARIFKQHFMDSRIPCLIVAAKSDLHEVKQEYSISPTDFCRKHKMPPPQAFTCNTADAPSKDIFVKLTTMAMYPHVTQADLKSSTFWLRASFGATVFAVLGFAMYKALLKQR

SEQ ID NO: 2257 - protein, 315 aa, Homo sapiens
MDFGVLVPTAYMFWGLLSCSLPTFCVMSVPGRWPPARWRLSILAVSIMPCVCLASLLQILWTRSSSPAHHLASPFLCVQIWQCGGVLETHPCSHVGHVFPKQAPYSRNKALANSVRAAEVWMDEFKELYYHRNPRARLEPFGDVTERKQLRDKLQCKDFKWFLETVYPELHVPEDRPGFFGMLQNKGLTDYCFDYNPPDENQIVGHQVILYLCHGMGQNQFFEYTSQKEIRYNTHQPEGCIAVEAGMDTLIMHLCEETAPENQKFILQEDGSLFHEQSKKCVQAARKESSDSFVPLLRDCTNSDHQKWFFKERML

SEQ ID NO: 2258 - protein, 200 aa, Homo sapiens [sequence omitted]

SEQ ID NO: 2259 - protein, 240 aa, Homo sapiens
  MISC_FEATURE (199): Xaa equals any of the twenty naturally occurring L-amino acids
MPSSPSTKSDGHHQYKDIPNPLIAGISNVLNTPSSAAFPTASAGSSSVKSQPGLLGMPLNQILNQHNAASFPASSLLSAAAKAQLANQNKLAGNNSSSSSNSGAVAGSGNTEGHSTLNTMFPPTANMLLPTGEGQSGRAALRDKLMSQQKDALRKRKQPPTTVLSLLRQSQMDSSAVPKPGPDLLRKQGQGSFPISSMXQLLQSMSCQSSHLSSNSTPGCGASNTALLALLTSCILQIPV

SEQ ID NO: 2260 - protein, 291 aa, Homo sapiens
  MISC_FEATURE (197): Xaa equals any of the twenty naturally occurring L-amino acids
  MISC_FEATURE (200): Xaa equals any of the twenty naturally occurring L-amino acids
MDSPWDELALAFSRTSMFPFFDIAHYLVSVMAVKRQPGAAALAWKNPISSWFTAMLHCFGGGILSCLLLAEPPLKFLANHTNILLASSIWYITFFCPHDLVSQGYSYLPVQLLASGMKEVTRTWKIVGGVTHANSYYKNGWIVMIAIGWARGAGGTIITNFERLVKGDWKPEGDEWLKMSYPAKVTLLGSVIFTFQXTQXLAISKHNLMFLYTIFIVATKITMMTTQTSTMTFAPFEDTLSWMLFGWQQPFSSCEKKSEAKSPSNGVGSLASKPVDVASDNVKKKHTKKNE

SEQ ID NO: 2261 - protein, 133 aa, Homo sapiens
MQSGGGVKTDDTSTLNSLCGYAWVYVWEEKQRCRLSSFFSSSASIPGLLPSHTLDLVQNVGVVLDEALGWGRERELCVKCLLEMHCGVFSCMGNHLCQAFPHFPYLSHLVSCLCFQLCVILFASCTKLIFSKV

SEQ ID NO: 2262 - protein, 259 aa, Homo sapiens
MLPSTSVNSLVQGNGVLNSRDAARHTAGAKRYKYLRRLFRFRQMDFEFAAWQMLYLFTSPQRVYRNFHYRKQTKDQWARDDPAFLVLLSIWLCVSTIGFGFVLDMGFFETIKLLLWVVLIDCVGVGLLIATLMWFISNKYLVKRQSRDYDVEWGYAFDVHLNAFYPLLVILHFIQLFFINHVILTDTFIGYLVGNTLWLVAVGYYIYVTFLGYSALPFLKNTVILLYPFAPLILLYGLSLALGWNFTHTLCSFYKYRVK

SEQ ID NO: 2263 - protein, 170 aa, Homo sapiens
  MISC_FEATURE (161): Xaa equals any of the twenty naturally occurring L-amino acids
MAGEGDQQDAAHNMGNHLPLLPAESEEEDEMEVEDQDSKEAKKPNIINFDTSLPTSHTYLGADMEEFHGRTLHDDDSCQVIPVLPQVMMILIPGQTLPLQLFHPQEVSMVRNLIQKDRTFAVLAYSNVQEREAQFGTTAEIYAYREEQDFGIEIVKVKAIXKTKVQSPLS

SEQ ID NO: 2264 - protein, 330 aa, Homo sapiens
  MISC_FEATURE (29): Xaa equals any of the twenty naturally occurring L-amino acids
  MISC_FEATURE (39): Xaa equals any of the twenty naturally occurring L-amino acids
  MISC_FEATURE (114): Xaa equals any of the twenty naturally occurring L-amino acids
  MISC_FEATURE (144): Xaa equals any of the twenty naturally occurring L-amino acids
  MISC_FEATURE (151): Xaa equals any of the twenty naturally occurring L-amino acids
MIMMFKIPPSDGLLILPCYGSMTTDQQRXIFLPPPPGIXKCVISTNISATSLTIDGIRYVVDGGFVKQLNHNPRLGLDILEVVPISKSEALQRSGRAGRTSSGKCFRIYSKDFXNQCMPDHVIPEIKRTSLTSVVLTLKCLAIXDVIRFPXLDPPNERLILEALKQLYQCDAIDRSGHVTRLGLSMVEFPLPPHLTCAVIKAASLDCEDLLLPIAAMLSVENVFIRPVDPEYQKEAEQRHRELAAKAGGFNDFATLAVIFEQCKSSGAPASWCQKHWIHWRCLFSAFRVEAQLRELIRKLKQQSDSQKRPLKALNMKYYEDVFVRAISKM

SEQ ID NO: 2265 - protein, 239 aa, Homo sapiens
  MISC_FEATURE (194): Xaa equals any of the twenty naturally occurring L-amino acids
MPLGHIMRLDLEKIALEYIVPCLHEVGFCYLDNFLGEVVGDCVLERVKQLHCTGALRDGQLAGPRAGVSKRHLRGDQITWIGGNEEGCEAISFLLSLIDRLVLYCGSRLGKYYVKERSKAMVACYPGNGTGYVRHVDNPNGDGRCITCIYYLNKNWDAKLHGGILRIFPEGKSFIADVEPIFDRLLFFWSDRRXPHEVQPSYATRYAMTVWYFDAEERAEAKKKFRNLTRKTESALTED

SEQ ID NO: 2266 - protein, 418 aa, Homo sapiens
  MISC_FEATURE (237): Xaa equals any of the twenty naturally occurring L-amino acids
MRHAANMAPVEHVVADAGAFLRHAALQDIGKNIYTIREVVTEIRDKATRRRLAVLPYELRFKEPLPEYVRLVTEFSKKTGDYPSLSATDIQVLALTYQLEAEFVGVSHLKQEPQKVKVSSSIQHPETPLHISGFHLPYKPKPPQETEKGHSACEPENLEFSSFMFWRNPLPNIDHELQELLIDRGEDVPSEEEEEEENGFEDRKDDSDDDGGGWITPSNIKQIQQELEQCDVPEDVXVGCLTTDFAMQNVLLQMGLHVLAVNGMLIREARSYILRCHGCFKTTSDMSRVFCSHCGNKTLKKVSVTVSDDGTLHMHFSRNPKVLNPRGLRYSLPTPKGGKYAINPHLTEDQRFPQLRLSQKARQKTNVFAPDYIAGVSPFVENDISSRSATLQVRDSTLGAGRRRLNPNASRKKFVKKR

SEQ ID NO: 2267 - protein, 105 aa, Homo sapiens
  MISC_FEATURE (9): Xaa equals any of the twenty naturally occurring L-amino acids
MVSVGGDVXLGVRRPHGPEAGPGPPRVAVLLPVGGCGLCCHPRVCTPFFRSLWTSVVLYFGASGEVFNFLVIDDCQVLKYQSFFVLFLNKYLSNFQKKKKKKKKK

SEQ ID NO: 2268 - protein, 115 aa, Homo sapiens
  MISC_FEATURE (4): Xaa equals any of the twenty naturally occurring L-amino acids
  MISC_FEATURE (8): Xaa equals any of the twenty naturally occurring L-amino acids
  MISC_FEATURE (90): Xaa equals any of the twenty naturally occurring L-amino acids
  MISC_FEATURE (106): Xaa equals any of the twenty naturally occurring L-amino acids
MKDXALKXKVSTATVSRALMNPDKVSQATRNRVEKAAREVGYLPQPMGRNVKRNESRTILVIVPDICDPFFSEIIRGIEVTAANHGYLVXIGDCAHQNQQEKTFIXLIITKQIDW

SEQ ID NO: 2269 - protein, 253 aa, Homo sapiens
MTPSAATPAPASGIGCGNPRGWAWQGGTCSPDALTPPRRFFYLYHFAFYAYHYRFNGQYSSLALVTSWLFIQHSMIYFFHHYELPAILQQVRIQEMLLQAPPLGPGTPTALPDDMNNNSGAPATAPDSAGQPPALGPVSPGASGSPGPVAAAPSSLVAAAASVAAAAGGDLGWMAETAAIITDASFLSGLSASLLERRPASPLGPAGGLPHAPQDSVPPSDSAASDTTPLGAAVGGPSPASMAPTEAPSEVGS

SEQ ID NO: 2270 - protein, 441 aa, Homo sapiens
  MISC_FEATURE (111): Xaa equals any of the twenty naturally occurring L-amino acids
MLTVLHETFSQHTFLMNGLIQGVKGLLSFLSAPLIGALSDVWGRKPFLLGTVFFTCFPIPLMRISPWWYFAMISVSGVFSVTFSVIFAYVADVTQEHERSTAYGWVSATFXASLVSSPAIGAYLSASYGDSLVVLVATVVALLDICFILVAVPESLPEKMRPVSWGAQISWKQADPFASLKKVGKDSTVLLICITVFLSYLPEAGQYSSFFLYLRQVIGFGSVKIAAFIAMVGILSIVAQTAFLSILMRSLGNKNTVLLGLGFQMLQLAWYGFGSQAWMMWAAGTVAAMSSITFPAISALVSRNAESDQQGVAQGIITGIRGLCNGLGPALYGFIFYMFHVELTELGPKLNSNNVPLQGAVIPGPPFLFGACIVLMSFLVALFIPEYSKASGVQKHSNSSSGSLTNTPERGSDEDIEPLLQDSSIWELSSFEEPGNQCTEL

SEQ ID NO: 2271 - protein, 128 aa, Homo sapiens
  MISC_FEATURE (26): Xaa equals any of the twenty naturally occurring L-amino acids
MSRQKETLQSAFPSMCALCPSEPADXRGGKDTVLNEQNLQDTQSCLFATWPYACPVFSLKAFTHARAVTWNVLSITPAVMPSTELDGRPLHGSLKRSHPSNWVCHRHTGSCLPVLPVVIVMRIVVLHP

SEQ ID NO: 2272 - protein, 112 aa, Homo sapiens
  MISC_FEATURE (28): Xaa equals any of the twenty naturally occurring L-amino acids
MGSRLSQPFESYITAPPGTAAAPAKPAXPATPGAPTSPAEHRLLKTCWSCRVLSGLGLMGAGGYVYWVARKPMKMGYPPSPWTITQMVIGLSIATWGIVVMADPKGKAYRVV

SEQ ID NO: 2273 - protein, 157 aa, Homo sapiens
MKLLPVDCERKTDEFCQAKQKAALLELLHELYNFLAIQAGNFECGNPENLKSKCIPVMEAQEYIANVTSSSSAKFEAALTWILSSNKDVGIWLKGEDQSELVTTVDKVVCLESAHPRMGVGCRLSRALLTAVTNVLIFFWCLAFLWGLLILLKYRWR

SEQ ID NO: 2274 - protein, 309 aa, Homo sapiens [sequence omitted]

SEQ ID NO: 2275 - protein, 114 aa, Homo sapiens
MIPYPLEKGHLFYPYPICTETADRELLPSFHEVSVYPKKELPFFILFTAGLCSFTAMLALLTHQFPELMGVFAKAMIDIFCSAEFRDWNCKSIFMRVEDELEIPPAPQSQHFQN

SEQ ID NO: 2276 - protein, 141 aa, Homo sapiens
  MISC_FEATURE (73): Xaa equals any of the twenty naturally occurring L-amino acids
MSGWSLSHSPLIGQWPVTDNWLGSCLHAPEGLLGGCHTVWLLSGDRLLVNGVLCLTSLIPALPTHRRACCPHXPCPRHPLHPHLLPSWAAGAYALSTFLLLIPTVRETLMWTRSWRTVLTGSSPGCQKTRDLPRQLLMMAA

SEQ ID NO: 2277 - protein, 131 aa, Homo sapiens [sequence omitted]

SEQ ID NO: 2278 - protein, 110 aa, Homo sapiens
MPFLQDFFVISVHMKMLTLNINTWRPCPVALPWLPAWSVFPCGFTCGPAVATSMVCVLVDSLQLSDASFCHNHLFPDTIVLILFQNCKIISSLKCKGCFCSVSVFFEIKL

SEQ ID NO: 2279 - protein, 128 aa, Homo sapiens
  MISC_FEATURE (12): Xaa equals any of the twenty naturally occurring L-amino acids
MEWIVLTHTLRXRARPEERCCCGGIFPRGSLPVLLGDGCWVPWATGESVRGWRRWPFLGCFLGNELYISWLDFVKSVFKIPHISVFLLEHLFLGLLCTAQVWGVLVIDCFRSRCVWGTALAASEVCVG

SEQ ID NO: 2280 - protein, 105 aa, Homo sapiens
MAVSSQQGEIMESRIFFQGSHAHFPTCMNVDTAATVLAVNVNLASNHCSQGNVPIRRRLSGTLILTGRWDILRDPEAGCHLLNFPEGCLGICFLFILELFFLFMG

SEQ ID NO: 2281 - protein, 285 aa, Homo sapiens
  MISC_FEATURE (112): Xaa equals any of the twenty naturally occurring L-amino acids
MAPKPGAEWSTALSHLVLGVVSLHAAVSTAEASRGAAAGFLLQVLAATTTLAPGLSTHEDCLAGAWVATVIGLPLLAFDFHWVNGDRSSANLLLGGGMVLAVAGGHLGPEAXCGWSGNAVGGRSDHPHCSCLHGQHLWDVGGGDAGCGRPPEPAGGGQAAAATEGGCLSLGLGCRQLGLLPGPAYTAPPVGVTVGYSQAGFLPCRTLSLPPACSWRLLPRGRLFCLLKWVCCTLTGQGQSLGAVLWPRVGTCLDQNERDRVPDTFGGPDSGLDTVVDPEKRPSLQ

SEQ ID NO: 2282 - protein, 217 aa, Homo sapiens
MENLFEKNKIRASISYKWTPEGRRLVTGASSGEFTLWNGLTFNFETILQAHDSPVRAMTWSHNDMWMLTADHGGYVKYWQSNMNNVKMFQAHKEAIREARFIHNIPFSVVPIVMVKLFSKCILGAEMHGLCQFLGNFLHPINTIFFFVFTHSPFCWHLSEVVLSRYQPLQYVRDVLSAAFCTGFLFSFMINNVYTLFLFIIYCVRQEYFIPNKEFSL

SEQ ID NO: 2283 - protein, 169 aa, Homo sapiens
MDWQSIKIQELMSDDQREAGRIPRTIECELVHDLVDSCVPGDTVTITGIVKVSNAEEGSRNKNDKCMFLLYIEANSISNSKGQKTKSSEDGCKHGMLMEFSLKDLYAIQEIQAEENLFKLIVNSLCPVIFGHELVKAGLALALFGGSQKYADDKNRIPIRGDPHILVGF

SEQ ID NO: 2284 - protein, 118 aa, Homo sapiens
MQKFLGSFFIGWDLDLYHEESDQKAQVNTSDLNEELGQVEYVFTDKTGTLTENEMQFRECSINGMKYQEINGRLVPEDQHQTLQKETYLILVVYPILTTYPILQPVPLSEPVLKMKLN

SEQ ID NO: 2285 - protein, 172 aa, Homo sapiens
  MISC_FEATURE (131): Xaa equals any of the twenty naturally occurring L-amino acids
  MISC_FEATURE (159): Xaa equals any of the twenty naturally occurring L-amino acids
  MISC_FEATURE (167): Xaa equals any of the twenty naturally occurring L-amino acids
MFILSLSFLTVFIFAFVITHVILRSQQTGFLNALKDSPASVLEAVVCFFSVWSIVGLSGFHTYLISSNQTTNEDIKGSWSNKRGKENYNPYSYGNILPTAVLPVWAHLTKPDRQKRVHPARHAAASSTLQXHHHVRGHASQMTWVQHAPVQSEPSFTSXELHLPGEXWAWGK

SEQ ID NO: 2286 - protein, 143 aa, Homo sapiens
  MISC_FEATURE (18): Xaa equals any of the twenty naturally occurring L-amino acids
MSTWFLLVSTFSMLPLLXKDELLMPSVVTTMAFFIACVTSFSIFEKTSEEELQLKSFSISVRKYLPCFTFLSRIIQYLFLISVITMVLLTLMTVTLDPPQKLPDLFSVLVCFVSCLNFLFFLVYFNIIIMWDSKSGRNQKKIS

SEQ ID NO: 2287 - protein, 268 aa, Homo sapiens
  MISC_FEATURE (229): Xaa equals any of the twenty naturally occurring L-amino acids
  MISC_FEATURE (234): Xaa equals any of the twenty naturally occurring L-amino acids
  MISC_FEATURE (237): Xaa equals any of the twenty naturally occurring L-amino acids
  MISC_FEATURE (245): Xaa equals any of the twenty naturally occurring L-amino acids
  MISC_FEATURE (252): Xaa equals any of the twenty naturally occurring L-amino acids
  MISC_FEATURE (258): Xaa equals any of the twenty naturally occurring L-amino acids
  MISC_FEATURE (264): Xaa equals any of the twenty naturally occurring L-amino acids
MLLKIKAVRAAKFWKICPMEHILVRLETDSRPVSRRLVSLIFNSFLPVNQPEEVWCERCVTLVQMNHAAARRFYQYAHEHTACTNIAKLIHVIRHCLNACIQRAVREPPEDEEEEDGREKENVTVLDKTLSVNDVACMAGLLEIIVILWKSIDRSMENNKEAKLYTINKFASVLPEYLKVFKDDRCKIPLFMLMSFMPASAVPPFSCGVISTLRSREEGAVDKSYCTLXDCLCXWGXVGHILELXDNWLATXHAQAKXNTASKXGADP

SEQ ID NO: 2288 - protein, 420 aa, Homo sapiens
MDMLRLTLQTTSDGVMLDKDLFKKCVQSNIVLLTQAFRRKFVIPDFMSFTSHIDELYESAKKQSGGKVADYIPQLAKFSPDLWGVSVCTVDGQRHSTGDTKVPFCLQSCVKPLKYAIAVNDLGTEYVHRYVGKEPSGLRFNKLFLNEDDKPHNPMVNAGAIVVTSLIKQGVNNAEKFDYVMQFLNKMAGNEYVGFSNATFQSERESGDRNFAIGYYLKEKKCFPEGTDMVGILDFYFQLCSIEVTCESASVMAATLANGGFCPITGERVLSPEAVRNTLSLMHSCGMYDFSGQFAFHVGLPAKSGVAGGILLVVPNVMGMMCWSPPLDKMGNSVKGIHFCHDLVSLCNFHNYDNLRHFAKKLDPRREGGDQRHSFGPLDYESLQQELALKETVWKKVSPESNEDISTTVVYRMESLGEKS

SEQ ID NO: 2289 - protein, 375 aa, Homo sapiens
MSSHKGSVVAQGNGAPASNREADTVELAELGPLLEEKGKRVIANPPKAEEEQTCPVPQEEEEEVRVLTLPLQAHHAMEKMEEFVYKVWEGRWRVIPYDVLPDWLKDNDYLLHGHRPPMPSFRACFKSIFRIHTETGNIWTHLLGFVLFLFLGILTMLRPNMYFMAPLQEKVVFGMFFLGAVLCLSFSWLFHTVYCHSEKVSRTFSKLDYSGIALLIMGSFVPWLYYSFYCSPQPRLIYLSIVCVLGISAIIVAQWDRFATPKHRQTRAGVFLGLGLSGVVPTMHFTIAEGFVKATTVGQMGWFFLMAVMYITGAGLYAARIPERFFPGKFDIWFQSHQIFHVLVVAAAFVHFYGVSNLQEFRYGLEGGCTDDTLL

SEQ ID NO: 2290 - protein, 118 aa, Homo sapiens
  MISC_FEATURE (11): Xaa equals any of the twenty naturally occurring L-amino acids
  MISC_FEATURE (15): Xaa equals any of the twenty naturally occurring L-amino acids
  MISC_FEATURE (64): Xaa equals any of the twenty naturally occurring L-amino acids
  MISC_FEATURE (67): Xaa equals any of the twenty naturally occurring L-amino acids
MFLQLVTGRSXIRAXVRLTPKPICAFHYTTITTNICSVQFTTLWSTLLLLLLLLPLLTSSLVSXYSXDYHDPHFTGRETETRKLAQDHTAGKWRRTRTSDRLPDSRSFFSFHDITLLP

SEQ ID NO: 2291 - protein, 119 aa, Homo sapiens
  MISC_FEATURE (19): Xaa equals any of the twenty naturally occurring L-amino acids
  MISC_FEATURE (20): Xaa equals any of the twenty naturally occurring L-amino acids
MPEDRASTPRTTTMTFTCXXFFDLFNALTCRSQTKLIFEIGFLRNHMFLYSVLGSILGQLAVIYIPPLQRVFQTENLGALDLLFLTGLASSVFILSELLKLCEKYCCSPKRVQMHPEDV

SEQ ID NO: 2292 - protein, 191 aa, Homo sapiens
  MISC_FEATURE (165): Xaa equals any of the twenty naturally occurring L-amino acids
  MISC_FEATURE (171): Xaa equals any of the twenty naturally occurring L-amino acids
MLHAEAPAPARFPAFSMGHGGAFGEGLCGFPPKSRLMPLIPSQEVAEGLGSVQAPRGGDVQVKQGVCRRRGSLPWAGCQHLGVPGCQEKFTHTRALLAKGESYDGRARALSRHQVCSQSSRSAPVTWNRPAFRGLSFLICLMGIAIPTFPVLVGFSLDAQETAAXEGLFGXLFHVTPLLPCPHGAGGAGAW

SEQ ID NO: 2293 - protein, 270 aa, Homo sapiens
  MISC_FEATURE (94): Xaa equals any of the twenty naturally occurring L-amino acids
  MISC_FEATURE (134): Xaa equals any of the twenty naturally occurring L-amino acids
MTQNTVIVNGVAMASRPSQPTHVNVHIHQESALTQLLKAGGSLKKFLFHPGDTVPSTARIGYEQLALGVTQILLGVVSCVLGVCLSLGPWTVLXASGCAFWAGSVVIAAGAGAIVHEKHPGKLAGYISSLLTLXGFATAMAAVVLCVNSFIWQTEPFLYIDTVCDRSDPVFPTTGYRWMRRSQENQWQKEECRAYMQMLRKLFTAIRALFLAVCVLKVIVSLVSLGVGLRNLCGQSSQPLNEEGSEKRLLGENSVPPSPSREQTSTAIVL

SEQ ID NO: 2294 - protein, 117 aa, Homo sapiens
  MISC_FEATURE (34): Xaa equals any of the twenty naturally occurring L-amino acids
MIGIFKNIISKPNEKEEAIVLEIQSDILLILSGXCENHIQRKEIFGTEGVDIVLHVMKTDPRKLQSGLGYNVLLFSTLDSIWCCILGCYPSEDYFLEKEGIFLLLDLLALNQKNSVI

SEQ ID NO: 2295 - protein, 113 aa, Homo sapiens
  MISC_FEATURE (10): Xaa equals any of the twenty naturally occurring L-amino acids
MYITSTIKTXSSRLAKPVLCLGTLCTAFLTGLNRVSEYRNHCSDVIAGFILGTAVALFLGMCVVHNFKGTQGSPSKPKPEDPRGVPLMAFPRIESPLETLSAQNHSASMTEVT

SEQ ID NO: 2296 - protein, 293 aa, Homo sapiens
MTEDSQRNFRSVYYEKVGFRGVEEKKSLEILLKDDRLDTEKLCTFSQRFPLPSMYRALVWKVLLGILPPHHESHAKVMMYRKEQYLDVLHALKVVRFVSDATPQAEVYLRMYQLESGKLPRSPSFPLEPDDEVFLAIAKAMEEMVEDSVDCYWITRRFVNQLNTKYRDSLPQLPKAFEQYLNLEDGRLLTHLRMCSAAPKLPYDLWFKRCFAGCLPESSLQRVWDKVVSGSCKILVFVAVEILLTFKIKVMALNSAEKITKFLENIPQDSSDAIVSKAIDLWHKHCGTPVHSS

SEQ ID NO: 2297 - protein, 100 aa, Homo sapiens [sequence omitted]

SEQ ID NO: 2298 - protein, 104 aa, Homo sapiens
MWHLLVFIVCVFFVYYTLGNFVLPKKKKKRKCNVRHTRKANQCCKLKVQFQRSLPTAGFFLYFKNIMLHIIAIFIFWGFATLIQWNQWKCHPATELPLLYLKSF

SEQ ID NO: 2299 - protein, 667 aa, Homo sapiens
  MISC_FEATURE (250): Xaa equals any of the twenty naturally occurring L-amino acids
MKMHAEKKHKCSKCSNSYGTEWDLKRHAEDCGKTFRCTCGCPYASRTALQSHIYRTGHEIPAEHRDPPSKKRKMENCAQNQKLSNKTIESLNNQPIPRPDTQELEASEIKLEPSFEDSCGSNTDKQTLTTPPRYPQKLLLPKPKVALVKLPVMQFSVMPVFVPTADSSAQPVVLGVDQGSATGAVHLMPLSVGTLILGLDSEACSLKESLPLFKIANPIAGEPISTGVQVNFGKSPSNPLQELGNTCQKXSISSINVQTDLSYASQNFIPSAQWATADSSVSSCSQTDLSFDSQVSLPISVHTQTFLPSSKVTSSIAAQTDAFMDTCFQSGGVSRETQTSGIESPTDDHVQMDQAGMCGDIFESVHSSYNVATGNIISNSLVAETVTHSLLPQNEPKTLNQDIEKSAPIINFSAQNSMLPSQNMTDNQTQTIDLLSDLENILSSNLPAQTLDHRSLLSDTNPGPDTQLPSGPAQNPGIDFDIEEFFSASNIQTQTEESELSTMTTEPVLESLDIETQTDFLLADTSAQSYGCRGNSNFLGLEMFDTQTQTDLNFFLDSSPHLPLGSILKHSSFSVSTDSSDTETQTEGVSTAKNIPALESKVQLNSTETQTMSSGFETLGSLFFTSNETQTAMDDFLLADLAWNTMESQFSSVETQTSAEPHTVSNF

SEQ ID NO: 2300 - protein, 106 aa, Homo sapiens
  MISC_FEATURE (17): Xaa equals any of the twenty naturally occurring L-amino acids
  MISC_FEATURE (28): Xaa equals any of the twenty naturally occurring L-amino acids
  MISC_FEATURE (33): Xaa equals any of the twenty naturally occurring L-amino acids
  MISC_FEATURE (38): Xaa equals any of the twenty naturally occurring L-amino acids
MSLPTSHCSYPFLGVCXAEPAALLTFFXPKDEXWQLWXDFGQVAVHPADGNCSPPNPQHKHSQTHIHFWAGIWGNWPSSLQFFAPCFLWFGRVGVSVISTGFNRHL

SEQ ID NO: 2301 - protein, 833 aa, Homo sapiens
  MISC_FEATURE (117): Xaa equals any of the twenty naturally occurring L-amino acids
MTKKRKRQHDFQKVKLKVGKKKPKLQNATPTNFKTKTIHLPEQLKEDGTLPTNNRKLNIKDLLSQMHHYNAGVKQSALLGLKDLLSQYPFIIDAHLSNILSEVTAVFTDKDANVRLXAVQLLQFLAPKIRAEQISPFFPLALADGSSRLRESEGLQEQKENPHATSNSIFINWKEHANDQQHIQVYENGGSQPNVSSQFRLRYLVGGLSGVDEGLSSTENLKGFIEIIIPLLIECWVEAVPPQLATPVGNGIEREPLQVMQQVLNIISLLWKLSKQQDETHKLESWLRKNYLIDFKHHFMSRFPYVLKEITKHKRKEPNKSIKHCTVLSNNIDHLLLNLTLSDIMVSLANASTLQKDCSWIEMIRKFVTETLEDGSRLNSKQLNRLLGVSWRLMQIQPNREDTETLIKAVYTLYQQRGLILPVRTLLLKFFSKIYQTEELRSCRFRYRSKVLSRWLAGLPLQLAHLGSRNPELSTQLIDIIHTAAARANKELLKSLQATALRIYDPQEGAVVVLPADSQQRLVQLVYFLPSLPADLLSRLSRCCIMGRLSSSLAAMLIGILHMRSSFSGWKYSAKDWLMSDVDYFSFLFSTLTGFSKEELTWLQSLRGVPHVIQTQLSPVLLYLTDLDQFLHHWDVTEAVFHSLLVIPARSQNFDILQSAISKHLVGLTVIPDSTAGCVFGVICKLLDHTCVVSETLLPFLASCCYSLLYFLLTIEKGEAEHLRKRDKLWGVCVSILALLPRVLRLMLQSLRVNRVGPEELPVVGQLLRLLLQHAPLRTHMLTNAILVQQIIKNITTLKSGSVQEQWLTDLHYCFNVYITGHPQGPSALATVY

SEQ ID NO: 2302 - protein, 191 aa, Homo sapiens
MGILYSEPICQAAYQNDFGQVWRWVKEDSSYANVQDGFNGDTPLICACRRGHVRIVSFLLRRNANVNLKNQKERTCLHYAVKKKFTFIDYLLIILLMPVLLIGYFLMVSKTKQNEALVRMLLDAGVEVNATDCYGCTALHYACEMKNQSLIPLLLEARADPTIKNKHGESSLDIARRLKFSQIELMLRKAL

SEQ ID NO: 2303 - protein, 166 aa, Homo sapiens
MPTTKKTLMFLSSFFTSLGSFIVICSILGTQAWITSTIAVRDSASNGSIFITYGLFRGESSEELSHGLAEPKKKFAASFVFVTMILFVANTQSNQLSEELFQMLYPATTSKGTTHSYGYSFWLILLVILLNIVTVTIIIFYQKARYQRKQEQRKPMEYAPRDGILF

SEQ ID NO: 2304 - protein, 174 aa, Homo sapiens [sequence omitted]

SEQ ID NO: 2305 - protein, 136 aa, Homo sapiens
  MISC_FEATURE (16): Xaa equals any of the twenty naturally occurring L-amino acids
MLFEDLLLNEIPEKKXSEKEFHVLPYRVFVPLPGSTVMLCDYKFDDESAEEIRDHFMEMLDHTIQIEDLEIAEETNTACMSSSMNSQASLDNTDDEQPKQPIKTTMLLKIQQNIGVIAAFTVAVLAAGISFHYFSD

SEQ ID NO: 2306 - protein, 195 aa, Homo sapiens
MTDLNDNICKRYIKMITNIVILSLIICISLAFWIISMTASTYYGNLRPISPWRWLFSVVVPVLIVSNGLKKKSLDHSGALGGLVVGFILTIANFSFFTSLLMFFLSSSKLTKWKGEVKKRLDSEYKEGGQRNWVQVFCNGAVPTELALLYMIENGPGEIQSIFPSSTPLPGCVCLSWLHWPALLETHGLQKLAQF

SEQ ID NO: 2307 - protein, 282 aa, Homo sapiens
  MISC_FEATURE (233): Xaa equals any of the twenty naturally occurring L-amino acids
  MISC_FEATURE (271): Xaa equals any of the twenty naturally occurring L-amino acids
MGNGGRSGLQQGKGNVDGVAATPTAASASCQYRCIECNQEAKELYRDYNHGVLKITICKSCQKPVDKYIEYDPVIILINAILCKAQAYRHILFNTQINIHGKLCIFCLLCEAYLRWWQLQDSNQNTAPDDLIRYAKEWDFYRMFAIAALEQTAYFIGIFTFLWVERPMTAKKKPNFILLLKALLLSSYGKLLLIPAVIWEHDYTSVCLKLIKVFVLTSNFQAIRVTLNINRKXSFLAVLSGLLLERSWSTSSRVWNGMLEVIMPSLNLRTXEEFYSSSLSVA

SEQ ID NO: 2308 - protein, 523 aa, Homo sapiens
  MISC_FEATURE (147): Xaa equals any of the twenty naturally occurring L-amino acids
  MISC_FEATURE (170): Xaa equals any of the twenty naturally occurring L-amino acids
  MISC_FEATURE (247): Xaa equals any of the twenty naturally occurring L-amino acids
  MISC_FEATURE (326): Xaa equals any of the twenty naturally occurring L-amino acids
  MISC_FEATURE (411): Xaa equals any of the twenty naturally occurring L-amino acids
MYTMLRDSNATAAKMSLDVMIELYRRNIWNDAKTVNVITTACFSKVTKILVAALTFFLGKDEDEKQDSDSESEDDGPTARDLLVQYATGKKSSKNKKKLEKAMKVLKKQKKKKKPEVFNFSAIHLIHDPQDFAEKLLKQLECCKERXEVKMMLMNLISRLVGIHELFLFXFYPFLQRFLQPHQREVTKILLFAAQASHHLVPPEIIQSLLMTVANNFVTDKNSGEVMTVGINAIKEITARCPLAMTXELLQDLAQYKTHKDKNVMMSARTLIHLFRTLNPQMLQKKFRGKPTEASIEARVQEYGELDAKDYIPGAEVLEVEKEENXENDEDGWESTSLSEEEDADGEWIDVQHSSDEEQQEISKKLNSMPMEERKAKAAAISTSRVLTQEDFQKIRMAQMRKELDAAPGKXQKRKYIEIDSDEEPRGELLSLRDIERLHKKPKSDKETRLATAMAGKTDRKEFVRKKTKTNPFSSSTNKEKKKQKNFMMMRYSQNVRSKNKRSFREKQLALRDALLKKRKRMK

SEQ ID NO: 2309 - protein, 339 aa, Homo sapiens
MKEEEGFPEDEATESEKNFKFGKRVGCLSEVPESYVETSASGGTVSLIAFTTMALLTIMEFSVYQDTWMKYEYEVDKDFSSKLRINIDITVAMKCQYVGADVLDLAETMVASADGLVYEPTVFDLSPQQKEWQRMLQLIQSRLQEEHSLQDVIFKSAFKSTSTALPPREDDSSQSPNACRIHGHLYVNKVAGNFHITVGKAIPHPRGHAHLAALVNHESYNFSHRIDHLSFGELVPAIINPLDGTEKIAIDHNQMFQYFITVVPTKLHTYKISADTHQFSVTERERIINHAAGSHGVSGIFMKYDLSSLMVTVTEEHMPFWQFFVRLCGIVGGIFSTTG

SEQ ID NO: 2310 - protein, 194 aa, Homo sapiens
MAAAAPNAGGSAPETAGSAEAPLQYSLLLQYLVGDKRQPRLLEPGSLGGIPSPAKSEEQKMIEKAMESCAFKAALACVGGFVLGGAFGVFTAGIDTNVGFDPKDPYRTPTAKEVLKDMGQRGMSYAKNFAIVGAMFSCTECLIESYRGTSDWKNSVISGCITGGAIGFRAGLKAGAIGCGGFAAFSAAIDYYLR

SEQ ID NO: 2311 - protein, 245 aa, Homo sapiens
  MISC_FEATURE (24): Xaa equals any of the twenty naturally occurring L-amino acids
MLANCGSVCEETQFRGTTVAPALXEFFTTTTKEGYDRRPVDITPLEQRKLTFDTHALVQDLETHGFDKTQAETIVSALTALSNVSLDTIYKEMVTQAQQEITVQQLMAHLDAIRKDMVILEKSEFANLRAENEKMKIELDQVKQQLMHETSRIRADNKLDINLERSRVTDMFTDQEKQLMETTTEFTKKDTQTKSIISETSNKIDAEIASLKTLMESNKLETIRYLAASVFTCLAIALGFYRFWK

SEQ ID NO: 2312 - protein, 621 aa, Homo sapiens
  MISC_FEATURE (594): Xaa equals any of the twenty naturally occurring L-amino acids
MNGSMDKKSSTVSEDVEATVPMLQRTKSRIEQGIVDRSETGVLDKKEGEQAKALFEKVKKFRTHVEEGDIVYRLYMRQTIIKVIKFILIICYTVYYVHNIKFDVDCTVDIESLTGYRTYRCAHPLATLFKILASFYISLVIFYGLICMYTLWWMLRRSLKKYSFESIREESSYSDIPDVKNDFAFMLHLIDQYDPLYSKRFAVFLSEVSENKLRQLNLNNEWTLDKLRQRLTKNAQDKLELHLFMLSGIPDTVFDLVELEVLKLELIPDVTIPPSIAQLTGLKELWLYHTAAKIEAPALAFLRENLRALHIKFTDIKEIPLWIYSLKTLEELHLTGNLSAENNRYIVIDGLRELKRLKVLRLKSNLSKLPQVVTDVGVHLQKLSINNEGTKLIVLNSLKKMANLTELELIRCDLERIPHSIFSLHNLQEIDLKDNNLKTIEEIISFQHLHRLTCLKLWYNHIAYIPIQIGNLTNLERLYLNRNKIEKIPTQLFYCRKLRYLDLSHNNLTFLPADIGLLQNLQNLAITANRIETLPPELFQCRKLRALHLGNNVLQSLPSRVGELTNLTQIELRGNRLECLPVELGECPLLKRSXLVVEEDLFNTLPPEVKERLWRADKEQA

SEQ ID NO: 2313 - protein, 139 aa, Homo sapiens [sequence omitted]

SEQ ID NO: 2314 - protein, 418 aa, Homo sapiens
  MISC_FEATURE (318): Xaa equals any of the twenty naturally occurring L-amino acids
MPLPVLQAISPELSGAMVVGDVLCLATVLTSLEGLSGTWSSSANSILHIDPKTGVAVARAVGSVTVYYEVAGHLRTYKEVVVSVPQRIMARHLHPIQTSFQEATASKVIVAVGDRSSNLRGECTPTQREVIQALHPETLISCQSQFKPAVFDFPSQDVFTVEPQFDTALGQYFCSITMHRLTDKQRKHLSMKKTALVVSASLSSSHFSTEQVGAEVPFSPGLFADQAEILLSNHYTSSEIRVFGAPEVLENLEVKSGSPAVLAFAKEKSFGWPSFITYTVGVLDPAAGSQGPLSTTLTFSSPVTNQAIAIPVTVAFVXDRRGPGPYGASLFQHFLDSYQVMFFTLFALLAGTAVMIIAYHTVCTPRDLAVPAALTPRASPGHSPHYFAASSPTSPNALPPARKASPPSGLWSPAYASH

SEQ ID NO: 2315 - protein, 271 aa, Homo sapiens
MIAMVEGAQRRKTPNEIALTILLIALTIVFLLATATLWPFSAWGGNAVSVTVLVALLVCLIPTTIGGLLSAIGVAGMSRMLGANVIATSGRAVEAAGDVDVLLLDKTGTITLGNRQASEFIPAQGVDEKTLADAAQLASLADETPEGRSIVILAKQRFNLRERDVQSLHATFVPFTAQSRMSGINIDNRMIRKGSVDAIRRHVEANGGHFPTDVDQKVDQVARQGATPLVVVEGSRVLGVIALKDIVKGGIKERFAQLRKMGIKTVMIHRR

SEQ ID NO: 2316 - protein, 111 aa, Homo sapiens
  MISC_FEATURE (18): Xaa equals any of the twenty naturally occurring L-amino acids
  MISC_FEATURE (26): Xaa equals any of the twenty naturally occurring L-amino acids
  MISC_FEATURE (95): Xaa equals any of the twenty naturally occurring L-amino acids
MFWPMTLEHGWQLPAEVXLPIPQGTXDLFPASWSLSKNYLRNLWVCGFTGLSVWVLQLLLSAAAGHIFPLTQPFMAHGELRGSGRAELQGCDLGXVGLRCPAQGSQVAHGL

SEQ ID NO: 2317 - protein, 397 aa, Homo sapiens
  MISC_FEATURE (194): Xaa equals any of the twenty naturally occurring L-amino acids
MVRPGARLCLGSVGRGLCLVLPLLCLGAGFLFLNTLFIQRGRHETTWTILRRFGYSDALELTADYLSPLIHVPPGCSTELNHLGYQFVQRVFEKHDQDRDGALSPVELQSLFSVFPAAPWGPELPRTVRTEAGRLPLHGYLCQWTLVTYLDVRSCLGHLGYLGYPTLCEQDQAHAITVTREKRLDQEKGQTQRXVLLCKVVGARGVGKSAFLQAFLGRGLGHQDTREQPPGYAIDTVQVNGQEKYLILCEVGTDGLLATSLDATCDVACLMFDGSDPKSFAHCASVYKHHYMDGQTPCLFVSSKADLPEGVAVSGPSPAEFCRKHRLPAPVPFSCAGPAEPSTTIFTQLATMAAFPHLVHAELHPSSFWLRGLLGVVGAAVAAVLSFSLYRVLVKSQ

SEQ ID NO: 2318 - protein, 414 aa, Homo sapiens
  MISC_FEATURE (277): Xaa equals any of the twenty naturally occurring L-amino acids
  MISC_FEATURE (286): Xaa equals any of the twenty naturally occurring L-amino acids
  MISC_FEATURE (288): Xaa equals any of the twenty naturally occurring L-amino acids
  MISC_FEATURE (350): Xaa equals any of the twenty naturally occurring L-amino acids
MKRLSPAPQLGPSSDAHTSYYSESLVHESWFPPRSSLEELHGDANWGEDLRVRRRRGTGGSESSRASGLVGRKATEDFLGSSSGYSSEDDYVGYSDVDQQSSSSRLRSAVSRAGSLLWMVATSPGRLFRLLYWWAGTTWYRLTTAASLLDVFVLTRRFSSLKTFLWFLLPLLLLTCLTYGAWYFYPYGLQTFHPALVSWWAAKDSRRPDEGWEARDSSPHFQAEQRVMSRVHSLERRLEALAAEFSSNWQKEAMRLERLELRQGAPGQGGGGGLSHXDTLALLEGXVXRREAALKEDFRRETAARIQVGGGIPQGGRWVTPIGKREGAQQQREQVSFGIRQLCHFAVTPXLFFSFFFFFLRQYLTLSPSLECSGVISTHYNLCLPGSSDSLASLSLPSSWITGVHHHIQLILYF

SEQ ID NO: 2319 - protein, 464 aa, Homo sapiens
MAASCLVLLALCLLLPLLLLGGWKRWRRGRAARHVVAVVLGDVGRSPRMQYHALSLAMHGFSVTLLGFCNSKPHDELLQNNRIQIVGLTELQSLAVGPRVFQYGVKVVLQAMYLLWKLMWREPGAYIFLQNPPGLPSIAVCWFVGCLCGSKLVIDWHNYGYSIMGLVHGPNHPLVLLAKWYEKFFGRLSHLNLCVTNAMREDLADNWHIRAVTVYDKPASFFKETPLDLQHRLFMKLGSMHSPFRARSEPEDPVTERSAFTERDAGSGLVTRLRERPALLVSSTSWTEDEDFSILLAALEKFEQLTLDGHNLPSLVCVITGKGPLREYYSRLIHQKHFQHIQVCTPWLEAEDYPLLLGSADLGVCLHTSSSGLDLPMKVVDMFGCCLPVCAVNFKCLHELVKHEENGLVFEDSEELAAQLQMLFSNFPDPAGKLNQFRKNLRESQQLRWDESWVQTVLPLVMDT

SEQ ID NO: 2320 - protein, 341 aa, Homo sapiens
  MISC_FEATURE (324): Xaa equals any of the twenty naturally occurring L-amino acids
  MISC_FEATURE (327): Xaa equals any of the twenty naturally occurring L-amino acids
  MISC_FEATURE (331): Xaa equals any of the twenty naturally occurring L-amino acids
  MISC_FEATURE (337): Xaa equals any of the twenty naturally occurring L-amino acids
MSLSDWHLAVKLADQPLTPKSILRLPETELGEYSLGGYSISFLKQLIAGKLQESVPDPELIDLIYCGRKLKDDQTLDFYGIQPGSTVHVLRKSWPEPDQKPEPVDKVAAMREFRVLHTALHSSSSYREAVFKMLSNKESLDQIIVATPGLSSDPIALGVLQDKDLFSVFADPNMLDTLVPAHPALVNAIVLVLHSVAGSAPMPGTDSSSRSMPSSSYRDMPGGFLFEGLSDDEDDFHPNTRSTPSSSTPSSRPASLGYSGAAGPRPITQSELATALALASTPESSSHTPTPGTQGHSSGTSPMSSGVQSGTPITNDLFSQALQXALXASGXPKLKAXAASC

SEQ ID NO: 2321 - protein, 202 aa, Homo sapiens
  MISC_FEATURE (33): Xaa equals any of the twenty naturally occurring L-amino acids
  MISC_FEATURE (38): Xaa equals any of the twenty naturally occurring L-amino acids
  MISC_FEATURE (52): Xaa equals any of the twenty naturally occurring L-amino acids
  MISC_FEATURE (62): Xaa equals any of the twenty naturally occurring L-amino acids
MHTGADTPQLPCTRLVQAPPRCTVRTAGHVPVXAMGLXRWASKVLGAAGCMXALLAGVSARXKSLEAGFPEARSLACTTRPPLLASRHQASSGHGGRDGPRNCCFLRILSAGNMAGEQSLVPLPWPLLGQPVLPEPLSQRARWPWLVGVDVGVSHLDQTGVGELHTLPGNGMRVGPGQGQLLGERHWGLEAGSGWCVSPVYF

SEQ ID NO: 2322 - protein, 138 aa, Homo sapiens
  MISC_FEATURE (110): Xaa equals any of the twenty naturally occurring L-amino acids
  MISC_FEATURE (138): Xaa equals any of the twenty naturally occurring L-amino acids
MDRPYQFYYFVPLVTVWFMVIYVTLALWPQIIQKKANGNCFWHFGLLLKLGFLLLFICFLAYSQGAFEKIFSLWPLSKCFELKGNVYEWWFRWRLDRYVSFPRNAVCFYXSGFCRNRKYFLKEKGEPLFFKQKFQNFX

SEQ ID NO: 2323 - protein, 156 aa, Homo sapiens
  MISC_FEATURE (31): Xaa equals any of the twenty naturally occurring L-amino acids
  MISC_FEATURE (40): Xaa equals any of the twenty naturally occurring L-amino acids
  MISC_FEATURE (41): Xaa equals any of the twenty naturally occurring L-amino acids
  MISC_FEATURE (42): Xaa equals any of the twenty naturally occurring L-amino acids
MIPAESRSFLLTDLASGRTYDLCVLAVYEDXATGLTATRXXXCARFSTEPALRPCGAPHAPFLGGTMIIALGGVIVASVLVFIFVLLMRYKVHGGQPPGKAKIPAPVSSVCSQTNGALGPTPTPAPPAPEPAALRAHTVVQLDCEPWGPGHEPVGP

SEQ ID NO: 2324 - protein, 173 aa, Homo sapiens
  MISC_FEATURE (169): Xaa equals any of the twenty naturally occurring L-amino acids
IQEILREGDIFRKKTNALIVVGSVKVTVNILPHRVCPRHFLPESSQVEMDNVVLDLDLLQCGSAGPEASCCPGWLPRCLHPLSLGQLCFLPLCSGPGWLLACRWNCFFNMGRYIYFFPCGWVSLFGFSSVFTFLFLEGWERIKLLWPPVSQQQVKWSCSGCPLLRTKSXNVQR

SEQ ID NO: 2325 - protein, 511 aa, Homo sapiens
MVKILVVTVQLILFGLSNQLAVTFREENTIAFRHLFLLGYSDGADDTFAAYTREQLYQAIFHAVDQYLALPDVSLGRYAYVRGGGDPWTNGSGLALCQRYYHRGHVDPANDTFDIDPMVVTDCIQVDPPERPPPPPSDDLTLLESSSSYKNLTLKFHKLVNVTIHFRLKTINLQSLINNEIPDCYTFSVLITFDNKAHSGRIPISLETQAHIQECKHPSVFQHGDNSFRLLFDVVVILTCSLSFLLCARSLLRGFLLQNEFVGFMWRQRGRVISLWERLEFVNGWYILLVTSDVLTISGTIMKIGIEAKNLASYDVCSILLGTSTLLVWVGVIRYLTFFHNYNILIATLRVALPSVMRFCCCVAVIYLGYCFCGWIVLGPYHVKFRSLSMVSECLFSLINGDDMFVTFAAMQAQQGRSSLVWLFSQLYLYSFISLFIYMVLSLFIALITGAYDTIKHPGGAGAEESELQAYIAQCQDSPTSGKFRRGSGSACSLLCCCGRDPSEEHSLLVN

SEQ ID NO: 2326 - protein, 205 aa, Homo sapiens [sequence omitted]

SEQ ID NO: 2327 - protein, 552 aa, Homo sapiens
  MISC_FEATURE (145): Xaa equals any of the twenty naturally occurring L-amino acids
  MISC_FEATURE (151): Xaa equals any of the twenty naturally occurring L-amino acids
MLDHKDLEAEIHPLKNEERKSQENLGNPSKNEDNVKSAPPQSRLSRCRAAAFFLSLFLCLFVVFVVSFVIPCPDRPASQRMWRIDYSAAVIYDFLAVDDINGDRIQDVLFLYKNTNSSNNFSRSCVDEGFSSPCTFAAAVSGANXSTLWEXPVAQDVALVECAVPQPRGSEAPSACILVGRPSSFIAVNLFTGETLWNHSSSFSGNASILSPLLQVPDVDGDGAPDLLVLTQEREEVSGHLYSGSTGHQIGLRGSLGVDGESGFLLHVTRTGAHYILFPCASSLCGCSVKGLYEKVTGSGGPFKSDPHWESMLNATTRRMLSHSSGAVRYLMHVPGNAGADVLLVGSEAFVLLDGQELTPRWTPKAAHVLRKPIFGRYKPDTLAVAVENGTGTDRQILFLDLGTGAVLCSLALPSLPGGPLSASLPTADHRSAFFFWGLHELGSTSETETGEARHSLYMFHPTLPRVLLELANVSTHIVAFDAVLFEPSRHAAYILLTGPADSEAPGLVSVIKHKVRDLVPSSRVVRLGEGGPDSDQAIRDRFSRLRYQSEA

SEQ ID NO: 2328 - protein, 139 aa, Homo sapiens
  MISC_FEATURE (60): Xaa equals any of the twenty naturally occurring L-amino acids
MKTPAFPDSPPSSVLQFSEKSWDMWEGAWELGSLRLPGRQFRLCRKEQSPWEALGEGGAXGPARMVLPATGGLRVVSAPCISPSLLTFLLCFPPSVCQRGGTGNRTAVAALSLLSTVYSGLSGDSREPGHLAAVRPLNL

SEQ ID NO: 2329 - protein, 300 aa, Homo sapiens
MKFLLDILLLLPLLIVCSLESFVKLFIPKRRKSVTGEIVLITGAGHGIGRLTAYEFAKLKSKLVLWDINKHGLEETAAKCKGLGAKVHTFVVDCSNREDIYSSAKKVKAEIGDVSILVNNAGVVYTSDLFATQDPQIEKTFEVNVLAHFWTTKAFLPAMTKNNHGHIVTVASAAGHVSVPFLLAYCSSKFAAVGFHKTLTDELAALQITGVKTTCLCPNFVNTGFIKNPSTSLGPTLEPEEVVNRLMHGILTEQKMIFIPSSIAFLTTLERILPERFLAVLKRKISVKFDAVIGYKMKAQ

SEQ ID NO: 2330 - protein, 142 aa, Homo sapiens
MAAAVAAAGAGEPQSPDELLPKGDAEKPEEELEEDDDEELDETLSERLWGLTEMFPERVRSAAGATFDLSLFVAQKMYRFSRAALWIGTTSFMILVLPVVFETEKLQMEQQQQLQQRQILLGPNTGLSGGMPGALPSLPGKI

SEQ ID NO: 2331 - protein, 273 aa, Homo sapiens
MVLGTGLRCIPISDLILKRRLIHGGQMLNGLAGPTVMNAAPFLSTTWFSADERATATAIASMLSYLGGACAFLVGPLVVPAPNGTSPLLAAESSRAHIKDRIEAVLYAEFGVVCLIFSATLAYFPPRPPLPPSVAAASQRLSYRRSVCRLLSNFRFLMIALAYAIPLGVFAGWSGVLDLILTPAHVSQVDAGWIGFWSIVGGCVVGIAMARFADFIRGMLKLILLLLFSGATLSSTWFTLTCLNSITHLPLTTVTLYASCILLGVFLNSSVPI

SEQ ID NO: 2332 - protein, 344 aa, Homo sapiens
  MISC_FEATURE (318): Xaa equals any of the twenty naturally occurring L-amino acids
  MISC_FEATURE (319): Xaa equals any of the twenty naturally occurring L-amino acids
  MISC_FEATURE (321): Xaa equals any of the twenty naturally occurring L-amino acids
  MISC_FEATURE (341): Xaa equals any of the twenty naturally occurring L-amino acids
MASSAAGCVVIVGSGVIGRSWAMLFASGGFQVKLYDIEQQQIRNALENIRKEMKLLEQAGSLKGSLSVEEQLSLISGCPNIQEAVEGAMHIQECVPEDLELKKKIFAQLDSIIDDRVILSSSTSCLMPSKLFAGLVHVKQCIVAHPVNPPYYIPLVELVPHPETAPTTVDRTHALMKKIGQCPMRVQKEVAGFVLNRLQYAIISEAWRLVEEGIVSPSDLDLVMSEGLGMRYAFIGPLETMHLNAEGMLSYCDRYSEGIKHVLQTFGPIPEFSRATAEKVNQDMCMKVPDDPEHLAARRQWRDECLMRLAKLKSQVQXXWXFPPFLFSLIAFDYILQPVIXVSW

SEQ ID NO: 2333 - protein, 152 aa, Homo sapiens
MDNVQPKIKHRPFCFSVKGHVKMLRLALTVTSMTFFIIAQAPEPYIVITGFEVTVILFFILLYVLRLDRLMKWLFWPLLDIINSLVTTVFMLIVSVLALIPETTTLTVGGGVFALVTAVCCLADGALIYRKLLFNPSGPYQKKPVHEKKEVL

SEQ ID NO: 2334 - protein, 277 aa, Homo sapiens [sequence omitted]

SEQ ID NO: 2335 - protein, 166 aa, Homo sapiens
  MISC_FEATURE (82): Xaa equals any of the twenty naturally occurring L-amino acids
  MISC_FEATURE (105): Xaa equals any of the twenty naturally occurring L-amino acids
MQPPALRTMVALATWGMLKLSGRQWSGWDVWICCLAAILLMDPVAILSQSLWLSAAAVAALIFWYQWFPCPEWQLPPVLRAXVSLIHLQLGITLLLMPVQIVIFXGISLTSFIANLLAIPLVTFITVPLILAAMVVHLSGPLILEQGLWFLADRSLALLFWGLKSL

SEQ ID NO: 2336 - protein, 138 aa, Homo sapiens
MISLTDTQKIGMGLTGFGVFFLFFGMILFFDKALLAIGNVLFVAGLAFVIGLERTFRFFFQKHKMKATGFFLGGVFVVLIGWPLIGMIFEIYGFFLLFRGFFPVVVGFIRRVPVLGSLLNLPGIRSFVDKVGESNNMV

SEQ ID NO: 2337 - protein, 157 aa, Homo sapiens
  MISC_FEATURE (135): Xaa equals any of the twenty naturally occurring L-amino acids
MLTDPGAVPKGNATKEYMESLQLKPGEVIYKCPKCCCIKPERAHHCSICKRCIRKMDHHCPWVNNCVGEKNQRFFVLFTMYIALSSVHALILCGFQFISCVRGQWTECSDFSPPITVILLIFLCLEGLLFFTFTXSYVWHPNPLHMQRRDGDRAIEK

SEQ ID NO: 2338 - protein, 161 aa, Homo sapiens
  MISC_FEATURE (157): Xaa equals any of the twenty naturally occurring L-amino acids
MQLKFLTASHPKSSLPFSGVIMKHELSSMKAFVILAESSSFNNAAKLLNITQPALTRRIKKMEEDLHVQLFERTTRKVTLTKAGKRLLPEARELIKKFDETLFNIRDMNAYHRGMVTLACIPTAVFYFLPLAIGKFNELYPNIKVRILEQGTNNCMXIGAV

SEQ ID NO: 2339 - protein, 349 aa, Homo sapiens
  MISC_FEATURE (286): Xaa equals any of the twenty naturally occurring L-amino acids
  MISC_FEATURE (320): Xaa equals any of the twenty naturally occurring L-amino acids
  MISC_FEATURE (324): Xaa equals any of the twenty naturally occurring L-amino acids
  MISC_FEATURE (345): Xaa equals any of the twenty naturally occurring L-amino acids
  MISC_FEATURE (348): Xaa equals any of the twenty naturally occurring L-amino acids
MNTDTFLEEINKVGKELGIIPTIIRDEELKTRGFGGIYGVGKAALHPPALAVLSHTPDGATQTIAWVGKGIVYDTGGLSIKGKTTMPGMKRDCGGAAAVLGAFRAAIKQGFKDNLHAVFCLAENSVGPNATRPDDIHLLYSGKTVEINNTDAEGRLVLADGVSYACKDLGADIILDMATLTGAQGIATGKYHAAVLTNSAEWEAACVKAGRKCGDLVHPLVYCPELHFSEFTSAVADMKNSVADRDNSPSSCAGLFIASHIGFDWPGVWVHLDIAAPVHAGERATXFGVALLLALFGPCLLRTLLLEPGCPQLGCEGGCXGGGXGEGTSKKTQSFGGEALLGLGXLDXN

SEQ ID NO: 2340 - protein, 239 aa, Homo sapiens
  MISC_FEATURE (56): Xaa equals any of the twenty naturally occurring L-amino acids
MTPVAYHGHGVSAFRCCSPLLLQAKQEDDRDGLLAEREQEEAIAQFPYVEFTGRDXITCLTCQGTGYIPTEQVNELVALIPHSDQRLRPQRTKQYVLLSILLCLLASGLVVFFLFPHSVLVDDDGIKVVKVTFNKQDSLVILTIMATLKIRNSNFYTVAVTSLSSQIQYMNTVVNFTGKAEMGGPFSYVYFFCTVPEILVHNIVIFMRTSVKISYIGLMTQSSLETHHYVDCGGNSTAI

SEQ ID NO: 2341 - protein, 275 aa, Homo sapiens
  MISC_FEATURE (268): Xaa equals any of the twenty naturally occurring L-amino acids
  MISC_FEATURE (274): Xaa equals any of the twenty naturally occurring L-amino acids
MEHFDASLSTYFKALLGPRDTRVKGWFLLDNYIPTFICSVIYLLIVWLGPKYMRNKQPFSCRGILVVYNLGLTLLSLYMFCELVTGVWEGKYNFFCQGTRTAGESDMKIIRVLWWYYFSKLIEFMDTFFFILRKNNHQITVLHVYHHASMLNIWWFVMNWVPCGHSYFGATLNSFIHVLMYSYYGLSSVPSMRPYLWWKKYITQGQLLQFVLTIIQTSCGVIWPCTFPLGWLYFQIGYMISLIALFTNFYIQVNLTLLWDLESGAFTXKGPHLXT

SEQ ID NO: 2342 - protein, 187 aa, Homo sapiens
MVLLWVVTCPATMLTEPQNPHLIGFVAYSGPSHTTQPHKYWLLLDGQADPAAAEGPVKRKAASVVWWPQALRHLSLLVHCWEESYEMNIGCQSLWAGGLASSGNGWDLGVAFRRDTCMSSSSLHWKEFKYAPGSLHYFALSFVLILTEICLVSSGMGFPQEGKHFSVLGSPDCSLWGRDEHVPREFA

SEQ ID NO: 2343 - protein, 414 aa, Homo sapiens
  MISC_FEATURE (64): Xaa equals any of the twenty naturally occurring L-amino acids
MAAYQQEEQMQLPRADAIRSRLIDTFSLIEHLQGLSQAVPRHTIRELLDPSRQKKLVLGDQHQXVRFSIKPQRIEQISHAQRLLSRLHVRCSQRPPLSLWAGWVLECPLFKNFIIFLVFLNTIILMVEIELLESTNTKLWPLKLTLEVAAWFILLIFILEILLKWLSNFSVFWKSAWNVFDFVVTMLSLLPEVVVLVGVTGQSVWLQLLRICRVLRSLKLLAQFRQIQIIILVLVRALKSMTFLLMLLLIFFYIFAVTGVYVFSEYTRSPRQDLEYHVFFSDLPNSLVTVFILFTLDHWYALLQDVWKVPEVSRIFSSIYFILWLLLGSIIFRSIIVAMMVTNFQNIRKELNEEMARREVQLKADMFKRQIIQRRKNMSHEALTSSHSKIEDRSFGLGDSCARKSARANGNGSG

SEQ ID NO: 2344 - protein, 207 aa, Homo sapiens
MALQLRWFKHRRPFFLLLIAQLCVHWPPHLPPDQRGFCLPQHCQPGVFLDSSPGPPSAPLPPSALTSRPPSLLLGNLAWVGLPSQPSRLFFLSLAACLAHHCGQVSLSENTISSHHGPVYKAVSHLPITSDQIRTLRLWIEADATVPGKPHCPPIPALASVPVRSCTMLLSAILPSPALPACWSCIALHLTDSYSTALASPKHTWPS

SEQ ID NO: 2345 - protein, 229 aa, Homo sapiens
MVFGGVVPYVPQYRDIRRTQNADGFSTYVCLVLLVANILRILFWFGRRFESPLLWQSAIMILTMLLMLKLCTEVRVANELNARRRSFTDFDPHHFWQWSSFSDYVQCVLAFTGVAGYITYLSIDSALFVETLGFLAVLTEAMLGVPQLYRNHRHQSTEGMSIKMVLMWTSGDAFKTAYFLLKGAPLQFSVCGLLQVLVDLAILGQAYAFARHPQKPAPHAVHPTGTKAL

SEQ ID NO: 2346 - protein, 387 aa, Homo sapiens
  MISC_FEATURE (236): Xaa equals any of the twenty naturally occurring L-amino acids
  MISC_FEATURE (283): Xaa equals any of the twenty naturally occurring L-amino acids
MEEEGKKGKKYLGQLTSIPGYLNPSSRTEILHFIDNAKRAHQLPGHLTQEHDAVLSLSAYNVKLAWRDGEDIILRVPIHDIAAVSYVRDDAAHLVVLKTAQDPGISPSQSLCAESSRGLSAGSLSESAVGPVEACCLVILAAESKVAAEELCCLLGQVFQVVYTESTIDFLDRAIFDGASTPTHHLSLHSDDSSTKVDIKETYEVEASTFCFPESVDVGGASPHSKTISESELSAXATELLQDYMLTLRTKLSSQEIQQFAALLHEYRNGASIHEFCINLRQXYGDSRKFLLLGLRPFIPEKDSQHFENFLETIGVKDGRGIITDSFGRHRRALSTTSSSTTNGNRATGSSDDRSAPSEGDEWDRMISDISSDIEALGCITPQQDHQ

SEQ ID NO: 2347 - protein, 190 aa, Homo sapiens
MKASQCCCCLSHLLASVLLLLLLPELSGPLAVLLQAAEAAPGLGPPDPRPRTLPPLPPGPTPAQQPGRGLAEAAGPRGSEGGNGSNPVAGLETDDHGGKAGEGSVGGGLAVSPNPGDKPMTQRALTVLMVVSGAVLVYFVVRTVRMRRRNRKTRRYGVLDTNIENMELTPLEQDDEDDDNTLFDANHPRR

SEQ ID NO: 2348 - protein, 140 aa, Homo sapiens
MSRFLNVLRSWLVMVSIIAMGNTLQSFRDHTFLYEKLYTGKPNLVNGLQARTFGIWTLLSSVIRCLCAIDIHNKTLYHITLWTFLLALGHFLSELFVYGTAAPTIGVLAPLMVASFSILGMLVGLRYLEVEPVSRQKKRN

SEQ ID NO: 2349 - protein, 155 aa, Homo sapiens
  MISC_FEATURE (62): Xaa equals any of the twenty naturally occurring L-amino acids
  MISC_FEATURE (92): Xaa equals any of the twenty naturally occurring L-amino acids
  MISC_FEATURE (105): Xaa equals any of the twenty naturally occurring L-amino acids
  MISC_FEATURE (125): Xaa equals any of the twenty naturally occurring L-amino acids
  MISC_FEATURE (130): Xaa equals any of the twenty naturally occurring L-amino acids
MQHQLHLLICWGKGSKSNTSCLGPVLSCSNMWSLALLVVAGSMGVAYSSVVMYVLLWVPLPXPSHFLPSGAPEAQPTTWAQSPHSVCKCGTXLGPAKPQGPSLPXPPCLIMLLSCRRQLGLAPSXWLPGXGSHGGELRGCSQGWAPGIAHLNICT

SEQ ID NO: 2350 - protein, 137 aa, Homo sapiens [sequence omitted]

SEQ ID NO: 2351 - protein, 272 aa, Homo sapiens
  MISC_FEATURE (55): Xaa equals any of the twenty naturally occurring L-amino acids
MNWTYVFYFFGTIGIFWFLLWIWLVSDTPQKHKRISHYEKEYILSSLRNQLSSQXSVPWVPILKSLPLWAIVVAHFSYNWTFYTLLTLLPTYMKEILRFNVQENGFLSSLPYLGSWLCMILSGQAADNLRAKWNFSTLCVRRIFSLIGMIGPAVFLVAAGFIGCDYSLAVAFLTISTTLGGFCSSGFSINHLDIAPSYAGILLGITNTFATIPGMVGPVIAKSLTPDNTVGEWQTVFYIAAAINVFGAIFFTLFAKGEVQNWALNDHHGHRH

SEQ ID NO: 2352 - protein, 168 aa, Homo sapiens
  MISC_FEATURE (80): Xaa equals any of the twenty naturally occurring L-amino acids
  MISC_FEATURE (85): Xaa equals any of the twenty naturally occurring L-amino acids
  MISC_FEATURE (86): Xaa equals any of the twenty naturally occurring L-amino acids
MLFSYFSVPAALQRRVLVYGVLGAIVLRTIMIFTGSWLISQFDWILYIFGAFLLFTGVKMALAHEDESGIGDKPLVRWLXGHLRXXDTIDNEHFFVRKNGLLYATPLMLVLILVELSDVIFAVDSIPAIFAVTTGPVHCADLKPVCDPRPACDVFPAGGRKERFSMLK

SEQ ID NO: 2353 - protein, 106 aa, Homo sapiens
  MISC_FEATURE (5): Xaa equals any of the twenty naturally occurring L-amino acids
  MISC_FEATURE (91): Xaa equals any of the twenty naturally occurring L-amino acids
  MISC_FEATURE (100): Xaa equals any of the twenty naturally occurring L-amino acids
MVKIXFQPAVAGIKGDKADKASASAPAPASATEILLTPAREEQPPQHRSKRGSSVGGVCYLSMGMVVLLMGLVFASVYICTIRKVLRSFFXEGYTFLTVXIPRPGA

SEQ ID NO: 2354 - protein, 235 aa, Homo sapiens
  MISC_FEATURE (192): Xaa equals any of the twenty naturally occurring L-amino acids
MSASAVYVLDLKGKVLICRNYRGDVDMSEVEHFMPILMEKEEEGMLSPILAHGGVRFMWIKHNNLYLVATSKKNACVSLVFSFLYKVVQVFSEYFKELEEESIRDNFVIIYELLDELMDFGYPQTTDSKILQEYITQEGHKLETGAPRPPATVTNAVSWRSEGIKYRKNEVFLDVIESVNLLVSANGNVLRXRSWAPSRCESSSRACPSCAWASTTRSSLTTRAAAKANPWSWRM

SEQ ID NO: 2355 - protein, 452 aa, Homo sapiens
  MISC_FEATURE (85): Xaa equals any of the twenty naturally occurring L-amino acids
  MISC_FEATURE (278): Xaa equals any of the twenty naturally occurring L-amino acids
MDRPIAGYANLCPNMISTQPQEFVGMLSTVKHEVIHALGFSAGLFAFYHDKDGNPLTSRFADGLPPFNYSLGLYQWSDKVVRKVXRLWDVRDNKIVRHTVYLLVTPRVVEEARKHFDCPVLEGMELENQGGVGTELNHWEKRLLENEAMTGSHTQNRVLSRITLALMEDTGWYKANYSMAEKLDWGRGMGCDFVRKSCKFWIDQQRQKRQMLSPYCDTLRSNPLQLTCRQDQRAVAVCNLQKFPKPLPQEYQYFDELSGIPAEDLPYYGGSVEIADYXPFSQEFSWHLSGEYQRSSDCRILENQPEIFKNYGAEKYGPHSVCLIQKSAFVMEKCERKLSYPDWGSGCYQVSCSPQGLKVWVQDTSYLCSRAGQVLPVSIQMNGWIHDGNLLCPSCWDFCELCPPETDPPATNLTRALPLDLCSCSSSLVVTLWLLLGNLFPLLAGFLLCIWH

SEQ ID NO: 2356 - protein, 487 aa, Homo sapiens
MFADSNENETVFAPVIQAGMEALKAADCPGKLFIFHSSLPTAEAPGKLKNRDDKKLVNTDKEKILFQPQTNVYDSLAKDCVAHGCSVTLFLFPSQYVDVASLGLVPQLTGGTLYKYNNFQMHLDRQQFLNDLRNDIEKKIGFDAIMRVRTSTGFRATDFFGGILMNNTTDVEMAAIDCDKAVTVEFKHDDKLSEDSGALIQCAVLYTTISGQRRLRIHNLGLNCSSQLADLYKSCETDALINFFAKSAFKAVLHQPLKVIREILVNQTAHMLACYRKNCASPSAASQLILPDSMKVLPVYMNCLLKNCVLLSRPEISTDERAYQRQLVMTMGVADSQLFFYPQLLPIHTLDVKSTMLPAAVRCSESRLSEEGIFLLANGLHMFLWLGVSSPPELIQGIFNVPSFAHINTDMTLLPEVGNPYSQQLRMIMGIIQQKRPYSMKLTIVKQREQPEMVFRQFLVEDKGLYGGSSYVDFLCCVHKEICQLLN

SEQ ID NO: 2357 - protein, 310 aa, Homo sapiens
MKPLRMARPGGPEHNEYALVSAWHSSGSYLDSEGLRHQDDFDVSLLVCHCAAPFEEQGEAERHVLRLQFFVVLTSQRELFPRLTADMRRFRKPPRLPPEPEAPGSSAGSPGEASGLILAPGPAPLFPPLAAEVGMARARLAQLVRLAGGHCRRDTLWKRLFLLEPPGPDRLRLGGRLALAELEELLEAVHAKSIGDIDPQLDCFLSMTVSWYQSLIKVLLSRFPQSCRHFQSPDLGTQYLVVLNQKFTDCFVLVFLDSHLGKTSLTVVFREPFPVQPQDSESPPAQLVSTYHHLESVINTACFTLWTRLL

SEQ ID NO: 2358 - protein, 474 aa, Homo sapiens
  MISC_FEATURE (134): Xaa equals any of the twenty naturally occurring L-amino acids
  MISC_FEATURE (137): Xaa equals any of the twenty naturally occurring L-amino acids
  MISC_FEATURE (167): Xaa equals any of the twenty naturally occurring L-amino acids
MWVEPEAAAYAPPPPAKKPRKSTAEKPKVKEIIDERTRERLVYEVRQKCRNIEDICISCGSLNVTLEHPLFVGGMCQNCKNCFLECAYQYDDDGYQSYCTICCGGREVLMCGNNNCCRCFCVECVDLLVGPGAXQAXIKEDPWNCYMCGHKGTYGLLRRREDWPSRXQMFFANNHDQEFDPPKVYPPVPAEKRKPIRVLSLFDGIATGLLVLKDLGIQVDRYIASEVCEDSITVGMVRHQGKIMYVGDVRSVTQKHIQEWGPFDLVIGGSPCNDLSIVNPARKGLYEGTGRLFFEFYRLLHDARPKEGDDRPFFWLFENVVAMGVSDKRDISRFLESNPVMIDAKEVSAAHRARYFWGNLPGMNRPLASTVNDKLELQECLEHGRIAKFSKVRTITTRSNSIKQGKDQHFPVFMNEKEDILWCTEMERVFGFPVHYTDVSNMSRLARQRLLGRSWSVPVIRHLFAPLKEYFACV

SEQ ID NO: 2359 - protein, 545 aa, Homo sapiens
  MISC_FEATURE (534): Xaa equals any of the twenty naturally occurring L-amino acids
  MISC_FEATURE (536): Xaa equals any of the twenty naturally occurring L-amino acids
MATSGAASAELVIGWCIFGLLLLAILAFCWIYVRKYQSRRESEVVSTITAIFSLAIALITSALLPVDIFLVSYMKNQNGTFKDWANANVSRQIEDTVLYGYYTLYSVILFCVFFWIPFVYFYYEEKDDDDTSKCTQIKTALKYTLGFVVICALLLLVGAFVPLNVPNNKNSTEWEKVKSLFEELGSSHGLAALSFSISSLTLIGMLAAITYTAYGMSALPLNLIKGTRSAAYERLENTEDIEEVEQHIQTIKSKSKDGRPLPARDKRALKQFEERLRTLKKRERHLEFIENSWWTKFCGALRPLKIVWGIFFILVALLFVISLFLSNLDKALHSAGIDSGFIIFGANLSNPLNMLLPLLQTVFPLDYILITIIIMYFIFTSMAGIRNIGIWFFWIRLYKIRRGRTRPQALLFLCMILLLIVLHTSYMIYSLAPQYVMYGSQNYLIETNITSDNHKGNSTLSVPKRCDADAPEDQCTVTRTYLFLHKFWFFSAAYYFGNWAFLGVFLIGLIVSCCKGKKSVIEGVDEDSDIRVVXEXLGVLEQTGP

SEQ ID NO: 2360 - protein, 148 aa, Homo sapiens
  MISC_FEATURE (80): Xaa equals any of the twenty naturally occurring L-amino acids
MKRFLGPCGWKYENIYITRQFVQFDERERHQQRPCVLPLNKEERRKYVIIPTFWPTPKERKNLGLFFLPILIHLCIWVLXAAVDYLLYRLIFSVSKQFQSLPGFEVHLKLHGEKQGTQDIIHDSSFNISVFEPNCIPKPWQALKLLAH

SEQ ID NO: 2361 - protein, 264 aa, Homo sapiens
MRPLLGLLLVFAGCTFALYLLSTRLPRGRRLGSTEEAGGRSLWFPSDLAELRELSEVLREYRKEHQAYVFLLFCGAYLYKQGFAIPGSSFLNVLAGALFGPWLGLLLCCVLTSVGATCCYLLSSIFGKQLVVSYFPDKVALLQRKVEENRNSLFFFLLFLRLFPMTPNWFLNLSAPILNIPIVQFFFSVLIGLIPYNFICVQTGSILSTLTSLDALFSWDTVFKLLAIAMVALIPGTLIKKFSQKHLQLNETSTANHIHSRKDT

SEQ ID NO: 2362 - protein, 300 aa, Homo sapiens
  MISC_FEATURE (32): Xaa equals any of the twenty naturally occurring L-amino acids
  MISC_FEATURE (36): Xaa equals any of the twenty naturally occurring L-amino acids
  MISC_FEATURE (163): Xaa equals any of the twenty naturally occurring L-amino acids
  MISC_FEATURE (167): Xaa equals any of the twenty naturally occurring L-amino acids
MLMHHQKYLQRFLGGKREKKQKEACSIPGIGXRMAXKIIEILESGHLRKLDHISESVPVLELFSNIWGAGTKTAQMWYQQGFRSLEDIRSQASLTTQQAIGLKHYSDFLERMPREEATEIEQTVQKAAQAFNSGLLCVACGSYRRGKATCGDVDVLITHPDGXSHRXIFSRLLDSLRQEGFLTDDLVSQEENGQQQKYLGVCRLPGPGRRHRRLDIIVVPYSEFACALLYFTGSAHFNRSMRALAKTKGMSLSEHALSTAVVRNTHGCKVGPGRVLPTPTEKDVFRLLGLPYREPAERDW

SEQ ID NO: 2363 - protein, 275 aa, Homo sapiens
  MISC_FEATURE (62): Xaa equals any of the twenty naturally occurring L-amino acids
  MISC_FEATURE (156): Xaa equals any of the twenty naturally occurring L-amino acids
  MISC_FEATURE (174): Xaa equals any of the twenty naturally occurring L-amino acids
  MISC_FEATURE (181): Xaa equals any of the twenty naturally occurring L-amino acids
MIKSAAHPHSQCSSHLGGETPPGCGTRLPALRGHESGGNAPVEGQQPWGGEQPGLWENHQRXASLHLAPAEEPHVHPALPGRGHRGHSHHRHVHVQPQVLGVPVQPECLRSCHLVWVPGGASGWWRHLPGRLLCEQAQAPGLRGHQVLPVLHRCQXAGHPRLLTALPQCAHAGXTASYGGXSCPKPPEPNGSLQRCLHCQPEHYSPVCGSDGLMYFSLCHAGALQPRRRMWTARRCTETVAVSLRIFPLVLAMPLQGNALQLVRESPSFWFSYSL

SEQ ID NO: 2364 - protein, 642 aa, Homo sapiens
MPCGEDWLSHPLGIVQGFFAQNGVNPDWEKKVIEYFKEKLKENNAPKWVPSLNEVPLHYLKPNSFVKFRCMIQDMFDPEFYMGVYETVNQNTKAHVLHFGKYRDVAECGPQQELDLNSPRNTTLERQTFYCVPVPGESTWVKEAYVNANQARVSPSTSYTPSRHKRSYEDDDDMDLQPNKQKDQHAGARQAGSVGGLQWCGEPKRLETEASTGQQLNSLNLSSPFDLNFPLPGEKGPACLVKVYEDWDCFKVNDILELYGILSVDPVLSILNNDERDASALLDPMECTDTAEEQRVHSPPASLVPRIHVILAQKLQHINPLLPACLNKEESKTCKFVSSFMSELSPVRAELLGFLTHALLGDSLAAEYLILHLISTVYTRRDVLPLGKFTVNLSGCPRNSTFTEHLYRIIQHLVPASFRLQMTIENMNHLKFIPHKDYTANRLVSGLLQLPSNTSLVIDETLLEQGQLDTPGVHNVTALSNLITWQKVDYDFSYHQMEFPCNINVFITSEGRSLLPADCQIHLQPQLIPPNMEEYMNSLLSAVLPSVLNKFRIYLTLLRFLEYSISDEITKAVEDDFVEMRKNDPQSITADDLHQLLVVARCLSLSAGQTTLSRERWLRAKQLESLRRTRLQQQKCVNGNEL

(The sequence listing continues in the following parts.)
